United States Patent Application Publication US 2023/0272435 A1 - sequence listing, part 5

SEQ ID NO: 16568 - protein, 428 aa, synthetic construct
MSTDQEEQLSSYENQVNYYREYILKHEDYELVDIYADEGISATNTKKRDAFNRLIQDCRDGKVDRILVKSISRFARNTLDCIKYVRELKELGIGVTFEKENIDSLDSKGEVLLTILSSLAQDESRSISENSTWGIRKKFERGVVQVNTSNFMGYDKDEKGNLIINHEQANIVRYIFDRFLEGYSPEFISKELREQEIPGCTGKAKWCPSAIWKMLQNEKYKGDALLQKTYTVDFLTKKRIDNDGQVNQYYIENNHEPILDREKWEIVQLEIARRKKFREQHKLQFYIMQKENNPFTTKVFCAECGSAFGRKNWTTSRGKRKVWQCNNRYRIKGQIGCLNNHIDEEMLEKAFMKAVGQLQEHRSDVVAKWQKLEQGTNLLYKHYAKQMYQILDLDKFDRVIMNQVLDRISISETGHIVVTFLEGTEVEL

SEQ ID NO: 16569 - protein, 413 aa, synthetic construct
MNIRTIEAKNNKRKKRICAYVRVSTTNGSQLDSLENQKVYFEKLYAERDDVEFLGVFCDKGISGSKYDRPDFQTMLDACRKGQIDVIHTKSISRFARDLINVLEISRELKTLGIDIFFEEQNIHTLSNEGEVVLTVLASLAEEELQSMSGNQRWSFRRKFQKGELLINAKRFLGYDLNEKGELVINKAEAQIVRTIFYSYLEGMGTHRIAKKLNEGKVPTVTGKKWYDSTIRNILKNEKYKGSLLLQKYFHDGVNGPKKLNQGQVEQYYIEDNHEGIITKEIWEKVQVKMKSRSRIQGTNKTYKFSRMLKCQYCGSTLKRQVSYKKKIVWCCSKYIKEGKNSCKGMRVPERDIEDWKLSSPVIVLERIEDGEKHYSYTGQKTSANSQISNSEKGQGSRLLSSVYRPRRTAIKL

SEQ ID NO: 16570 - protein, 481 aa, synthetic construct
MITTNKVAIYVRVSTTSQVEEGYSIDEQKAKLSSYCDIKDWSVYKIYTDGGFSGSNTDRPALEGLIKDAKKRKFDTVLVYKLDRLSRSQKDTLYLIEDIFIKNNIAFLSLQENFDTSTPFGKAMIGLLSVFAQLEREQIKERMQLGKIGRAKAGKSMMWAKTSYGYDYHRETGTITINPAQALAVKFIFESYLRGRSITKLRDDLNEKYPKHVPWSYRAVRTILDNPVYCGFNQYKGEIYPGNHEPIISKEEYDKTQSELKIRQRTAAENVNPRPFQAKYILSGIAQCGYCGAPLKIMLGVKRKDGSRLKKYECHQRHPRTLRGVTTYNDNKKCDSGFYYKDKLEAYVLTEISKLQDNAGYLDKIFSGDNAETIDRESYKKQIEELSKKLSRLNDLYIDDRITLEELQSKSAEFISMRGTLETELENDPALRKNKRKADMRKLLNAEKIFSMDYEGQKVLVRGLINKVQVTAEDIVINWKI

SEQ ID NO: 16571 - protein, 481 aa, synthetic construct
MITTNKVAIYVRVSTTNQVEEGYSIDEQKDKLSSYCDIKDWSVYKIYTDGGFSGSNTDRPALESLIKDAKKRKFDTVLVYKLDRLSRSQKDTLHLIEDVFIKNGIEFLSLQENFDTSTPFGKAMIGLLSVFAQLEREQIKERMQLGKLGRAKSGKSMMWAKTSYGYDYHKETGTVTINPAQALTIKFIFESYLRGRSITKLRDDLNEKYPKHVPWSYRAVRTILDNPVYCGFNQYKGEIYPGNHEPIISKEEYDKTQSELKIRQRTAAENVNPRPFQAKYILSGIAQCGYCGAPLKIMLGVKRKDGSRLKKYECHQRHPRTLRGVTTYNDNKKCDSGFYYKDKLEAYVLTEISKLQDNAGYLDKIFSGDNAETIDRESYKKQIEELSKKLSRLNDLYIDDRITLEELQSKSAEFISMRGTLETELENDPALRKNKRKADMRKLLNAEKIFSMDYEGQKVLVRGLINKVQVTAEDIVINWKI

SEQ ID NO: 16572 - protein, 522 aa, synthetic construct
MSLARSVTVIPARRRGSNVDAEDKKKLKVAAYCRVSTDSEEQATSYEVQVEHYTSYIQNNPEWELAGIYADDGISGTNTKKREQFNKMIEDSMNGKIDMIITKSISRFARNTLDCLKYIRQLKDKEIPVFFEKENINTMDAKGEIMLTIMASLAQQESQSLSQNVKLGIQYRYQQGEVQVNHNRFLGYTKDENNKLVINPEQAKVVKRIYREYLEGASLVQIARGLETDEILTAAQRSKWRPESIKKILQNEKYIGDALLQKTYTVDFLTKKRVVNNGHVPQYYVENNHEPIIPREIYLQVQEEMMRRANIRNGKTGKKRVYSSKYALSSIVFCKECEDVFRRVHWNNRGYRSIVWRCVSRLERKTHLCSAETIREDELQQAIVHAINEVLGNKDNYLNILIENIETVLNENADKPTVGIDEKLEELQMELLRLANSKEDYDDVAEEIYRLRELKQEVMMKNAAREGLRQRIEEMTKYLKEQPQQLETYDDLLVRQLIERVTIHKRNLTIEFKSGIEKEIAI

SEQ ID NO: 16573 - protein, 520 aa, synthetic construct
MRKITTLDVTTSSAVKPKQKVAAYIRVSTSNEDQLISLEAQRRHYKTLIEKNVEWQLIDIYSDEGITGTKKDRRPELIRLISDCEKGKIDFILTKSISRFARNTIDCLELVRKLMDLGVHIYFEKENINTNSMESELMLSILSSLAENESVSLSENSKWSIRQRFKRGTYKLSYPPYGYDYIDEQVIVNKKQAQVVKRIFNSVLEGVGTERIARQLNKEKIPTKRNGKWTGTTIRGIIKNEKYTGDVLLQKTYTDEHFNRKVNQGELDQYLIENHHEAIITHADFEVANRMLEYQASQKNIAVGSRKYLNRYPFSGKIECAECGDTFKRRIHTSTNSKYIAWCCSTHIKNKDECSMLFIREERIHQAFITMMNKLKFGYSYVLTSLSKQLETSNQDETYQKITEIEEQLEVIKDKLNTLIQLMAKGFLEPAIFNEQKIELSQRHMKLKEEREQLLYLINDGSNQLSEVKRLIKYFKQGKFIDAFDEESFQDIVKKIIVYSPNEIGFHLNCGITLREGVKR

SEQ ID NO: 16574 - protein, 452 aa, synthetic construct
MKAAIYIRVSTQEQVENYSIQAQTEKLTALCRSKDWDVYDIFVDGGYSGSNMNRPALNEMLSKLHEIDAVVVYRLDRLSRSQKDTITLIEEYFLKNNVEFVSLSETLDTSSPFGRAMIGILSVFAQLERETIRDRMVMGKIKRVESGLPLTTAKGRTFGYDVVDTKLYVNKEEAQHLQLIYDIFEEEKSITFLQKRLKELGFKVKSYSSYNKWLMNDLYIGYVSYSDKVHVKGVHEAIISEEQFYRVQEIFSRMGKNPNMNRDSASLLNNLVVCGKCGLGYVHRRKDTVSRGKKYHYRYYSCKTYKHTHELEKCGNKIWRADKLEELIIDRVNNYSFASRNVDKEDELDSLNEKLKTEHTKKKRLFDLYISGSYEVSELDAMMSDIDAQINYYEAQIEANEELKKNKKIQENLADLATVDFDSLEFREKQLYLKSLINKIYIDDEQVTIEWL

SEQ ID NO: 16575 - protein, 561 aa, synthetic construct
MKNKKIKCDIYTRVSTTMQVDGYSLHAQKEKLKRYAEFQNMEIVNEYSDEGKSGKSVEGRPEFQRMLDNIENGTDKVQFVLVFKLSRFGRNAADVLNSLQRMQDFGVNLICVEDGIDSSKDSGKLMISVLSAVAEIERENILVQTMEGRKQKAREGKWNGGFAPYGYELVNGELQIAEDEAEIIRLIYDKFIHTNMGISAIAAWLNQHGYKKKKRQNNTLDAFATSFIKGVLDNPVYCGKLAYGRRKNEKVSGTRNEYRIVKQENYMLHDGIHEGIISETDWELAHQKREKTGVKYEKTHSLDHEHILSGILRCPLCGSGMYGNVNRKKKKDGTLYKDYFYYACKHRRLVDGHKCGYRKQWSEEKINNAVEEVIRKLVKNPKFEEAILNKIGSRIDTEEIEKEIEGLEKQHRQLTGAKARLGQQMDSLDIMDKFYEKKYQDMETRLYRLYYEIEGVENSIEEVKNRLLNIRQQKISEENVYQFLLYFDKLYDKFTDLEKKKFLNSFVEQVDIYEQEQPDSRFLKHIKFRFPVYFGDRETQELCWDNESTVETVCLLSRKDK

SEQ ID NO: 16576 - protein, 568 aa, synthetic construct
MREGWHVVEVYSDHAISGASLLRPGIQKLMQDGVSGKFDIVVSEAMDRLSRDQEDIAGFYKRMQFANVTVFTLSEGEISSLHIGLKGTMNALFLKDLAAKTHRGMRGRVEKGKSGGGLTYGYDVVRGVDATGDYTHGERRINDAEANIVRRIFSEHLKGLSPTAIAKQLNSEGIAGPLGGTWGPSTINGNRRRGTGIINNELYVGKIIWNRLRYVKDPSTGKRISRLNEPSEWVVTEAPELRIVDQAVWDELKSRQTLIERAPLHSHNRPRYLLTGLMRCGCCGGGYTVEGRKRVRCANRMNKGTCDNALAMNVEELEASVLSALQVHLMDEALCDLFCKEYTRRMNELRSAHNAARDGYRAELNKLEREREKIISAIAEGIDVSLIKDRANALQKRREELQKILEVTSDEPVIFHPNMAKRYHNAIRELVTTLQDPAERMQASRILRSLIEKVVLTPAPDGDRLVVDLVGDLAGILSIASNRDKAAVKADLSDLNLVPDSNANGQFDETGLEGPSDQNAMFADERNHSDGARNEKSPREGAFISSPSRYRQVVLVAGAGFEPATFRL

SEQ ID NO: 16577 - protein, 533 aa, synthetic construct
MSAQVYSYKRFSSIEQRKGSSLERQTDYAKKIAKKYNLRLNEELNMTDEALSAFHAEHVTKGMLGTFIQAVKDGAVAPGSILIVESLDRLSRQQPLQAQMQFNELLENEITIITATDSQVYNKQSLSRDPYKLFSSLSVMLRAHEESLIKQDRAISSIRSKIKSFRNKGEKSIPGTVPFWIDKTEKGFVLNQHKSTVELIVKLYLKQNGLNSISRELASKNIPTPTGKHKNWGITTIRKVLDNKALFGVRVVSMRYLKDATAITETEELASYYPAVISEEDYFVIQQRKKKKENSREGYGKATYLLSSYGKNKAICASCGYALGSQLQKQVNRRNEYTQSVLRLHCKKHKESLSCVPSIRAGRLESAFLDSIHHHLDANFLKPRLSYSKMESLGAELEVINEQISNLLDSLIYLKNKDTKDSLYKKIEKLEIKKEKLTKRIEENRLDKASIEDVKKLRDLAEKAKKISNNEERKLLKQILLQSLSKIIISLPNQSLIAQFFNGNELHLSFDPVAQKFVTIVTYGFKVNKFDEI

SEQ ID NO: 16578 - protein, 587 aa, synthetic construct
MNHKKAIAYIRVSTTHQDVERQRIKFKEYCKNNNLQANEEIIDFGISGAKSDRPGYLRLQALTGKDADILVVSELSRLSRQEEILETINIIQNIVYNGLSLIFLDAPSKVYEAHSTLDITELIILLVGAFRAAQDRKEIKRKNQEGKQALLSQNPYAVVDAKIPYGYNAIYNPNGNRPKKILIENEEEVANVKKIFQLALEGYSLGKIAKYFNNRNILFRGNFVTRQLLSVLVRNILYKGIRRRIHSFDRKDNPNIIENRITPIISESDFERVNQMLKDNHKFCSTGNNYFNTLRGIIKCRCGRGMMVKDKGYTSGIKKMVYRCNDVSAKDNPIHCQYKDEISYQFTNEVIFNVFKYIHNTDEIFIFMAKTEQKIYEINEEIKGIERKIENKNIEIESLNKDNKRLIERYIHAKSQSIANAIQDEQLTIENKIHKLEDEISHCNKEKVKLITNKESLINYIDTEELSSLGNEERAELFKKHLEKVIYLPVTLMQGFYIITFKSKMQRIVAIRKTAKSPIAAILPDGYTVDMNTKLITEYYQGIQTGGCYYPISSSFKQLTIQEYFKKLPQIGNLGILKIDYSYRKGK

SEQ ID NO: 16579 - protein, 539 aa, synthetic construct
MPATAIRKVTLIPADPIYAQKDIRKKALRVAPYCRVSTNSEEQLDSYQAQIEYYTEKIAAQPEWTMVDMFADEGKTATSTKKRKDFLRMIKACEKGKVDLVITKSVSRFCRNTLDGLDYVRKLKRMGVGVFFEKENVNTLYMDNEMILTFMMSQAQAESESMSGNIRWGHRKNFKDGKVYYHYAGFLGYRKGEDDLPEVDQEEAEIVRRIFSRYLVGHSVAKIIADLEADGIETVRGHKKWNDGVIRGMLKNEKYIGDALLQKTYIADLFTRQSKKNNGELPQYYVHDCHPAIIDKLTFQRVQEEMARRSSLRKVSATAKTELAKYSGKYVLTELLSCGDCGSPYRRVTWTRPEGKKIVWRCINRLENGKKFCKDAPTLEESRIHAAVVSAMNEMFSLKTMKALLQDSILSALSEKGGETSIAAIDGRLSELRNQQYELLQLAASVGVNSTQYDEELNKISMEFSALIAKRNELEKNQQDIAQADKRAEQIAAGLDTVDTGITGFDEVAVRQLISAVRVLSEEKLLIRFKDGTEIEQII

SEQ ID NO: 16580 - protein, 513 aa, synthetic construct
MPPRPSPDSDGLIPVIGYVRVSMLKEEQISPEIQKAAVTNWAQRNGRKIVRWVIDLDATGRNFHRKIMEAIAGVEAGEAKEIAAWKYNRFGRNRTGNAINLARLHNVGGELQSATEDIDATTAIGKLQRGMLLEFAAFESDRAGEQWAEAHQYRRSRGLPSHGRARFGYVLRGRIPDPLQPHRTIRAPQDGPERYEIDPRTGPVLAELYRRYTAGEGARQLVAWANAAGVASTQGRPWSTSTLLRYLDTGFGAGLIKTHDPQCGCGNAARCRRIIHLKGAHEPVITEEEWQAYRRRRERVAKTAPRARVTVYPLTGRIWCGHCRATMTVGEHKGVKAARYNCSAYMRKGQCGSRSVQRARVEELVLGVLAQWAEDIEADPGSAPAPALEAQIDVSGLEGQIRRLDAALDRLTRQLALELVPEDTYKRTRDDLLAERAELVAQVDELQRPAPRSRHAYVPVIQALVAEWPTLRPVRRRELMAELIDSVHVFRTDPRTAWLEITSTWGDKRQVSV

SEQ ID NO: 16581 - protein, 559 aa, synthetic construct
MAKNVQVIEPIKKFDNTKKDDNTVKKKVCAYCRVSTDSGEQMESYNAQVDEYTKIIKENPAWEFVNVYADAGISGTNIKNRLAFNRMIKDCYEGKIDMIITKSISRFARNTVDCLNHVRMLRNQGIEVFFEKENIYTFDPKVELLLTMMSSIAQEESRNISENSKWGIKKRFKDGVAICNTNRLLGYDKDDEGNLIINEKQAKIVRRIYKEYLDGKGYGSIARGLTADGIITVAGGKTWYGSTVSKILSNEKYKGDLLLQKTVTIDYLSHKRVKNNNLEPQYMIEDNHEAIISKEIWKQVQLEKKRRYSLTCGNDPKDRSKYTNKYAFSSKLYCDKCGRTLKRRKWNAGTKSEKIMWQCNNYIKGIENCDSKAVSDTILKETFVKVYNDMLKDKGSFIKNFMKNIEKILAGNKNIDKINSVVKQISELEQDLKGLIQLQIKGKIDEKYYDEEYTRIKIEIDKLNDERVKFEEEHIKEVDYKQRLKAMMKILDSSDELLTEFDDEIFKAVVKTVIIKAPDHFVFILENGLEYEGKSYGSKQHAAHVETVVSLTKRIVATH

SEQ ID NO: 16582 - protein, 524 aa, synthetic construct
MPMIAIYSRKSVYSDTSDSTQTQYNLALEYCKGHYDDYDVIWYEDEGYTGANTDRPAYSRMVEDVKDGKINIVICYKIDRVSRDVKDFSNFFSFLQDHSVEFVSIKEQIDTSTPLGRAMMYICSVFAQMERETIAERVKDGMTDLSKTGKWAGGRAPLGYRRERVEISGKSHTVLSIDPDGVKLLNKISDLFLNGGYSLTQMERYCRENHITTAQGSYFSSTQIWTLLKNPTYCTADQAAYDYFAGLGCQMGVDRDKFDGKHAIMSYGRTAGGKRKKHVHNPPEKWVISVGLHDPIWTSEKYIAIQERFGNNQIDKTRKHKIGILKGVVKCRCGYTMRVKHKIDKVYGKTYDSYFCQQRMRRGKSFCDMPFTSVDTLDRLVIDVLKQIKLDKSMIDNFIVDDCGLKVVSRSRSDVQRDIDKVNAKILNLTNALGNSSGSSAAKYIVQEIEKLDRELSGLKYELLEISANDKKRSRANYDRELKYKMVCDIVDNIESADYDEINGLLRDLFKECVYDGQTLHIKI

SEQ ID NO: 16583 - protein, 610 aa, synthetic construct
MSPDELQITDIRPGTGKAVVKGALITTQYTGTLEDGTVFDSSRERGKPFQCVIGTGRVIKGWDQRFQMLASTSSHRRKVFAAMKAPATRRPYAISYVRFSSMRQTGGTSVERQEAMIASWLEGHPDYDLYTTEFKDLAKSGFKGEHVEKGGGFGKLLEAIHRGAIQAGDVVLVEALDRTGRLDATDMLGILHPIISAGVAIITLDDNQTYDRSALNGAGLFMLSAKIQSAHQYSDTLSRRVGASYESRRKAAKAGVVPKRWTPLWLTTEGEVIVSIAAQVKLAYELYVSGLGKTAIAKRLRESGVPELAKCSGPTVDGWLKNRCTVGDWEAHKDNPDRETEVIAGVYPPIITLALYQKAQLHRERVGTAKPVQHSKHFLVGLVKCAECGKNYIYQNVNGKPHNMKCRVHTNDKQCPNFACIPKPVMDAVLAWTGDKAKLAGIATLHSSVNEVEIAALRAEIDTVTFKVKGLMDTIKAVGAIPEFLEDLKVLTLERDEHQARLTLLERTEKPVAGNHWQYQAEMWWLEENDPERLSALMQQIGYTITIHQDKRIQVGQAVFKYDGYLKGSKEYKVIQAYGSTEERLVMVRKNDYCETGLCRRVEGDVYETA

SEQ ID NO: 16584 - protein, 614 aa, synthetic construct
MSNIQIIEADKKRARRYSSVLNDNKRVAAYCRVSTDSEEQQSSYHSQVLHYKEMIKSKPDWELADIYADEGISGTGTKNRIEFQRMINDAMTGKIDMIITKSISRFARNTLDTLNYVRTLKEKNVAVVFEKENINTLTMNGEMLLVILSSLAQQESESISANVTMGFKMKMKRGELIGYNGCLGYDYNKEDKTIKVNEKEAEIVRYIFRRYIEGAGGKVIANELGNLGYKTQKGLSRWRDSTILGILKNEKYKGDLLLGKTFTTDPISHKRLKNLGERDQFYVSNNHEPIITDEMFERAKEIRQKRSRVHGSKTINERFSRKYPFSSICTCAYCGSILMRRQWNSGTKHEKYTWQCMNSIKNGRKACSHSKAIAETDLEDAFVQGYNMLTDLNKEVITEFVTNIEQALDIPSLKEEYEKLSDQIAKIEDKIQKLIDLRLEDNIDLESYTKKHAKFMKEQEGLVEQKRTIKYTLDSEESISMRIRNFKHAFNKNETLEGFDRLILDAIIEKVVVGAVDNKGKAMPKVLTFVLKSGLEVDDDVLSSLRVNLDGIEEVKVVLDGEAETDLFGDSLDRKEPLVLLGFKYYTKYFTFNKRDDDFVEKKMKDYINVRFAI

SEQ ID NO: 16585 - protein, 497 aa, synthetic construct
MPNLKIVAYARFSSDNQRTESIDAQLRAIREYCKKENYQIINIYTDEIRSGLSDERPGFLEMIDDAEMNQFDAIVVHKLDRFSRDRYDSALYKRRLKKAGVKLFSVLERLDDSPESIILESVLEGMAEYYSKNLARETFKGLKENALKCQHNGGIPPLGYDVDPQTKKYIINDYEADTVRMIFDLYLRNSGYSEISEKLNTAGRLTKRNKPFGKNSLYEVLNNDKYIGFYTYNKVANRRLYGANRRSVKDESEIIRIKGGIPAIIEDSQWQEVRERMSSNKRKTASYKAKYVYPLSGLITCGKCGSAYCGHHRSSRSYHNFYYVCSNKHNKGECDAKSVSKELLETAVVNELEKRLFSENGLEATAKYIQNYAITQNDHQLKRLSGLKSELEKTNIQIARIVDAVVDGMYHETMKERLTQFEAKRNNLEREIRNYEENMENMIPSLEDIKMIIGMDNIRTMDENKLKECFQKYVKKITILEDGEIEIDLVVHINGVP

SEQ ID NO: 16586 - protein, 536 aa, synthetic construct
MNGARNVRSVTVIPATPELFNQIEEVNSRKKRVAAYARVSTNLEEQQSSFEAQLDYYTKYIKGKEEWDFVEVYTDEGISATSTKRRDGFNRMIKDALDGKIDLIVTKSVSRFARNTVDTLTNVRLLKEKNIEIYFEKENIYTLDSKGELLIAIMSSLAQDESRSISENVTWGKRKSFSDGNISLPYKSFLGYVKGENGLPQIVEEEATTIRLIYKLFLEGYTPSAIAKKLMALKILTPTKREKWSVSTVISILQNEKYKGDAILQKRYTTDFLTKKTKTNEGEVPQYYVENSHPAIIPPETFGLVQEEFARRKSKGGYTSSQSCFSTRIICGDCGSAYGSKVWHAGSKYQRIVWQCNQKFKQKDKCITPHLYDETIKKLFVEVMNHLIKNKAEIFENYRLLIEKLTDSQDLKEELKQVDEDCSSIEMMVDAFVNENTRIAMDQDEYQRRYNAYAESYDKLRNRHMALSEEIRKRKARKSQIHAFLDILEQQDQLLSEFDETLWRRTILETVVLSKDEVNFRFKDGAEIKWPMKGNI

SEQ ID NO: 16587 - protein, 434 aa, synthetic construct
MRKIIKIEPSVLKLPDKKRVAAYARVSSGKDAMLHSLSTQISHYSEFIQNHPGWEYVGVYADEAATGTKDKRAEFQKLLADCRNHKIDLIITKSISRFARNTLTLLEVVRELSSLGIEVYFEKENIYSLSGDGELMLTILASFAQAESLQVSENCKWRIRKGFQEGELVNLRFMYGYRISRDGIEIAEDQAEIVCMIFDDYLSGKGFNLIAKKLRKMDVEKLRGGIWTPERVGEILKNEKYAGNSLAQKKYVSDHLSKKLVTNWGQLPKYYAENTHPSIIDQETFDKAQEILASRRKSSGKKKRPVYPFTQKIVCDKCGKHYNRKVTHGYTYWNCRTYLHFGKSVCHTIQIPEEILMDVSAEVLGLDHFDEVVFSEKIKEIRVPDDFKLLFVFNDNQILEKTWSHKSRKESWDEKKKQEARERQSLIVERGMAN

SEQ ID NO: 16588 - protein, 509 aa, synthetic construct
MRRAISYIRFSSERQLKGDSVRRQSKLVTDWLDKNPEFYLDSSLSFKDLGKSAFSGKHLKGGLGDFLTAIEKGLVKAGDTLLIESLDRLSRQDIDIASELLRRILRAGVDVVTLSDGEHYTRESLKDPLSLIKSILIMQRAHEESLRKSERVQAAWNRKKELISEGIKVSRRCPAWLRLNDDRRTFTIIPDKVEVVKRAFDLRLQGLSFWAITRTLNDEGHLSLNQYTPKQKGWSDTAVKKLLRNRAVIGCFTPAGREEVQGYYPAIISESLFYRVQQLNTGQYGRASVSSNPLSVNLFRGIIKCSECGATIVLGGYALKRFGMYRCPNRSANRCSAKAISRKQTDATILYMLALCDRFETENTDTIDSLKLQREDLQRKISKMAELAIELDDMTIITEKLRDMKNALSKLNHDIEEETQRIKAITTGSLKDIDRTTKEGMIETQLLIKGVLKEIVIDAAKRRCKVTFHNGKVIDLPITENPSDNVTEAIQSLSEVTERGLIDVDVVEI

SEQ ID NO: 16589 - protein, 508 aa, synthetic construct
MKKAIAYMRFSSPGQMSGDSLNRQRRLIAEWLKVNSDYYLDTITYEDLGLSAFKGKHAQSGAFSEFLDAIEHGYILPGTTLLVESLDRLSREKVGEAIERLKLILNHGIDVITLCDNTVYNIDSLNEPYSLIKAILIAQRANEESEIKSSRVKLSWKKKRQDALESGTIMTASCPRWLSLDDKRTAFVPDPDRVKTIELIFKLRMERRSLNAIAKYLNDHAVKNFSGKESAWGPSVIEKLLANKALIGICVPSYRARGKGISEIAGYYPRVISDDLFYAVQEIRLAPFGISNSSKNPMLINLLRTVMKCEACGSTMIVHAVSGSLHGYYVCPMRRLHRCDRPSIKRDLVDYNIINELLFNCSKIQPVENKKDANETLELKIIELQMKINNLIVALSVAPEVTAIAEKIRLLDKELRRASVSLKTLKSKGVNSFSDFYAIDLTSKNGRELCRTLAYKTFEKIIINTDNKTCDIYFMNGIVFKHYPLMKVISAQQAISALKYMVDGEIYF

SEQ ID NO: 16590 - protein, 547 aa, synthetic construct
MKLLVPYIRWSTKEQDSGDSLRRQTNLIDAFYAKHKDDYYLLPAHRYVDKGKSGFHQQHKAQGSDFRRMFENVMSGVIPEGSLIVVENFDRFSRADIDTAIDDVRQILRKGVSILTLGDGELYDKSALTDPVKLIKHIIIAERAHQESLVKQKRIAQVWNHKTQLARELKKPMGKQAPGWLELSDDGSHYIVDEDKASLVNIIYDKRLSGMSMFAICKWLNEQGYPTINQRKVRISKTKKPDGNWSALSVKHILTSRSVLGYLPAKISTEDRKTVLREEIEGFYPQIVTDSKFYAVQQLLEETGKGKTSSGEHWLYVNILKGLIRCKCGLVMTPTGIRKPVYQGTYRCNGNKESRCNYGTVSRKLLDTQLCSRLFSKLSQLHDEATDTAKLDELQRRLNTVDSELEKLTETLIQLPNITQIQEALRVKQEEKDELIVQLSREKARVKSVSSLDLSGLDMESVEGRTEAQIIIKRLVKEIVVSGNEKLVDIYLHNGNMIRGFPLDGKDDHTLTLEEATDEMQSLDDMLIFGEPVTRIYPAGDMEEVDA

SEQ ID NO: 16591 - protein, 547 aa, synthetic construct
MKLLVTYIRWSTKEQDSGDSLRRQTNLIDAFYAKHKEEYYLLPAHRYVDKGKSGFHQQHKNQGSDFRRMFENVMSGAIPEGSLIVVENFDRFSRADIDTAIDDVRQILRKGVSILTLGDGELYDKSALTDPVKLIKHIIIAERAHQESLVKQKRIAQVWNHKTQLARELKKPMGKQAPGWLELSEDGSHYIVDEDKASLVNIIYDKRLSGMSMFAICKWLNEQGYPTINQRKVRISKTKKPDGNWSALSVKHILTSRSVLGYLPAKISTEDRKTVLREEIEGFYPQIVTDSKFYAVQQLLEETGKGKTSSGEHWLYVNILKGLIRCKCGLVMTPTGIRKPVYQGTYRCNGNKESRCSYGTVSRKLLDTQLCSRLFSKLSQLHDEATDTAKLDELQRRLNTVDSELEKLTETLIQLPNITQIQEALRVKQEEKDELIVQLSREKARVKSVSSLDLSGLDMESVEGRTEAQIIIKRLVKEIVVSGNEKLVDIYLHNGNMIRGFPLDGKDDHTLTLEEATDEMQSLDDMLIFGEPVTRIYPAGDMEEVDA

SEQ ID NO: 16592 - protein, 559 aa, synthetic construct
MKTKLYSYIRFSSMRQSDGSSYERQIRMAREIAAKYDLELVNDYQDLGVSAFKGANSKTGALSRFLDAIGRSVPVGSWLFIENLDRLSRADIVSAQELFLSIIRRGITIVTGMDNKIYSLDTVTANPMDLMFSILLFIRGNEESQTKRNRTNSSALIKIKAHQENPQNPAVAIEEVGKNMWWTDTTSGYVLPHPVYFPVVQEIVELRKNGRSTAEILDHLNETYTPPPAVSNKKHSKWSRAMVERLFHTRALIGIKEVSVDGVNYELKDYYHRVIDDPTFYHLKKNIGARAWNFGDKEEVKPIPLLSGIGLLKCDHCGCAMVKVKGTNKRSDQYRYTCDATRSRRLDCEHPNWSFRGDQLEKAVLQLLADKIWIAEDKANPVPALKVQVDEISRKIDNLIALSAMTGATKELADQITTLNSERETLYNQIKMAEEEMYSVDSQGWEKLAEFDLEDVYNEERLKVRFKIKQALKRIGCSRIDRNKNLFVLEYIDGKTQRVVIENSRGTRKGQIFVDLKTINDRQILESNGLVLHPCLDMLTDKNWKPEEEIPGPLQEFGI

SEQ ID NO: 16593 - protein, 448 aa, synthetic construct
MKRAIGYLRQSTTKQQSLPAQKQAIELLAPKHNIQNIQYISYKQSGRTDNRTGYQQVTERIQQRQCDVLCCYRLNRLHRNLKNALKLMKLCQKYHVHILSVHDGYFDMDKAFDRLKLNIFMSLAELESDNIGEQVKNGLREKAKQGKLITTHAPFGYHYQNGTFIINNDESPTVKAVFNYYLQGYGYKKIAQYLEDDNKLITRKPYQVRNIIMNPNYCGRVINQYGQYNNMVPPIVSATKYEHAQAIRNKKQLHCIPSENQLKQKIKCPCCDSTLTNMTIRKKHTLRYYICPKNMNESRFVCSFKGINAQKLEVQVLATCQNFFQNQQLYSKINNAIHQRLKKQRVIEAKSTLTQEQLIDKLAKGMIDAESFRKQTHLMNQKHKTISSISDNQLQTSLQKVIQKSFTLNMLHPYIDEIRITKNKALVGIYFKNEPLNIVNQTSQSSIA

SEQ ID NO: 16594 - protein, 522 aa, synthetic construct
MKKVTTIPATISKFSQTPINKVTKRRVAAYARVSTEQEEQQTSYEAQIDYYTNYIQSREDWEFAGMYSDEGITATNTKKRVGFQNMVTDALAGKIDLIVTKSVSRFARNTVDSLTTVRQLKEKGVEIYFEKENIWTLDSKGELLITIMSSLAQEESRSISENVVWGQRKRFADGKVTVPFKQFLGYDMGPDRNLVVNPEQAKIVKRIYAMFLKGKSPYNIATILSKEGVPTPSGKSNWWVGTIQSILTNEKYKGDALLQKTYTVDFLTKEKKVNEGEVPQYYVKNNHEAIIEPEIFDMVQKQMALRTRGKNRIRSTSIFSCKLKCMDCGSYYGSKVWHSNSKYRRVIWRCNHKYDEDEKCQTPHLYEDEIKELFIKATKQLVGMKDEVMSNYAEMKEMLFGTAELEAEQENLETEINEIAGLIEDCVNENARVALNQTEYEERYNALVARFDKANARLEEVKQEVVERQAKGMQVERFLHELEKIGIIDEFDDDLFMGLVDVIEVWHDKKVVRFKDGSEVEV

SEQ ID NO: 16595 - protein, 589 aa, synthetic construct
MKIIQKIEPTIPKLAKRKKVAAYARVSVEKGRTMHSLSAQVSYYSKLIQKNAEWEYAGVYSDGGISGASTKKREGFKQMVEDAENGEIDIILTKSISRFARNTVDLLETVRHLKAIGVEVWFEKENIHSLSGDGELMLSILASFAQEEITSLSNNIKWSIQKKYMQGKANARFRIYGYRWEGDNLVIQPDEAKVVKLIYDNYLNNFSAEETAAQLREMGVKGLNGGKFSAVSVRQMLKNITYTGNLVLQKYMVTDPFTKKLKRNHGELSKYYVENNHEAIIPMEVWQKVQDEIARRRRVGQRANISHKIYPFTSKVRCSKCGKNYIRGTRLDKRNNRRRHYWTCWTKRSKGRDACFTKEVPEYVLNEKTAEVLGLDNFDEKIFESKIERIDVIGDNRLDFVFFDGQIKTVNWESKFNYKGKPWTEERMQWQKEGYVRDENHPPKRRFKTFSRYIQCGYCGKYYISTLGKLSGGKKVQKWSCYTKKAFCPNPHDRRYIPEAVLEESVCDVLNLETFDVKVMEDKIEKLVAYSDEIKFIFKDGHDESRKLVIPRAKNPEYSQETLQKMSEKRKEWWRRKHEESNNNSSNNQ

SEQ ID NO: 16596 - protein, 452 aa, synthetic construct
MKAAIYIRVSTQEQIENYSIQAQTEKLTALCRSKDWDVYDIFIDGGYSGSNMNRPALNEMLSKLHEIDAVVVYRLDRLSRSQRDTITLIEEYFLKNNVEFVSLSETLDTSSPFGRAMIGILSVFAQLERETIRDRMVMGKIKRIEAGLPLTTAKGRTFGYDVIDTKLYINEEEAKQLRLIYDIFEEEQSITFLQKRLKKLGFKVRTYNRYNNWLTNDLYCGYVSYKDKVHVKGIHEPIISEEQFYRVQEIFSRMGKNPNMNKESASLLNNLVVCSKCGLGFVHRRKDTVSRGKKYHYRYYSCKTYKHTHELEKCGNKIWRADKLEELIIDRVNNYSFASRNVDKEDELDSLNEKLKIEHTKKKRLFDLYISGSYEVSELDAMMSDIDAQINYYEAQIEANEELKKNKKIQENLADLATVDFNSLEFREKQLYLKSLINKIYIDDEQVTIEWL

SEQ ID NO: 16597 - protein, 558 aa, synthetic construct
MTKLYSYIRFSSMRQSEGSSYERQIRMAKEIADRHGLELVNDYQDLGVSAFKGANSKTGALSRFLDEIGRSIPVGSWLFIENLDRLSRQDIISAQELFLSIIRRGITIVTGMDNKIYSIETVTANPMDLMFSILLFIRGNEESQTKRNRTNSSALLKIKAHQQNPQSPAVAIEEIGKNMWWTDTTSGRVLPHPVYFPVLQKIVKMRQDGHSAGSILDYLNEHHEPPAPTSNKKHGKWSRAMVSRLFNTKALIGVKTVNVDGVEYELRDYYPRVLSDSEFYFLRKNIIKKAWDYGHDKEKVIPLLSGIGVLRCVHCGATMVKQTAANGKREQYRYCCDGRKSGRTDCPYPNWGFRAATLERAVLQLLADKIWIAEDKTNPIPEIQVKIDDISRKIDNLINLSAMMGATKELANQITDLNMQREALHEEIRLFEREMYSVDSQGWEKLAEFDLSDVQNEERLKVRMKIKGALHEIECSRLDSKKNLFVLVYLDGLRQRLVIENNRGLKKGQIIVDLKTINDRQILESAGMVLHPCIDMIVDKNWKAPEEIPGLLSEEFGI

SEQ ID NO: 16598 - protein, 466 aa, synthetic construct
MRSAAVYARISADAEGKSLGVQRQLEDCRRLASDRSWVVGREYVDNDVSAYSGKARPGYEAMCNDLAAGVRDAVIVYNLDRLHRRPVELEEFVALCEAAGVNQVATVTADIDLGNDDGLFMARIFAAFAAKESGRKSARMRRKYEQKAAQGLPHGPNRPFGYEDDKITIRESEGEVIQELVTRVIAGESLNSLTVWLNETGVKPVRGTRWASTAVRNIVSSPRIAGLRAYKGEVVGEAAWPAIISTAERDQVMAALAVRAWNRKRSPRKYLLSGLCRCGRCQARMFSAARLEAGAAKRRYVCSSSPDHGGCGRMTVVAEPLEKLITDAVLTRLDSKALADALAGKARANPDTAALSAQVEQAQARLDELTGLYSSGAISAREWIMARDPITDTIGRLRREIAETLDTGPLAELAGQGSKIRTQWDDLGLDRCHAIIRTVIDHIIVKPGQPGARGLDMGRIDPIWRT

SEQ ID NO: 16599 - protein, 604 aa, synthetic construct
MEYDTSKLADLLMADSQINTQTAAKIAVSYPRVSSKKQAEKDGDPDGYSLPAQREANRRKAATLGAVVVEEFVERAESAKSADRPKLQEMLNYIRQHKVDYVIVHKIDRLARNRADDVEISLAIKQAGAELVSATENIDETPNGMLLHGIMSSIAEFYSRNLAVEVTKGMTQKAKIGGTPGKAPLGYLNVRKINAHGADVRTVDVDPVRAPLITWAFHAYASGDWTLKALAAELERRGLTTRPTPKTPARPIKYNSLHKILTTPYYKGVVVFSKATYSGKHKPLVDDVTWAKVQEVLSSHATGEKQREHPHYLKSSVFCGSCASRLVITNAKNPSGTVYAYFICLGRHQKITDCEQRAVLIAKVEQQVADYYRTVQLDPDLRNQIETMLRDEMAAYRASAETQHKQLSMQKDRLERERSSLLQAHYAQAVPLDLLKTEQDRIARSLAEITERLAATSMEFQQFERALTTALDYAMNCHRAYIGAAHVVGGKQIRRLLNQAIFTRLYIDDGDIHGDLAEPFRTLLSDELANAAQQHAANKGRGMADDGKYRVTSGNGHRPSLTEVLQKTNKKPDDSVASLKLTTLVPSAGFEPATPALGEPCSIP

SEQ ID NO: 16600 - protein, 550 aa, synthetic construct
MITVALYARVSSKSQAQNNTIESQIAELKHRIAADKHELLNEYEFKDDGLSGWSLEREGLDALRDKVGEDQIDKIYIHSPDRLSRKSAHQMILLDEFEKAGVEVIFLNHKTENNPESKLLLGMQGLVAEYECTKIMERSRRGKLHRAKKGCVSVIGIAPFGYNRIKHVDREKTKFEINEEEAKIVKQIFMWVGQERISIREVIRRLRDKSIRTRTGKKVWCPIIIWKVLRNPAYKGQAAFGKLKRVEKRERNKQKVSISRTDEDSWIYIPVPKIVDEGLFNKVQKQLDENRKRARMQREGGKKKYLLQGLVVCQNCGYAYSGAQCGVEGKKFSYYRCSSTIRITDGREKCTNKLVRTDMLETAIWEKVKNLLKNPEIIKNEYHRRTAENKNDESSDKKFARRENQIKQGIEKLMEDYYSQENVGDKGYISEEEFKQTMKRMRERLRGIEEEKKKVVDQKAIEKGMNLIINSIKSLYSSVKSNLEQLDWQTKRGIIKALVERIQIGYDQVEVAFRIEEPAQDGEIFNLQHCTGRHDSEAIVFAFANLQIKR

SEQ ID NO: 16601 - protein, 513 aa, synthetic construct
MIIGIYPRKSVYRDNSESIKVQIKLCKEYAKIVYKGQQIDFRIYGKDEGFSGKNTNRPSFQELMRDVKSNILNVVMVYRLDRISRNVSEFSEMYDIMHAHNVTFLSVKESFDTSTPIGRTVMYILAAFSQFERESTSERVADNMHSLGASGKWTGGKLPAGMSSIRKTVDGKEHSFLVVNDERIGLVKMLYSMYLEGYTITALERYCRDHGFRTESGKFLSTSQIHCILSNPVYCSNGTAAYDYFKGHGHTVPDKLFFDGTKGLVSYGKTKQSEKRIVNDKYTISVGIHEPVIAAEDWIAVQNRFGANKFYRSNKYKVGILKGVLKCNCGARMDIRTYVKNGNQFSYYYCARMAREGKKVCDTGYIRVDTIDDAFISKLMQIKSNPSMIKVRATELDFVDINKIEAELKSIDQAIENLTGALSENSSSTAASHIIKQIEKLDASKVRLESSLYSAMQNNKIAQSEKETKDIIYNYICCLLEKFESMSYQEKNELIKKAVKKCICSNDGLHIIF

SEQ ID NO: 16602 - protein, 519 aa, synthetic construct
MKKVTKIDKIQPAKKAEDKLRVAAYCRVSTATDAQLESLEAQKSHYENYINSRDDWCFAGVYYDEGITGTKASKRPELMRLLADCKAKKIDFVITKSISRFSRNTMDCLEIVRTLLNLNIPVYFEKENINTGSMESELFLSVLSTMAEGESASISSNNKWSIKKRFENGTYRLSSAPYGYKLESGGLQVVSEQADIVKRIFRELLSGKGMYSIAKELNAEQVPTQKGGRWTSTSVHNILTNEKYTGDCIFQKTYADSNFNRHTNNGELNRYLIQNHHEAIISHEDFNATAALIKQRATERRIESGSDKYQQRYAFSEKLICGECGNTFRRRIHKGKYNSYVAWVCNTHLSDTNRCSMLFVRDDALNLAFATMLNKLIFSYRLLLKPYLAAMQSNTADEALLRIQYLEKQLDQNAEQRSTLHKLMAQGYIDQILYTQESNELLLQARDFRSELEALNNTVAGDTTKVYETERLINYCKRGEMLTDFNESLFELFVDHILIYSRQKIGFVLRCGLTFEEMI

SEQ ID NO: 16603 - protein, 524 aa, synthetic construct
MGDKMKRVYCLYRVSTKGQVDKDDIPMQKTSCREFAERNGWTILKEFQEKGVSGFKVSASDRDAIQDLKSAAEKKEFDVLLVFMFDRIGRIDDETPFVVEWFIKHGIEVWSVNEGEQRMDNHVDKLMNYIRFWQANGESQKTSARVKTRLNQMTLDGKFTGGVAPFGYKLIKSGEINKKGKELMDIVVDDDETPIVKKIFEMTVKEGYGSYRMADYLNSHCIRTHNNSKFQCNTVNRILKNRLYCGYLVSGGVESPYIERLHIIDENIFEQAQFILKQRSSKNEEKQQIARTTKGSTLLSGNIYCAHCGQKMVSTRYIDKYDRADGSQYRVRRQRYICTNKAMKRGACDGQSAYVAHRIDGAVLETLRDYLAKIKSTPKDIALEKRYKSEISEYRRKQTKIEKEIDKLKRQVIELSAEIGRSLLGESRFAPDILSASIDNTNDLLHKKETELNDIKFKLANQQNAMGKLDFYYSQFRTWADEFDNSTMEQKKMIACQLIREVKVSRGYELGIVFDLNYEQFLSL

SEQ ID NO: 16604 - protein, 529 aa, synthetic construct
MPYCLYLRKSRADIDAEANGEMETLARHEKILLDLAKRMHLDVTEIYREVVSGETISSRPVVQHLLTEVENEMWDGVLVVEIERLARGDTIDQGIVSRAFKFSNTKIITPLKTYDPNNEYDEEYFEFGLFMSRREYKTIRRRLTQGRMSSAKEGKHTGSKAPYGYDRIHVESGKGYTLSPNEKEAPIVKMIFDWFVNGQLQEDGSYRKLGAHAIAHRLTNLCIDSPTGNPTWNPRSVYWMLHNPVYTGKIRWGYKKDKKIIVDGAVKRTRIIPPEEEQILVEGLHPAIISDEIFNRAQELFLRRGNPSVVIEKELKNPLAGVVVCGICGRPLRYRSNANRRDYGVECRTYGCPCKGSYIYIVEKRIIDALRDWVNEYKLSWDDMPRETHSLLIVKEQAYNAAIKELNTLTKQLDKTHDLLEQGIYDTETFLIRSKSLSEKIAESEKNIAKLSADINNEKLRENNRKNLIPKVENLIDIYWQLPNASAKNDMLKEVLEKVEYTKLHTVGRSKTKKLDDFDLVLYPKLPRT

SEQ ID NO: 16605 - protein, 643 aa, synthetic construct
MAGIRMENKIYEVGMYCRLSKDDGTDNESASIATQKSILTDYVKKQGWHLAKTYVDDGYSGTNFQRPSFQNMIKDIESGLINCVITKDLSRLGRNYLDCGLYLEVFFPEHNVRYIAVNDGVDTLNKSAMDITPFRNILNEMYSADVSVKIKSAYRARFQQGKFMGTTAPYGYVKDPADHNHLLIDDKVAHVVREIFDLALAGNGIAKIRKHINKQHILRPAAYAAEQGATGYERYFEENEENRYIWSENSVRGILRSPIYAGNLAGYKRIAANMKSKKRPSKLPEEWEVIPDTHEGIVTQEEFDTVQQLITSRRLPENKGGFENIFAGVIKCADCGYAMRAMSANRRKRPDIIDCVQYSCNNYGRYGNIMCTAHSIEARDLFNAVLTDINRFADMAVNDEKAVRAIEKRLTETDQSKAKALEKEQRKLNKRLAELDRLFSSLYEDKVMERITERNFEMMSGKYQKEQLEIEARLKEVTETLSDSYEKTQGVRDFLSLIRNYQGIKELDATIINALIDKILVSEREKLTDGMVRQEIKIYYKFIGFVGELHITPTKRWTALKPKNCTVCGVEYVPRSGISKYCPACAKKIQREKSNESKRRSRERNRQACIELSAKNDRLILNSRKVVSYGRVIRIKRCRFFGM

SEQ ID NO: 16606 - protein, 520 aa, synthetic construct
MRKITTLDMTTFSVVKPKQKVAAYIRVSTSNEDQLISLEAQRRHYKILIENNDEWQLVDIYSDEGITGTKKDRRPELLRLISDCETGKIDFILTKSISRFARNTIDCLELVRKLMDLGVHIYFEKENINTNSMESELMLSILSSLAENESVSLSENSKWSIRQRFKRGTYKLSYPPYGYDYLDEQVIVNEEQAQVVKRIFNSVLEGIGTERIARQLNEEGIPTKRNGNWTGSTIRGIVKNEKYTGDVLLQKTFTDEHFNRKVNQGELDQYLIENHHEAIITHADFEAANQMIEYQASQKNVAAGSRKYLKRYPFSRKIECAECGDTFKRRIHTSTHKKYIAWCCSTHVKNKDECSMLFMREERIHQAFITMMNKLIFARKKILHPLFETMKNGFKQDTEEQLDNIELQLTECYAKSQMLKKLMDDKFLEQKLYEEQRAKMDQQINELLDDKERLLRLIRNEEEQVYELKRLMSFTNKQQEVASFEETIFEEYIEKVYIHSSTKIGFLLKSGLLLKEEVNR

SEQ ID NO: 16607 - protein, 521 aa, synthetic construct
MESSRNVTVIPARPRRTREVSDKQKLRVAAYCRVSTDSDEQATSYEVQIEHYTSYIQANPEWKLAGVYADDGITGTNTKMREQFNKMIQDCIDGKIDMIITKSISRFARNTLDCLKYIRKLKERDIPVFFEKENINSMDAKGEVMLTIMASLAQQESQSLSQNVKLGIQYRYQQGEVQVNHNRFLGYTKDENKRLVIVPEEAEIIKRIYREYLEGSSLNKIAKGLEADGILTGAGRKKWYSSSLHKILTNEKYTGDALLQKTYTVDFLSKKRVNNDGVVPQYYVENNHEAIIPKHLFMLVQEELKKRKIAHISKNGQRRNYSSNHSLAQIVFCENCGEIFRRVHWNNRGKRSIVWRCVSRLENTGVFCDARTVREEGLKQAVIQAINELFKNRSNFLKVLEQNIAQTLSSHLHDKLVKVEKELEALQHSLIGLANSNKDYNDVVDNIYKRREEKQQLQLEIAEQDNGRERLEQISALLKEQTCELETYDEQLVKRMVERIVVHPEKLEIEFKSEMIVEIDV

SEQ ID NO: 16608 - protein, 456 aa, synthetic construct
MYKKELAPDLVRVALYIRVSGEEQKIKGLSLEAQQERLEAYARERGWVIVGIYIDAAKTARKNIHKRTEFQRMMDSVKRDEVDILLFARLDRWFRSVADYYKVMEILQAHNCDWKTTDEEYDTTTANGRLYINVKLSIAQNEADIDGERIDVVFDSKIAHGTVVSGSAPFGFRVNEEKRLEVVPEDAAIVQDAFNYFENTVSQRATVRYVRETYGVNWCDATFRRMLKEKLYTGVYDRGGRYNDQFCPAIIDRQQFDRVQALLTRNVRSAPSGKVYIFTSILTCAECGHKLVGYKSSDYFYYRCNQHFQRGRCSHNHSAREDVVEQWLFEHLGEELERCQLEWDVEAAKKKASVARTDKAALKRKLTKLKELYVNDLIDIEDYKKDYQIYVSALNQIPEPAQEAPPDFAAVRRLLDNSFRTIYDTLTREEKRTLWRSVIKEIRIDNDQNITGVVFG

SEQ ID NO: 16609 - protein, 599 aa, synthetic construct
MKKIIPYGYLRVSSLEQVRSGGGLEAQNDAVRNYINERSDLFDTDRTVMISDAGLSAFSGQQLSEGQLGVFLSDVETGKVPTGSALVCFSIDRLSRQNPWIGTKLISTLIGAGIQIHSVAERQVLKSDDPVGVIMSTIYLMRANNESEIKSSRAKDGYQQRLLKSIQNKTVLTGQMPRWLFNKNGRYSINPDMQKIINFSFDSYIAGQSTGYIAKELNNKGWMYGSTSWRGSYVAKLIRDERLIGKHTRYGKQIKGVKREIIEVIPDFYPVAVELEKFYLANNMLTNIAEKIRGRTRITYGDTSILRNLFSGVIKCGVCGGDTSVVQNTRRKIVNGTVKYIPYKTFLRCRNKYELKSCTQGDLRYEVIEQAVLLHLKSLDINSLLNKPIDNTVELYKAELEGCISDSLQYQSMINLRKAENKRVRPETLEAYEKVMDRIDELNRLIESHVVDDFVPDFNIDLDRIKNISNVAERSVIKKGIASISDTIKYKRISDFIFIEIKYRNINAKHVLVIDNKSSDMVVDFSIEYNEGNKVYICNSFVMEYDNLSCEFTISKTTMEDYAHMMNFVDYVSDDESYKAKEFLVNNLTHIKFITKSNE

SEQ ID NO: 16610 - protein, 523 aa, synthetic construct
MRQVITYLRFSSKPQERGDSIRRQKGLFERWLKDNPDAKVVDEFSDEGASAYHGHHLKGDFGRMLQKIQDGKYLSGQTVLLVESETRLNRQKARNTENLVDLITGKGVDVICLESGKIYTSTNIDDLDTSIQLKIAAHIAHQQSKEKSIKVSAAWEHRAQLALEGKQQLTKNVPGWIDPDTRKLNEHSSTVVTIFDLLLSGESLHNIARYLQANNIKSFSRREKANGFSVHSVRTILRSESTVGTLAASKRNDRPAIPNYYEPAIDVATFNKAQEILSKNRVGRAPASDNPITINLFKGIIRCQCGASVHPTGVKATYQGVYRCNNVPDGRCNVPTIKRKPFDKWMLDNIIGFLERSDGNHTDKRKAEIEYQISLVTSKLKKATPLLLELDDVTELKEQVKELNIQRSNMQSELDELNQRETLSDKPLHHLSEIDLTTKAGRVEAQLILSKFVQSIELQREMIIITLRNGTVIGKSRDLSPVLSRDLMKQVVSSPSPTDIDMFSVITSDEEFRKSGKQVTKRS

SEQ ID NO: 16611 - protein, 537 aa, synthetic construct
MKQQIYNTALYLRLSRDDELQGESSSITTQRSMLRLYAKEHHLNVIDEYIDDGWSGTNFERPSFQRMIEDIEVGKINCVVTKDLSRLGRNYIMTGQYTELYFPSHNVRYIAIDDGVDSEKGESEIAPFKNIINEWVARDTSRKVKSAFKTKFAEGAYYGAYAPLGYKKHPDIKGKLLVDEETKWIVEKIFSLAYQGYGSAKITKILREEKVPTSSWLNFTRYGTFAHIFEGKPESKRYEWTIAQIKGILKSEVYIGNSVHNRQSTVSFKSKKKVRKPESEWFRVENTHEPIIEKEVFYRVQEQIKSRRRQTKEKATPIFAGLVKCADCGWSMRFATNKANKTPYSYYACSFYGQFGKGYCSMHYIRYDVLYQAVLERLQYWAKAVQQDEEKVLHKIQKVGNAERIREKKKKASALKKAENRQNEIDCLFAKMYEDRACEKITERNFIMLSGKYQKEQIELEQQITDLREELSKMEQDMIGAEKWIELIKEYSVPKELTAPLLNAMIEKILIHEATTNEENERIQEIEIYYRFIGKVD

SEQ ID NO: 16612 - protein, 703 aa, synthetic construct
MHDFDQRPTAYSYIRMSSKRQIKGDSLRRQLELSKKYAEDHNLRLDESSMVADKGVSAWTGANLTEGAFGQFLAAAKAGQIKAGSYLLVESLDRLSRQQVRTALLPFMELINADITIVTLADNQVYSKATVDANFTQLIISLTIMARAHEESETKSKRLRAVAKNRRENAAKGVGRFSPMHVGWIDSERAENDRWTFKLNDHANAVRRIFALADSGLGQVTITKRLNDEGVPTFRGKGLWYPANVGRIMRDETVVGTYQPTHVVEDVRQPFGQPIKDYYPAVVSEELFWRVQRGIKAGFAKGRHKGNRIANLFSGLITCAHCGRTLRLRTGTPHKYLYCDNLYRAGNCASGGGLYRYDRLEDIVFSKISELDPDQEAGGKADAQTRETLLQSVKSNEDQIQQQERAYKNYMASLALVDDDAMRREITAEMKSARTKVEQTKALVSEQKEELANIDTKRKEIASIAERMNLERLGWSTGSAEEVFESRSRVAKMIKRFLTTMTINFDEKVLMVALAGGLRGYKFNYDGDIVDRYDMTLHLGHGTPPNHRVDGALRDEHFATDISADDFDLREDRLKIIGSMSPSDENERPSADADVLIDALQSIYAFRPPRHVIHKAVDGYPMWIEQIEESNFTVENIIEKMKLQGASEEDIARVVDATRHELLDRGVELRTKKPVNPRLNDPDVLALKALRKSKIGSQEITCQ

SEQ ID NO: 16613 - protein, 559 aa, synthetic construct
MEREDLPNLRALGFEDDELMALGLWEPVTGSPTDLAEMYVRRSKKKDTLSSLREQVRRICWHAKQESKRIRHVWFEQKSASKAYVRREEFEMATAAIADAGLSKTLYVFKTSRLSRRGMGQVGLLLDKFEERQARIYVVAENIDSTRSRMVLAILSEQARDQASDISEFTKNGINGNKADGRWTGGVTPYGLYSPKGSGKLALDPKEYPTARRIAEYLLHRETPHWIANKLNSEGIQTRHGKKWAGPGIVSLAHSVAWAGLVVKREKMLDEHGNDTGKYHRGGSPLLDKKGKPISCGEGVVTFAEHVKINAILAERSQPGTSIGDRTRGKREIVALLSGTLRCGLCNGPMANGGVNYRCYARQAEGESSCKGVSTERTRVDSAVEIMWLNHVLRLAPDSPTIQAIARDWLSYQDPERDARKAHVNAALESAVGREMKLEKEFFVMGRMDEDKYDRLREQVSAQIAELKAERAELSEEADLSPLMDPASLAELWQGAGIGGQRALLKAAAKGITLIPSKYRGDRTPILDRLIPEWRDGRGNPAEDAAWDRWEERRTQAAV

SEQ ID NO: 16614 - protein, 559 aa, synthetic construct
MKTKLYSYIRFSSMRQSDGSSYERQIRMAREIAAKYDLELVNDYQDLGVSAFKGANSKTGALSRFLDAIGRSVPVGSWLFIENLDRLSRADIVSAQELFLSIIRRGITIVTGMDNKIYSLDTVTANPMDLMFSILLFIRGNEESQTKRNRTNSSALIKIKSHQENPQNPAVAIEEVGKNMWWTDTTSGYVLPHPVYFPVVQEIVELRKNGRSTAEILDHLNETYTPPPAVSNKKHSKWSRAMVERLFHTRALIGIKEVSVDGVNYELKDYYPRVIDDPTFYHLKKNIGARAWNFGDKEEVKPIPLLSGIGLLKCDHCGCAMVKVKGTNKRSDQYRYTCDATRSRRLDCEHPNWSFRGDQLEKAVLQLLADKIWIAEDKANPVPALKVQVDEISRKIDNLIALSAMTGATKELADQITTLNSERETLYNQIKMAEEEMYSVDSQGWEKLAEFDLEDVYNEERLKVRFKIKQALKRIGCSRIDRNKNLFVLEYIDGKTQRVVIENSRGTRKGQIFVDLKTINDRQILESNGLVLHPCLDMLTDKNWKPEEEIPGPLQEFGI

SEQ ID NO: 16615 - protein, 542 aa, synthetic construct
MQQLKTKRVGIYVRVSTEMQSTEGYSIDGQINQIKEYCDFHHFEVKDIYADRGISGKSMNRPELQRMLKDAKEGNIDCVMVYKTNRLARNTSDLLKIVEDLHKQNVEFFSLSERMEVNTSSGKLMLQILASFSEFERNNIVENVFMGQTRRAQEDYYQGNLPLGYDKIPDSKHELMINQHEANIVKYIFECYAKGHGYRKIANALNHKGYVTKKGKPFSISSITYILANPFYIGKIQFAKYKDWSEKRRKGLNDKPVIAEGKHSPIINQDLWDKVQMRKKQVSQKPQVHGKGTNLLTGIIHCPQCGAPMAASNTTNTLKDGTKKRIRYYSCSNFRNKGSKVCSANSVRADVIEDYVMKQILEIVKSDKVIQRVVTHVNQENQVDGAALHHDIAYKQQQYDEVQIKINNLIKTIEDNPDLTSVIRPSIQKYEKQLNDITNQINQLKNQQNEDKTLFDAKEISKLLQHIFHDIKHIEKSRLKALYLSVIDRIDIKKDGNHKKQFYVTLKLNNEIIKQLFNNKQLDEVHLSTSSLFLPQTLYLTI

SEQ ID NO: 16616 - protein, 476 aa, synthetic construct
MRCAIYARVSTEEQATEGYSISAQKKRLTSFCEAQDWDIIGYYVDEGLSAKNTKRPELQRMIEHIEKGIIDCVLVYKLDRLTRSVLDLYTLLEIFEKHNCKFKSATEVYDTTSALGRLFITMSAALAQWERENIGERIRVGQQEKVKQGKYTSARKPYGYSANHKKGTLQIIEEEAKVVREIFNDYLKGHSAMRIARHLNTIGTPGRDYWNEKAVMYILENPLYIGTLRWRKETEHYFEVEDSVPHIIEQEIFNQAQLLRESRKNTHPRSKYGSYIFSGIIKCPCCGKSLVGNYVVSKSKDGAKTKYKYYFCRGRKLGVCNMGNMSERKLEQIIIPQILSFYVDPTDDIVQTEDQSKEEIAKIKTALKLIEKRRKKWQYAWANDLLKDEEFSKLMREENEKENNLKSELNKLKPNENIRLNNDELKKIIQNIKLNWNTLNAEEKKMFMQIILKQVVVDRTGTPYSYKLNIREMKFN

SEQ ID NO: 16617 - protein, 530 aa, synthetic construct
MNKYDQARLEDVVQPGKRIVFYARYSTEKQEYDMQKHSVETFLQRYGCEVCKEYVDRATSAIKVPFEKREDLQNLIRDAEKGKFDVVITYKNDRIARRIEEHQLFREKMRELNIHVVVSSSSELYTVGEVVSQAVKDGLTRIEAALIQDRTKDTFRSKTKRGTWLGGKAPYGYTYRVIEENDGGRKTRKEYFKDEEDQQEAVMEIFRLFEIGYGFQQIANEIHSRKLDENMKWTKEKIRYIITNPFYCGFISMNRYDNGVLNDKSQWVEGTPKNMTPLFKREYWEYIMRLFEERKKRKVHSRDYSTPFLLRGILNCDQCKELMLAKNQQSGGEKYKGKKKKEQRRIYECKKCDFKLQANMIHERFRKDYLPYVLEQVTQRKKEQVESAIEERLKKEMQSLKGSKKKLDEEIAKLNQQIEALNVEMKSYYDKETIDKKVLEFMSIIMSHRTNKIHELHTVKDKKVGLQERIDRIAQTMQQKKYLPPQHLIHEFAKENVDTQKLRAFLLQFFKCIHVARDGNLVLSINEHLM

SEQ ID NO: 16618 - protein, 496 aa, synthetic construct
MKVLESYAVYVRVSTDRDEQVSSVENQIDICRNWLERNGFNWDEKRVFKDEGISGTLFVDRPSIQLLLQKAKAKEINMVVFKSISRLARDLKDSLEIREVFLAHHVRIISVEEGYDSIKAGKNDMAFELWSLFSAQYSRTLSSSITAALAVKVRRGEHIGKIPYGYNRKEQKLVINEEEAQVVQMMYKWYCEGWGYKKITNELNQLGIKSKTKKNWQMTSIQRILQNPIYKGTFILNQYTSVKVGGKKKQIRNPKEKWFVFPNHHPKVVEEEIWDRANRKKNKKNKTKITAWNEFRNLAKCAVCGSNMVIVQSHLKKKSGERTEWKYLKCSQYRRAGKHGCVNHVPIQYGDFRQFIINLLVEKGGSVTLKLQSNVEKGQEKKIKKLQQLMNTNQQKKKALLDLYLEKLINKEEFEKKRNDLEAEIIKADHELLVIQNGNHAQMDIKTIKQAFEQLQKQDQDLIYVFQALIKKINIHQDGTVDITYTFEMHKNYEES

SEQ ID NO: 16619 - protein, 515 aa, synthetic construct
MKTAIYLRKSRADLEAEARGEGETLAKHRSTLLKIAKEMDLNVLAVREEIVSGESLVKRPEMLALLEEIEDNKYDVVLCMDMDRLGRGGMKEQGIILETFKRSNTKIMTPRKTYDLNDEWDEEYSEFEAFMARKELKIITRRMQRGRIASVEAGNYLGTHAPYGYDIHRLNKRERTLTINSEEASVVRMIFDWYANEDMGANAIRSKLNDLGYKSKLGNEWNPYSILDILKNNVYIGKVTWQKRKEVKQPDAVKRSCARQDKSDWIIADGKHEPIIPESLFEQVQEKLNSRYHVPYNTNGIKNPLAGIIKCSKCGYSMVQRYPKNRKETMDCKHRGCENKSSYTELIEKRLLEALKEWYINYKADFEKHKQDDKLKETQVIQMNEAALRKLEKELVDVQKQKNNLHDLLERGVYTVDMFLERSNVVSDRITEITSTMENLKKEIKTEIKKEKVKKDTIPQVEHVLDLYFKTDDPKKKNSLLKSVLEKAVYKKEKWQRLDDFELVLYPKLPQDGDI

SEQ ID NO: 16620 - protein, 497 aa, synthetic construct
MTINNVAIYLRKSRAEDGLTDAESLENHRNVLTEIAERNSWKYEIFEEIGSSMSISERPQLRILLDSVTNKYIYDAVLVMDVDRLSRDRYDSSLIMKILRDNDVKIVTADGKITNLRDENDALMTDFKDIFSNYEYKQITKRMIRGKEASARKGRWSSGRVPLGYVYNKDTGMLDIDEDKAPIIREIFHMYANGTGTHFISLEMNKRGYRGAMGKPFGGKSIRDIITNEIYLGNATLRKFIKAGNTYKLRPEEEHIRHEGIYPAIVEKELFESVQRRYESQKMKPNRAKAGTHSLSGLVRCGYCDKVHAIQTRPTKGKVLKGCSKRDLITGVLCKNHGILYEKVMEEVFKDLSKYSATLDETVERLLEDKTMYLNSKDRELEALESQLKTIEAQLKRINYMFMNDLLSEEELGEMKPQKVKEKDHILKRITEVKELTVDDKLEEYEKVSKTLKNILDNREVLSDKDLNRLLSSVINRIVLYNYKDKDVEPRIVIEFK

SEQ ID NO: 16621 - protein, 515 aa, synthetic construct
MKTAIYLRKSRADLEAEARGEGETLAKHRTTLLKIAKEMNLNVLSVREEIVSGESLVKRPEMLALLEEIEDNKYDVVLCMDMDRLGRGGMKEQGIILETFKRSNTKIMTPRKTYDLNDEWDEEYSEFEAFMARKELKIITRRMQRGRVASVEAGNYLGTHAPFGYDIHRLNKRERTLTINSEEASVVRMIFDWYANEDMGANAIRSKLNDLGYKSKLGNEWNPYSILDILKNNVYIGKVTWQKRKEVKRPDAVKRSCARQDKSDWIIADGKHEPIIPESLFEQVQEKLNSRYHVPYNTNGIRNPLAGIIKCSKCGYSMVQRYPKNRKETMDCKHRGCENKSSYTELIEKRLLEALKEWYINYKADFEKHKQGDKLKETQVIQMNEAALRKLEKELVDVQKQKNNLHDLLERGVYTVDIFLERSKAVSDRINEITSTMENLKKEIKTEIKKEKVKKDTIPQVEHVLDLYFKTDDPKKKNSLLKSVLEKAVYKKEKWQRLDDFELVLYPKLPQDGDI

SEQ ID NO: 16622 - protein, 467 aa, synthetic construct
MKCVIYRRVSTDMQVEEGISLDMQRLRLEQYAKSQGWVVVNDYCDEGYSAKNTERPAFQQMIKDMKKNQFDIILVYRLDRFTRSVSDLHSILKIMDEYNVKFKSSTEIFDTTTATGRMFITLVATLAQWERETTAERVRDSMHKKAELGLRNGAKAPMGYDVKKGNLYINHTEAEIVKYIFEMYKTKGVVSIVKSLNSRGIKTKRGKTFNYLAVRYIINNPIYIGKIRWGEDVLTDIAQEDFETFIDKDTWYTVQQVQDSRKIGKVRLQNFFVFSNVLKCARCGKHFLGNKQVRSYDRIAVGYRCSSRHHQGTCDMPQVPEDVLEKEFLNLLEVAIVDLDATDEKPVELSNLQEQYNRIQDKKARLKFLFIEGDIPKNEYKKDMLTLNQEENIIQKQLANITDTVSSFEIKELLNQLKDEWFNLNNESKKAAVNAIVSSIIVDIIKPARAGKNPIPPVIKIIDFKLK

SEQ ID NO: 16623 - protein, 640 aa, synthetic construct
MRRKKDKSNGITALYERLSRDDDNAGESNSIVHQKQMLEDYAMKHGFTNLVHFTDDGWSGATFDRPSWNRLVEGVKNGEITACICKDMSRIGRDHLQVGFFTDILFREKEVRFIAINNGIDSDRQETSEFAPFLNIMNEWFVRDTSKKIKAVLKSRGSSGNAHTSNIPPYGYLKDPENPDHWIIDEEAAEVVRRIYRMTIEGKGPYQIARELSEEKIERPSYYLGKKGLGNHASNYDKENPYMWRGNQVTTLIARPEYIGKTVNFRTFKNSYKDKKTKRADKEDWVVFDDTQEPIVDEETWLLAQKLRQNVRKADPMGEPNVLTGKIYCADCGAPMYNHRQRKGRERIYYTTKGEKRISHSNPADCYECSTYNLAYQKYGRHCTCHHISTKALKSIILKTIQETCHYVSLNEREFVYSLQEESAMKDIAVSETVKNRIERNQKRVHELDMLIRKIYEDNVIGRLPDRLFQSMLTDYENEQNELNKIIETDTADMQRIIGGQNNMERFLKLVKKYENITELTPAMINEFIDKILVHEPQGKGADRTTEVEIYLNYVGQFQVPVEQHEPTEEERIAAEKEAERLRRKRESNRKYMKKIREKSKEFAEHERIPEEKSSDSNVCFEQNATSKSNRQKVKGEKIA

SEQ ID NO: 16624 - protein, 528 aa, synthetic construct
MLDNSNVAPGKNKTLRCAIYTRKSHEEGLEQEFNSLDAQRESAEHYIEAQRMRGWTALPDRYDDGGFSGGNMERPGLRRLLADIDAGKIDVIVVYKVDRLSRSLLDFMKMIDLFNEKGVSFVSVTQHFSTTDPTGRMFLGILITFAQYEREVIAERIRDKVAAAKRRGKYCGGVPILGYDVDRDNKKLLVNPDEARTVQYIFRRFIQIGSAKKLGQELNEQGYRTKAWTTKKGKVREGSEWNTAHIYRLLNNRIYIGEIAHKDRSYPGEHEGIIDRATWDKVQAILEDNKPVKVSMARTKMVAPLKGVIRCGHCGCAMGPTYARKNGRHYTYYICQKDSKRTVSRCPLKRIPAGDIEQAVIEQLSAVFRTPTLVAKTYFAARDIEQAERERLFKQKAQLEMELSQAREQALELMKPGSDQPGKTEMLTTVNRQAVELSKQLTHVSERCRAYRGNSITEQDVSEAFQNVEGFWEDLFPVERNRLIRLLVDKVEIRETGIDMELRTNGLTTLIAELAGLACEVTERRASR

SEQ ID NO: 16625 - protein, 527 aa, synthetic construct
MLNNNNTQNGQRKTLRCAIYTRKSHEEGLDQEFNSLDAQREAAEAYIESQKLQGWKAIPYRYDDGGFSGGTMERPALQRLLADIDAGKIDVIVVYKIDRLSRSLLDFMKMIELFNEKEVSFVSVTQHFSTTDSTGRMFLGILITFAQYEREVIGERIRDKVAAAKRRGKYCGGPAVLGYDVDRENKKLLINQSEAPLVKLIFRRYTQVGSAKKVAQELNEQGYKTKSWTTKKGKERIGTEWNTAQVYRLLNNRLYIGEIAYKGKNYPAEHDALIDQNTWDKVQALLSENNRTKMSKARVKMVSPLSGVIRCGHCDSAMGITYTNKGDRRYSYYICEKDTKRAVSRCPLKRVPAGDIESVVLDQLGAVFRTPTLVAKTYFAAREIEAEERERLQVQKKELEQSLQSVRQEALKLMSPDNDDPDRNSRLPLVNQQAVDLTKQLTNVSARLKVIDTEQISEGDVSEAFQSVKTFWEDLFPLERNRLIQLLVETIEIRETGIDMELKTNGLTNLVTELAGLACEVRERSNS

SEQ ID NO: 16626 - protein, 544 aa, synthetic construct
MAETVELQEKKAVAYSYVRFSTARQELGDSLRRQVAMAEEFCAKYGLDLHPVSYRDLGVSAFKRKNVERGALSAFIDAVKTGKVEKGSYLVIEQFDRLSRAEVDVALKLLLDLVHSGIKLVTLVDEKIWDRESVKDIGNLILAIVFMSRANNESAAKADRLSQAWTQKKKAALESGKIMSRECPRWLTVNADKSAFVVLEDRAESVRRVFAMRINGHGVVSIVNRANREMWPVPGKGDTWHTSLVGRLLSNRALLGEYQPHRSGSEDDKRIPVGELVRDYYPAIIDEQTFLRAQAVRERKGAFPGRRDISYRNWLQGLLKCSCGHSFVRKNKTSSKQPGYARYYCTARNRGVTDCPSMNAREIETAIIHAVSGIAPHFWNGTARLEELNTLLDVQQVDLTAAVSQRDRFAEAIGASKAPIPVLLERLTAAEIEVEKAEKALATTRAEISELQGDSDSVFENIVKAVENVDSLDARAALREDLSRVLVKCVVDVKAGIVNVYIRGEELPLTVPLREDAVIPGAAAGQMTEEEFRGTFGRGPDELE

SEQ ID NO: 16627 - protein, 564 aa, synthetic construct
MSKLSKPKVYSYLRFSDPKQAAGSSADRQMEYAARWAAEHEMQLDVSLTLRDEGLSAFHQRHIKKGALGVFLRAVEDGRILPGSVLVVEGLDRLSRAEPIQAQAQLAQIVNAGITVVTASDGRKYNRERLKAQPMDLVYSLLVMIRAHEESDTKSKRVKAAIRRQCEGWVAGTWRGIVRNGKDPHWVRQAENGAFEFLPERELAIRTMIDLFLAGHGAIEIARILSERELYVSNAGNYSTHMYRIVRNRALVGEKSLTVDGEEFRLAGYYPALLTPDAFATLQEAMSERGRRKGKGEIPNILTGLSISSCGYCGLALVSQNTAIRPAKGRAFTRRLGCSGATFNTGCPVGGTCDSRIVERALMHYCSDQFNLARLLEGDDGAARRVAQLAVARQRAREIETQIQRVTDALLSDDGVAPVAFMRRARELESELEQQHREIEVLEHKIAASNAHEIPAAAEAWAQLVDGVLALDYGARMKARQLVADTFRKIVLFQRGFTPFGNAPADRWKRSGTIGLLLVTKRGGMRLLNIDRKTGQWEAEDNLDLAPHHADEIPLPPTIQGMEC

SEQ ID NO: 16628 - protein, 439 aa, synthetic construct
MGRKITKIERTAELPSRQRVAAYARVSCGKDEMLHSLAAQVSFYSNLIQSNPEWEYVGVYADEAETGTKDSRPEFQRLIADCRAGCIDLVLTKSISRFARNTITLLATVRELKDLGVGVSFEEQNLHSLSCDGELMLTILASYAQEESRSVSENQKWRIHKNYTEGKPSNNIRIYGYAYSKGKLTVIPREAEVVRMIFADYISGMGKNAIMKKLTRLGIPTKCGGRWSESTVGSILTNEKFIGDTCLQKGFIADHITKHWKPNSGELPKYYVEGSHEAIIDRETFEAVQAEMARRAAKANHPRKSTFSEFSGLITCGQCGAKFRKKINGIGTKYAKATWACATFTYRGKDQCGAKRIPEDILKAKCAEALGFHEYDAEKLKAKVAAIAVPDDGVFVFTFKDGTGRTLTWENPSRRNSWTDEMKAAARKKAKEGHANGKC

SEQ ID NO: 16629 - protein, 527 aa, synthetic construct
MANVRVIPATAPIVSAQVTNAACKRRVAAYARVSTDSEEQLTSYEAQVDYYTKFINNRSEWEFITVYTDEGISAVNTKKREGFKQMVADGLAGKFDLLVTKSVSRFARNTVDSLTTVRKLKEKGVEVWFEKENIYTLDSKGELLITIMSSLAQEESRSISENVTWGQRKRMADGKITLPYKQFLGYCKGEDGLPKIVPEEAEVVRLIFRLFMEGKTYSAIAKHLVKYGFPTPAGKETWQACVVQSILTNEKYKGHALMQKTYCANFLTKKMVKNTGQVQQYYVEDSHPAIVDPDEWEAVQAEIMRRKKLGSIGRCGSPFSGKIVCGECGGWYGKKVWGSYKSDKTYRREVYRCNDKYKGEHKCETPAVTEDEVKERFLTAFNTLMENRDGLIEDCRLAQSTLCDTTAIDTELAELLREIEVVAELSRKAIFENARTAQSQNDFNERNNGYLERHRKAMEQIDMLEAAKQERLAKSKTLEIFIRDIESRPLVITEFNEALWLAVIDRVAIATDGAMTFTFRNVAEVTV

SEQ ID NO: 16630 - protein, 548 aa, synthetic construct
MKVALYARVSSEAQDVELSIAAQLRALRDYAGKNNYQITYEFIDEAESGRTAARPEFKRMIAMSKSSIPPFEAILVWKLNRFARNRADSITYKLLLQKKGIKVISINEPLDDSPTGKLMEGIIESLDEFYSANLGQDIKRGMKENALRGFYNGSQPPLGYELVKVKDGPKQRNKLAPEADTSPGVKTVRYIFALADKGKGCKEIANILNREEYITKAGKPWGRTTVHKILCNEAYTGTLVWGARPSQGLAKNEEAVRLENAWPGIIDKETFQRIQQSMVSRQPKNTHPRTVPSQYLLSGMAFCSCGAALTGHSAKSGQYAYYQCNRKFKQGNGVCNCQAIPKTKLESAVIKQIKSKVLTEENLEELVKQVNEELESTSSHHKEKLAVLDAELDDIRQRLNRLYEAIESGKLNYDDLAPRIRELRERQSKLEKSRVLAEAEMVADSDDNFNLGMVKAYANDLKQLLNESEITDCKTFLKTFVKKIETDSRNVSLKYTLPLPGTNRRREVLPIDTFGGAEGIRTPDLLLAKEALSRLSYSPTEHHYTKFE

SEQ ID NO: 16631 - protein, 616 aa, synthetic construct
MTDYSKITALYSRLSVGDEDRDGGESNSIQNQKIFLENYARGQHLTNIRHYIDDDESGRFFDRSAYSRMMDDVENGKIGVCIMKDLTRWGRDYLQVGNAMEIFRRNNVRFIAVNNGIDSEKPDTLEFAPFINIMSEWYAKDISKKVKTGIKTKGMSGKPIVTEAPYGYVKDPDNKDFWIIDEEAAEVVRLIFRLFIGGRNRNQIAVYLTQEQIPTPTFYMKDRGRGTCKNKTLNEDNRCKWNKATLTNILTRQEYCGDVVNFKTTKHFRDKHNHYVDRSQWHITENVHEPIISRSDFETVQRILENAPVKRPNGDGEIHPLSGLLFCKDCGAKMHIRIDYRNGGKRHVAYCSEYHKGKAKNPKCHSPHIMDADLLMQTIAEVLKKIEDYSISNRAEFEALVKKNLAMQQTDQSKKQQKRIPQIMTRLEQIDKVLNKLYEDNALGTIPQDRYEQMSQKYSEEYYTLKAELAKLQDQLSAYENAGGRAQKFLKLTERHAAFTDLAPAILNEFISRIEVHERDQKRARYAIQHISIYFNYIGKFENEVTQLAEPTEQEIRQMREEIEEAKKEKSRAYHRNYSREYRARNLEKQREYDRMKAREYRARRKAQAAAAQPTQ

SEQ ID NO: 16632 - protein, 556 aa, synthetic construct
MAMMNEMEYRTIGKALAGGYRAAVYCRLSKDDDLQGESASIANQRDMLEKYCEKQGWEVVAVYQDDGFTGLNMERPDLQRMLRAIERRQINLVITKDLSRLGRNYLQTGHLIEDFFPRNGVRYIAMNDGIDTLRDNNDIAPFKNILNEMYSKDISKKVHSSYLLKAQKGQFTGCLAPFGYRKDPEDKNHLLIDEETAPIVRLIFGYALNGHGPNYIRRRLEEEKIPCPTWWNRERGLRNTRTKWEKKDPENGRYMWDFSVIKDLLMNPVYTGAIASQKKDYRFKIGTMGEKKPEDWIVVEGQHEPLIDRMSFDIVQNKLKSRQRPGQTNEISLFAGLIKCGECGKSLTIRYTNAKHPQQIYSCKTYNAFGKNHCTQHRIDYDTLYSHVLRKIRECARAALMDGEAVADRLTNTCEAEQREQREAMERSLTRDEERIEVLDKMVMRLYEDMIAGRISEQNFNTMLEKTQTEQTELKTKVSEGRKRLSDEVQLANDAKQWVEAIQEYANITELDAATLNRLIKEIVVHERIDEDKTRHISIEIHFNLKPIPEVEQVTA

SEQ ID NO: 16633 - protein, 707 aa, synthetic construct
MSRTSRITALYERLSRDDDLTGESNSITNQKKYLEDYARRNGFENIRHFTDDGFSGVNFNRPGFQSLIKEVEAGNVETLIVKDMSRLGRNYLQVGFYTEVLFPQKNVRFLAINNSIDSNNASDNDFAPFLNIMNEWYAKDTSNKIKAIFDARMKDGKRCSGSIPYGYNRLPSDKQTLVVDPVASEVVKRIFTLANDGKSTRAIAEILTEEKVLTPAAYAKEYHPEQYNGNKFTNPYLWAMSTIRNILGRQEYLGHTVLRKSVSTNFKLHKRKSTDEEEQYVFPNTHEPIISQELWDSVQKRRSRVNRASAWGTHSNRLSGYLYCADCGRRMTLQTHYSKKDGSVQYSYRCGGYASRVNSCTGHSISADNVEALILSSVKRFSRFVLNDEQAFALELQSLWNEKQEEKPKHNQSELQRCQKRYDELSALVRGLYENLISGLLPERQYKQLMKQYDDEQAELETKMETMKTELAEEKVNSVDIKHFISLIRKCKNPTEISDAMFNELVDKIVVYEAEGVGKARTQKVDIYFNYVGQVDIAYTEEELAEIEAQKKQEEQQRLARQRKREKAYREKRKAQKIAENGGEVVKTKVCPYCNKEFIPTSNRQVFCSKECCYQARQDEKKADREAERGNHYYRQRECAVCGNSYWPTHSQQKFCSEECQRVNHNKKTLEFYHHKKEKEKLQCKDLSQTKERVSDMNLSGTITTPA

SEQ ID NO: 16634 - protein, 614 aa, synthetic construct
MKGVIYARYSSDNQREESIEGQLRECKEYAERNDIMILGTYIDRALSAKTDNRPEFQHMIKDSAKGLFDVVLVWKLDRFARNRYDSARYKNILKKNGVKVISARENISEGSEGIILEAMLEGYAEYYSAELSEKVIRGLTDNALKCKYNGGTVPIGYYIDEQQYYQIDPKTAPVVLEMFTRYSEGATMQELVNLLNSRGMRSIRGGKITLNIMNHLLKNRRYMGEYSYRDVVKEDGIPAIVPKELFERVQERLAKNKKAPARHKAEDDYLLTTKLYCGKCGSFMVGESGTSHTMKVHRYYRCVNTKKKKLCDKKAVKKDWIEDLVVSYTMKAIMNDEVMERLIDTLMELQKRESTDLPLLKKQLAETEKGINNMLNAIQAGIFTPSTKQRLDELEETKSQLEISILQEEMHKPMLTREQIAFFIYRFRKFDVTKREQRQRLIDSFVNAVYLYEDKIILTFNYKDGSKTITLAEVEGSDLSVLGAVSKDVKKHRDSLYLLGFPVLSIFLFSCPPFQTAFPGPFLCQQKFPAYFLPMIQKLLQTGGMIMAKAGMRRPNPYDADNHGTENHHKMNRPENKQAQVPEIQGAAKNGNAKAGPIHAPNWARDDYKTGDHE

SEQ ID NO: 16635 - protein, 559 aa, synthetic construct
MKTKLYSYIRFSSMRQNDGSSYERQIRMAREIAAKYDLELVNDYQDLGVSAFKGANSKTGALSRFLDAIGRSVPVGSWLFIENLDRLSRADIVSAQELFLSIIRRGITIVTGMDNKIYSLDTVTANPMDLMFSILLFIRGNEESQTKRNRTNSSALIKIKAHQENPQNPAVAIEEVGKNMWWTDTTSGYVLPHPTYFPVVQEIVELRKNGRSTAEILDHLNETYAPPPAVSNKKHSKWSRAMVERLFHTRALIGIKEVSVDGVNYELKDYYPRVIDDATFYHLKKNIGARAWNFGDKEEAKPIPLLSGIGLLKCDHCGCAMVKVKGTNKRSDQYRYTCDATRSRRLDCEHPNWSFRGDQLEKAVLQLLADKIWIAEDKANPVPALKVQVDEISRKIDNLIALSAMTGATKELADQITTLNSERETLYNQIKMAEEEMYSVDSQGWEKLAEFDLEDVYNEERLKVRFKIKQALKRIGCSRIDRNKNLFVLEYIDGKTQRVVIENSRGTRKGRIFVDLKTINDRQILESNGLVLHPCLDMLTDKNWKPEEEIPGPLQEFGI

SEQ ID NO: 16636 - protein, 559 aa, synthetic construct
MKTKLYSYIRFSSMRQNDGSSYERQIRMAREVAAKYDLELVNDYQDLGVSAFKGANSKTGALSRFLDAIGRSVPVGSWLFIENLDRLSRADIVSAQELFLSIIRRGITIVTGMDNKIYSLDTVTANPMDLMFSILLFIRGNEESQTKRNRTNSSALIKIKSHQENPQNPAVAIEEVGKNMWWTDTTSGYVCPDPVYFPIVKEIVELRKNGRSTSEILNYLNDTYTPPPAVSNKKHSKWPRAMIGRLFHTRALIGIKEVSVDGVKYELKDYYPRVIDDATFYHLKKNIGARAWNFGDKEEVKPIPLLSGIGLLKCEHCSSAMIKVKGTNKRADQYRYSCEGIRSHRFDCEHPNWSFRGDQLEKAVLQLLADKIWIAEDKANPVPALKVQIDEISRKIDNLIALSAMTGATKELADQITTLNSERETLYNQIKMAEEEMYSVDSQGWEKLAEFDLEDVYNEERIKVRFKIKQALKRIGCRRIDRNKNLFVLEYVDGKTQRVVIENSRGTRKGRIFIDLKTINDRQILESNGLVLHPCLDMLTDKNWKPEEEIPGPLQEFGI

SEQ ID NO: 16637 - protein, 508 aa, synthetic construct
MKKAIAYMRFSSPDQMSGDSLNRQRRLIAEWLKVNSDYYLDTITYEDLGLSAFKGKHAQSGAFSEFLDAIEHGYILPGTTLLVESLDRLSREKVGEAIERLKLILNHGIDVITLCDNTVYNIDSLNEPYSLIKAILIAQRANEESEIKSSRVKLSWKKKRQDALESGTIMTASCPRWLSLDDKRTAFVPDPDRVKTIELIFKLRMERRSLNAIAKYLNDHAVKNFSGKESAWGPSVIEKLLANKALIGICVPSYRARGKGISEIAGYYPRVISDDLFYAVQEIRLAPFGISNSSKNPMLINLLRTVMKCEACGNTMIVHAVSGSLHGYYVCPMRRLHRCDRPSIKRDLVDYNIINELLFNCSKIQPVENKKDANETLELKIIELQMKINNLIVALSVAPEVTAIAEKIRLLDKELRRASVSLKTLKSKGVNSFSDFYAIDLTSKNGRELCRTLAYKTFEKIIINTDNKTCDIYFMNGIVFKHYPLMKVISAQQAISALKYMVDGEVYF

SEQ ID NO: 16638 - protein, 547 aa, synthetic construct
MKLLVTYIRWSTKEQDSGDSLRRQTNLIDAFYAKHKDDYYLLPAHRYVDKGKSGFHQQHKAQGSDFRRMFENVMSGAIPEGSLIVVENFDRFSRADIDTAIDDVRQILRKGVSILTLGDGELYDKSALTDPVKLIKHIIIAERAHQESLVKQKRIAQVWNHKTQLARELKKPMGKQAPGWLELSDDGSHYIVDEDKASLVNIIYDKRLSGMSMFAICKWLNEQGYPTINQRKVRISKTKKPDGNWSALSVKHILTSRSVLGYLPAKISSEDRKTVLREEIESFYPQIVTDSKFYAVQQLLEETGKGKTSSGDHWLYVNILKGIIRCKCGLVMTPTGIRKPVYQGTYRCNGNKESRCNYGTVSRKLLDTQLCSRLFSKLSQLHDEATDTAKLDELQRRLNTVDGELEKLTETLIQLPNITQIQEALRVKQGEKDELIVQLSREKARVKSVSSLDLSGLDMESVEGRTEAQIIIKRLVKEIVVSGNEKLVDIYLHNGNMIRGFPLDGKDDHTLTLEEATDEMQSLDDMLIFGEPVTRIYPAGDMEEVDA

SEQ ID NO: 16639 - protein, 547 aa, synthetic construct
MKLLVPYIRWSTKEQDSGDSLRRQTNLIDAFYAKHKDDYYLLPAHRYVDKGKSGFHQQHKAQGSDFRRMFENVMSGAIPEGSLIVVENFDRFSRADIDTAIDDVRQILRKGVSILTLGDGELYDKSALTDPVKLIKHIIIAERAHQESLVKQKRIAQVWNHKTQLARELKKPMGKQAPGWLELSEDGSHYIVDEDKASLVNIIYDKRLSGMSMFAICKWLNEQGYPTINQRKVRISKTKKPDGNWSALSVKHILTSRSVLGYLPAKISTEDRKTVLREEIEGFYPQIVTDSKFYAVQQLLEETGKGKTSSGEHWLYVNILKGLIRCKCGLVMTPTGIRKPVYQGTYRCNGNKESRCSYGTVSRKLLDTQLCSRLFSKLSQLHDEATDTAKLDGLQRRLNTVDSELEKLTETLIQLPNITQIQEALRVKQEEKDELIVQLSREKARVKSVSSLDLSGLDMESVEGRTEAQIIIKRLVKEIVVSGNEKLVDIYLHNGNMIRGFPLDGKDDHTLTLEEATDEMQSLDDMLIFGEPVTRIYPAGDMEEVDA

SEQ ID NO: 16640 - protein, 507 aa, synthetic construct
MKRVISYIRFSSEKQAKGDSLRRQSKMVTDWLKAHPEYYLDESLTFRDLGVSGFTGKHLKGGLGDFLTAIEKGLVKAGDTLLIESLDRLSRQDIDIASELLRRILRAGVDVVTLSDGEHYTSESLKDPLALIKSILIMQRAHEESLRKAERIQAAWDAKKEAAKAGIKVSKRCPAWLKLNDDRKTFSVIPEKVETVRRCFQLRLEGKSIWAIVKALNDEGHQSMSQYKPGKFGQTSVQDLLKNRSVIGYFTPKGCEEISGYYPAIIDETTFYKVQQLSYARYGRKPASDKPLSVNLFKGVIRCSECGHALIITGFSDTRSGIYRCPLRNENRCSAKGLSRKQTDGTLLALLSRLDRFDSDMTNTVDTLKLHREHISSNIEKLVQLSLEIEDLSAITSKLRQLKNELSQVDADIEKETQRLKSIDVGCLSDCDLTTKAGRIEAQLIIKSAVKEVVLNTAKRRCKVTFHNGKLIDLPITENPSEDVTEAIQSLSEVTERGLIDVDEVII

SEQ ID NO: 16641 - protein, 547 aa, synthetic construct
MKLLVTYIRWSTKEQDSGDSLRRQTNLIDAFYSKHKNDYYLLPAHRYVDKGKSGFHQQHKAQGSDFRRMFENVMSGAIPEGSLIVVENFDRFSRADIDTAIDDVRQILRKGVSILTLGDGELYDKSALTDPVKLIKHIIIAERAHQESLVKQKRIAQVWNHKTQLARELKKPMGKQAPGWLELSEDGSHYIVDEDKASLVNIIYDKRLSGMSMFAICKWLNEQGYPTINQRKVRISKTKKPDGNWSALSVKHILTSRSVLGYLPAKISTEDRKTVLREEIEGFYPQIVTDSKFYAVQQLLEETGKGKTSSGDHWLYVNILKGLIRCKCGLVMTPTGIRKPVYQGTYRCNGNKESRCSYGTVSRKLLDTQLCSRLFSKLSQLHDEATDTAKLDELQRRLNTVDSELEKLTETLIQLPNITQIQEALRVKQGEKDELIVQLSREKARVKSVSSLNLSGLDMESVEGRTEAQIIIKRLVKEIVVSGNEKLVDIYLHNGNMIRGFPLDGKDDHTLTLEEATDEMQSLDDMLIFGEPVTRIYPAGDMEEVDA

SEQ ID NO: 16642 - protein, 507 aa, synthetic construct
MKRVISYIRFSSEKQAKGDSLRRQSKMVTDWLKAHPEYYLDQDLSFRDLGVSGFTGKHLKGGLGDFLTAIEKGLVKAGDTLLIESLDRLSRQAVDRASELLRNILRSGVDVVTLSDGEHYTKESLRDPLSLIKSILIMQRAHEESLRKAERIQAAWDAKKEAAKAGIKISRRCPAWLRLNDDRKSFSVIPDKVETVKRCFQLRLEGKSIWEIVRTMNAEGRQTLNQYEAGSFGQSSVQDLLKNRSVIGYFTPKGCEEIAGYYPAIIDETTFYKVQQLSYARYGRKPASDKPLSVNLFKGVIRCSECGHALIITGFSDTRSGIYRCPLRNENRCSAKGLSRKQTDGTLLTLLSRLDRFDSDTTNTIDMLRLHREHISSNIEKLVQLSLEIEDLNAITNKLKQLKNELSQVDADIEKETQRLKSIDAGCLSDCDLTTKAGRIEAQLIIKSAVKEVVLNTAKRRCKVTFHNGKIIDLPITENPSEDVTEAIQSLSEVTERGLIDVDVVEI

SEQ ID NO: 16643 - protein, 582 aa, synthetic construct
MTNPASRPKAYSYIRMSSAIQIKGDSFRRQAEASAKYAAEHDLDLIDDYKLADLGVSAFKSDNLTTGALGRFVAECEAGEIEAGSFLLIESLDRLSRDKILDAFSLFARILKTGVKIVTLSDGQVYDGSSDQVGSIYYAISVMIRSNDESKIKSTRGLANWSQKRKLAAEHGVKMSSQCPAWLKLSDDRKSYLIDKERAKIVQRIFEASASGKGANLITKELNRDNVPTFGRGALWAEAFVSKTLRNRAVLGEFQPGQYVNGKRQPAGDPIPNYFPPVIEEELFDIVQASLRGRLLAGGRRGEGQSNIFTHVAFCGYCGSKMRHRSKGSRVKGNPPHRYLTCFNRFNGPGCDCKPLPYAAFERSFLTFVRDVDLRGLLEGAKRKSEAKTIADRITVNQEKVKKADERIRDYLMKIEGAPDLAEIFMERIRELKTEKDDLVRSIEESNDALSKIKSDNVTDEELASLISTFQNPCGENRIRLADRIKSIIERIDVYPNGEIRKDDPAIDLVRASGDPDAEKIIAAMNAGSRLKDDPYFIVTFRNGAVQTVVPNPSNPDDIRVSVYAGEKTRRVEGSAYEYESD

SEQ ID NO: 16644 - protein, 541 aa, synthetic construct
MTTPASRRAAIYARFSTDFQSDQSVEDQFAICRALAHREGFSIVQTYSDRAKSGASILGRDGVQALIEDAKAAKFDVLIVEALDRLSRDMADLALIFRDFQFRGIEIRAVHDGVADTVTIGLRGLVGQLFREDGAKKVRRGMAGVIRDGRYAGGRAYGYAPTPGEPGKLRIVEEEAQIVRRIFAEYAEGRAPRDIAAGLNRDNIAPPRGAAWNASTINGNRERGHGIIQNPIYGGEIVWNRVRMVKDPSTGKRISRPNPESEWQRAPAPHLQIIDPDTRAAAIARKGAHAPAPRGPRRYTRSILSGLLKCGRCGSGMVKHDNSAGRPRIRCSRVAESGCCDNKRRYYLDAIEQGVIAELRAQLDQPELLAEFIQTYHEERRRLAGTAARGRIDKEKRLADIRRQLVRIADMLAEGAAAFDVMRGKMEQLDQERRELEAALAAQAESESVVTLHPQAVARFRQMLEALATEMSAENPLAHAAFRELVERIIVHPTPTGQEQRVEIVGRLAALLDLKGLGRPAAAVGGFLVAEEGLEPPTQGL

SEQ ID NO: 16645 - protein, 595 aa, synthetic construct
MRAIGYARVSTTKQDLARQRCKITNFCGENGYELEFIIEDFGISGATLDRKGYQRLNSLTDNDCDVIVVSEISRLSRKEQITEALNDIQQILNNGISVILLDDSAKVYKAKENLNISELLLLIIQLWGAAQERNEIKRKNQDGKQALFKSNPYAVVDAKIPYGFRSVPNTISNRPKYLLEQDPEEVEVVKKIFELVLDGKTLYGVMQYLNDRNIMIRKGMPSISILSRIIHNELYIGIRKRTQSYGKVKGKEDVAIQHIEPIISEEEFRRAGERIEINNKYISTARVYFNPFKGIIRCRCGRSMMVKPKKRENGVTILTYRCSCNESRNSSKFCSVNIDETSYELTNSVIKSLFIQRSQEIIDYYKETGQTRVNELNEIIDGIAKKIDIANLRKEELNNRTKQNVQKLLVATNEVFVKALEQDQAKTDADIKKVDSEVASLRRKEREIINQIYSIKKAYSNIDAYERISKISNDELTEMYHLYLEKIEYYPITTMKGFYKVLFKSGMIFYIAITKVRCSPAAYIVDADVNLETGDMTFKYDMATADGTFSFSPTQIKTVNIKDFFLSEWTEYSFAVRLNLDLSYRERYTKQLEDK

SEQ ID NO: 16646 - protein, 477 aa, synthetic construct
MKDSKSKTVIIYNRVSTIMQDKNESLTEQTDECIRYCKTNGYEIYKILKDVKSGTKDDRAGYLELKKHIKRRDFDILVVLETSRIARKMKELVLFFSLLNENNIEYISIREPNYNTTTPDGKFAMNIRLGLIQFERDNTAERVTDRLYFKASKGQWVNGKPPIGYKLVNKRLEIDEEKAEIVRNIYDDFLNGYSLNQINNKLQFSWGSKQVKRILTNPTYKGYIRYGARSNRKKNNREAFIVKGWHEAIIPEDKWEKVQEMYKSLNRKASNTKPTLLSGLLKCKECGNNYIRKRGGSYDKNLYYGCNLNNLRYSDKFFYKDIPECSSATIKGDLLEKAVIDTLKKQINDLNFNDIEIDKKRQVNIKQIDNSINKFKNRLNKIYELYIEDEIPKDKYLKDKKDIEARIISLEKQKKSFGEIEVEKSNNEMIQEYFSKIDLSNIEEANRILKIIVNKIVVYKKKKTPKDDFEVEIYLNI

SEQ ID NO: 16647 - protein, 510 aa, synthetic construct
MKRAVAYCRFSSSNQREESIDAQVRAIKEYCDKNKLKLLKIYKDEAISGTSTKDREMFLEMILDCKKNLFDCVIVHKYDRFARNRYDHALYEKILNDNNVKLISVLEQLVDDSPESVILKSVLAGMNEYYSKNLSREVKKGKKENALKAIHNGGIPPLGYDLDVNKKYIVNKKEAEAVKLIFELALDGVGYVSIADILNKRGYKNKRGKEFKKISIRDTLLNIKYIGTYYYGLKDGHGRLQKEPIIIENSHEAIIDKDIFYKVQSKMKKNLKGPRNRNGQLYFLTGYCVCGECGGPFSGGYRSVNRNGSVSYGYYCQKKKRKETKCNNKAIRKELLETFIFDIIKKEVFNDEKVEKIIKDIISFSENKKLIREEEIKEYTKEIEKLQKITLKLLEKNLEGNILDEIFNIKNNELKEKIQVLREKIYSVKNITKINEKELRKYLIKFKESANEQAKRKVVEAFVQEIRVYRDKIKIVLRKFPKDLDMVKIGGDDESRTRVRNHNDHKLLQV

SEQ ID NO: 16648 - protein, 449 aa, synthetic construct
MKQVIGYLRQSTMKQQSLAAQKQAIEAIAEKHHIQHINFYSDKQSGRKDNRSGYRQMTQLIQQGQCDILCCYRLNRLHRNLKNALKLIKLCQTYRVHILSVHDGYFDMDQAFDRLKLNIFISLAELESDNIGEQVRNGLQEKAKQGRLITTHAPFGYDYHNGTFIINQNESPTVKAVFNYYIKGHGYKKIAQLLEEDNTYINRQPYQVRNIIINPNYCGRVNNQYGQFDNMFPSIVSTSIYEQAQRLRLQKQTKQTPSDNQLKQKIKCPCCNATLTNMTIRKKNHTLRYYVCPKNMNASRFVCDFKGINAQTLEDKVLEVCRDFYQNQRIYTKIKGAIDKRIKRQRNIEKHHILTQEQLIEKLAQGIIDAETFREQTQSLRQQPQRTTSINGHQIQHTIQNIIQKRFTLNILYPYIETIHITKDKNLIGIYFKNEPLNIVNQAMQSSIA

SEQ ID NO: 16649 - protein, 456 aa, synthetic construct
MKKIIRKIEKPLSMPLMESRRITCKKVAVYARVSTSHEEQQTSLEAQKDYYAKFIAEHPDWTLAGIYAEDGRSGTSYFHREAFKSMMEDSKSGKIDMILTKSVSRFARNTVDALQSIRKLKEYGIGVFFEKENIWTLDSKGEFLITLMTSLAQEESRSISENVTWGIRKRFASGKYYVPYRVFLGYDPGFVVNQEEAVLVRRIYRMALQGYGTTTIARMLTEEKIPTPGKKTKWCNRTVRSVLENEKYKGDALLQKTFVVDFLTHKAKINRGELPKYYVKQGHEAIIAPWLFDYVQQRLKERDPVSYNGVSMYNSKFVCGKCGAFYGPRPEHSNDKYRRIVWMCHNRFKKGKYCKNLRINAADLNKLVCQVAWASIKCRPGVLALCRKIAEGNDDLLKILTERVSGNTYSDMEDLAIIIKRITVFPDRRLAVELISGNYVYLSFNPDFPKHKYKLK

SEQ ID NO: 16650 - protein, 559 aa, synthetic construct
MLGIYIRKSVEREREKSINEQILLGQEFALENNMEYKLYNEGIISGQKNKENRPKFSELLKDIENKKITSVFIWDSSRIARNEGAWYEFAKLLSDMGALLYDNGVKADFRDENTFLFYTITSGMNAHFARVTAKKIKTVLKRNAIGGLVHGIAPYGFTADKQSKWTTHKDEVENVKTIFDLYEKGYGYIRIANYLNEMGINARYKTGWTPATIRYMIYNKTYSGRAKFNNIEIKVPQIIDPIRHDKLIASIGNRYKKPGAKSKRYILNEVLVCGKCGTRYTVSQRKRHSYYRCLSEVNRGVPKCFSKAVRSEHIDKLILEKVLLGNELYELAEQTYLEGGNVEQKKELEKKLSYHNSRIKKLEGELKRSYQVYVKGGVELDLFMSEKKRIDRQLLKTQDAIDNLNVDLERIKDTNRLLEDMSLDFNIDLPDIWKGETNPSMKFLKENAIKQAIRANRLEKNKETMVETMPFDEKVAMVEKYIKQIKVDYHNLPLKLTIEFNIPVPPMQLIMESRYYAAMDIKTKRMHLLKDLGKKPSFIYKRTKQELEENIKRLDINTL

SEQ ID NO: 16651 - protein, 679 aa, synthetic construct
MNNMDKKVLIYCRVSTQQQTTDRQKEELLKFAAENHWNVEEEDIFIDVISGFKKGEFRPEYVKMLERVEYGDIDIILFSEFSRLARNATELLEQIKLFIDKGINLYFDKQKLWVRDSNKDVGSIILLHVLAVMSSYEIELFVERSLSGKITKVQAGHGGGDERAYGYMHNENKQIVINPIESKIVTRIFEMYVGGYSSIQISEILNAEKVPAPYVRKLNEYKKNREAKGLEVKEYKFDTDNLKWRISTINRLMHNELYKGNRRITFYKPDPTNPLPLSERQDREIVYEYSEHVESLRIVSDELFQQAQDKLSKAHYNKNNAVRHENLLKHLMVCGECGANFSVGKSNETSKNYISGGRTYKCYGRVNRKDKPRTCTNGAELRQWKLDGLVLQLSIQMFAEINIQQTNILRIENIGKEIEELIQIKSSKNTELVEAENLYKKTLKRLIAIEDDEVANNLISDAKHKYDETKNVLRKAMDKLSREITTKRITIDNLKRLNANPLLINKMDEIRKNKDLVKTMIDEYIDKITIFRLHELWLLVVVAYKGGEEMWGTIKCARYKKEEMFYDELHCHYGVEFQGWLLNNTEHCFSYDKSTRTITYHGGSEIYVEFKSGEYDYDTFNQMIQKTGWMGCFPFYAYEDSGKDLSAPSNEDFGKSLQENRIDWKAHNEKVLERLLSKS

SEQ ID NO: 16652 - protein, 481 aa, synthetic construct
MITTNKVAIYVRVSTTSQVEEGYSIDEQKAKLSSYCDIKDWSVYKIYTDGGFSGSNTDRPALEGLIKDAKKRKFDTVLVYKLDRLSRSQKDTLYLIEDIFIKNNIAFLSLQENFDTSTPFGKAMIGLLSVFAQLEREQIKERMQLGKIGRAKAGKSMMWAKTSYGYDYHRETGTITINPAQALAVKFIFESYLRGRSITKLRDDLNEKYPKHVPWSYRAVRTILDNPVYCGFNQYKGEIYPGNHEPIISKEEYDKTQSELKIRQRTAAENVNPRPFQAKYILSGIAQCGYCGAPLKIMLGVKRKDGSRLKKYECHQRHPRTLRGVTTYNDNKKCDSGFYYKDKLEASVLKEISKLQDDADYLDKIFSGDNAETIDRESYKKQIEELSKKLSRLNDLYIDDRITLEELQSKSAEFISMRGTLETELENDPALRKNKRKADMRKLLNAEKVFSMDYESQKVLVRRLINKVKVTAEDIVINWKI

SEQ ID NO: 16653 - protein, 481 aa, synthetic construct
MITTNKVAIYVRVSTTNQVEEGYSIDEQKDKLSSYCDIKDWNVYKVYTDGGFSGSNTDRPALESLIKDAKKRKFDTVLVYKLDRLSRSQKDTLHLIEDVFIKNGIEFLSLQENFDTSTPFGKAMIGLLSVFAQLEREQIKERMQLGKIGRAKAGKSMMWAKTSYGYNYHKETGTVTINPAQALTIKFIFESYLRGRSITKLRDDLNEKYPKHVPWSYRAVRTILDNPVYCGFNQYKGEIYPGNHEPIISKEEYDKTQSELKIRQRTAAENVNPRPFQAKYILSGIAQCGYCGAPLKIMLGVKRKDGSRLKKYECHQRHPRTLRGVTTYNDNKKCDSGFYYKDKLEASVLKEISKLQDDADYLDKIFSGDNAETIDRESYKKQIEELSKKLSRLNDLYIDDRITLEELQSKSAEFISMRGTLETELENDPALRKNKRKADMRKLLNAEKVFSMDYENQKVLVRRLINKVKVTAEDIVINWKI

SEQ ID NO: 16654 - protein, 600 aa, synthetic construct
MKKEVKVIKGDTTLKRTASGCVERSIKRVAAYCRVSTDTEDQINSYNSQVEHYTEFIQKNNEWTLAGIYADEAITGTQVDRRIDFQRLINDCMNGDIDMIITKSISRFARNTLDTLKYVRKLKEFNVAVFFEEENINTLTMDGELLLTILSSVAQQEVENISANVKKGLRMKMERGEMVGFQGCLGYDYDPETKSISINEKEAEIVRYIFRRYIEGVGGMVISRELEEQGYLSPRGNKRWTETTVLGIIKNEKYKGDLMMGKTYTVDPISKRRLDNFGEQDKFYIENHHEPIISEEDFEKAQGIRLRRSKNRNTVANNGGKREKYSRKYAFSSMLECGFCGHNLSRRNWHSSSEYTKVIWQCVNATKNGKKYCPHSKGIEEEAIEKAFMESYRQVCHNNVEITNEFLKTVEEELKDNSLAKDLKKITNQLDKILKKEKDLVELRLNESISMDIYQDKYNEIAISKEKLLAEKRTLEVTLTDEKALKKRLEGFKKLLESNKYLEEFDRAVFESIVDKIIIGGTNDEGEIDPAMITIIYKTGKKDSQDGRLFKSRRKNAKEVNEKADSKLYPQSSDEVNNLCSYPMDNTRRDGSTFVQTRCR

SEQ ID NO: 16655 - protein, 481 aa, synthetic construct
MITTNKVAIYVRVSTTNQVEEGYSIDEQKDKLSSYCDIKDWNVYKVYTDGGFSGSNTDRPALESLIKDAKKRKFDTVLVYKLDRLSRSQKDTLHLIEDVFIKNGIEFLSLQENFDTSTPFGKAMIGLLSVFAQLEREQIKERMQLGKIGRAKSGKSMMWAKTSYGYDYHKETGTVTINPAQALTIKFIFESYLRGRSITKLRDDLNEKYPKHVPWSYRAVRTILDNPVYCGFNQYKGEIYPGNHEPIISKEEYDKTQSELKIRQRTAAENVNPRPFQAKYILSGIAQCGYCGAPLKIMLGVKRKDGSRLKKYECHQRHPRTLRGVTTYNDNKKCDSGFYYKDKLEAYVLKEISKLQDDADYLDKIFSGDNAETIDRESYKKQIEELSKKLSRLNDLYIDDRITLEELQSKSAEFISMRGTLETELENDPALRKNKRKADMRKLLNAEKVFSMDYESQKVLVRRLINKVKVTAEDIVINWKI

SEQ ID NO: 16656 - protein, 481 aa, synthetic construct
MITTNKVAIYVRVSTTNQVEEGYSIDEQKDKLSSYCDIKDWNVYKVYTDGGFSGSNTDRPALESLIKDAKKRKFDTVLVYKLDRLSRSQKDTLHLIEDVFIKNGIEFLSLQENFDTSTPFGKAMIGLLSVFAQLEREQIKERMQLGKLGRAKSGKSMMWAKTSYGYDYHKETGTVTINPAQALTIKFIFESYLRGRSITKLRDDLNEKYPKHVPWSYRAVRTILDNPVYCGFNQYKGEIYPGNHEPIISKEEYDKTQSELKIRQRTAAENVNPRPFQAKYILSGIAQCGYCGAPLKIMLGVKRKDGSRLKKYECHQRHPRTLRGVTTYNDNKKCDSGFYYKDKLEASVLKEISKLQDDADSLDKIFSGDNAETIDRESYKKQIEELSKKLSRLNDLYIDDRITLEELQSKSAEFISMRGTLETELENDPALRKNKRKADMRKLLNAEKVFSMDYENQKVLVRRLINKVKVTAEDIVINWKI

SEQ ID NO: 16657 - protein, 595 aa, synthetic construct
MSNNVEIIKANPLVTRRNDNSGSLSRRVAAYCRVSSDSDDQKNSYDSQVRHYREYISQHQDWILVDIYADEGISGTQVGKRQDFQRLISDCLDGKIDYIITKAIARFARNTLDTLKYVRLLKDKQIGVFFEEENIDTLTMDGELLLTILSSVAQQEVENTSAHVKKGLKMKMQRGELIGFQGCLGYDYNQDTKSISINEKEAKIVRYIFERYIDGIGGRAIARELDELGYKTPRGLDHWQDTTVLGIIKNEKYKGDILMGKTFTVDPISKRRLINFGEEDKYYIKNNHDAIISPEIFTQAQEIRLRRSGNKKTIANIKGKRERYSRMYPFSSRLECGFCGTVLSRRSWHSSSEYKKIIWHCTTSIKRGKKYCTHSKGIEEKAIENAFLQSYQQLFYENNNLTEDFLEIIKEELTDDTLKVELTKIVSKLNSLYKKEEKLVSMNLDGKISDSVYEDKFNQIQIEKEKLLEEKVNLEVTLKSEVDIKSRLENFKEILTSQKTLTEFDKDIFESIVEKIIVGGINSDGEIDPAMLTIIFKTGDSSTKDAKSYKSKRKNAKIDNDKLCFNSVTDEEKKCTNKENNARRDGSTFVQTRCR

SEQ ID NO: 16658 - protein, 519 aa, synthetic construct
MKKITKIGVNETLIQKKKLKVAAYCRVSTASDEQLISLEAQKAHYENYIRSNDEWEYVGLYYDEGITGTKKDVRAGLLSMIADCEDGKIEFIITKSISRFARNTTDCLEMVRKLIGLGVHIYFEKENINTGTMESELVLSILSGLAESESISISENTKWAIQRRFQNGTFKISYPPYGYQNMDGQMIVIPKQAEIVKYIFAEVLSGKGTQKVANDLNQKGIPSKRGGRWTATTIRGILTNEKYTGDVLLQKTYTDSHFNRHTNYGEKNMYLVENHHEAIISHEDFEAVDVVLNQRAKEKGIEKRNSKYQNRYSFSGKIICSECGSTFKRRIHSSGRKYVAWCCSKHIGNITECSMQFIRDEDIKTAFVTMMNKLIYGQKFILRPLLNRLRNQNNVASFRRIEELETKIENNMEQSQMLTGLMAKGYLEPALFNKEKNSLEAERERLLVEKDQLTRSVNGNFTKVEEVDRLLKFATKSQMLTAYEDELFENYVEKIMVFSREEVGFELKCGITLKERLVN

SEQ ID NO: 16659 - protein, 452 aa, synthetic construct
MKAAIYIRVSTQEQIENYSIQAQTEKLTALCRSKDWDVYDIFIDGGYSGSNMNRPALNEMLSKLHEIDAVVVYRLDRLSRSQKDTITLIEEYFLKNNVEFVSLSETLDTSSPFGRAMIGILSVFAQLERETIRDRMVMGKIKRIEAGLPLTTAKGRTFGYDVIDTKLYINEEEAKQLRLIYDIFEEEQSITFLQKRLKKLGFKVRTYNRYNNWLTNDLYCGYVSYKDKVHVKGIHEPIISEEQFYRVQEIFSRMGKNPNMNKESASLLNNLVVCSKCGLGFVHRRKDTVSRGKKYHYRYYSCKTYKHTHELEKCGNKIWRADKLEELIIDRVNNYSFASRNVDKEDELDYLNEKLKIEHAKKKRLFDLYINGSYEVSELDAMMADIDAQINYYEAQIEANEELKKNKKIQENLADLATVDFDSLEFREKQLYLKSLINKIYIDDEQVTIEWL

SEQ ID NO: 16660 - protein, 452 aa, synthetic construct
MKAAIYIRVSTQEQIENYSIQAQTEKLTALCRSKDWDVYDIFIDGGYSGSNMNRPALNEMLSKLHEIDAVVVYRLDRLSRSQRDTITLIEEYFLKNNVEFVSLSETLDTSSPFGRAMIGILSVFAQLERETIRDRMVMGKIKRIEAGLPLTTAKGRTFGYDVIDTKLYINEEEAKQLRLIYDIFEEEQSITFLQKRLKKLGFKVRTYNRYNNWLTNDLYCGYVSYKDKVHVKGIHEPIISEEQFYRVQEIFARMGKNPNMNRDSASLLNNLVVCGKCGLGFVHRRKDTVSRGKKYHYRYYSCKTYKHTHELEKCGNKIWRADKLEELIIDRVNNYSFASRNVDKEDELDNLNEKLKTEHTKKKRLFDLYISGSYEVSELDAMMADIDAQINYYEAQIEANEELKKNKKIQENLADLATVDFDSLEFREKQLYLKSLINKIYIDGEQVTIEWL

SEQ ID NO: 16661 - protein, 452 aa, synthetic construct
MKAAIYIRVSTQEQIENYSIQAQTEKLTALCRSKDWDVYDIFIDGGYSGSNMNRPALNEMLSKLHEIDAVVVYRLDRLSRSQRDTITLIEEYFLKNNVEFVSLSETLDTSSPFGRAMIGILSVFAQLERETIRDRMVMGKIKRIEAGLPLTTAKGRTFGYDVIDTKLYINEEEAKQLRLIYDIFEEEQSITFLQKRLKKLGFKVRTYNRYNNWLTNDLYCGYVSYKDKVHVKGIHEPIISEEQFYRVQEIFSRMGKNPNMNKESASLLNNLVVCSKCGLGFVHRRKDTVSRGKKYHYRYYSCKTYKHTHELEKCGNKIWRADKLEELIIDRVNNYSFASRNIDKEDELDSLNEKLKIEHAKKKRLFDLYINGSYEVSELDSMMNDIDAQINYYEAQIEANEELKKNKKIQENLADLATVDFNSLEFREKQLYLKSLINKIYIDGEQVTIEWL

SEQ ID NO: 16662 - protein, 624 aa, synthetic construct
MIKTFIYSRVSSQEQLSGGGLDRQETDVREYVTRNGLDQYEIVAMVDRGISGYDGSNMRDGELGKWYKDAITGMYWGSHLVLEAIDRFSRRDPMLAMEDFTVLVNKGGIKVHIVKFNTFINGDNLPMLSMMMNLAHSESKQKSDRISKGWQRRRRMALDNGTAITARTPYWIDVRDNEYRLNNSSIAVVEAFAMYKQGLSCGLIAKKLNELKHYFPYMWTKTAVQHIVDGLNTSGIIDAPRAIKTIKAFYKSGFSVEDIAKKMNAEFQFMKEWNAPAVHKLLQNKSVTGLVEIQKRKLIQEFDSDGKPLELRTKSEGEKYFESIYPQIISIDDFELIQKLLESNRKVDTKTAKGQTTGGTVTQNEDGELVKQFILSSLCRCYKCGGAMFNNIVRSKRKNGKVDTYSYLRCLNERDAHCDVKALNYPVIERAIIEHVKGLNFDTMFKGTNNSELELLKTREVELLRDIATYEDAIAARKAAGKNTSPVLVTSLVDAQDDLEALQKKIRAISGVTVNAEELTSLNESVFDVAEYELRNMVELELQKIIKRITFNCTEKNIYFITIQYNTGTVLQHGLKVDKKKGVIETYELHEGNKGYVSNGEVITPALIEAAESKNIGIFEGKVM

SEQ ID NO: 16663 - protein, 490 aa, synthetic construct
MKQRAKRALVVVRLSRVTDETTSPLRQREACFELCEQRGYEVIGTAEDLDISAGKTSPFDRPQLGDWLTNRRGEFDVLVTFRMDRIVRRLLDLADLIRWCQSNSVSLVSATETFLDLDSAFGDIIALLVAKVAEMELAAISERNRSAAQHNMRQGKYRGGPPPWGYRPEKIDGDWRFVQDDEQVAVINEVVRRVLDGEPLRQVAADLTDRAVLTPRDRVNQLKGREIRGYSWHSAKLREMLTSKSLLGHAVTASGSIRNDDGSPIIRATPILERDVFEQVQVELAGRENRKEPTKRSSSLLLRVLYCGVCGKPAYKLKGGKGRQDRYRCASAQYKSTCGNGMVLVADANEVLTDAVMFELGDKYRRDRVWDAGSDYAAELAEIDDTLADLTDQLGTGAFRKGTRQRERLDARIADLAERQTQLAAQATRPAGWTWVPTTELFRDWWESQTVEQLNLWLRSMDIQMWWNHQGIQTDMLHLERMAEQWSTLS

SEQ ID NO: 16664 - protein, 502 aa, synthetic construct
MENQPKRALIVTRLSRVTEATTSPERQMEICQVLCDDRGYEVVGHAEDLDVSGSVDPFDRRRRPNIARWLANEAEPFDVIVVYRVDRLTRSLRHLQKLVHWAEDNGKLVVSATEPHFDMTTPFAPVLIALIGTVAEMELEAIRERNSSAARHNIRAGRWRGGQPPWGYVSSNASGEWRLVPCPEQVELINEVAARVLGGEPLQRIAHDLTSRGIPTPKGRTEWNVTPLKRSLTSEAMLGYVISGDKPLRNDDGSPIVRAEPILSREVFDRVKVELESRSRRGQPTKRSSSLLLRVLYCGVCQLPAYQFNGGSHSKSPRYRCSSTGKSTKCENLTVRMDIADEAFTENLLDVFGDSERLERIWDTGSDHSVELADINEILEDLTGLLGTGPYKAGTPQRSALDARIAALATRQTALSAEAVRPSGWAWKPTGEMFAEWWDNQDTERRNVWLRSMNIKVTYNNSSGAVTWGLDWGDLKKFEEQLKFGKSAQRAVRQITEAAPDL

SEQ ID NO: 16665 - protein, 491 aa, synthetic construct
MGARVSVLSGPQKVSHEAQIDTATKWATAHDYPVVGAFEDLGVSASVPPDERPDLGPWIRERSHEWEVIIWSKLDRAFRSMRHCSDFIKWAETNRKVVVFAEDSMTLNYLNPSTGIDSILGELFVQIAAAFAQIELNRFKSRAEDMHRAIRPTTRWAAGLPPLGYQVVDHPSGRGKGLAIDSDAANLVREMADKLVDGWSFVRITEWLNESGKLTSQGRSRKARGLEPKGRWTTTNVIEILTGYRTLGIKTHKGQPVLDDNGEPIRLAPPLFTPERWDEVQRAAQLRKGKPRTPSDTSNPMLEVGFCAVCGSSLAQQFAKTRPRKSDGHVTHYRYYRCSRTPINCKTVFVVADDLDELLSEQFLLERGDRRVTERVFIPGEDNSYELDFINQRIELLREDRASGLFPSGEDELVYRNQMKQLLARRDELASVPVRQAGYENVELEKTYREVWPGATPEEKRKMLIDAEISIRLGESPGKSLRAELVIGTPY

SEQ ID NO: 16666 - protein, 515 aa, synthetic construct
MKTAIYLRKSRADLEAEARGEGETLAKHRTTLLKIAKEMNLNVLSVREEIVSGESLVKRPEMLALLEDIEDNKYDVVLCMDMDRLGRGGMKEQGIILETFKRSNTKIMTPRKTYDLNDEWDEEYSEFEAFMARKELKIITRRMQRGRVASVEAGNYLGTHAPFGYDIHRLNKRERTLTINSEEASVVRMIFDWYANEDMGANAIRSKLNNLGYKSKLGNDWNPYSILDILKNNVYIGKVTWQKRKEVKQPDAVKRSCARQDKSDWIIADGKHEPIIPESLFEQVQEKLNSRYHVPYNTNGIKNPLAGIIKCSKCGYSMVQRYPKNRKETMDCKHRGCENKSSYTELIEKRLLEALKEWYINYKADFEKHKQDDKLKETQVIQMNEAALHKLEKELVDVQKQKNNLHDLLERGVYTVDMFLERSNVVSDRITEITSTMENLKKEIKTEIKKEKVKKDTIPQVEHVLDLYFKTDDPKKKNSLLKSVLEKAVYKKEKWQRLDDFELVLYPKLPQDGDI

SEQ ID NO: 16667 - protein, 556 aa, synthetic construct
MAKRKTPPPPTAPSAALYLRVSTGRQAESDLSIPDQGRQLRAYCQAKGWPVAEEFVEPGNSATDDRRPAFQQMIDTATAKPPPFNVILVHSFSRFFRDQFLFEFYARKLAKNGVRIVSITQEVGDDPMGIMVRQMMNLFDEYQSRENAKHTLRAMKENARQGFWNGSHPPLGYRVITAEQRGERIKKKLEIDPIGAETVRQIFRLALHGVENSGPMGLKSIATYLNDKGITTRGGGRWGVGTVHHTLTRTTYIGEHVFNSRNWASQEPKDDTEHVVMAVPPLIERDTFEAVQRAMSLRNPRAMAPRFVNSSILLGGICFCGLCGKAMTLRTGKGGAYRYYTCCTNARQGPVGCEGMAVRMDLLDASVIDHLENRLLNPERLATMMDNIIDRRSEWIERRHRHVADLRKRATEADQRLQRLYLSIEQGIIDPGDPSLKQRVTTLKAQRDKADGDAQRAAKAIDGITPALTPDLLRRFSEATREMFRDEAGAYRRDLIRAVAQKVELLSPHEARICGSRVELLRTLASNNGVQSAALALPGFAPGWRALQDSNLRPFA

SEQ ID NO: 16668 - protein, 519 aa, synthetic construct
MNQKTISSDARVAVYIRRSRDEDGIGIEELLKNHRQRLQVFMNEKGFEGVEWFEEVASGGSIDGRPEFKRLLSNVQAGHYDAVAVIHEDRLTRGDEEDRGKIKNIFKATGTLLLTVDNRIIDYNNPTDLLTSGFTGLMSEYEKAQILRRFRDGKITAVQNGTPHSGTTAYGYTWDKNTKTAEVVQHEADVLRMMVDWYLKDGLSAGQIALKLNDLKIPSKRGGFWHSEVVSTMLQNDFYTGVVYYRKYKTEVDFVNDVVKYTSKLNDDPETVIKARGNHTPLITDYEHAEIIKRIEELRKYKSKDRRVRKNTYRLSGLIYCPHCGLCQGLMRRKGMANRTHVRKCLKKSTRRTPECDDTRGIREDYVFEAVKMRLQQYRDTLFAPTEPSDDNAAMNSLSRMIKAHEAAIEKARKHFDKIKEMFMNDIIDMDEMKEEKQRHSDIIKRNEAELTKLRMNKDFHDEERKEQQRKLWSSDDVERVFNNELSDSEMNDVLRLLIVRIVYQFNDEGGVDIEITYR

SEQ ID NO: 16669 - protein, 378 aa, synthetic construct
MRTVKAYIYSRVSSLQQVDAFGLERQISTVLDFLENAKLPAELGYQLDPSNHEVLESDKGLSGYAGHNFTKGSLGRFKERVRSGEITEGCLLIESVDRFSRKQGYDAMDECTFLIKRNIDIVEVETGQIYSYKLDHKLSALSTSIERAHQESKRKARISMKSWKHRKEASLANGGALNNNTPDWLSLSTDKLSYEIDYHRVETIKRIFQMYRDGYGVTHIVKVLNDEGNRYNGIGWNTVTVYNKLRDRRLNGFLVGKYKTIPKKINESTNETEKRILENLKIKKEAHDNAKRIYPVVVDDDLFLKVQSLMDRNVSNKKQRSTTTKQRNLFNGLTKCYECGSPMIVQSMSNGGLRCYRQRTKDEKCNSKMLRYSVTYAS

SEQ ID NO: 16670 - protein, 446 aa, synthetic construct
MQRQLEDCRKLAAERGWDVGHEYVDNDISAYSGKLRPGYEAMCSDLAAGVRDAVIVYNLDRLHRRPAELEDFVALCEAAGVNQVATVTADIDLGNDDGLFMARIFAAFAAKESGRKSARMKRKYEQKAAQGLPHGPNRPFGYDDDKMTIRESEAEVIRELVVRVIAGESVNSLTAWLNETGVAPVRGVRWASTAVRNIVSSPRIAGLRAYKGEVVGEAAWEPIITTVQRDQVLAALSVRSWNRKRSPRKYLLSGLCRCGRCQARMFSAARLEAGAHKRRYVCSSSPDHGGCGRMTVVAEPLEKLITDAVLTRLDSKTLADALAGKIRANPDTAALSTQVEAAQARLDELTGLYSSGAITAREWIMARDPITETITRLRREIADTADTGPLAELAGKGSALRAQWDDLGLDRCHAIIRAVIDHVVIKPGQPGARGLDMRRIDPMWRI

SEQ ID NO: 16671 - protein, 494 aa, synthetic construct
MKAFPILRVSTTAQVKEDGGLDSQLLYLQHWLEQHPDYTIESTLELDGYSAYTSKHRPLIERFVVSLPRNSTIVFSEVSRLARMGQKESLEFLFWIMNQGVSIAFAQTNTILKAQDEIDVMTMQQLSMLFEMSRSESAIKALRINNAFKLRLDRIREGSHFKTNNLSAWLKPNKQTKTYHVSDYDIETIQTAFNKRLQGSSVGDLHKWLVADRKPFGKMKGWTVNYVGKLLRMRQVLGEYQPVSIYQENGTTKRKPNGDPVLDYFPRIITNELFSQVQVTFRNEARGRTSASVINPYRGILKCKGCGGAMALNNSKSQGARLRCEAQRNKSRICTNKSMLFSLADERIQSFLRSFDATAFNSSKRSPDTLQLEIEALNQSIKQTSQALATVGVDVPELVTQIQGLTEKRNQLQHELMLPRDVPISPVDVNRDTNPERYNQSIRDLFKGIYLSPTHTKFVFNDILSQGIPTVTVDHEEHTGEIDSMKLIKDAYEL

SEQ ID NO: 16672 - protein, 609 aa, synthetic construct
MIRAVIYCRCSTEEESQKNALEKQVAEAESSVRQYGWVLVDRYVESRSGTTAKGRNEYKRLFNDLLTDKFDVIVIKSQDRLMRNTKDWYLFVDRLCTEQKKLYMYIENKFYSTDDALITGIKAILAEEYSRELSKKINNAHRNRQRDGGNVMLPGNAYGFKRMPDKSVALVEKEAEIKREMYRLCAAGYGTRTISTIMRNRGIVNRDGKPFTSSYILRMLRNPINKGTAVMGKYHFDFDSKRTIKNPKEKIYIHEDKVPRTVSDELWNAANEQIDKRSVKTKDGEDDIGKNPGKYQLSGKIVCGMCGQPYWRKVHRKHSNHELIYTWACSSYLELGRSDNLRARPNLRKVFLENEKGCDNINIAENEFYAVLEEICSNQYQKNKKKIIEKIMKLLSKSLNNQDGTKEIEKLEREQEDIERKMKFLVDKLIDGVLTDQMYKTKQEELEKKRDQNKKKILELTERTSNTQNIKDRLQEIETRLNDDDLFKKATIDDMLEEVDKIVVYPRYMEIYFSLSSVTGCMDLKIFDGDKKCFRVDYGNRLDYKGRQCDAREVVVDLIRENPRITGKMIAKEIGCSLSGANYKLKVLKKEGRIRFNGAGGKGCWEILE

SEQ ID NO: 16673 - protein, 539 aa, synthetic construct
MRTLIYARFSSDLQNSRSIDDQIRICRERAEIEGWEIVDIFTDYAISGAAGIGESQRPGLNALLARVNNGGIDQVLAETTSRIARHQGDAYAIRERLNYAGVRLFTLADGEIDDIKGWVKGFLDAQQRKDLAFNIKRAQKGVVAEGRAPAGLAYGYKRANRFDERGNVIRGLRSIDDEQAAIVRRIFAEYAAGDTARDIAIRLNREGVPGPTGGTWRVSTITGDRQRQNGMLQNRLYAGVIVHNRTSKVVDPDSRRVRIRPNPESEWISEPAPQLRIIDEHVWQAVCDRRAAIAHVPMRLQRKPKRLLSGLAVCGVCGGGWVVVTPRKMGCGRERDGGGCTNNRMITVERLEARVLNGLQEKMLDPELVAIFVQEFHREAQTAAAERKTERARLERKLAEASRKVERLVSAFAAGAGEFEEIRAVLTKARADRDQAAEALSEIEADNVVALHPSILDDYRRQMSELAAALSTDPDLRDEAVPIVRGLIERVTVTPSEGPKGVDIEVTGKLANILSLAAGKAVRGPGMFLLERAKGIEPS

SEQ ID NO: 16674 - protein, 689 aa, synthetic construct
MTGNDLLPVTVLKRKAVVYVRQSTPGQVQNNLESQRRQYELVDVARRWGFHDVEVIDDDLGRTASGTVDRPGFERLVSGLCTGKVGAVLCLDASRLSRNGRDWHHLLELCGLVEARVIDLDGVYDPCRPNDRLLLGMKGSISEFELGILRTRMLDAARAKARRGELRLSVPIGYIWHREYGLGLDPDIRVQEAIRLIFSRFRELGSARQVLISLTADNFHFPRPSDGRKTVSFDWVPVRYRSVISILKNPFYAGVYVYGKSEKRTEIVDGRARKSYGHSKPFGTWEVLLQDHHEGYIDWSEFERNQSHIAVNAFGQKGGIKSGRGGRALLAGLLTCGRCGRRLGVVYSGRPPGHPYYRCERINQMLAKPRCMTFGASRIDPAIGKEILRAVTPMAIEAAMEADRAHRDNLEERHRMVELDLQQARYEASLAERRYAACDPDNRLIAAQLENSWEAALRRVEACEAGLAQARQIDLAAPVPDFAGIATDLETAWRSPNVDMRCRQQLLRTLVTDIIADVDEEQREVILTIHWKGGQHSQLRIRKPKAGEHGQSTPEAALAIIRSMATRWSDADIAATLNRMGMQTGQGKTWTARRVGSLRTVHKIHGYRSAEKNGEWLTLTEAAKKLGVTAHRVRRLIKEGVLPTEQVVPDAPHQIRATDLEKDEVTQFPRHRGPCRIKMENQKSLFPDI

SEQ ID NO: 16675 - protein, 597 aa, synthetic construct
MPKITKIEPKIKALPQRKKVAAYARVSMETERLHHSLSAQVSYYSELIQKNPEWQYAGVYADEGITGTSTMKRPEFQRMLADCEAGKIDIILTKSISRFARNTVDLLETVRHLKELGIEVRFEKEHINSLSGDGEVMLTLLASFAQSETESISNNVKWGIRKRMQAGLPYANGHMNVYGYRWESDEMVIVPEEAAIVRRIYQNFLDGKSRQETEKEFAAEGIKTRAGAPWVDSNLKVILTNVTYTGNMLYQKEYIADPITKKVKKNRGELPQYYVENTHPAIISKETFDYVQAEMARRRELGCFGNKALTLNCFSTKIKCGQCGRSFVRSTRRNRAKMSRLGEKYTFWACTSHKKTNCSSCSSGTIRESVLKEECAKVLGIPEFDEDIFSERVERITVPESGTMIFEFTDGTTLEHHWYRNAKKESWTEENRKRASQYRRRHPVTRDDITCFTTKIRCEECGCNYRKQTCVMADGHQNAYWKCADKKNHPGKSLREDHLKEIINEVLGLDEFDEQVFLERIDHISVRNLTHLTFHFTDGSTAERDYEYSKEGVPWTDERREKQTEAIRDSFTPERRKKISENMKRIRSEKHWSSKRK

SEQ ID NO: 16676 - protein, 527 aa, synthetic construct
MEQQKKVTTIPASRTRFSSTPITEKKKRKVAGYARVSTDHDDQFTSYEAQIDYYTNYIKGRDDWEFVNVYTDEGISGTGIKKRIGFQNMIEDALAGKIDLIVTKSVSRFARNTVDSLTTIRKLKENGVECYFEKENIWTFDGKGELLITIMSSLAQEESRSISENCTWGQRKRFADGKVTVPFHRFLGYDRGPNGELIVNPEEAETVRRIYRLFLQGLTYNGIAKQLTNDGIKTPGGKDHWSISTVKSILGNEKYKGDALLQKSYTVDYLTKKTKVNEGEIPQYYVEGDHEAIIAPETFDLVQREMKKRGNGIMYHSGVHVFSSKIRCGQCGSFYGSKVWHSNSKYRKTIWRCNHKYDGCKKCTTPAIDDSEVKTAFLSAVNKLLETKAEVIANGKEMLPFLFKTDELEAERDRLLDEAQMVADAVQQNIVENARTALDQNAYKKHYDDLADRYDKLKTRIEELTAKIEETQSRKAGYEDFLKAFENTPESLTEFSLDAFNGLVDHLTIYANDDIRFTFRNGQEIKA

SEQ ID NO: 16677 - protein, 536 aa, synthetic construct
MTIIKTMDSTITRTTYCYSYHRISTRNQLKGGGIKRQIEDSSRFCEAQNWVMDTTFKLTDIGTSAYHGKNLDDRAALGSFLKAADDGLVKRPAVLLVESLDRLSRANIMDALELFIRILNAGISICTYHDRMIYSKESIQANFGPLLISITIMCRAHEESETKSKRVKRSWIQMREKIRNGGIGSKKIYPKWISTESGRPEIIESEAKIIREIFDLCVNHNMSYTDIIVEMRKRHNNNINLRSYQLNRLFRHKNVLGIYCTTGAQAGEEIKAYPAIISEDMYYKAKALIKERISVRVGQPTKYEINFFKTKLSCGDCGYAITSNRANRSTSYLCREKLKTKTACKQSSKITAKKFQPVLLYAISLIDKDDMLESAANSKKAKLSKAINTKQAELEDKQTRMDNLADLVAAGSKKGVQMVVQLEGEVDTILQDIATMQDQLDMLNSPTMAASIDHANEFGRKFILGQATKEDQEPFVQALGNIVEKIVIHSPEKEGQRTIAIIKLLSGIDIRVVVEKDYSADIFKGKKRIGRFTPKG

SEQ ID NO: 16678 - protein, 609 aa, synthetic construct
MGASVLVKGETSGNVLVPTGDMTTTRNPLAGSVFQTETLRGVRCVRLSVLTDETTSPERQRDADDAIAAELNISFGEGDALREAVDLDVSASKVAPFDRPALGSWLARPDDYDALVWWRFDRAIRSMSDMHDLAKWAKQHRKMLVFAEGIGGGKLVFDFRNPVDPVSELMMTFFAFAAQVESQSISDRVTGAMAAIRRMPLRWRGGGRPPYGYMPAPMPKEHGGTGWTLVPDPDAVKVIERIVRELLEGLTVSAIAVGLNADIIPSPRDHWAVKQGRKTGGKTGGVKGLVKDAFLWNPAVITRMLRNETLLGWKMHQGKPVRDGEGNPVMATAEPIMTREEFDRIGAVLDSRSIDNKERTDTDALLLRVIHCDACGGRMYLNKQESQKNQRPTYKCNPYSRGFKCEESAHIRGDWADEHVEAEFLRLVGSVQTTHVVEIPGYDPEPELLATLAEFNEHQAQQGRQKSRHAAAAWQERADALDARIATLENSEKREGQRIVTPTGRTFADEWAAADTAGRRAMLIEAGVRLDVRRGVRGGWRKLDTRRVDFTMRGELDPAAEAATDTAGDQDAESRNDTPPAPGSVARLVSESAPKSAPVAEPVRELVAA

SEQ ID NO: 16679 - protein, 540 aa, synthetic construct
MLKAKKEVLFLKKKILEGQFCIYLRKSRSDLEAEGKGEEDTYTRHMNNLLQLQKKLGINVTEIYKEKPITGERISARPEMLRLLNDIEDNRWDGVLVVEVERLARGDTLDQGIVSQAFKYSDTLIITPMRTYDPNDPNDEEYFEFGLFMSRREFKTITRRLQGGRIDGVKEGRYMGNIAPYGYQRIKLPGKGYTLEPHPEQAQIVQLIFSLYTDPDIDKRLGTQLIAHYLNDKGIPTMRGSMWIVVTINTILRNPTYIGNVRWKSRPLLKRRDSISRPRLQRKDWIEQKGLHPAIIDENTFNMAQQIMKANNNNPGPKKGVTVNPLAGLIRCGVCGSAVIMRQFGDKTPATLMCSMPRCKNVSAYFQLIEDRLLQGLREWLESYKVDWESKRPTINTFDDMKLKANQDAYKSLENKLKELSKQKSSLHDLLELKIYTIEVYLERSKNLDLRIEETKNSLEQTKQALEVYNKRESARTNIIPQIEHVLDVYNEAQTPEEKNQLLKLILGSVVYTKKEGGRWSGAQDKFTLELQPKLPELKI

SEQ ID NO: 16680 - protein, 501 aa, synthetic construct
MAKHGLEVDRHLEDAGTSAFHGKHAGSDGVLGQFLKEVRKGEIEKGSYLLIENFDRLSRDKIVRSNKIFTDLLFSGIKIVILDKNKIYDADNLDFGDWITALVEFERANAESQRKSDFSSKAWKLNRDKMHNGEIVTKKVPTWLKVENNTFIIDEVKIDRIRTLFRLSLSKGLQEATKEYNSLYGEKLAIHQAQYLLSNRKLIGEHQPKKIHYNENGRLIRKDEGNPIPNYYPQVIDEDLFLKVQSVITSRKPFSGRYSAQRYNVFRDLIFCRFCGGTIRYMNKGERDYFICTNSMTGKCGLKGQQSIRGKKVFGRFFKFTNGINIGTLLEENTNADEIKNELMKLENQKNKISNRLDDFKSQIKKMVMEGETIPETYNEIIVDLENSIIKYDAEIEIKNKELDKIISSFRSFYDLQGIDIEKIIYDKSQEAIEKRVQYNNELKNIIKKIQIDYLNDILHVEFSNGVNRHILNDELANEYNKDEIENSWASVVKSIAQKTN

SEQ ID NO: 16681 - protein, 586 aa, synthetic construct
MAKIWPYIRFSSEEQKHGDSRRRQRELVESFARRHEIVAEGSVIDDSLDLNDLGVSGYRGKNLLTGRFKVFLDAVEAGIVKPGDYLAVEALNRITRLDPMESLPIILNLIQEKGIKIAITSGSQIYKKGDDISSLYIALGELQRGFKESQEKGVRVKEAWNSKKKRAADLGEIATSRVPLWLAVDTTRLDSGTIKRTIREIEERVAVVREIFRLSDINIGAVATARMLTDRGVPTFTRENARKNSNYGDFWQVTYIRKILANRAVLGHYQPMQWLEVDGKRSRVNHGAEIKNYFPQIIGLELFDRVQLKKDSRKNEGQGNKGLKFSNLFTKMAFCSECGAVAHHVNKGKDPKKGGRYLVCYRAKYGSCAYKSWRYEKVESMILSYLAEADIKSIMRDDNKVDALINERYKIESEFISVSEMLENFRKDFKALNGRISNTERELAIENEARLVEFKSKLQSLDAEILDAIEQQKADIKQEVKALQEMESVADENTVFEIRSKINARLKLVVDRIVLNFALQVAEVRFKNGVVRYIHEDGVFGNIMPPPTPEQSLEDLRQIEEWSKLSDDEKRSTWADSAFPIVPLKI

SEQ ID NO: 16682 - protein, 570 aa, synthetic construct
MPRLISYLRMSTSEQLRGFSLERQRKLIAEFAAKNDLSVEEENTLEDIGRSSFSDDAQQKELTRFFENLNAGKYEPGDVFALENIDRLTRRGPIDALMKVNQIISKGLKLAIISDKEQRILEEIDVFSIITLSIDASRANKESQVKSDKGLFNWQEKRNLAASQKLAMTAQAPAWLDTEIFYIFDEEKKKNIKRRKYVLNEEKAETVRLIFDLYLSGNGALKIKNILNERNISTFKNAPYWEPSIITKILKNPATYGLYQPKKQGTGKRDLIAAGEPINDYFPPVITREIFEQCERIREGNGTRKGRKGKLFTNLFTGLLTCQKCSGPIHLINPGIDKRNKVQKSIYYLVCKRAKFTKECSTKRVRYDDFETALLKAIQEINLADVLNENNPLETLIKKQRSKETEINKKKKLIENFQRQFLENDGDLPAFMISQAKDAEISIKELEDQQREIASEIAQLNIYNSNVDNAIEELKEKPDYETRSKINLLFHEIIKNISLDVENQFYTIRFKNGVLRVVTAAGFVVTTEHQTTAEMAEIMRIEGTQDIPAEIANDPEKLIEYLRQFDFVDH

SEQ ID NO: 16683 - protein, 507 aa, synthetic construct
MKRVISYIRFSSEKQAKGDSLRRQSKMVTDWLKAHPEYYLDQDLSFRDLGVSGFTGKHLKGGLGDFLTAIEKGLVKAGDTLLIESLDRLSRQAVDRASELLRNILRSGVDVVTLSDGEHYTSESLKDPLALIKSILIMQRAHEESLRKSERIQAAWNRKKELISEGIKVSRRCPAWLRLNDDRKSFSVIPDKVETVKRCFQLRLEGKSIWEIVRTLNAEGHRSMNQYKPGKFGQTSVQDLLKNRSVIGYFTPKGCEEIAGYYPSVIDETTFYKVQQLSYARHGRKPASAKPLSVNLFKGVIRCSECGHALIITGFSDTRNGIYRCPLRNENRCSAKGLSRKQTDGTLLTLLSRLDRFDSDTTNTVDTLKLHREHISSNIEKLVQLSLEIEDLSAITIKLKQLKGELSQVDADIEKETQRLKSIDVGCLSDCDLTTKAGRIEAQLIIKSAVKEVVLNTAKRRCKVTFHNGKAITLPITENPSEDVTEAIQSLSEVTERGLIDVDEVII

SEQ ID NO: 16684 - protein, 563 aa, synthetic construct
MRAFLYCRVSSKHQTKQQGGTGITRQEATVIEYINDYQPDPKLGYQLSLDDHEMLDPDLGKSAYHGYNFTKGALGEFKRKVLSREIKEGALVIENVDRFSRLPEHEAIREFNDLILGGIDIHEVETGVVYSKKIPNTLSKLSHSIERAWGESERKSTIAKKVWKARRETVLATGKPLPARTPKWLKIVNSEYVIDKKYSDAVNTIFKLYTEGYGTAYIVKYLNNNDMKIDGLSWSTAALTKMYSDERLIGWKSGMKIYPAIVGEDVFKKAREIKNSKVMLNKQKVNSSQRSIFNSVARCGKCGAAMCVSVNGHNKLYYWCWKKRGTKECDLSGFVYAYAELAILQHIKNIDWNKVYRDSDRSNERSEDLNMELAELLNYKLEIDEIIKTTERPPTAVLRALITTEEKISKLEEEISSIKASEYPLDFDFNVDDITNQNNIELRQKCNIQIKKSIKSISFNKDDKVIIIDIKYFTDVLKHVLILDNKTGGVVSSISIIKEGDAINYSSGSFKIIEHEDGCTFDGIDDVSVTDYFMLANYIGSIREKQWIVDVMYLQHNMDAVLK

SEQ ID NO: 16685 - protein, 574 aa, synthetic construct
MRKCFLYSRVSSDVQISGDGLGRQEDKLKQYLLQNALRLNLSVDDCEILVDSGVSGWKGSNMGDTAALGQLFHRVESGEIDGSVLIVESLDRFSRENPFRVAGYIAKLAEHSIDIIDVEQNLVIGTSNPWSSTIASIIANRAHEESTLKSKRIKAAWNSRRKKAEESGQYMIKNTPFWIDVLDDKYVANADASIVREIFDLYLQGYGSFTIAKKMNKAGKVIRNKRWSTPKICALLRNPRCNGDFISHSLERDYEKGTSTSVEHVIKGLYPKIVTDEEFALVLNRLNDGSKNKRVCNDRKVTILNGLLKCSICGGALTVRSAGAYRYVGCLKTIEKGGCYSKPIRYDALEKIVVNHIRNMDLGHVYESNDSQEVITKERIKTLMSHIEEYKAGITQLRERGKKPSFDMLTELQNSEDELELLKKALEQLSLSKIDLSEFAVGTELFDITQIALRTRLERTISSLLNKIKVYHTKDLSFSLIEMIYVNDVVKHVLVADKKGDVTGDVVIRRNGESTTYESCSVKIIKDEDGVFSLDCNISEVVLNDYLLLMNVVDFVDSEAKEFLNLHLNAVLAH

SEQ ID NO: 16686 - protein, 599 aa, synthetic construct
MKKIIPYGYLRVSSLEQVRSGGGLEAQDEEVRRYITQKSDVFDIDKMVMMSDEGLSAYSGRNIKEGELGRFLADVDAGLIPAGSALVCYSVDRLSRQNPWVGTQLISTLIGAGIEIHSVAENQILRSDDPVGAIMSTIYLMRANNESVIKSERAKHGYTKRLNESIANNKVLTRQMPRWLYDNDGKYAIDPNMQKVIDFTFDSYIAGQSTGYIAKKLNDMGLKYGDTSWRGSYVAKLIRDERLIGKHIRYSKQIKGVKREIIETIPDFYPVTIDTDKFHIANNMLTSVAKNIRGRTRMTYGDISILRNLFNGVIKCGVCSGETSVVQNTRRKITNGVVTYVPYKTFLRCRNRYELKTCTQGDIRYEVIERAILNHLMGLDITTLLAAPVDNKIERYRTELELCKAEEEELQAIIKERENEGKRPRPQTLKSYEDVADRIDELTQLIESHVEDNFIPHFNVDLDSITDVSNVSERSLIKKGIATIADSICYKRISDFILVEIKYRNLNDKHVLVIDNKNSEMVVNFSIEYNEENKVYICNSFVMEYDNLSCEFTVSKTTMEDYAHMMNFVDYVSDDESYNAKEFLVKNFTHIKFIDKSNE

SEQ ID NO: 16687 - protein, 559 aa, synthetic construct
MKTKLYSYIRFSSMRQSDGSSYERQIRMAREVAAKYDLELVNDYQDLGVSAFKGANSKTGALSRFLDAIGRSVPVGSWLFIENLDRLSRADIVSAQELFLSIIRRGITIVTGMDNKIYSLDTVTANPMDLMFSILLFIRGNEESQTKRNRTNSSALIKIKAHQENPQNPAVAIEEVGKNMWWTDTTSGYVLPHPVYFPVVQEIVELRKNGRSTAEILDHLNETYAPPPAVSNKKHSKWSRAMVERLFHTRALIGIKEISVDGVNYELKDYYPRVIDDPTFYHLKKNIGARAWNFGDKEEVKPIPLLSGIGLLKCDHCGCAMVKVKGTNKRSDQYRYTCDATRSRRLDCEHPNWSFRGDQLEKAVLQLLADKIWIAEDKANPVPALKVQVDEISRKIDNLIALSAMTGATKELADQITTLNSERETLYNQIKMAEEEMYSVDSQGWEKLAEFDLEDVYNEERLKVRFKIKQALKRIGCSRIDRNKNLFVLEYIDGKTQRVVIENSRGTRKGQIFVDLKTINDRQILESNGLVLHPCLDMLTDKNWKPEEEIPGPLQEFGI

SEQ ID NO: 16688 - protein, 506 aa, synthetic construct
MRTVITYLRFSSATQGAEGADSTRRQNELFKQWLRKNSDAQVVASFSDEGLSGYKGKHLTGQFGDMLARIEAGEFPAGAILLVESIDRIGRLEHLETEALMNRIIAHGIEIHTLQDGLIYTRDALSDDLGISIIQRVKSYLAHQESKQKSFRVSEKWKQRAKLALAGEQHLTRNVPGWIDPDTFKCNEHAETVRLIFKLLLDGESLHNIARHLQSNDIKSFSRRKDANGFSVHSVRTVLRSESVIGTLPASQRNDRPAIPNYYEAAIDAATFNKAQEILDKNRKGRTPASDNPLTINIFKGLFRCQCGASVHPTGTKNKYAGVYRCNNHLDGRCDVPPLKRKPFDKWMIDNFLGMIDVGNDGEAEGKIASLQHEVEIVTARIKKATALLLEMDDIDELKIQLKELNQKRTELQTMIDNMRRKASLTDKELPQLKDIDLMTKAGRVECQLILSKHLKGLTLGKDSVTVTLQNDTEIIVPTDPLPLNDGTSIFEIAEKELLEIDAYQL

SEQ ID NO: 16689 - protein, 475 aa, synthetic construct
MKTTNKVAIYVRVSTTSQVEEGYSIDEQKDKLEAYCKIKDWKIYDVYVDGGFSGANTQRPELERLISDVKRKKVDIVLVYKLDRLSRSQKDTLFLIEDVFAKNDVAFISLQENFDTSTPFGKASIGMLSVFAQLEREQIKERMMLGKEGRAKNGKSMSWTTIPFGYDYSKETGVLSVNPTQALIVNRIFTEYLNGKPVVKIIRDLNAEGHVGRKRPWGETITKYLLKNETYLGKVKYKDKVYEGQHEPIITQELFDLVQLEVERRQISAYEKYNNPRPFRAKYMLSGLMKCGYCGASLGLRYTRKDKNGISHHKYQCRNRHSKDLEKRCESGWYSKEELERVVIKELERIKFDPKYKNETLAKKEETIKVEEIKKQLERINNQVSKLTELYLDEIITRKELDKKNDKIKTERQFLEEQLENQKSNVLSIRKRKLTRLLKDFDVEKLSYEDASKIVKNIIKEIIVTKDGMSITLDF

SEQ ID NO: 16690 - protein, 545 aa, synthetic construct
MHVAIYVRVSTTSQALKGTSLDSQITLCKNKAKEIGYLDSHILLYKEAGASGEDIDIRPEMTRLREDIKKGEISKIIIQHPDRLSRELIDKLTVCREFEKYGVEIIFVDTEFQNTPEGWLFFNVMSSIATYELGLIKKRTVRGRLKAVEKGKKVMPMRVPPFGYELVNNQLIIHKKEADIVKQIYQWYVYNQLTLRQIGEKLYRLGVMPKRKEKKEWNASSIRRILTSEIYIGKYTYNKRKTQKIKGEKTEAGNPKKTYTIREKEDWITIDVPRIVDETLFKLAQKQRNNNTKNSGNTKNQYLLKGLIKCQCGRTWEGTFYSGRKDKITGEQQKYFIYRCPNRNPKSYGPKIKKCKTPSIKIEELEEYIWKLVVEVFSRPDSYYVYMEEGQTEFISQYEKEVSIRLNKVKEIEKKKDKIKMLFLEDLISEQEMKSDFKKTNEQINQLKEELKTFEDKLNLENKKENTKKRMDQIIESIQNVLKDKTDNKLTFEEKRNIITQLIDEIHLEFDGEQQVNVKINGTLDALAHDIVLSTQSLNDMSYKP

SEQ ID NO: 16691 - protein, 550 aa, synthetic construct
MNNKVAIYVRVSTHHQIDKDSLPLQRQDLINYSKYVLNTNKYELFEDAGYSAKNTDRPNFQNMMSKIRKNEFSHLLVWKIDRISRNLLDFCDMYEELKKYNCTFVSKNEQFDTSSAMGEAMLKIILVFAELERKLTGERVTAVMLDRATKGLWNGAPIPLGYAWDKVRKFPIIDQKEKNTIELIYNTYLKTKSTTAVRGLLNSNNIKTKRGGSWTTKTVSDIIRNPFYKGTYRYNYREPGRGKVKNENEWVLIEDNHPGIITKELWNQCNEIMDTNAQRNNAAGFRANGKVHVFAGLLECDECHNNLYSKQDKPNIDGFIPSIYVCSGRYNHLGCSQKTISDNYIGTFVFNFVSNILTTQNKVNKLDTQSFENSLLKGKFFKDIIGIDNIETIQGISYPKNILKTKNINVKSNSIELEIIKKEKVKFERAMQRLEDLYLFDDEAMSEKDYMIKKKKINEKLQELNNKLKGFDTCGDVSELNLMKEVSNFMLSKELLNMHDINYKKLVLAVGRERLKDFVKTIIDKIIIKDKKILNVKFKNGLVIKFVYKC

SEQ ID NO: 16692 - protein, 540 aa, synthetic construct
MKAIAIYARKSLFTGKGDSIGAQVDTCKRFIDYKFANEDYEIKIFQDEGWSGKTTDRPDFTNMVNLIKSKKIDYVITYKLDRVGRTARDLHNFLYELDQLGIVYLSATEPYDTTTSAGRFMISILAAMAQMERERLAERVKSGMIQLAKKGRWLGGQCPLGFDSKKEFYIDDMGKERQMIKLTPNKEEIKIVKLIYDKYLEMGSMSQVRKYCLENSIRGKNGGDFSTNTLKQLLTSPIYVKSSSDIFKYLDSHGINVFGTPNGNGILTFNKTKEIRIERDKSEWIAAVGKHKGIIDDNKWLQIQQQLQQQSEKQIKSSGRQGTTSTGLLSGIIKCAKCGNNLLIKTGHKSKKNPGTTYSYYVCGKKDNSYGHKCDNKNVRTDEADSAVITQLKLYNKELLIKNLKEALIKNKNNDTDSIEILKDNLKEKEKAVSNLVKKLSLIEDENVSNIILNEISNMNKEINDIKLQLSNETLKNNEVTKAKLDTEIYIKILENFNDKIDSITDPIEKRNLLKSALESVEWNGDSGEFKINLIGSKKK

SEQ ID NO: 16693 - protein, 533 aa, synthetic construct
MKAAIYSRKSKFTGKGESIENQVQMCIEHAKTVGITEYEIYEDEGFSGGNTERPKFQKMLLDAKAKKFDVLICYRLDRISRNIADFSNLINELQNLSIGFMSIREQFDTSTPMGRAMMYIASVFAQLERETIAERVRDNMLELAKTGRWLGGNPPIGFNSERIIYLDENFKERSLVQLTPVEGELEFIKFIYDKYEELGSIHKLRKYFLQNNIKTQNGNDYSMRVLADILRNPIYVKADRKVLDYLESKEINVVGKGNNKNGILVYNKKDKRGKQKDKSEWIAAISNHEGIIDATRWLAIQKTLDQNGFKKAMGTSKVALLTGLIRCKKCGSPMRITYGRTNKAGEKKHYYACDMKFASGGTRCENKNLNGAKAEQTIINKIKELTKNKGMLVQEFKKTQNELKTSSNKSEIEILSKKITDNESSIQNLVKQLSKNETSIASKYIIEEIEKISKETEELKSKLKELNDKNKDAEMTEVDLELIINNLTKFSDLMDNADNNQKKYLISSIVDSIYWDADTGELEIIFFGKRKKK

SEQ ID NO: 16694 - protein, 540 aa, synthetic construct
MKTIAIYARKSLFTGKGDSIGAQVDTCKRFIDYKFANEDYEIRTFKDEGWSGKTTDRPDFTNMVNLIKSKKIDYVITYKLDRIGRTARDLHNFLYELDNLGIVYLSATEPYDTTTSAGRFMISILAAMAQMERERLAERVKSGMIQIAKKGRWLGGQCPLGFDSKREIYIDDMGKERQMMKLTPNKEEIKIVKLIYDKYLEMGSMSQVRKYCLENSLRGKNGGDFSTNTLKQLLTSPIYVKSSDNIFKYLESQNINVFGIPNGNGMLTFNKTKEIRIERDKSEWIAAVGKHKGIIDDNKWLQIQQQLQQQSEKQIKSSGRQGTTSTGLLSGIIKCAKCGNNLLIKTGHKSKKNPGTTYSYYVCGKKDNSYGHKCDNKNVRTDEADSAVITQLKLYNKELLIKNLKEALIKNEKADTHNIEILESKLKEKEKAVSNLVKKLSLVDDENVSNIILSEVTNINKEINDIKLQLSNETLKINEVTKATLDTEIYIKILENFNKKIDDITDPIEKRNLLKSALESVEWNGDSGEFKINLIGSKKK

SEQ ID NO: 16695 - protein, 512 aa, synthetic construct
MKVAIYSRKSIETDKGESIKNQIEICKEYFLRRKSNVQFEIFEDEGFSGGNTNRPDFKIMMNRAKNNEFDIIACYKIDRIARNVVDFVNIYDKLNKLNIKLVSVTEGFDPGTPLGKLIMMILASFAEMERENIRQRVKDNMKEMAKAGKWTGGNVPFGYSTQRIDIGNKKATYLKLDNAKKEIVKEIFNLYISTNSMHKVQKWLYDTKDIKWCLSTIKNILTSPIYVRCDKEIIKYLSNFGEVFGEPNGVNGVITYNRRPYTNGKHRWNDKSMFYAVSKHEGIINSDLWLLVQSIQEKTKTKPRPKNSQVSYLTGTLRCSKCGSSMTVNYNHKNKDGSISYVYVCSGRRSFGKNYCDCKQVSQKILDKQIEEALNSYVKLDIEEFKRTIEVKEPKSQKGKIQTIEKAIQTNKTKINNLIDKISILSNTASAPLIGKIETLTQENEDFKKELLFLKQEELNNNIISPEEKYKKLKQLVNILNSNDIETKRSLLNFSVQEILWDSDTKYADIII

SEQ ID NO: 16696 - protein, 490 aa, synthetic construct
MLREGEKMNKKVKAGIYIRVSTEEQKQGHSLEAQESMLKEFADKKGYEIYDVYNDGGYSGKNFNRPEIQRLLRDLKDDKIDVILVWKVDRLSRNNTDVMSLIDTELTPRKKSLIITSIDMDSSSPTGHMFISLLSTFARYERATIIDRVKAGMQKRAEKGYWNGGSILGYDSVDKKLIINENESKIVREIFQLRAEGKGYKFIVNILNDKGIKTKTGKNFSIPAIKLIVNNYIYSGKMVWKKHQDWSTRRRAGKADPIIVEGIHDAIIDEGLWERVQKVNELQKNSFSSNRNFNGNFLLTGILKCPKCGAGTVMSKTKKRNSDDYYLYYMCQAYHNKGSSVCSANLIEKAQVEQQVLNVISLLVNENDIINALIDELNSDNNNANGIHIVNIKMFKKQLGKAYDKRKKLDNDYFEGNIESSTYNRLMNELQLEINKLKRNIRESEREIIKNDSIINKEEVIHVLTNFNKLFKIVNDEEKKLLIRSLIREV

SEQ ID NO: 16697 - protein, 515 aa, synthetic construct
MIPAIKRVGSNKSSERKPKIRVAAYCRVSTDSEEQASSYEIQIEHYTNYIKKNKEWELAGIFADDGITGTNTKKREEFNRMIEECMAGNIDMIITKSISRFARNTLDCLKYIRQLKDKNIAVFFEKENINTMDSKGEVLLTIMASLAQQESQSLSQNVKLGIQYRYQQGEVQVNHKRFLGYTKDENKQLVIDPVGAEVVKRIYREYLEGASLLQIARGLEADGILTAAGKAKWRPETLKKILQNEKYIGDALLQKTYTVDFLSKKRVKNNGIVPQYYVENSHEPIIPRELSMQVQEEMVRRSNLRGGKGGKKRVYSSKYALSSIVYCDHCGDIYRRVHWNNRGYKSIVWRCVSRLEEKGSECTAPTINEETLQTAVVKAINELLANKEPFLSTLQKNIATVFNEENDNATNDIDSKLEELQQQLLIQAKSKNDYEDVADEIYRLRELKQNALVENAEREGKRQRIAEITDFLNEQSYELEEYNEQLVRRLIEKVTIYEDKLTVEFKSGIEIDIEI

SEQ ID NO: 16698 - protein, 551 aa, synthetic construct
MNKKSAIYVRVSTSHQIDKDSLPLQRKDLINYSKLILGIDNYVVFEDAGYSGKNTDRPAFKDMFNRIKEGEFSHLLVWKIDRISRNLLDFCSMYDELKKYNCTFISKNEQFDTSSAMGEAMLKIILVFAELERKLTGERVAATMLDRATKGLWNGAPIPLGYKWDKAIKFPVIDNEERLTVELIYNKYIETESTSAVVKYLNQHNIRTKRDGSWTTKTVGDILRNPFYKGTYRYNFRESARGKKKKENEWIVLDNNHDPIIDLDLWTKCNNILDENAKKNSARFRAKSKTHIFAGLLECGECHKSFYSKSDKTSLDGYTPSIYTCSSRYNHLGCNQKTISDTIIGNFTLNFISNMIKLYKTYKKLSPEDIEKKLLLGSSFNDVKGIIEIDDIFNSFYNTSSKIFKPNKQETKPANVDLNKLDADLKKQHRALERLENLYLYAEDEMSEKDYILKKNIINTKIKEIDTKIKSSATISTSTYNINFFLNTATLELSKEIIEGNINMKSLIQRVGRDIIKEFVNSLITKITVRDRKVISIQFTNGLISTFIYEV

SEQ ID NO: 16699 - protein, 525 aa, synthetic construct
MKTVRDVLEKGKKGAFYARVSSDRQTIDAQRHHVYEFIKNYECEIVKEYVDHGESAFKKRLIKRPKMMALLRDVEQGKYDFVITYADDRLARSEIEHAQIRLLMKQANTDVILTSTAELYTERDIITQLIREGGTRYEVERISARTKDAYKQRTDYGEWMGGPVPFGYEQDGKTKKFSILEDEKEIVLRIYQLYQSGEGFADIAKILNEQKEKTNTMIWRKERVKQILTNPIYAGYVTFGRLKSGSGNSIEDLSKWKMAQCKDIPPIMTQEEWFATFHLFERKRNKELPPKQFKTEYVLRDLIYCKNCDLPLLPKNQETTGKSGKKYGMKKYKCSNKTCKIWFPTDELHTLVFDSVMKEVTDKVISKSQTELMYEIEQNLEKDIKRIQKEIQRLKQQVNDCLVWIKDAEREIDDLYNRKKRLVEADPEIDPLLDVMLDYRVHLLHEIKESEELIAKKEAEVKHIEEVDSHKNMLEKNVLQAFQIEFSNLQTDVKRIRQFLVYLIDKITIDKNGKTEYVLKINLDH

SEQ ID NO: 16700 - protein, 522 aa, synthetic construct
MKLSHILQPNMKAAFYGRHSTDKQDMDMQLNSVMEVIRKYDCIHTHSFLDKAVSARKNKITSRKELENMFEAAKRKEFDFVIVYKSDRLARDPLEHQTIRIVMKTLDIPIIISSTESVYNTDTDLIVQLMEDGFTKYEVDTIIARTRSGLENKAKQGKWLGGKPPFGYTYDKSSEQFIEHTEELCYVKEIFNLYVNGHGFQYIAHTLPNGSRRGKDWGKENVKAIVLNPFYCGLLSWRRQTDGKQNERDIWIEAPNHYVKPIISRTTWEACWRIYSEKRNGNMVPKHYKTSFLLQGLLSCEKCQELMKTKNQQTVSSTNKKYGGKIYFCPNCKLRIEADLLHDKVVNQTLTDVKISGFHNVYHAIEQKIQYEIQELNNNIQKHQRLYENHIIKLHNITEELKQRMKNNDDKRFLKSLAIYRSDVQRKLDGIIQQINNFKQQITLKEKVEKSKEIWLHTLNEVFQDDVKLQEISDMDKRRFLLPLIQSVSIKENKKRNEYDISLQLRTDFSKRDVKKQISLIL

SEQ ID NO: 16701 - protein, 452 aa, synthetic construct
MKAAIYIRVSTQEQIENYSIQAQTEKLTALCRSKDWDVYDIFIDGGYSGSNMNRPALNEMLSKLHEIDAVVVYRLDRLSRSQRDTITLIEEYFLKNNVEFVSLSETLDTSSPFGRAMIGILSVFAQLERETIRDRMVMGKIKRIEAGLPLTTAKGRTFGYDVIDTKLYINEEEAKQLQMIYDIFEEEKSITSLQKRLKKLGFKVKSYSSYNNWLTNDLYCGYVSYADKVHTKGVHEPIISEEQFYRVQEIFSRMGKNPNMNRDSASLLNNLVVCGKCGLGYVHRRKDTVSRGKKYHYRYYSCKTYKHTHELEKCGNKIWRADKLEELIIDRVNNYSFASRNVDKEDELDSLNEKLKTEHAKKKRLFDLYISGSYEVSELDAMMADIDAQINYYEAQIEANEELKKNKKIQENLADLATVDFDSLEFREKQLYLKSLINKIYIDGEQVTIEWL

SEQ ID NO: 16702 - protein, 484 aa, synthetic construct
MNEQSSQFIALYCRVSTDDQAKEGVSLEEQQERLEAYCRAMGWGEDVVVYVEDGYSAKSTDRPHLKRLIEDVKAGEIKKIIVTKLDRMSRKLLDLLTLIDLFQEHDVSFVSISESFDTNTPSGRLTLQVLGAVAEFERERIRERVFENMYHAASKGKWLTQHPFGYRLENKELVIYENEAKIVRDIFIWYTQEGHGFYAIAKKLNLLGIPSRQNKQWSIRSVKLLLSNPVYKGTVVWNRKDRSKKKEQFKKEDEWVIQENAAPAIVTDELWNEAQKRMQTSTLAPRAQTSPHLLGGLLKCGKCGSGMSIGWSGSTKNRYRVYRCSANKNKGTCTSKQYKAHQLEELFKKGLSNLCESFSFSLHPSLSLQKRQTDVTNQMKLATAKKRYKRKVEAFTAGLIELEDLQEEKRRLETLELALQPTTELNENINLPQIEEWMKSKLKNIYDALSIVPVEELKPLIQTIIEKVILHSEEELEIVLQPII

SEQ ID NO: 16703 - protein, 543 aa, synthetic construct
MSQKIAYQRLEDILKKGSRIALYARYSTGKQDENAQIHDVRKFLSDYGCELLDNNIYIDPKTSAVKVPMDQRKDLQRLIKDSKENKFDCIVSYKNDRIARNTQEHNELRTEMQRLGMPVVLSSTREIYTVGEIVPLTIKDALTQIEPLLIAERTRDTFSSKIENGEWTGGQAPYGYIYDKETELFEITGKKVEVVQEIFRLFKLGYGLQQIANKLIADRRDIGQKWYKDKIKYIITNPFYAGHMTMNRYVKGKLQLKMETWTWSKKQESIPAIMSRDEWEYCFYLYVERRKSQTVRKSSTPFWLRDILHCNECQLPFKTKNQKTKSKRKNGEKVEYGKILYECRNCGLKLETEKIHDKFKEDVGRVLKKLLEKHRENLIQQTQLQIEKEHEEITNVQKELANKRIKLIENIDVLDKKISQLYKDITTGKGLKANHTEDVLGKEDEQDDWNSKLVEILLTGRSQKHNDLEEIKQQQQLLEDKQESLNIVMNALKNQYQDELLNFSFDPENEKSMRNFLLQFVKAVYVSRDMRLDYKIYENLISE

SEQ ID NO: 16704 - protein, 534 aa, synthetic construct
MKKYEQARLEDVLQSGSRVAFYARVSTEEQDCAMQENAVEMFLERYGCKIGEGLKYIDPAVSAMKIPLKERKKFQELISDAEKRKFDVIVTYKNDRLARSVEEHQEIRKRMRELNMHIVLSSTHELYTVGEIVSQTVKDGLTKIEAAITQERTRDTFRSKTKRGKWFGGKAPYGYTYRVIEENNGGQKTRIEEFKDEKDQQEVVTEIYRLFEIGYGFQQIANEIKNRKLDEDMKWSKEKIRYIITNPFYCGLMSMNRYDNGTLNDQIQWVKGEVKGITPLFTREYWEYVMKLFEDRKKRKIHSRDYSTPFLLRGILYCHQCNELMTTKNQEPGGVKYKGKKTEQKRRIYECKNCDFKLQAKTIHEKFQSEYLPYILDQITQQKKEHVESEIEKRLKKEMKNLKDTNKKLDEKIVKLNQQIEELSEEIKSYYEKEIIEDEVLEFMKIIMAHRTNKIHELNAVKDKKFGVQERIDRIAQTIRQKKYLPPYEVLNDFTKKNVDTQKLRAFLLQFFKFIHVASDGNLVLEINERLMGL

SEQ ID NO: 16705 - protein, 490 aa, synthetic construct
MKGLESYAVYARVSTDRDEQVSSVENQIDICRNWLERNGFTWDEKHVFKDEGISGTLLVERPAIQLLLQKAKAKEIDMVIFKSISRLARDLKDSLEIREVFLAHNVRIISVEEGYDSVKAGKNDMAFELWSLFSAQYSRTLSSSITAALAVKVRRGEHIGKVPYGYNRENQKLVINEEESQVVQMMYKWYLDGWGYKKITNELNRLGIKSKTKKNWQMTSVQRILQSSIYKGTFILNQYTSVKVGGKKKQIRNPKEKWFVFPNHHPKIVEEEIWNQANRKKNKTNKTKITAWNEFRNLAKCAVCGSNMVIVQSHLKKKSGERTEWKYLKCSQYRRAGKHGCVNHVPIQYKDLREFIINLLVEKGESVTLELQSNVEQGQKKKIKKLQKFVDANDEKKKALIDLYLEGLIEKGEFEGKRRDLEMQVIEANQELFMLKKDDVVYTNIKTIQEAFEQLQQQRQDLFHVFQTLIKEIIIHQDGTVDIQYTFGIS

SEQ ID NO: 16706 - protein, 561 aa, synthetic construct
MNEKTGTLDILNLNRKQRRQLGSKIAVGYSRVSTQNQLEEGLSLATQENEIKKKAKELDLFYRMTYVDGGISGSDIEHRSGMIQLLEDAKQGIFDAVIIYSISRASRDLEDFLLIVSTLESYDIELISISEVIDTSNPAGTMSRNLLAIVAQFERERTSELVSEGMKTLASEGRFTGGRMLGYRSGTDDEGRKTLIIEPEEAKIVRTIFTKYAAGEGYRAIANYLNRHGFKTVTGKSFNSGGIKTILSNQKYGGIIEYGRYHQWAKKRRRGANPNPIIQKAIHEPIIEEGLYQKVRERLELEKTQPSWTHRGENVLTGILKCPVCHGPMAASNVTNTLKDGTKKRIRYYSCANFRNKGATVCSANSIRADFAEKFVSDRLRELVSFPEFLAVLVKEINQKILDEISPLEQELATLQLTMQEIDEKLTAWEQFELIEKDLNEDVTLRKDQLREQMIFAKQREREILSVLEHQEQKVEVADVQQILLALDKMLQKASKPVIKQIYRSFIEKIEFNPLNKEHIRITMKFDEAIIHQLNQIYQEAVSDETDAAFFVLKRPFTLIV

SEQ ID NO: 16707 - protein, 452 aa, synthetic construct
MKAAIYIRVSTQEQIENYSIQAQTEKLTALCRSKDWDVYDIFIDGGYSGSNMNRPALNEMLSKLHEIDAVVVYRLDRLSRSQRDTITLIEEYFLKNNVEFVSLSETLDTSSPFGRAMIGILSVFAQLERETIRDRMVMGKIKRIEAGLPLTTAKGRTFGYDVIDTKLYINEEEAKQLRLIYDIFEEEQSITFLQKRLKKLGFKVRTYNRYNNWLTNDLYCGYVSYKDKVHVKGIHEPIISEEQFYRVQEIFTRMGKNPNMNRDSASLLNNLVVCSKCGLGFVHRRKDTVSRGKKYHYRYYSCKTYKHTHELEKCGNKIWRADKLEELIIDRVNNYSFASRNVDKEDELDYLNEKLKTEHVKKKRLFDLYISGSYEVSELDAMMADIDAQINYYEAQIEANEELKKNKKIQENLADLATVDFDSLEFREKQLYLKSLINKIYIDGEQVTIEWL

SEQ ID NO: 16708 - protein, 452 aa, synthetic construct
MKAAIYIRVSTQEQIENYSIQAQTEKLTALCRSKDWDVYDIFIDGGYSGSNMNRPALNEMLSKLHEIDAVVVYRLDRLSRSQRDTITLIEEYFLKNNVEFVSLSETLDTSSPFGRAMIGILSVFAQLERETIRDRMVMGKIKRIEAGLPLTTAKGRTFGYDVIDTKLYINEEEAKQLQMIYDIFEEEKSITSLQKRLKNLGFKVKSYSSYNNWLTNDLYCGYVSYADKVHVRGIHEPIISEEQFYRVQEIFSRMGKNPNMNKESASLLNNLVVCSKCGLGFVHRRKDTVSRGKKYHYRYYSCKTYKHTHELEKCGNKIWRADILEELIIDRVNNYSFASRNVDKEDELDNLNEKLKIEHSKKKRLFDLYISGSYEVSELDAMMTDIDAQINYYEAQIEANEELKKNKKIQENLADLATVDFDSLEFREKQLYLKSLINKIYIDGEQVTIEWL

SEQ ID NO: 16709 - protein, 491 aa, synthetic construct
MGLAAIYLRLSRNEEQLNIDEILLNHRNALTKIAKQQKLTYDIYQEISSGVNTERPELNLLLSRLDDYDALLVMDIDRISRDNAHAEEIKKMLIIHDIKILTPQGAIDLSQESNEMLFSFQAMMANFEYKQIRKRLGRGRLAAAEQGKWTMSNRVPLGYKKNEEKRLEVVEDEAKIIRFIFQKTLERVSANEIAKQLDILGWRSRQGKVLTSTHISNMRRNVVYYGVVKAGRKVNGRVVDEVFVEDAHEPIVSKQMFLEVQKILEENTTGNFFNKLKATRKLQNLIYCNCCKRKRYIQCDGNGIDYIKSCIYKVDNNKCRDRGYKYEPIEQFVLQKVKEKKSAFEQELQMLKSLDTTEVEKKLLIQRESLEKQINRFNKRQRNLKEMRMDGEISKAEFYEMRDENEEQIKQVKQQMELIDIKIENLSNTDEEQARLQDALKTLDKLEELKAESCNTFLKKFIKKIWFSSNTEANHDTTRPKEDATIEIEWL

SEQ ID NO: 16710 - protein, 663 aa, synthetic construct
MSKEKIKVYLYTRVSTSIQIDGYSLEAQKSRMKAFALYNDYEIVGEYEDAGKSGKSIEGRVQFTRMMEDIKSGKDGVSFVLVFKLSRFARNAADVLSTLQIMQDFGVNLICVEDGIDSSKDAGKLMISVLSAVAEIERENIRVQTMEGRIQKAKEGKWNGGFAPYGYQLIDGKLIINEEEAIAIRTIFDQYVNTSIGANGLSKYLENHGIRKIPRQNGKNPLFDAGLIRKILKNPVYNGKIAFGRRTLEKVHGTRNEYRQVEQDDYLVAEGIHEAIIPDELWQAAQVKLKAQAKKYEHVNKGKNMRTHLLSGIVKCPICGAGMFGNKSIKYKKDGTKYKDFYYYGCKHRLMNRGHKCTYNKQIREELLDDAVAEVIIKLVSNPKFASMIQEKINMKVDTSAIENEIDNYQNELRKSHSTKYKLIEEIDNLDVEDKHYKRRKNDLDDRLYRMYDKIEELESQLIEAKAKKETIEVEKLTGDNIYKVLIYFDKLYKVMNDVERRQLIEALISEIQIYEEKQPNGQWLKSITFKLPIIDEDLNISLENDEQVETVVLLSHKKPDGHINVKVEFGEGEGKVPLDDIAQRAESYKPKERVTYKMIKEYIEAKYGFKVHTAYIAEVKRDLGLPMYDAPNAVEELKQPRKHPIAEKVEAIKDALKHFEVI

SEQ ID NO: 16711 - protein, 546 aa, synthetic construct
MIESMTTKTVAIYARVSTIEQAEEGYSIDEQIRVLNKFCEREGYLVYDEYVDRGISGKNISGRPAIQRLLLDAEQKKFEVVLVWKMNRLARKSLDLMNIVEKLDSKNIAFRSYTERYETETSTGKLQFQLMAAIAEYERNNIAENVKMGMIARAKEGRWNGGQVLGYDVVEISSDNRKRKNTHLVINEREANTVQLIFQMYSSGHGYKSIANYINKKGYRTKKGKTFSLNAIKIIVTNPVYAGYIRYNVRKDWNEKRRNNINPNPIIQKGEHEPIISEEVWQIAQNVYQSRSCKPNRIHDGEFPLTGIMRCPACGAGMVISRTTNTLKDGTKRVLEYYVCGAWKNKGTLVCRSNGVRTEYADAFTLDKLQRLMHSDKLIKELVKSVNSRNGKIFMPLQKEFDMYAKQMNEAEQKLLKTFDAYTDELISKAMYVEKAKRLEGQIQELKELMEPLRKQMQGNTVKVISYEMIKEVLLNFSKAFQNALTREQRKRLLHLLIHKITINEDRKIESIQLKLNNEVLKELKIGVDDSSSDESSTSFSVLIAI

SEQ ID NO: 16712 - protein, 452 aa, synthetic construct
MKAAIYIRVSTQEQIENYSIQAQTEKLTALCRSKDWDVYDIFIDGGYSGSNMNRPALNEMLSKLHEIDAVVVYRLDRLSRSQRDTITLIEEYFLKNNVEFVSLSETLDTSSPFGRAMIGILSVFAQLERETIRDRMVMGKIKRIEAGLPLTTAKGRTFGYDVIDTKLYINEEEAKQLQMIYDIFEEEKSITSLQKRLKKLGFKVKSYSSYNNWLTNDLYCGYVSYADKVHTKGVHEPIISEEQFYRVQEIFSRMGKNPNMNRDSASLLNNLVVCSKCGLGFVHRRKDTVSRGKKYHYRYYSCKTYKHTHELEKCGNKIWRADKLEELIIDRVNNYSFASRNVDKEDELDNLNEKLKTEHTKKKRLFDLYISGSYEVSELDGMMADIDAQINYYEAQIEANEELKKNKKIQENLADLATVDFDSLEFREKQLYLKSLINKIYIDGEQVTIEWL

SEQ ID NO: 16713 - protein, 522 aa, synthetic construct
MANVTIIPARRQVGNNVKQAEQPKLRVAAYCRVSTDSDEQETSYETQVSHYTEYIKSHPEWELAGIFADDGISGTNTKKRDEFNRMIDECMAGNIDMVITKSISRFARNTLDCLKYIRLLKDKNIAVWFEKESINTMDSKGEVLITIMASLAQQESQSLSQNVKLGLQYRYQQGKVQVNHNHFLGYTKDSDGHLVIDPEQAEVVKRIYREYLEGLSMKRIAERLEKDGILTGAGKTKWYDSTINKILRNEKYMGDALLQKTVTTDFLTKKRVRNSGALPQYYVEDDHEAIIPKEIFMQVQAELVRRRKVHTGPNGQKRIYSGNNCFSQMVVCGECGELYRRVHWNNHGCKSIVWRCISRLEPSRAAMNCISRTVKEDLLQEVTVKAFNRILTDSDGFLRQMQENIAKAIMAADTMSPDGIQARLDELQKELIRKANSKQDYDAIADEIFTLRGQKSQAEADTRSREETRKRIAELQDFIGSQQSEITEFDESLVRKLIQQITVYDDHFTVEFKSGITIDIEA

SEQ ID NO: 16714 - protein, 479 aa, synthetic construct
MNKVAIYVRVSTKGQAEEGYSIDEQIALLTSYCSIHKWKIHDTYVDAGVSGATIERPELSRLSRDAQKKKFNTMIVYDLKRLGRSQRNNISFIEDVLEKNGIGFISLTENFDTSTPLGKAMVGILSAFGQLDRDTIRERMMMGKIGRAKSGKPMMTSTIAFGYTYDKVTSSLNINPAEAIVVKTIYNEYLSGRSLTKLRDYLNENDLLRNGKPWNYQGVSRVLRNPVYMGMVRFRGEVYQGNHDPIIDSETFEAVQKELKKRQLETYEFNKNTRPFRAKYMLSGIIKCGYCGSPMGVTLGTKRKDGTRNIRYQCVNRFPRTTKGITVYNNGQKCNSGFYEKDDIEIYVLGQVRLLQLNKAKLNKMFETPEIINVEEIENQINSLNNKMKRLNDLYLNDMISLDELKTQTYTFLKQKDLLENELNNNPAIHQEENRKQFQKLLGTKDITQLSYEEQSFAIKNLIDKVFVKPGIIDINWRI

SEQ ID NO: 16715 - protein, 547 aa, synthetic construct
MKLLVTYIRWSTKEQDSGDSLRRQTNLIDAFYAKHKEEYYLLPAHRYVDKGKSGFHQQHKNQGSDFRRMFENVMSGTIPEGSLIVVENFDRFSRADIDTAIDDVRQILRKGVSILTLGDGELYDKSALTDPVKLIKHIIIAERAHQESLVKQKRIAQVWNHKTQLARELKKPMGKQAPGWLELSEDGSHYIVDEDKASLVNLIFDKRLSGMSMFSICKWLNEQGHPTINQRKVRISKTKKPDGNWSALSVKHILTSRSVLGYLPAKISTEDRKTVLREEIEGFYPQIVTDSKFYAVQQLLEETGKGKTSSGEHWLYVNILKGLIRCKCGLVMTPTGIRKPVYQGTYRCNGNKESRCNYGTVSRKLLDTQLCSRLFSKLSQLHDEATDTAKLDELQRRLNTVDSELEKLTETLIQLPNITQIQEALRVKQEEKDELIVQLSREKARVKSVSSLDLSGLDMESVEGRTEAQIIIKRLVKEIVVSGNEKLVDIYLHNGNMIRGFPLDGKDDHTLTLEEATDEMQSLDDMLIFGEPVTRIYPAGDMEEVDA

SEQ ID NO: 16716 - protein, 495 aa, synthetic construct
MTNDSQLVPVVAYARISADLAKDGHGVDDQHKVNDETASALGLKIVHYYTDNDLSAAKAGLVRPDFEAMLRTLKVGHLPDGQPVRGALVVADDRLVRRVGDYERFVDALTYEDGRVYADAKGLKDLYNEDVESMGLFGVVIAKAEVRKIKRRTRRSHRRRAEEGIPVGGKRPFGWQDDKLTLEPEEAQHLAQAARDVIARKSLHSILAAWREQGVRTVHGNEWQSRSLKLALWNPRLCGWRKHNGELVRDASGVPVVGKWEAIITPKEWMAIDALFSARIGPNIKADGTVTDYRTPSHLLTGILRCGKPKDDGQICNAPLRVSTRPDLSGGYVYQCQSRSMGGCGGSARNGAKVDEYVTEAVLAKLEERTAAKSQVSSEWTGQEELDRLMVKQRKMLQAWQEDQVSDELFFPENHKMESRIKELRKERTQHALQVQRASVVTENIREQWYSGKLDMAQKRALVREALHAVIVLPVGGGGRRPFNPDLLVPKWTEG

SEQ ID NO: 16717 - protein, 547 aa, synthetic construct
MPVAFSYVRYSSLRQAHGDSLRRQTAMVAEWLKHHPEYVLSADDAYQDLGRSGFSGAHLDNAFGRLRAAVSTGIIKPGDCILIEAIDRAGRLAPSIMLNLLTEIVNAGVSLISLDDGITYDSDPYKSNNLFLLVAKVQQAYQYSDALSRRVKSAYERKREAARSGEATGRRAPIWIKTEYPNGKKAQPVVSLREDLAPLVAQAFQDYADGLGERRIHHRLRDQHPELAKLSTTSLKRWMRNPTAIGNWNDIPDVYPAVVSKELWYRVQKRLNQKSKPKSAASNHLLVGLVKCAKCRANFHVHITPDNAAMKCGKRHRLGDQGCSNKKSLPMAVLDFIRSQTTFKALQRASLSRNLTASEKRALEIEGELAELNRQAATAAEGAVKYGMSAFGPALDRITAQIGVLEDEKLTLVSKSAPSTEGEMIDLQEELLDVDEMRLNALLQEAEYVMWCDDRTITVEEPSIEFSADRQVITYLGKDRVKGVFRITWNGARIDLPDLLSAPQRAELEQHMVQEARYKSGELERTVMRFNSDTGDMDHVSGPPLKS

SEQ ID NO: 16718 - protein, 619 aa, synthetic construct
MKKAYSYIRYSSPQQAKGDSFRRQLATTQAYCDKHGFKLDEELSLYKELGVSGFSGDQENLKRFISDCVSGKIEKGSLLIVENLDRLSRQKINIAMRQFLHLLEYVDIYTIQDEKKYLHISDTDEEKNDNQMLDIMTSLIIMSRAYEESATKQKRLKESWDERRANIGTKKLTSLIPHWLKLSKDKSSFHIKKERVEIIKYIYDKCIEGIGVTQLIRQLNNNLEQFPTPTTKSKLWARTSVSRILTDRSVLGEYQPHVGKHSGIGDKKRKPLGQPILDYYPQIVDEETFLKAQIAKKSRFVGKRSGKLSNDHFSNLFRSFIKCGHCAGKMEFVNKGTDKVRGGKYLTCASSKRGGECTQNKHYKYLPLELMLLHLTTENGFMPKPEPPTKLNLRLAKLQDVNEKANNDLNFLLNGDFTALPIQNKISELSKDIENYSSEIKILEDQVLTFKPDYHYDELHHDVILEEDKLKLYSNRINFNSYLLKKIDSAYLLYDYCPFILFKMKDGHVYTVVIDENYNFGGCTLSNGKVSYKRLNGVHTAIDEKIWNIQELFIELLDNSKNINSKKLENYLNRINKLINKIILDQDVELFDQLSYQITKATKLLFQLSMTMTYSSEKS

SEQ ID NO: 16719 - protein, 523 aa, synthetic construct
MRALIAVRLSRVTDATTSPERQIATCRELCEGRGYEVVGIAEDLDVSAGKTSPFDRPQLGRWLTTPAEYDVIVFFRVDRIVRRLFDLADLIRWARLHDVTLVSATESHFDLSSSFGDIIALLVAKVAEMELEAISERNASAFRHNIRQGKWRGGVPPWGYLPERVDNDWRLVPDPVQVNVIQEVVQRVLRGDTLRAIAHDLTGRGVLTAKDRFAQVSGRAVKGYEWHSAPLKRALTSQTLLGRVVTREPLTDAQGRIQRDAKGRKVFGPETVVVGEDGSPIVRAEPVLTRDMFDRVGKELEGRENRKEPTARTTALLLRVLYCGVCGKPAYRLKGSPGRKARYRCASAQYKDQCANRSIPLDWAEAELERRLIMNMGPMERRQRVWFAGNDHTTELDEVNDTLADLTDQLGTGMFKRGTPQRDRLDQRIAALTARQEELSATPNEPAGWRWEPTGEIFSDWWARQDNEARNVWLRQMGFRVVWTSHTEGTRTVVDEFRLDGDLSLNLDADQLFGPIWEIVTGK

SEQ ID NO: 16720 - protein, 523 aa, synthetic construct
MAKTVRMIPATPRVFRSEVAAEPRRRRTAGYARVSTDHEEQASSYEMQMAHYKNYIESRADWDFVGMYSDEGISGTNTKKRDGFNQMIEDALAGKIDLIITKSVSRFARNTVDSLQNVRKLKENGVEIYFEKENIWTFDTRGELLITIMSSLAQEESRSISENTTWGKRKQFAEGKTSVGYSAFLGYDKDFEINEEQAKIVRLIYKLFLGGRSFYAITKELEKRGIKSPSGKDKWYISTVRSILTNEKYRGDALIQKEYTADFLDKTRRKNTGEIPQYYVEEHHEAIIPPDLFDFVQSEIKRREQNGKHSGVSIFANKIKCGCCGGWYGAKVWHSTDKYRRVIYRCNKKYSQKGKPCSTRHLTEEEIKQIFVKALNSLVEVKENVIAELRSLINGVCQTGELTEEHDRTEQELGVLTERLEMLIRENARVAQDQTEYLKQENEIRALYVEKQGHLENLSGQIAEREGKRKTLEGMIYTICGINGEQSEFDEDLWGGLLDHIVVKEDGQITVVFKGGIEIGVEG

SEQ ID NO: 16721 - protein, 499 aa, synthetic construct
MKIRRVQPSPILQKKLRVAAYARVSVDTLHHSLAAQVSHYSNLIQKNPAWEYAGVYADEGITGTSTTHRTEFKRLIADCNAGKIDLVLVKSISRFARDTVDCLHTVRRLKEKGIAVRFERENIDSTSEDGELLLTLLASFAQEESRSIGDNIRWGVRRRFVQGIPNGHKPPYGYTWDGEMFRIIPAEGKIVKEIYRRYLAGESAYAIAKILAGRGITGRQGRPIEQTTVKDILSNISYTGTMALQKNYISEGHIRKRNKGELPMYLVEGMFEPLVSKEDFDKAQEIRKRRAEGAANRNPVLMPFSGMVKCGCCGGGFSRRTAGKYRRWGCNTRERKGSTACDSRPIKEEELVAAVRTVMEKDDFDTAELKRKVSKIVIYGDRIDFHLVNGRIKKTARIYNGQRGSNPFTNKVYCTSCGSKCERDIWTKGAKVWSCSQPRTKCGLKRLPESELKEAAESLFGDCCEGKIVQNVERIIISDDEVIFQLKEGGAYRWQRQCG

SEQ ID NO: 16722 - protein, 601 aa, synthetic construct
MLSGQQTWVNEMEQDRKTKLYSYIRWSSDRQAKGTSLERQTAKAREFALLHDLEMVELLDAGLSGYRGKNSTEGALGGFIQAVESGVIPNNSYLFVENLDRLSRQDILTANKLFSHLLELGLTVVTGMDGKIYTRRSVTANPTDLMLSILLFSRANEESQTKSKRVKANAAALVKRHNSGLPTTIKSAGSHVWWVDASGHHTESVKPHPVYWHAARQIIDLYLAGYTTYKICDYLDERYLPPPVKLNKSSVVTGDRRWSYQLIRRMKTSEALIGRRTLVLDKTTTPPTTATLEGYYPALCSQSEYARLVDLTENNRISTGKKKKRITLLSGLGIARCGHCGGAMTFFISLGKIRYMCASGRDHVSDCKAWSVRGDIFEHTAIHALVRGYASLMTRDKSAGEDLQDDIRGQQESLQAIENQISNITDAITIGGNMVALVERMRALETSKQAIILEIERLNHRQLMAGSQQDNIERLSDFIGLLSNDLLEDVTHPHRANIREAMRTVISSARVTKRQNNSLSIVFDIHDGTRHTFEGGEERNTYIEFVQDLDTDGNPITYPDTEEVRAWRKKREELESKLFAAVSASLEALPPIDPSKFWSKR

SEQ ID NO: 16723 - protein, 622 aa, synthetic construct
MKNSPKIYNYARVSSVKQLKGVGLETQQQRSVLERLSHEHNLPIHTENYVDEGLSAYHGKHKEGALGGVLEKIDDGTISSGSILVVFSLDRLSRETVNIAMEQLLSIINKGVRVYTHIDDTLFDVHSRNITADLILSLLTMQRANEESRTKSIRIKAAAKQALKKWKDTGEPQGALGRAPLWIDQPTNSLNKNADGVKAAVELFLQGESTLKVKQYLDNNYPYYRTRKTQIKSAKTWDFSVLNQLWEKHSLYGEKRLSIDGLEYKLPNYYPALIDKATFKALQAIRKKKKGRASSKGNIHFLKGLLRCGECGASMVFVDKGGRRKSYVCSLSLKGEQQHARELFNAEMLELVVLSLCKDQYALKQTELTSNDGQRENLELEIEQEQQELDDLLKSYRTKARASILTLIEEKEDRLEYLKEKLEDDDSGIPDEFFELLRNEMYTDEIRLDFTHPKRKEFANIVSSIISEVKLFRTTEDSLFSKTGKVNCIRVRIRFKDGLMRELKAKPFAYVKANDRELLRISFEYVYDVPVKEVSRNPDLIPDLINELHNVDLLNKLYPSKGKHQWAKKLLEPIEVDSQVLDLMPLPSKIDRKSVLEFLKDPYKSGIKRRDICFNSKSKLPV

SEQ ID NO: 16724 - protein, 593 aa, synthetic construct
MKKNNVEIIKADSLVRRRGDNIERHLKRVAAYCRVSSDSEDQKNSYESQVRHYKDYISQRSDWELADIYADEGISGTQVGKRQDFQRLINDCVNGEIDYIVTKAIARFARNTLDTLKYVRMLKDMQIGVYFEEENIDTLTMDGELLLTILSSVAQQEVENTSAHVKKGLKMKMQRGELVGFQGCLGYDYDVETKQISINKKEAKIVRYIFERYLEGIGGKVIARELDELGYKSPRGLKHWNDTTVLGIIKNEKYKGDILMGKTFTVDPISKRRLSNFGEEDKYYIKDNHEPIISKEDFEKAQEIRLRRAGNKKTAANVNGKRERYSKMYAFSSMLECGFCGSILSRRSWHCRSDYRKVVWHCVTSIKKGKKFCKHSKGLEELAIEGAFMEAYRQLYHSNENLMTDLLETIESELNDNSLNKELKRITNKLRTLLKKEENLVNLRLEGKISDSIYNEKYNEISSEKEFLSEEKVNIETTLKSEVDVKKRLTEFKHSLSSQKMLTEFDRTVFESIVEKIIVGGVNSDGEIDPAMLTIIFKTGETQNKNGKKFKSKRKNAKLEPDKLCPQNSDEDKKLYSQGTDNTCGDGSLDVTG

SEQ ID NO: 16725 - protein, 545 aa, synthetic construct
MRTIRKIEQKISGLKQRKKVAAYARVSMESERMHHSLSAQVSYYSKLIQKNPNWEYAGVYADYGISGTGIKKRQEFRRMLEDAEAGKIDIILTKSIQRFARNTVDLLQTVRHLKELGIEVWFEKENIHTMSGDGELMMTILASFAQEESRSISENIKWRFRKKFEQGIPHAKFFVYGYCWEKDNLVIQPEEAAIVREIFDAYLQGRTRKDILRELKRREIRTMYGNYFKDASIRQILTNRIYTGVLEIQKTFVTDPITKRQAVNHGERNRYVVEWHHEAIISSDMFERVQQELKNRKEMGMQRGGYARDFLNTSCFTGIIKCGICGKSYVHVVRKYKGRIREYWTCDSHKGKGTNCGAYGSIPQPALKKACAAVLGTDEFDEELFVQRVKKIVVPSYHTLVFHFKDGNVITQEWKSTALKDMWTDEQKKKQRQWMETYHQRDTSGRYTAFSERIVCPACQTKFIRCLEKRKNGKVAYWRCRGEHRCIHVRNIKEEWLQRMAAETMGKLEFDDTAFRAQVQRIEVQDNETLLFQFNDGHTKEVKLS

SEQ ID NO: 16726 - protein, 523 aa, synthetic construct
MKKVQVIPATLRSYTKKLMDSQKKRRVAGYARVSTDHDEQLTSYEAQVDYYTRYIQSRNDWEFVGMYTDEGISATNTKHRKGFKRMIDDAMDGKIDLIITKSVSRFARNTVDSLTTVRKLKDKGIEIYFEKENIWTLDAKGELLITIMSSLAQEESRSISENVTWGHRKRFADGKVSLAFSHFLGYDRGMDGNLIVNKKQAEIVKLIYRLYLSGYTFHSIAKELTERKIPTPAGCKIWRANTIRSILMNEKYKGDALLQKKITVDFLTKETKKNEGEVPQYYVEHNHEAIISPQIFDWVQEEIKRRRKGKKRYSGVSIFSSKIKCGQCGGWYGAKVWHSTDKYRRTIYRCNDKFKSHCKTPHLTENEIKGAFIRAVNQLIENKEDILSNITMLKKRLTDTASLEKERDALELDLNMLTDQVQQLIAENAQVAQDQDEYGRKYNGLVSRYEETKKKYDQVCDAIQQCVDRYWKLDNFMKNLQKQNLVYEFDERLWCSLVDFIIVYSKVKIQIVFKNGTKIHVGM

SEQ ID NO: 16727 - protein, 481 aa, synthetic construct
MKKCAIYVRVSTLNQAEEGYSISEQTDKLRAYCVAKGWTVAEIYTDAGFTGSNIDRPGMQQLINDISVQKFDTVLIYKLDRLSRSVRDTLYLAKDVFAKNNIDFVSLSENIDTSSAMGGLFLTILSAISEFERETIKERMQLGKLGRAKSGKSMMWSRTAFGYLHNTDTGVLEIEPLQAEVVKQIFQEYLNGMSITKLRDKLNSEGHTGKDKPWSYRALRATLANPVYTGKVKYNNQIFDGLHKAIISPELFQAVQSELEIRQKEAYQKNNNPRPFQSKYILSGIAKCGYCKTPLQVILGSVRKDGSRDIKYQCKNRFPRKTKGVTIYNDNKKCDSGFYYMSDIEAEVIDQISLLQLNNGALENLISINSEPVIDTTEFEKQLINIDNKIKRLSDLYINDMISLDEMKQRSKNLKKDRDALKAKITSSNKTSTTDRLKAARKLIGNKPIESLSYEQQKNIINRIISRVYVTAETVDITWSL

SEQ ID NO: 16728 - protein, 491 aa, synthetic construct
MRAVIYKRVSALKNGSDGTSLDMQQERLEAYAKAQGWDVTDVYEDPGISAKDTNRPELQRMLKDAETGKFDVILVYKLDRLSRSVSDFHRLSNFLETHKVALVSVTQHLDTSSSTGRLLRNILVDFANFERELITERTVDSKLRRAEEGKWNGGHAPYGYKLVDKRPVVVPEEAEIVRKIYALYLARKSMRQVARITGISFSKVELVLMNPLYSGKIAWGKTRYKDHKGQFRRMPQDKWIMADGEHEAIITFEDWQRVQDIKQEKKNIPDERSPKQLFKDLCFCAQCSKKLYFFSGGKETHFYYRCHDVNKFEGCKQTVVRQHELETKVVRKMNELLENGDFWRQVEAQAKKKERSDEQETEPLDAQMERLNGQIKRLVMQMADADIAHLIKPSLLRLENERKTLHEQKTAMLKVVQKSMRSISHEVMKDIASNWSLLTFEEKSEGIRILIKAAHCTTDKVTIEWTDSNLPSCDILLDERYANGIIRAFRF

SEQ ID NO: 16729 - protein, 541 aa, synthetic construct
MKYTAIYPRVSTGTQADEGTSLEGQLELGHKKAKSLKIPKEEIREYIEYGFTGEDIDRPALNELMQDVKDKKVKRLIVTHPDRLTRDLTDKLILCRELEKNDVELIFVDTEYLTTPEGQLFFNMMSSIAQYELQLIKKRTVRGRIRAVEKEGKVMPMRVAPFGYDFKDGKLTINEEESKFVLLIYQWYVREGKTLREIGEELLMLGALPKRAESKAWNASSISKILTSKIYIGIYTYNRRETKKIKGQKTASGKAKKTYKIRDSSEWIRISVPAIIDESLFTLAQVQRGKNLTRKGGNVKHNYLLKSLMRCSHCGRRWEATTYNSKKQGEKVTYPLYRCSGKYPRRFGESVHKCNVPTLRTDILDDFVWSIVVKFLDNPEEVLSRLEEASKSPDDNLKELADEYSRQLNNKEDERTKIKLMFRKGIIDEQELDDDITQLNKEITKIQNEYDKIQDKLNSRNNKEATKEQLMELANAFKKYTTTKLTDEDKRWIIEKLIDEIIITHDDEENRFSISCIGYLGEKLPTRDTYSFNLVSSTQPQ

SEQ ID NO: 16730 - protein, 658 aa, synthetic construct
MTLSDDARSMAQDDALPARKILYKYIRFSSIQQARGSSFARQNERLEKYAKENGFEVNDSLDLRDFAKSGFHGINKEIDQGLGRFIAAIDKGLIPTDGTAYLAVEQFDRISREDIDKAQDLFKSILRKNVNVITLMDGRIYTKKSLSNFMEVLYSLFLMEQAHQESLKKSDRIKGAYTNKIKRLHERVKEQKEELAAWEKNPVGKKPVFEPLINEIQFSSQVPEWIDQKIEIISGRKFRKFVVNEEKAKIIRYALSLLNDDNGYMNVSQQLNDEQIPRLDFVTRRQRSTRKNIWTNSSVNNFVNSDSIFGELAIHDNNFVDKEFEYEGIATSKKVMTRTHVVNIPNYYPPVVDKKLIMGLRARANSKKKGRVAGRSTNDNLFQNMLFCGKCGDSMHMKQSKRETKKGTYVRKYLACYSAVHNACDAKMIPYGDVEREIIKYLIMPFDENQLDGAAKVVSDSRNERMLELEGEIKAIEDRIDEFTKEIKSNKSLKPAIALSLLSEMETDKDFKILQLKELQEQKDTIIDSLGAKPVGNFDLETEDGRVSFKIAVKQRYAGFVLFTSDQVVMVMHKRGGSEFFKIQVINRRGKAIAPVRTADTMTLFQNMLNHIKELAKTYKEGKLYEIIKAYKTNDITLFEEDYKNRGSEQPTTYKRGE

SEQ ID NO: 16731 - protein, 528 aa, synthetic construct
MKKYKTAVGYLRISSESQKDGSSIEEQKLSIKSFCTNQGIVLLELYVDTFSGKTFNRPEFENSFKYLKDNRNDVDLFLTKKADRFTRGLKTGLEAFDEISELGIEVNFVDEWIENIQSPQGQMLMHLKFTFAEYERACIYERTRAGERRALQSGRYTKTPPLGYSRGTISRGEFIGKKGMVPNEKAPLVKELFEDYSTGLYNQRELLTKFRAKGLKTSKSAISVILSNPLYAGIIDLKRYETSPFTQIKGCHQPIITEDLFLKVQRIKQGKNKNKKKIRGKNPLFPLNTFLYCSSCGSPMRGSTSNNGKKRNKTTWYNYYRCANNCGESYTPEEIHSKFLSALASIKPSAEVIELFRHILIDNYKTNSRNRIKMLSNINKQIEEVEKLQLSLTDKFARDLLSNEIYQKAITATEYDINKLKTEREQLGDYQDGLDKYVRFGLNIFVSLDYYYKNASIEVKTKLLSSYFNDKLYFDKNKFRTLPFVNIINLICNKNKGFQQLNKKKGANKNINSLVVARTGLEPATFGL

SEQ ID NO: 16732 - protein, 643 aa, synthetic construct
MTPPNPGIASPEAPVNSLDGLEHLLQSPAARAAEDARVGLAYAVTYLRVSTPRQLHTAADLDEDGNSIATQRVETMRKVRELGVPAAKEFIEPGQSAQTIAKRTEFKKLLRYVDDHPEVKYVVIYMRSRVFRNFTDAAITKRQLLEKGVRLISAKEEFGEGYMADAMEAITDIMNEVQVRMNGEDVAVKMAHKVEQGGSVGRAKLGYLNVRKDFGGRLVNTIDVDPERGPLVAWAFEQYATGRYSIARLQRLLEAQGLQTRPSPSNSAKTVSTSRLATILRDPYYTGINRYKGKLYVGRHEALVTKETYLKVQAVLDSRKRDGTRDIVHFHYLKGLLFCGECRDAGRTSRLLYSQNTGRGGTYEYLICAAHQRQLCSMVNVRVEQIEAAIVPKVSEERLSEDVLTGMQEAVSASVANILAQDRDTKTQLKKQLDKLEAQEERLIELAATGALPMSKIRARIEKTAMQRAAVEEQLEFTVDRLQYTAESVLSFLALLVDPGTLYGRASDAVRRDLLTAYFNRLVVYVADEGIKIEAERHDANARIREIHGRVANARQNAVSEQNKTPRSRAGSSVSVSNEASSFDQGLSNYDVAGVTGLEPRTTESHQVRFTQPTKRRSSAEFRGFRASIVLNPASRFGPICLL

SEQ ID NO: 16733 - protein, 498 aa, synthetic construct
MPYAVPYLRFSHVSQRGGSTIKRQEEMVGRWLAANPDYTLFTQTFKDLGRSGFKGTHLEHGFGKLQQAVRDGAIKSGDVILVEAIDRAGRLEPLEMFPILSEIVVAGVTIVTLDDGVRYDRESVNNQHLFLLIAKIQQAHQYSAALSRRVKASYESRRAKARAGEAVKVRTPVWLDKNGHLIPELAPLIQQAFEDFATGIGEKRIHRRIADKHPLLTSLDPTTIRRWMSLKVAIGYWDDIPDVFPAVVDKELFYRVQQRLLPKDDAPKPTAARKYLLSGLVKCGICGSNCTVKNQKGKGTFFICGKRHRLGEIGCENNKTVPYSPLNAIRAETSAPYLQVALQRQQLSESQKQAIVVRGEVDALTKRLDNLYATAELGLTEELKSRIQAVIAERSEKTDRLRFLESDSRPVEVKTALKVSNEMLMKDQERLNALLKSVGYEIRIFPDGAVTVPIGGAGECLRYVYQGYEPKPAVYVFDTPEGRREFKNRASKKHAPQS

SEQ ID NO: 16734 - protein, 512 aa, synthetic construct
MKRIAIYSRKSRETDTGESIKNQIDMCKTYFNRADEECSFEVFQDEGFSGGNTNRPSFQRMLELAKHKQFDVIAVYKVDRIARNIVDFVNIYDELEKHDVKLVSITEGFDPSTPIGKMMMMLLASFAEMERMNIAERVKDNMKGLAKIGRWSGGTPPTGYRSKTITLNGKKETYLELIPEKKQLLISIFKKAADGYTTYQIGEMFSMSPKTISNIICNPTYVQADSLSANYLKSIGYDIFGELNGNGYLSYNRRPKKKGKKLFNAKGMFTAVSNHEAPIDSKTWIKANNNLKDRATEAKPRISNNSFLAHLVKCSCGSGMYIHTGHKKKDGTKNLYFACSKKKTQNKCTSKWLRIDFAENHILNILKEISFSPKLLENYLKHQNNPVDYTESIKNIKKQIDKNNEKINTLTDKLIFLKGTAIDIVSEKINTIADENYKLSEQLLRLERKKMFSEVDGENVKVLLDNIKKFLQNFDKINTTERQNFAKSIIKKIVWDSSANNNKGKISIEFLE

SEQ ID NO: 16735 - protein, 434 aa, synthetic construct
MTRNIRKIEPLIQKMPRKKRVAAYARVSSGKDAMLHSLSAQVSYYSDLIQKQVGWEYAGVFADEALTGTKEIRPEFQRLLNECRSGNIDMVITKSISRLARNTVTMLETVRELKSLNIDVYFEKENIHSLSGDGELMLTILASFAQEESRSVSENCKWRIRKGFEAGELINLRFMYGYHIEKEKIEINESEAEIVRMIFDDYIEGIGCTLIAKKLRDMNVPKIRGGIWNSERVANIIKNEKYAGNALLQKKYVKNHLTKTLVINKGNLPMYYAEGTHPAIINVETFQRAQEIMSKNVEKYTRDNTRVKYPFTSIIVCGICGKNYRHKNTRGRISWNCSTHLKYGKDSCHSKQIPEEILISVTTEVLGLKEFDEDIFQEKIKELQVPEQNTLVFVFMDGTTLKKEWKYKSRSEGWSIEAREKARERSLKNIEGRS

SEQ ID NO: 16736 - protein, 529 aa, synthetic construct
MATARAVTVIPAIVGRFTPATSGVVTMKKVAAYARVSTDNDEQLSSFEAQMDYYTRYIKSNTEWSFIEVYTDEGISATSTKKRDGFNRMIADALGGKIDLIITKSVSRFARNTVDTLTTVRQLKEKGVEVYFEKENIYTLDSKGELLITIMSSLAQEESRSISENVTWGQRKRFADGKVSLPYKQFLGYEKGEDGLPKIVEKEAAVIRMIYKMFLEGKTPSGIAKHLTLSKIPTPGGKEIWQASTVSSILKNEKYKGDAILQKSFTIDFLTKKKKINEGEIPQYYVENSHPAIITPEVFDLVQHEIKKRKDAKGYKTSSGCFSGKIVCGKCGSFYGSKVWHSTSKYRRTIWQCNSKFKNNEKCGTPHLYEDKIKQAFVEVFNSIIENKQDILASYEGIIQALTDTTKLDKESFKLQSELEVISEMLKKCVEENAHSALNQDEYEERYKALAERYENIKKGLEEIDEKRLERSAKHESSIAFIKELEQRESLIIEFDENLWTGTIEKIIVNTKEQITFVFKDGMEIEWNI

SEQ ID NO: 16737 - protein, 434 aa, synthetic construct
MTRNIRKIEPLTQKMPRKKRVAAYARVSSGKDAMLHSLSAQVSYYSDLIQKHVGWEYAGVFADEALTGTKEIRPEFQRLLNECRNGKIDMVITKSISRLARNTVTMLETVRELKSLNIDVYFEKENIHSLSGDGELMLTILVSFAQEESRSVSENCKWRIRKGFEAGELINLRFMYGYHIKKGKIEINESEAEIVRMIFNDYIDGIGCTLIAKKLREMNVPKIKGGIWNSERVVNIIKNEKYAGNALLQKKYVKDHLTKTLVINKGNLPMYYAEGTHPAIINIETFQMAQEIMSKNVEKYIRDNTRVKYPFTSKIICGICGKNYRHKNTRGRISWNCSTHLKYGKDSCPSKQIPEEILIAVTTAVLGLKEFDEDIFQEKIKEIQVPEQNTLVFVFMDGTTLKKEWNYKSRSEGWSIEAREKARERSLKNIEGRN

SEQ ID NO: 16738 - protein, 529 aa, synthetic construct
MAIARAVTVIPAIVGRFTPTTSGVVTMKKVAAYARVSTDNDEQLSSFEAQMDYYARYIKSNTEWSFVEVYTDEGISATSTKKRDGFNRMITDALNGKIDLIITKSVSRFARNTVDTLTTVRQLKEKGVEVYFEKENIYTLDSKGELLITIMSSLAQEESRSISENVTWGQRKRFADGKVSLPYKQFLGYEKGEDGLPKIVEKEATIIRTIYKLFLEGKTPSAIAKHLTLSKIPTPGGKEIWQASTVSSILKNEKYKGDAILQKSFTIDFLTKKKKINEGEIPQYYVENSHPAIITPEVFDLVQHEIKKRKDAKGYKTSSGCFSGKIVCGKCGNFYGSKVWHSTSKYRRIIWQCNSKFKNNEKCGTPHLYEDKIKQAFVEVFNSVIENKEEILAGYEGILQALTDTTKLDKESFKLQSELEVVSEMLKKCVEENAHSALNQDEYEERYKALAERYENIKKGLEEIDEKRLERSAKHESITAFIKELEQREGLITEFDENLWAGTIEKIIVNTEEQITFVFKDGMEIEWNI

SEQ ID NO: 16739 - protein, 566 aa, synthetic construct
MKQSSKKTALGTAALYCRLSRDDNMDNESNSISNQKKILQKAAKDKGYTDTIFFVDDGITGTTMKRPGFQKMIAAIEAGYISAVFVKDLSRLGRNYIEVGKLTEEFFPLHDVRLVAVSDGVDSDEGEDDFTPFKNIMNEYYAKDISKKRRIVNKMKGNAGIPLSPPPYGYIKNPDDPRFWVVDPVAADVVRRIYRMALEGYGLAETAAALGADGIVNPTYYWRSKGTSRGGSKSTLEPTKWGHTTIKKILTTQEYCGDVINFKSYSKSYKMKRRIENPEENRAIFLNVHEAIIDRPTWEKVQALKAGTRRKRPTVTQEPSAFSGVMKCPECGGNLNFHFNQNNHDIKFFSCQNHNSGLRKCSSTHYIRLDFLEQVVLYEVHRLACFANEYENDFIKAMVGRSAKVAENERVRKKRELDGLLARDRELDTLFERLYEDNVSGKIDDARFAKMAKRYEQEQGENAGRIKALRLEVKKLEEKRMDVDDFLETVRHYTNAAKITKRMVAELIDHIEVYPAVKEDGVTNQRVTIHYNCIGAFEVPDRRKIPERDILLETRKGVALSYAPAV

SEQ ID NO: 16740 - protein, 558 aa, synthetic construct
MSKEKIKVYLYTRVSTSIQIDGYSLEAQKSRMKAFALYNDYEIVGEYEDAGKSGKSIEGRVQFTRMMEDIKSGKDGVSFVLVFKLSRFARNAADVLSTLQIMQDFGVNLICVEDGIDSSKDAGKLMISVLSAVAEIERENIRVQTMEGRIQKAKEGKWNGGFAPYGYQLIDGKLIINEEEAIAIRTIFDQYVNTSIGANGLSKYLENHGIRKIPRQNGKNPLFDAGLIRKILKNPVYNGKIAFGRRTLEKVHGTRNEYRQVEQDDYLVAEGIHEAIIPDELWQAAQVKLKAQAKKYEHVNKGKNMRTHLLSGIVKCPICGAGMFGNKSIKYKKDGTKYKDFYYYGCKHRLMNRGHKCTYNKQIREELLDDAVAEVIIKLVSNPKFASMMQEKINMKVDTSAIENEIDNYQKELRKSHSTKFKLIEEIDNLDVEDKHYKRRKNDLDDRLYRMYDKIEELESQLIEAKAKKETIEVEKLTGDNIYKVLIYFDKLYKVMNDVERRQLIEALISEIQIYEEKQPNGQWLKSITFKLPIIDKDLNISLDNDKQVETVAKIIKQ

SEQ ID NO: 16741 - protein, 591 aa, synthetic construct
MQEVEVIKAKNVLSRQARGKAIERLRVAAYCRVSTDSEDQLNSYKSQVQYYTDMIKKNKEWVLADIYADEAITGTQVTKREDFQRMINDCMNGEIDMVFTKSISRFARNTLDTLKYVRMLKERNIAVYFEDEKINTLTMDGELLLVVLSSVAQQEVENISANVKKGLKMKMKRGELVGFQGCIGYDYHPEDKTITVNQEEAEIVRYIFNRYVDGAGGSVIGQELESLGYKTKYGSSTWAPSTVIGIIKNEKYKGDILLGKTFTVDPISKRRLENMGEEDKFYMKDHHEPIISEEVFEKAQEILNRRNKNRTTVGSGKREKYSRKYAFSCMLECGFCGGTLTRRNWHSGSQYSKVIWQCVTATKKGKKFCKHSKGIPETAIEEAFVESYRLLCDDNKDVLEEFLQRMDDTLSSSVVSKQLAKAEKEIDALEKKKSKLVDMRLEEIIDKETYESKYADLVSKQEQLVEERQKLQETSDNEKDIKKRLKEFKKTLEQNEVLDKFDRYVFESIVEKVIVGGLDENGNVDPAQLTFVYKTGLKNSVDGAKFKPQRKNARGRHRTNELCSHDSNEVDKMCSDSSNDTCGDGSTIVQT

SEQ ID NO: 16742 - protein, 532 aa, synthetic construct
MKAAIYSRKSRFTGKGDSIENQIQLCLDYTKSIGIKDFLIYEDEGFSGSNIDRPQFKKMMQDAKDKKFNYLVCYRLDRISRNVSDFSTLIEKLNELNISFISIKEQFDTSTPMGRAMMFISSVFAQLERETIAERIKDNMYELARSGRWLGGNTPHGFNSEKITFLDENLKERSMYKLQVNNEQMEVVKLIYNKYLEFRSLSKLYKYVYHNGIRGPRGGKFDPSSLSRILRNPAYVKANDEVLEYLRNNGMDVIGTSDRKCGILTYAKNTSDSIAAIAKHHGVIEPEIWLEVQSQLDKNRDKTPRIATGKTALLSGLIKCGKCGANMRITYKGKKTDKDLKYYYVCGTKKTLGADTCNCKNLNGQLVESLVIDKIKNCKVESIISEFNSNNIKNGNIFNVLKSETNLLKNQILNKERLIKNLIIELAKNTGSTASDYIVSQIESLNSEISILKDKLNTLETSNVNISSDSINLDIIVSNLKRFNDEVDNASLDDKRLLLSTIINSIVWDSSLGNLNIIYMGAEMDNSVSLSN

SEQ ID NO: 16743 - protein, 1009 aa, synthetic construct
MRKLTAGGMTNKLKAKARVTLSALDMKKLILTNLPYLFIFLLADRASCLYRASPGADMGNKLLYAMEHADRILTGFLPSLYYMDVLVGAGIAAVVKILVWQKQADAKKLRKGVEYGSARWGTAEDIKPFMADDFWMNIPLTATESITMESRPKNPKFARNKNICVIGGSGSGKTRFFVKVSIMMMNCSMVITDPKGTLIEECGKMLAKGPPKRDKHGNVVKDKSGKVVHEPYVIKVLNTINFSKSLHYNPFAYLKSEKDILKLVTVIIANTKGEGEKATEDFWVKAEKLLYTALIALIWYEGDEDEKNMNTLIDLLNESETREDDENYKNPVDMLFEDLEKRNPEHFAVRQYKKYKLAAGVVCFRRLLNQSIGKSPKTYNEERRIRMDTRMITALYERLSRDDDVEGESNSIQNQKKLLEDYAKQHGFPNPVHFTDDGISGTCFDRPGFLEMMKQVEAGRVEYLCIKDMSRLGRDYLKVGQIMEILRQKGVRLIAINDGVDSARGDDDFTPFRNIMNEYYARDTSRKIRSTFQSKGKSGKHVTGLVIYGYLWNETRDQWLVDEYAAGVVKRIFQMTINGMGPYQIAAKLKEDKILIPSAYLATHNEGVNKSKTFKDVYGWGSSTVVNILDKREYLGHTVNFKTRKHFKDKKSHYVPEDEWLIFENTHEAIIDQETFDLAQKVRSNVRRYPDGWGDVAPLTGLMYCADCGGKMYVHRTNNGKRISQYTCSKYTKVPCGTLCPTQHRINESVVLELISDLLKAIAEYAKHDRDEFIRVVQEAQDSHIAADVKRQRTKLNTAKQRLNELEVLLCKIYEDNILGKLPDARYATLDAQYAKEQATLKAEVSTLEAFLENHEKNRKSAERFITLIEKYENFDNLTIAMLNEFIDKILVHERDRKGSRETTQEVEIYFNFVGKFVPPTYAEAELTPEELEELRKREERKDRLHQNYLKRKASGAQKRYEDKIKAKKKAEMDAKKNAIRAEDVARGVFIPVSNMPKLEPQIAPQKGA

SEQ ID NO: 16744 - protein, 452 aa, synthetic construct
MKAAIYIRVSTQEQIENYSIQAQTEKLTALCRSKDWDVYDIFIDGGYSGSNMNRPALNEMLSKLHEIDAVVVYRLDRLSRSQRDTITLIEEYFLKNNVEFVSLSETLDTSSPFGRAMIGILSVFAQLERETIRDRMVMGKIKRIEAGLPLTTAKGRTFGYDVIDTKLYINEEEAKQLRLIYDIFEEEQSITFLQKRLKKLGFKVRTYNRYNNWLTNDLYCGYVSYKDKVHVKGIHEPIISEEQFYRVQEIFSRMGKNPNMNKESASLLNNLVVCSKCGLGFVHRRKDTVSRGKKYHYRYYSCKTYKHTHELEKCGNKIWRADKLEELIIDRVNNYSFASRNVDKEDELDYLNEKLKIEHAKKKRLFDLYINGSYEVSELDAMMADIDAQINYYEAQIEANEELKKNKKIQENLADLATVDFDSLEFREKQLYLKSLINKIYIDDEQVTIEWL

SEQ ID NO: 16745 - protein, 521 aa, synthetic construct
MTEKNIMVIPARKRVGSTAAKEKIKKLRVAAYCRVSTETEEQNSSYEVQVAHYTEFIKKNNEWEFAGIFADDGISGTNTKKRDEFNRMIAECMDGNIDMVITKSISRFARNTLDCLQYIRQLKDKNISVYFEKENINTTDAKGEVLLTIMASLAQQESQSLSQNVKLGLQYRYQQGKVQVNDKRFMGYTKDEDGNLIIVPEEAEIIKRIYREYLEGQSLAGIGRGLEKDGILTAAGKPRWRPESVKKILQNEKYIGDALLQKTVTVDFLTKKRVKNEGHLPQYYVENSHEAIIPKDLFLQVQEEIHRRRNIYTGADKNKRIYSSKYALSAITFCGDCGDIYRRTYWNIHGRKEFVWRCVTRIEQGPEVCKNRTVKEDELYGAVMTATNRLLAGGDNMIRTLEENIHAVIGDTTEYQISELNSLLEENQKELISLANKGKDYESLADEIDELREKRQTLLIEDASLSGENERINELIEFVRDNKYCTLRYDDTLVRKIIQNVTVYEDHFVIGFKSGIEIEVE

SEQ ID NO: 16746 - protein, 520 aa, synthetic construct
MKKITKIDELPQVQLPNTKLRVAAYARVSTDSDEQLESLKAQREHYERYIKSNPEWVFAGLYYDEGISGTKMEKRTELLRMIRDCKQGRIDFIITKSISRFARNTVDCLELVRELIDIGVYIYFEKENLNTGDMESELMLSILSGFAAEESASISQNSTWSIQKRFQNGSYVGTPPYGYSNIYGEMVIVPEEAEIIKRIFAECLSGKGGGTIARGLNKDKIPARRGNHWSAGTVIDMLRNEKYMGDVLLQKTYTDSNYNRHPNTGEKDQYYYKDSHEAIISREDFAKTQDLIDERAKMKCKGVKKNVYLNRYALSGKIVCGECGRNFRRKTNYSAGRSYIAWSCIGHIEDKESCSMLFLRDGEIKATFTTMMNKLAFSHKLILEPLFKSISQIDEDSDRERMDAIDKRMEQLMEERNTLITLMAKGFLEPALFNQERNVLDSEMKNLSTEKTNLVSNSASELLRANEIKDLINYVSADNFNGDYTEELFEEFVVNIIVNSRDELTFNLKCGLSLKEKVVR

SEQ ID NO: 16747 - protein, 452 aa, synthetic construct
MKAAIYIRVSTQEQVENYSIQAQTEKLTALCRSKDWDVYDIFIDGGYSGSNMNRPALNEMLSKLHEIDAVVVYRLDRLSRSQRDTITLIEEYFLKNNVEFVSLSETLDTSSPFGRAMIGILSVFAQLERETIRDRMVMGKIKRVESGLPLTTAKGRTFGYDVVDTKLYVNKEEAQHLQLIYDIFEEEKSITFLQKRLKKLGFKVKSYSSYNKWLMNDLYIGYVSYGDKVHVKGVHEPIISEEQFYRVQEVFSRMGKNPNMNKESSSLLNNLIVCEKCGLSFVHRVKDTVSRGKKYHYRYYSCKTYKHTHELEKCGNKTWRADKLEEIIIDRVKNYSFATRNVDKEDELDSINAKLKVEHLKKKRLFDLYINGSYEVAELDKMMADIDAQINYYNSQIEANEELKRNKKVQESLAELATVDFDSLEFREKQIYLKSIINKIYIDGEQVTIEWI

SEQ ID NO: 16748 - protein, 403 aa, synthetic construct
MNRSGKKCVLYPRVSTEMQVDGFSLDGQKNSLKRFADREEMEIVNIYEDAGKSGKSIEGRPAFMQMLSDIENGLGIDYVLVYKLSRFGRNAADILNSLEHIQSFGVNLICIEEGIDSSQTSGKLLISVLSAVAEIERENIIEQIMNGRKEKARQGGWNGDFAPYGYFLKDKQLFIQEDEAEAVRIIFDKYVNGNMGFYKIANYLNLQGIQKVKRDNGTLTQWSTHFVRMIIDNPVYMGKIAFGRRTREKVKDTKNEYRQVHQDDYILADGQHDGIISEELWTQAHEKREITGVKAPSKIGRDRAHLLSGILKCPKCGGPMYTNKHAWTNKDGTYKEIYYYVCRKARTTRKKSCDYKAMLKKTDIEPLVVEAIRDLIKNEDFAAEIKSKIGKQIDTSTLDRERT

SEQ ID NO: 16749 - protein, 519 aa, synthetic construct
MGERKTAVGYIRVSTGVQARDGFSLDNQVEEIRNKCKKEEWELLGVFDDKGKSGALLNERPGLLEMMKFIKENNVNYLIIYKFSRLSRNIENLFLITKQLEDTSTHLVSTSDNINTEGPLGKAFMVLTGLFAEMERDNIIEQVKGGMSQKAREGEWNGGTAPLGYDLVDKKLIINGEESKTVKFIYTEYLKGKGYKTIAAQLNDDGIKTKIGGTFSGNSVKDILRNPTFCGKIRWGHRKDWGKRYSDGKRKRVYNEEPIIVEGKHDPIIDEATFSKVQELIDNNPRHHMKRFNGNHLLSGLLKCPDCGNGMSIQPVKNGKRTYEYYTCNQYMNHKTCKPNTINKAKIEPEFLDILEKKVNEPDFQKSILASLNSSNEQVKEFEKVIKSKDREIKESEQKLEDIIDELLEESSERVKEALRKRMDKLSLRIEELQTDISKKKASIKNLESQNLNQDEIVEVFKSVGKAIKLIEDKEKQQSLVRMLVAEIQVENKHIKEVHFRFSKKFRIGGGKENRTISK

SEQ ID NO: 16750 - protein, 558 aa, synthetic construct
MSGNVYSYMRWSTDRQSDGSTEERQRTSQEAFCKHFGMTLVEELTDPGMSSYRGKNAHEGKLREVINRAKAGDIPPGSLLLFENADRMTRMALAHAVPLFFEILGAGLQIGIADRLQIYTPGTLDLGGLMTILVDMERANKESTRKSDFARNGWKKNHDRMEQGEVVTDKCPQWLDVVEKKFVVRDDIADQIRALFHASLQYGVAESCRRVNEQFGSSWKVHQVQYLLKNRRLIGEHTITNFNEQAGKNTPSDRVLTDYYPVIIDKNLFAEVQAVINKRRPFAGKQDASNLNIYRGLVKCAACGGSVRFMLKTGKEYFHCTASMTNSCTEPGIRSIRGEYLRRLLFKFEHWTNLKNYFMEASEDLKTLRRERDALLVQMKKIATRTSQTQQRLMDEDDTDRQSVLLDMLTKAKGDDRDTRAKLATAETALSELEDAFNIGGLEVGDRMEWLLNDRSEPAALERARINRYLGNIFEKLVIDFTGKTLTTEVRPAFKGKVTEFQAGISSPPDRRMKPTTGVKRIIGTPRGTPRPKTEDVPPPPPGLVWITSNELLPTKES

SEQ ID NO: 16751 - protein, 540 aa, synthetic construct
MKQPYNTTIYNTALYMRLSRDDELQGESGSIQTQRMMLRQYAAEHGLNVIDEYIDDGWSGTNFDRPDFQRMIDDIEDGKINCVVTKDLSRLGRNYILTGQYTEIYFPSKGVRYIAVNDNVDTINGENELAPFLNILNEMHARQTSKKVKAAMRTRFANGAHYGAYAPLGYVKDPDKKGHLLIDPETRWIIEKIFDLAVHGRGAASITRILVEEKVPTPGWLNFQRYGTFANIYAGAPEEKAYAWTIAQVKSILKEETYIGHSVHNKQTNISFKNKKKVRKPKEEWYRVENTHEAIISEDVFRQVQEQICNRRRRQKNGTTQIFSGLVKCADCGWSLAYGMNSQNKNPYAHYHCSKYGQGTRQCSMHYIRYDVLYAYVLSRLQYWSVLAQQDGDKLLKRLLNASDKERNTARKRQTAELKKAEKRKAEVDTLFAKMYEDWSAGRITEYNFNMLSEKYQGEQRELDAKIERLHEAMEAAAQTAVDAEKWIGLMKQYVNPTELTAELLNTLIEKILVHEAVKSEDGSREQEVEIFYRFIGKIE

SEQ ID NO: 16752 - protein, 547 aa, synthetic construct
MKLLVTYIRWSTKEQDSGDSLRRQTNLIDAFYSKHKNDYYLLPAHRYVDKGKSGFHQQHKNQGSDFRRMFENVMSGAIPEGSLIVVENFDRFSRADIDTAIDDVRQILRKGVSILTLGDGELYDKSALTDPVKLIKHIIIAERAHQESLVKQKRIAQVWNHKTQLARELKKPMGKQAPGWLELSEDGSHYIVDEDKASLVNIIYDKRLSGMSMFAICKWLNEQGYPTINQRKVRISKTKKPDGNWSALSVKHILTSRSVLGYLPAKISTEDRKTVLREEIEGFYPQIVTDSKFYAVQQLLEETGKGKTSSGEHWLYVNILKGLIRCKCGLVMTPTGIRKPVYQGTYRCNGNKESRCSYGTVSRKLLDTQLCSRLFSKLSQLHDEATDTAKLDELQRRLNTVDSELEKLTETLIQLPNITQIQEALRVKQEEKDELIVQLSREKARVKSVSSLDLSGLDMESVEGRTEAQIIIKRLVKEIVVSGNEKLVDIYLHNGNMIRGFPLDGKDDHTLTLEEATDEMQSLDDMLIFGEPVTRIYPAGDMEEVDA

SEQ ID NO: 16753 - protein, 547 aa, synthetic construct
MKLLVTYIRWSTKEQDSGDSLRRQTNLIDAFYAKHKDDYYLLPAHRYVDKGKSGFHQQHKNQGSDFRRMFENVMSGVIPEGSLIVVENFDRFSRADIDTAIDDVRQILRKGVSILTLGDGELYDKSALTDPVKLIKHIIIAERAHQESLVKQKRIAQVWNHKTQLARELKKPMGKQAPGWLELSEDGSHYIVDEDKASLVNIIYDKRLSGMSMFAICKWLNEQGYPTINQRKVRISKTKKPDGNWSALSVKHILTSRSVLGYLPAKISTEDRKTVLREEIEGFYPQIVTDSKFYAVQQLLEETGKGKTSSGEHWLYVNILKGLIRCKCGLVMTPTGIRKPVYQGTYRCNGNKESRCNYGTVSRKLLDTQLCSRLFSKLSQLHDEATDTAKLDELQRRLNTVDGELEKLTETLIQLPNITQIQEALRVKQEEKDELIVQLSREKARVKSVSSLDLSGLDMESVEGRTEAQIIIKRLVKEIVVSGNEKLVDIYLHNGNMIRGFPLDGKDDHTLTLEEATDEMQSLDDMLIFGEPVTRIYPAGDMEEVDA

SEQ ID NO: 16754 - protein, 506 aa, synthetic construct
MRSVITYLRFSSATQGAEGADSTRRQNDLFKQWLKKNSDAQVVASFSDEGLSGYKGKHLTGQFGDMLARIESGEFPEGTLLLVEAIDRIGRLEHLETEALMNRIIAHGIEIHTLQDGLIYTRDALSDDLGISIIQRVKSYIAHQESKQKSFRVSQKWEQRAKLALAGEQRLTKMVPGWIDPDTFKLNEHAETVRLIFKLLLDGESLHNIARHLQSNDIKSFSRRKDANGFSVHSVRTVLRSVSAIGTLPASQRNDRPAIPNYYEAAIDAATFNKAQEILDKNRKGRTPASDNPLTINIFKGLFRCQCGASVHPTGTKRTYQGVYRCNNHLDGRCDVPPLKRKPFDKWMIDNFLGMIDVGNDGEAEGKIAALQHEVEIVTARIKKATALLLEMDDITELKTQVKGLNQKRTELQTTIDNMRRKASLTDKELPQLKDIDLTTKAGRVECQLILSKHLKGLTLGKDSVTVTLQNDTEITIPTNPLPLNDGSPIFEIADKELLDIDAYQL

SEQ ID NO: 16755 - protein, 481 aa, synthetic construct
MITTNKVAIYVRVSTTNQVEEGYSIDEQKDKLSSYCDIKDWNVYKVYTDGGFSGSNTDRPALESLIKDAKKRKFDTVLVYKLDRLSRSQKDTLHLIEDVFIKNGIEFLSLQENFDTSTPFGKAMIGLLSVFAQLEREQIKERMQLGKLGRAKSGKSMMWAKTSYGYDYHKETGTVTINPAQALTIKFIFESYLRGRSITKLRDDLNEKYPKHVPWSYRAVRTILDNPVYCGFNQYKGEIYPGNHEPIISKEEYDKTQSELKIRQRTAAENVNPRPFQAKYILSGIAQCGYCGAPLKIMLGVKRKDGSRLKKYECHQRHPRTLRGVTTYNDNKKCDSGFYYKDKLEASVLKEISKLQDDDDYLDKIFSGDNAETIDRESYKKQIEELSKKLSRLNDLYIDDRITLEELQSKSAEFISMRGTLETELENDPALRKNKRKADMRKLLNAEKVFSMDYESQKVLVRRLINKVKVTAEDIVINWKI

SEQ ID NO: 16756 - protein, 481 aa, synthetic construct
MITTNKVAIYVRVSTTNQVEEGYSIDEQKDKLSSYCDIKDWNVYKVYTDGGFSGSNTDRPALESLIKDAKKRKFDTVLVYKLDRLSRSQKDTLHLIEDVFIKNGIEFLSLQENFDTSTPFGKAMIGLLSVFAQLEREQIKERMQLGKLGRAKSGKSMMWAKTSYGYDYHKETGTVTINPAQALTIKFIFESYLRGRSITKLRDDLNEKYPKHVPWSYRAVRTILDNPVYCGFNQYKGEIYPGNHEPIISKEEYDKTQSELKIRQRTAAENVNPRPFQAKYILSGIAQCGYCGAPLKIMLGVKRKDGSRLKKYECHQRHPRTLRGVTTYNDNKKCDSGFYYKDKLEAYVLKEISKLQDDADYLNKIFSGDNAETIDRESYKKQIEELSKKLSRLNDLYIDDRITLEELQSKSAEFISMRGTLETELENDPALRKNKRKADMRKLLNAEKVFSMDYENQKVLVRRLINKVKVTAEDIVINWKI

SEQ ID NO: 16757 - protein, 481 aa, synthetic construct
MITTNKVAIYVRVSTTSQVEEGYSIDEQKAKLSSYCDIKDWSVYKIYTDGGFSGSNTDRPALEGLIKDAKKRKFDTVLVYKLDRLSRSQKDTLYLIEDIFIKNNIAFLSLQENFDTSTPFGKAMIGLLSVFAQLEREQIKERMQLGKIGRAKAGKSMMWAKTSYGYDYHRETGTITINPAQALAVKFIFESYLRGRSITKLRDDLNEKYPKHVPWSYRAVRTILDNPVYCGFNQYKGEIYPGNHESIISKEEYDKTQSELKIRQRTAAENVNPRPFQAKYILSGIAQCGYCGAPLKIMLGLKRKDGSRLKKYECHQRHPRTLRGVTTYNDNKKCDSGFYYKDKLEAYVLTEISKLQDNAGYLDKIFSGDNAETIDRESYKKQIEELSKKLSRLNDLYIDDRITLEELQSKSAEFISMRGTLETELENDPALRKNKRKADMRKLLNAEKIFSMDYEGQKVLVRGLINKVQVTAEDIVINWKI

SEQ ID NO: 16758 - protein, 481 aa, synthetic construct
MITTNKVAIYVRVSTTNQVEEGYSIDEQKDKLSSYCDIKDWNVYKVYTDGGFSGSNTDRPALESLIKDAKKRKFDTVLVYKLDRLSRSQKDTLHLIEDVFIKNGIEFLSLQENFDTSTPFGKAMIGLLSVFAQLEREQIKERMQLGKIGRAKAGKSMMWAKTSYGYDYHRETGTITINPAQALAIKFIFESYLRGRSITKLRDDLNEKYPKHVPWSYRAVRTILDNPVYCGFNQYKGEIYPGNHEPIISKEEYDKTQSELKIRQRTAAENVNPRPFQAKYILSGIAQCGYCGAPLKIMLGVKRKDGSRLKKYECHQRHPRTLRGVTTYNDNKKCDSGFYYKDKLEAYVLKEISKLQDDADYLDKIFSGDNAETIDRESYKKQIEELSKKLSRLNDLYIDDRITLEELQSKSAEFISMRATLETELENDPALRKNKRKADMRKLLNAEKVFSMDYEGQKVLVRGLINKVQVTAEDIVIKWKI

SEQ ID NO: 16759 - protein, 481 aa, synthetic construct
MIATNKVAIYVRVSTTNQVEEGYSIDEQKDKLSSYCDIKDWNVYKVYTDGGFSGSNTDRPALESLIKDAKKRKFDTVLVYKLDRLSRSQKDTLHLIEDVFIKNGIEFLSLQENFDTSTPFGKAMIGLLSVFAQLEREQIKERMQLGKLGRAKSGKSMMWAKTSYGYDYHKETGTVTINPAQALTIKFIFESYLRGRSITKLRDDLNEKYPKHVPWSYRAVRTILDNPVYCGFNQYKGEIYPGNHEPIISKEEYDKTQSELKIRQRTAAENVNPRPFQAKYILSGIAQCGYCGAPLKIMLGVKRKDGSRLKKYECHQRHPRTLRGVTTYNDNKKCDSGFYYKDKLEASVLKEISKLQDDADYLDKIFSGDNAETIDRESHKKQIEELSKKLSRLNDLYIDDRITLEELQSKSAEFISMRATLETELENDSALRKNKRKADMRKLLNAEKVFSMDYEKQKVLVRGLINKVQVTAEDIVIKWKI

SEQ ID NO: 16760 - protein, 481 aa, synthetic construct
MITTNKVAIYVRVSTTNQVEEGYSIDEQKDKLSSYCDIKDWNVYKVYTDGGFSGSNTDRPALESLIKDAKKRKFDTVLVYKLDRLSRSQKDTLHLIEDVFIKNGIEFLSLQENFDTSTPFGKAMIGLLSVFAQLEREQIKERMQLGKLGRAKSGKSMMWAKTSYGYDYHKETGTVTINPAQALTIKFIFESYLRGRSITKLRDDLNEKYPKHVPWSYRAVRTILDNPVYCGFNQYKGEIYPGNHEPIISKEEYDKTQSELKIRQRTAAENVNPRPFQAKYILSGIAQCGYCGAPLKIMLGVKRKDGSRLKKYECHQRHPRTLRGVTTYNDNKKCDSGFYYKDKLEASVLKEISKLQDDADYLDKIFSGDNAETIDRESYKKQIEELSKKLNRLNDLYIDDRITLEELQSKSAEFISMRGTLETELENDPALRKNKRKADMRKLLNAEKVFSMDYESQKVLVRRLINKVKVTAEDIVINWKI

SEQ ID NO: 16761 - protein, 485 aa, synthetic construct
MGGIVKYAVYVRVSTDRDEQISSVQNQIDICRYWLEKNGYEWDSNAVYFDDGISGTAWLERHAMQLILEKARRNELDTVVFKSIHRLARDLRDALEIKEILIGHGIRLVTIEENYDSLYEGGNDIKFEMFAMFAAQLPKTLSVSISAAMQAKARRGEAIGKPGLGYDVIDKRLVINEKEAEVVRGIFDLSKKGFGYKKIASILNDKGIYTKFGKLWSDTTIAKVLKNQKYKGDLVSNRYKTVKMDGRKKRIHTPKDRLTIIEDHYPAIVSKELWNAVNNNRISQKKTKQDMRNEFRGMIFCNHCGGSITVKYSGRYSKKNKKEWVYLKCSNFLRYNQCVNFNPIYYDEIREVIIYRLKQKEKELEIHFNPKIHEKREAKSMEIKKHIKLLKAKKEKLIDLYVDGLIDKDVFSKRDLNFENEIKEQELELLKLMDQNKRMKEDQQIKKAFSMLDEEKDMHEIFKILIKKITLSKDKYIEIEYTFSL

SEQ ID NO: 16762 - protein, 541 aa, synthetic construct
MAQAATAKKVVIVPVKTLDIVEGIQPIQKKKVAAYCRVSTDSEEQKESYTNQVNHYTKYIQNNLEWEMADIYADEGITGTSTKNRTHFNRMIQDARNGKLDLILVKSISRFAMNTLDLLKYVRELKSLGVAVFFERENINTLDTTGEVLLTILSSLAQDESRNISENSRWGILRGFQNGKVFCNTTRFLGYDKDEHGELVINEKEAEIVRRIYEEYLDGKSYQAIARGLMRDKIKTVTGGDTWWDSSITLILTNEKYYGALLQQKTVTVDFLTHKRIRNKGQEQQYLIEDNHEPIVSKELFEAVQKEKERRAKMKGSVMGDSKRYSSKYALSSKVYCGCCGAIFKRRTWNSNNASKKVVWQCKTYVSEGKAACDAKSVDEQVLYAAFVRVFNRMYENKKRLIKTLKANIESVLSSRVEQKSLLDIEGQMQQLKSDLKELVNLKLRNQIDETVYDEETNRLSNELNELRQQKLTLDKEEEQKANIKERVDEIIQVLSLREDILEQFDDNLFNALVEKITILSPAHFVFTLKSRTDIDEIIGD

SEQ ID NO: 16763 - protein, 511 aa, synthetic construct
MLLDNSLSLRDEGLSAYHQRHVTQGALGVFLRAVEDGRIPAGSVLIVEGLDRLSRAEPIQAQAQLAQIINAGITVVTASDGREYNRARLKAQPMDLVYSLLVMIRAHEESDTKSKRVKAAIRRQCQGWIAGTWRQPVRVGKDPQWIREVANQFELIPERAAAIRLIVAMYKQGHGAVRIVRELSERGLAVSDTGRTSSAHIYKILANRMLIGEKTVELDGEEYRLEGYYPAVISSAEFAELRHFAEQRFRRKGKGEIPGVVTGLGLTYCGYCGTAVTAQNIMGRRRDTEGRPQPGHRRLSCFAYRTGSGCPVSGSVSVAPIERALMHYCSDQINLSRLLEGDSNSAGLSAHLAQTRQRVINIEAQIQRVTDVLLSEVDAPPAAVLRRIRELEAQLQRDRNEISSLEDRLAAESSAMPAVAQAWAELVEGVEELNYDARMQARQLVADTFSRIVVYHRGFTPRANSNTIGLLLVGKRGVTRLIKIDRKTGKWKAAEEIRIRGMVANELPLPS

SEQ ID NO: 16764 - protein, 511 aa, synthetic construct
MLLDNSLSLRDEGLSAYHQRHVTQGALGVFLRAVEDGRIPAGSVLIVEGLDRLSRAEPIQAQAQLAQIINAGITVVTASDGREYNRARLKAQPMDLVYSLLVMIRAHEESDTKSKRVKAAIRRQCQGWIAGTWRQPVRVGKDPQWIREVANQFELIPERAAAIRLIVAMYKQGHGAVRIVRELSERGLAVSDTGRTSSAHIYKILANRMLIGEKTVELDGEEYRLEGYYPAVISSAEFAELRHFAEQRFRRKGKGEIPGVVTGLGLTYCGYCGTAVTAQNIMGRRRDTERRPQPGHRRLSCFAYRTGSGCPVSGSVSVAPIERALMHYCSDQINLSRLLEGDSNSAGLSAHLAQTRQRVINIEAQIQRVTDVLLSEVDAPPAAVLRRIRELEAQLQRDRNEISSLEDRLAAESSAMPAVAQAWAELVEGVEELNYDARMQARQLVADTFSRIVVYHRGFTPRANSNTIGLLLVGKRGVTRLIKIDRKTGKWKAAEEIRIRGMVANELPLPS

SEQ ID NO: 16765 - protein, 481 aa, synthetic construct
MITTNKVAIYVRVSTTSQVEEGYSIDEQKAKLSSYCDIKDWSVYKIYTDGGFSGSNTDRPALEGLIKDAKKRKFDTVLVYKLDRLSRSQKDTLYLIEDIFIKNNIAFLSLQENFDTSTPFGKAMIGLLSVFAQLEREQIKERMQLGKIGRAKAGKSMMWAKTSYGYDYHRETGTITINPAQALAVKFIFESYLRGRSITKLRDDLNEKYPKHVPWSYRAVRTILDNPVYCGFNQYKGEIYPGNHESIISKEEYDKTQSELKIRQRTAAENVNPRPFQAKYILSGITQCGYCGAPLKIMLGVKRKDGSRLKKYECHQRHPRTLRGVTTYNDNKKCDSGFYYKDKLEAYVLTEISKLQDNAGYLDKIFSGDNAETIDRESYKKQIEELSKKLSRLNDLYIDDRITLEELQSKSAEFISMRGTLETELENDPALRKNKRKADMRKLLNAEKIFSMDYEGQKVLVRGLINKVQVTAEDIVINWKI

SEQ ID NO: 16766 - protein, 624 aa, synthetic construct
MIKTFIYSRVSSQEQLSGGGLDRQETDVREYVTRNGLDQYEIVAMVDRGISGYDGSNMRDGELGKWYKDAITGMYWGSHLVLEAIDRFSRRDPMLAMEDFTVLVNKGGIKVHIVKFNTFINGDNLPMLSMMMNLAHSESKQKSDRISKGWQRRRRMALDNGTAITARTPYWIDVRDNEYRLNNSSIAVVEAFAMYKQGLSCGLIAKKLNELKHYFPYMWTKTAVQHIVDGLNTSGIIDAPRAIKTIKAFYKSGFSVEDIAKKMNAEFQFMKEWNAPAVHKLLQNKSVTGLVEIQKRKLIQEFDSDGKPLELRTKSEGEKYFESIYPQIISIDDFELIQKLLESNRKVDTKTGKGQTTGGTVTQNEDGELVKQFILSSLCRCYKCGGAMFNNIVRSKRKNGKVDTYSYLRCLNERDAHCDVKALNYPVIERAIIEHVKGLNFDTMFKGTNNSELELLKTREVELLCDIATYEDAIAARKAAGKNTSPVLVTSLVDAQDDLEALQKKIRAISGVTVNAEELTSLNESVFDVAEYELRNMVELELQKIIKRITFNCTEKNIYFITIQYNTGTVLQHGLKVDKKKGVIETYELHEGNKGYVSNGEVITPALIEAAESKNIGIFEGKVM

SEQ ID NO: 16767 - protein, 558 aa, synthetic construct
MTKLYSYIRFSSMRQSDGSSYERQIRMAKEIAARYNLELVNDYQDLGVSAFKGANSKTGALSRFLDEIGRSIPVGSWLFIENLDRLSRQDIISAQELFLSIIRRGITIVTGMDNKIYSIETVTANPMDLMFSILLFIRGNEESQTKRNRTNSSALLKIKAHQQNPQSPAVAIEEIGKNMWWTDTTSGRVLPHPVYFPVLQKIVQLRQEGHSAGVILDYLNEHHEPPAPTSNKKHGKWSRAMVSRLFATKALIGVKTVNVDGVEYELRDYYPRVLSDSEFYFLRKNIVKKAWDYSHDKEKVIPLLSGIGVLRCVHCGATMVKQTAANGKREQYRYCCDGRKSGRTDCPYPNWGFRAVTLEGAVLQLLADKIWIAEDKTNPIPEIQVKIDEISRKIDNLINLSAMTGATKELANQITDLNSQREALHEEIRLFEREMYSVDSQGWDKLAQFDLSDVQNEERLKVRLKIKGALHEIECSRIDSKKNLFVLVYLDGLRQRLVIENNRGLKKGQIFVDLKTINDRQILESAGMVLHPCIEMIIDSDWKAPEEIPGLLSEEFGI

SEQ ID NO: 16768 - protein, 514 aa, synthetic construct
MKPIKRRAYSYLRFSTPEQLKGDSYRRQTTMALEYAARHGLALDQDLTFEDLGVSAYRGANAEAGRLGEFLEAVRVGLVPRGSYLLVEALDRLSRLVPRKAVRVLEDIVEEGITVVTLNDGREYTSENLDADPTSLLIAIVLFMRANEESATKSRRLKAAWEGKRQNIDDRPLTAVTPAWVTLNEATGKLELIPDRAAIVRRIFDMYVSGVGYASIAETFNREGIACFGRAQHWHRTYVRKILTNDAVVGTFTPHRIVHEGGKKVRVPLEKVPGYFPAVIPEEVFARAQAQLGPAPKHRGAVVSNIIAGLARCPLCGSTMTRVTKGSGPKGGKPKLICTKAKAGAGCQYHAVPLENVETAIVENASFIAGTVPSGREGLDTDLDMAEVRIAATQDEIENLLQALAAAPSTAIAERVRDLELSLDALRTERDILADQLVAANGPLLGKRVEDLRATLEADPMDRAKSNAALRLLLSSVTVDYERGKLMLEWKHGGETEVVFGMPSEARKVTRLSA

SEQ ID NO: 16769 - protein, 540 aa, synthetic construct
MQAGPKVYSYLRFSDPKQASGHSADRQAQYAKAWAKERGLSLDESLTLRDEGLSAYHQRHIKQGALGVFLAAIEDGRIAHGSVLVVEGLDRLSRAEPIQAQAQLAQIIGGGVTVVTASDGREYNRERLKAQPMDLVYSLLVMIRAHEESDTKSKRVSAAIRRQCQGWIEGTYRGLIRNGGDPRWLQLKDGKWVLIQERARAVRFVLDRYLEGLGGGRIYQLMVEGGYDTSNVGNSGERIYRLVRLPALKGVKQISVGGDEFLLPDYYPRLLSDSEFEALQAMNGERFRRRGKGAIPGVVTGIGITYCGYCGTSMSAQNVMQKRRADGSMADGHRRIMCVSYMDGQGCDAGGSCSVAPVERALMAYCSDQMNLQRLQEPALEGKSLMQMRIEAQGACDEIEGQISRLTEALALGEGEGVAPLVLVRKLQELEQRHQGAKAKVQEVDRKMVAATARQAPANAQVWADLAAGVDALDTAVRDRVRQLMLDTFERIVIYMRGVIPAGRTSRDIDVLLVSKAGQKRWLRVDRKTSAWAAGADRPQ

SEQ ID NO: 16770 - protein, 576 aa, synthetic construct
MTTRRPHVYTRISKTTQTEGSGLDEQTARIEQYLKDKRHLFEGDVTYWQDIGLSAYGNKNIQDGQLAEFIKQVDEGRIGQGDALIIYSLDRLSRRSSWDETTIQHLVKKGVEIHDVSTPVVLNREDSMSKIIMELIVTRGNNESKIKSERSSAGWEKRLNDTLKDGRVFTNKLPRWLGSNDDQYVVLKDEAEIIKRIFREYTNGMSSPMIARRLNEEGIKSTGKSLWRPNTITKLIKDERLRGNLVREKITLIPNVFPKVIDDELFVLANRILSTNAVGKKGRPRENNKTREVNNIITGLVRCGKCGSKVTTTKNGRGMRYITCLNRLNYKICGQKSIRLEEVERIVIKHVKLVDMSKVLSISNVDTSSEAQLQAELIELKIEEQSCIVKIEERKILKQRTSLPLANALTDIQDRIEEVTNEILNLQVQEPLPDISSESISALLNASNVELRMSLRKYLVQVVDKLTFINIGDYNIIEVKYNNNVYCHAIITDKKLKVLHEVDITVSGDTTTYNSGEFSIVESENEGVCTFTGIDAVSSTNYFLLANYIGSLPEKQWIVDVMYLQQNINVVLQGHD

SEQ ID NO: 16771 - protein, 571 aa, synthetic construct
MIHLAIPYRRFSSDKQTGNTSLTRQQDLVTKWLSKNPEYKTLPQYDYVDEAVSGYHGDNIKFGQLGEFISEVEKGTFNRYKAPTLLIENFDRFGRLKPRKALGYITDILEAGVSICLLDRGEVITPDKVDDDFFLMQLVMTASRAHGESKRKSDNVTKAWQIKAEGIADGATLTRNVPFWINPDDRQLVIPERAKLVERIFKMRLESMSCYAIGKTLNQEGIPVYTHRTVTPGKDYKKRRVAPCWHSANVSGLLSNKAVLGILPAQQVNKHNKHRQDTLRADTPGYYPAVISATLFAAVQSLKDEKHGKKRVLSNINSIQIFKKMLRCVCGAYMDVTGCRSTYAGVFKCASARAGSTLCTKPSINRQKVEEALLTRLLPSLTRLDVNHELSNQIETLKAEIEGLDVLIRKGWEDYENSEHPFYLSDGQASRISQNEKKRDEKKSELTALSVTEQSSVYEDISHLDLSDYTQRCEARVIIKRMISSITIDTDKGLLDVHLVNGNTITGFCIDSTSNKKAVFTEATDEEKQAELTAIIGERLPLVIPAGDPVGVAYEPMLDWPDVDTGDYPNE

SEQ ID NO: 16772 - protein, 496 aa, synthetic construct
MYGYNLKPCLTRRNTLKRMEQITPPPISTSPLVKVAAYARISMETERTPLSLSTQVSYYQQLIHDTPGWTFAGVFADSGISGTTTHRPQFQEMLALAREGAIDLILTKSISRFARSTVDLLETVRELKDLEVEVRFEKENISSTSADGELMLTLLASFAQAESEQISQNVKWRIWKGFEEGKANGFHLYGYTDSADGTDVQIIEEEAAVVRWIFDQYMKKTSCEKMAAQLIAEGRVPHLADNKLPGEWVRHILKNPHYTGDLLLGRWSTPEGKPGRAVRNTGQLPQYLVENAIPAIIDRDTFTAVQTEIARRRELGARANWSIETVALTSKIKCVSCDCSFVRNVRNPKTQNSISTEHWICTKRKKGRKTGCGTCEISDTALKGFIAQVLGIDAFDEDVFNERIDHIDVQGKDQYTFQYTDGTSSSHTWRPNLKKSSWTPARKAAWGELVRARWAEAKRLRLDNPRQAPTPPEALAKYRAVAKAEAERLRAERGER

SEQ ID NO: 16773 - protein, 528 aa, synthetic construct
MARTVTAIPATRALHTGAPLGQTTLRRVAGYARVSTDHDDQVTSYEAQVDYYTRYISDHAGWQFVKVYTDEGITGTSTKHRAGFQQMVTDALDGKIDLIITKSVSRFARNTVDSLTTVRALKDKGVEVFFEKEGIWTFDAKGELLITIMSSLAQEEARSISENVTWGHRKRFADGKVTVPYSRFLGYDKGEDGNLVINPEQAKTVRRIYNMYLGGMSIGTIARTLTDEPETFTAAGNKIWYYQSIRAILTNEKYKGDALLQKSYIADYLTKRQVINQGEVPQYYVTANHEAIISPAVWDFVQAEIAKGARDQRTQHRTRPFSSTFECGQCGHFFGSKTWHAGSKYEKVIWRCGHKYAGQEKCATGHISDQRLKDMFLKAIRLRFASPTDTGVNQAVLDALDTSDLEVEAAGLLAQINEVAKKLQSIIARNARVAQDQQAYEKAFNASHEQHQTLLAEHAAVVAEIQNKNNRLAAYHYYRQETANLDLEQLAFSPYLCVALLDKGVVDVDGNVTFQFRDGSTQVVAIKQ

SEQ ID NO: 16774 - protein, 431 aa, synthetic construct
MAIRITQTPAPVATSRRLRVAAYARISETKGNTPASLSAQISYYNQKITENPDWEYAGVYADAGASGTNTDRPQFRRLLGECESGRIDLVLTKSISRFARNTVDLLEVVRHLKALGVEVIFERENIRTLSGDGELMLSILASFAQEEAWSVSANVKWGIRKNFEKGITNQMCVYGYIWTGSEFIINEKQAEAVRYIYRRFLEDAPYADIIRECEDLGYEAYWGGRFTTAALKMILRQERYTGNTLLGKSFNPYPGHHGMKNTGQAPMYFAEGTNPIIIDQTTFDKVQPLLEARTARNRRAAHNQTITVFSGNVWCGPCSAKAHRCLAYRDKEGHEFRGWRCPRRIKGKPNQCEGHILREDRIKEITCLLTGATTFTDELFHTRVNRVVMTSPGEVEFQLRDGRSFQIVYSRGKYARPISVEDIALLEEGEN

SEQ ID NO: 16775 - protein, 555 aa, synthetic construct
MARKKKFAPNDNNLAIAYYRFSSHSQNDASIDQQRELAHEWADAHGFKIVQEYEDAAISGTTDARPGFQQMLSEVAKIRPHTLIMWKTDRLGRDKYVLAMAKKKIRDAGCEIHLLAEHIPTEGPEGVLVEGLMEAMAEYYSRQLSQNIQRGMDYNAQHALYNGHKLFGYDVDRSTKKYIPDPNTAPFVQWAFKEYASGKPLKAIAEEMNAQGLRTPRNAKFSVNMLNKMLKNRAYIGEYHHGDIVVAGGMPVLVDEATFDRAQRRFAENKRKGSQRAHGMDDAEAPRYWLTGKLYCGECGSTMQGVSGTSATGRTYYYYYCSAQRRKECHLHKARKRDLEDMVLFALHNIVDDEENVTALALDAAEYYEKNHNGTAYLEALEAKRREVEKSLANLVKVIEKGVVSDTVTQRLAQLEEQKSALNDAIGTENVRVSLCEDRHSIQAYFDKFLHADVNDPEIRDQVFEYFVDKVYLYDDKLVVSMWFSEDDKQEITWRDWFSLDEYWTDESPFVKGGGVEFDCFPLGSTTDNRSPVGAQPRGSFAFPRLRQATSSKKT

SEQ ID NO: 16776 - protein, 603 aa, synthetic construct
MARKNPKNPDATRPLSCVLYIRVSTKLQVEKGESIDAQRFELTRYAEAHGMRVLGEYVDAGFSGKNVRGRPQFRQMLDDIIKEQPGRRPTYVLVFKLSRFGRNAADTWNSLQMLQDYGVELCCVKDGIDSATTMGKAMLSIAAVFAEMERDNIRTQTMSGREEKARKGYWNGGQAPYGYRLVDRGGKFKELVVDEDEAKVVRRIFKMYAYENKGPMAIASWLNRHGVTKAARGNATMETFGNTTIARMVVNPVYIGKIAYGRRRTEVIEGTRGETHVVKSDGYEVYDGRHEAIIDEATWAAAQAIVGTRKPNAKRHDDGHVNLLNGLLVCPECGRKMSSHPNRGKVKKDGTRGKTTYAYYCPHTSKARGATCTFRRQYPQEYVDAEVVEMVKLASRSDAFVEALRRRINDETDVEQLREDAERIGREQAANDKRMRMLMNQIDALDPADRSYERKFSDLQRRLDDLYDRDAGFQEALEETRAKIAAADKRRVGERRLLDELDRIPELLEEADEQTRFDIVHEAVSEVRILAGRNPRKERVVQSVTFKCPVRFFWEEVPGEADGYTAVTPDSFDADGNFRDDETHVETIALVERVEGFFERSDR

SEQ ID NO: 16777 - protein, 519 aa, synthetic construct
MNVIKIQPNVKKSKDMPKQRVAAYCRVSTDNSGQIESLETQIKHYETYIKSNPSWVYAGIYYDEGISGTKKEKRHGLLRMVSDCENKKIDLIVTKSISRFARNTADCLELVRKLLNIGVFVYFENENINTGSMESELMLSILSGLAEGESVSISKNNKWALKRRFQNGLFKISYAPYGYDVLDGKLVVNESQAEIVRFIFSEILSGKGAQKIAKVLNDRMIPTKRNSKWTSKTIIDMVRNEKYVGDALFQKYYTDDNFNRRRNKGECNQYFATNHHDPIVSRETFEAAQAVIDQHCKEYGLEKNNSKYQNRYPFSGKIICGQCGGVFKRRTHATGRHRIAWCCSTHIMDIEKCSMKYVPQADIEFAFVTMMNKLIFGHEAVLRPLFNALRGMNSENAIEAIKAIDKSLEENALQRNVLVELMAKGYLEPAIYNKSNNDLLQEAERLRRQKESITQLLSSDFQAATEAGTLLQYAAKTSTLSAFDGALFTRFVARVVVLSREEIAFELKCGLTLKERLAR

SEQ ID NO: 16778 - protein, 438 aa, synthetic construct
MARTIQQITFPEPMRPGLKRVAAYARVSSGKDAMLHSLSAQVSYYSALIQKHAGWLYCGVYADEAFTGTKDSRDGFQDLLAECRARNIDMVITKSISRFARNTVTLLETVRELKALGVDVYFEEQNIHTMSADGELMMTILASYAQEESRSASENQKWRIRHGFERGELVNLRFLFGYKIEKGQVAVDPEKAEIVREVFRRALEGESLTSLAADLNRRGFTGVLGGRWNAMRIREMLSNEKYLGNALLQKQYRNNHLEKKEIPNRGELPQYYAEGTHEAIIDRATFDAAQRLLAKLRESTPVRSPWKKSAFTSMITCAVCGRKYKRCTCGKRHFWNCPSAVQTDLPSCGTSQIPEKLLYDLAAQVLGLTQFDEPVFREKVKSIDALQDKTLVFHFYDGSTVARHWEHTSRAKSWTPEMKEKARQRALAQRRGEKWQER

SEQ ID NO: 16779 - protein, 525 aa, synthetic construct
MARAVTVIPPTIQPITHLARNAVVRRRVAAYARVSTSSEEQLTSYEAQVDYYTRFIQSKPEWEFVKVYTDEGISAVNTKKREGFNQMVRDALDGKIDLIVTKSVSRFARNTVDSLVTVRKLKEKGVEVYFEKENIYTLDSKGELLITIMSSLAQEESRSISENVTWGQRKRFADGKVSLPYSHFLGYRKGADGFPEIVPEEAETVRWIYSLFLSGKTTSSIASLLTKEGIPTPAGKKRWAASTVESILKNEKYKGDALLQKAFTVDFLTKKQKKNEGEVPQYYVENSHPAIIDPAEWKLVQRELERRKAIGRSYSGNSIFSSRLVCRDCGGYFGSKVWHSTDKYRRTIWRCNSKFTGEEKCQTPHLTEEAIKARFLDAFNTLVADKERLLNECRTMQAALTETSSLDSEIAALLSEMEVVAELTKRCIEENSTTAQDQAAYLERYNGLAERYETAKAKLGKLRAVKAKREAKAEDIGGFMFELAEYGDPITEFDDRLWLTVIDTVAVHRDGRLTFTFQTGHEISI

SEQ ID NO: 16780 - protein, 526 aa, synthetic construct
MPKVTMIPATINPLTHLPSVAARKRRVAGYARVSTDSDEQFTSYEAQVDYYTKFIQSKPEWEFVKVYTDEGISGTNTKRREGFKEMITDALDGKIDLIVTKSVSRFARNTVDSLVTIRKLKENGVECYFEKEGIYTFDGKGELLITIMSSLAQEESRSISENITWGQRKSFSDGKVHLPYKRFLGYEKGEDGRPAVVESEARVVKLIYGLFLEGKTQAGICKYLEELGIPSPGGKQTWSKTTITSILQNEKYKGDALLQKKFTVDFLEKKMKPNEGEVPQYYVTGSHPAIIEPDEWEQVQAEFARRKTLGKAYSGKSVLSAKLVCEDCGAFFGPKVWHSTDQYRRTIWQCNGKFANEEHCHTPVVDTETIQRLFIKAYNLMMQDRVQIIKQCEAWRARLMDFGTLDADIERQLEETQVVAELVKAAVKENASTAQSQEAYLKKYEALTERYEKAAAELERLQSLRTARSQQDKKMALYIRTLKKQPEVMYDWNDTIWTVMIEKAIVHKDGQITFVFQNGTEIKVGA

SEQ ID NO: 16781 - protein, 433 aa, synthetic construct
MPRAITIVPKPPKLEQKKRVAAYARVSSGKDAMLHSLSAQVSYYSALIQNHDDWLYVGVYADEAKTGTKESRADFQRLIADCRAGKIDIVITKSISRFARNTVTLLQTVRDFKAWEVDIFFEEQNIHTMSGDGELMMTILASYAQEESRSASENQKWRIKRNFEEGMPWNGAMLGYRLKNGRYEIIPEEADLVRRIYDEYLSGDGYLTIAKRLNEDGIPSRFGKQWGQSVISKILSNYTYTGNLILQKTFRENHITKKTIINNGELPKYHAEDAHDAIIDMETFQAVQAEKARRAARFIKKPTPKKTYPFTSLLVCDGCGKNYRRKVTKTGPVWVCGTFNSMGKAACASKQIPEETLQAVTAEVLGRVDFPEELLRRLIKSILVCNENVLIFRFYDGLEVTRKWQDRSRSQSWTDEMKATARQKALERRNQNA

SEQ ID NO: 16782 - protein, 471 aa, synthetic construct
MTIRAALYLRQSTHREESISLELQEAACRRHCEERGYQVVMVESDPGISGRTFNRPAVKRVMEAVEAREVDAVILWKWSRLSRSRRDWAIAADRVDVAGGRIESATEDIDVSTSHGRLARGMMVEFAAFESERIGDQWKEAHQRRVSMGLPANGKPRFGYRRLDEGFEPDPETGPVLADMYRRYISGESFYALVKTLNDNSIDTVPGYGTSGGAWSQRSLQRVLDSGFGAGLIRSHEEYFPGAHEPIIDEDEWKDYRAARDRRRVHRGSERSTYLLSGMVRCHCGSSMVAGQFGWKRVPKFRCKAAAEKRAHDGGYVSAHVLDDEVKAWLRGIVSDLSEVATAEAGLQSKRSQASSNLSKLGSTLTRTEQAITRLTVSYAEGILDLEAYRSATKELEQKRDGLMSTINSAESERRAIPVSLEVVQSLLDDWDIIGIEQRREMLRGLVRHVVVKPQRPKSNVTVVPIWDAGV

SEQ ID NO: 16783 - protein, 557 aa, synthetic construct
MEHTGLQDQNIDKAVIYCRVSSSKQTVHGDGLNSQETRCRDFAKYRGYEVVEVFRDDSSGSLTTRPGMQAMLEYLRKRKSDSHAVIIDDISRLARGVMAHFELRMKIDKAGGILVSPSIEFGEDSDSQLVENLLASVSQHQRQKNGEQTVNRMRARIQNGYWVFQAPVGYRYERSSGQGKILVRDEPNATSLQEALEGYASGRFETQVEVKRFLERQPLFPKDLPGGEIRNQRIYDMLTRVIYAGYIEAPKWNISLRKGQHEGLISLETFEKIQTRLKGTAKAPARKDINADFPLRGFILCNDCKKPLTACWSQGKNKKYPYYLCPTKGCPSYRKSIGREKLESEFEGVLQSIQPTEGLFALVKAMFRDAWDIRLAKASEASKGLKNNIKQLEKQIDQLLDRIVDASNSSVVSAYEKRIAKLEREKLVAEEQLAQCGKPRHTFEESFEHAMRFLASPWNIWKKSDLILKRTVLRLAFVEPLPYCRNQGLRTPDLSLPFKALGEIFSNKSEMAHPSRFERETSAFGGQRSIQLSYGCLTRGLRQSCQGCKWFCTPDVL

SEQ ID NO: 16784 - protein, 600 aa, synthetic construct
MNSVEVIKGQGLVARRGNSQEFERQRVAAYCRVSTDNEDQLSSYKSQVQHYTEYIKSKNEWVFAGIYADEAITGTQTKKREDFQRLINDCMNGEIDLVITKSISRFARNTLDTLRYVRMLKEKNVAVFFEEENINTLTMDGELLLVILSSVAQQEVENISANVKKGLKMKMQRGEIVGFQGCLGYDYHPEDKSLTVNEEEANIVRYIFQRYIEGTGCTILSNELKNLGYKTKRGLTSWPASTVINIIKNEKYKGDLLLGKTFTVDPISKRRLVNFGEEDKFYIKGHHDPIVSEEVFAKAQEILAKRGYPRRLNPDGKREKYSRKYAFSSLLQCGFCDTTLSRRSWHAGARHKKLIWQCTLATKKGKKYCPESKGIEESIVEEAFLEAYKLLCGNDKSIIDDFLALAEETLTEANVEKIISRTERDLVAAENKKSKLIDLRLEGTIDDDAFSSKLFDLDNNIDTLKSTLNDLSVTKNQQDDLRSRILGFKAILESNQVLEKFDRYVFESIVEKVVIGGYEEGGTPDPGLITFVFKTGYKQKLHKNNYGIVRRQFDQDGNAILPSSSSQTESFSASSYASANTSGLRCLKRTVFGVKFHCLR

SEQ ID NO: 16785 - protein, 503 aa, synthetic construct
MRLSKYHKDKADAIERQRLDLTRKLAAEGGWTIMGEYIDNDSASKSAARTRKGWRQLNQDIKAEKVPALAFWKLDRTNRIAAKTIEWIAQCQQAGVYLVSHQDSADELNTATAGAKLVTGIKALLAEVETDAMSERQLASKRHLAEAGFIHGGMLPFGWKAGPRVVDEFGRSGVRLVPHPVEHPALKDAVDMVLAGKSLAQIGRHWQEQYGITTAKGRPLYEGNIRRYLVSPRMIGYRMRKVPEHQRGVSVELLDYIARDASGEPVIAHEPVCDRATWLRVRRLLEQARTSKTRRPWGSHEWLLTGLLYCQCGASLYGKQKYWKKASGESVKAFEYTCQANRRNGPGSCSGGCTVNAERAEAFVLGWFFSQITDEALEKARARRRAARSDTGINEMLAQLDEAKAERDTLVAKQGTGEYRGAMVTVLLSLIEDAQARVESLQRRLDAMELDEIPFEDGPTLIASWKGRDIKEKRAYLRRLIHRIDVLPIKAAVEERLQIIPVQ

SEQ ID NO: 16786 - protein, 522 aa, synthetic construct
MHQTTPRPKAYSYLRFSTVEQGKGDSYRRQTALAEDFCRVRGLDLDRTTTFEDLGVSAYSGKNRRKGALRAFLDAVEEEIIPEGSYLLVESLDRVSREAILDAQATFLQIVNAGITLVTLKGTPREYSRATVNANPTDLLISLLEMIRANEESETKSQRIKADWNRKRQRALDGEAITSLVPAWLERSGKDFKVIEERAAIVRRIFSLTLEGKGQHAITSLFNKEGIKPFGSAKWWHRSYVRLVLRSPAVIGTFVPHRMVEGKRIPLEPIRNYFPAVIDVETYEAVRALDQPRASPPRTIASMFSGLVRCEECGGPMVRARKGQPPKPFYYVFVCHNAKLGQSCECRTVRQSVLEDALRADFVRFIEEAPTHDDDLTAQLEAVEDALSEMQGRAARLVEAISQRPLAQLVDRLAEVNEGVAELKEKQAELTAAFRDTARPVMLKRLADLSDLLESQDSEVTPRIQVQLRQVLDHIVVHFDREASRRKPRGYIEFVWKGGGRSYLDWGPVFYAASMRDRRANR

SEQ ID NO: 16787 - protein, 534 aa, synthetic construct
MEQVRNGMWDSSILVVESIDRFSRQNPFDVMGYINALMAHNVAIHDVMANIVISRSNSKDLPFVMMNAQRAYDESKYKSDRIRKGWAKKREQAFNKGTIITNKRPQWIEVDNDKYVLNEKAAVVKEIFALYQTGMGCPTIAKQLQRKEGEQYKFNRPWTGELVHKILTNRRVTGKIFISEIIRNHDDIENPVTQKKYDMDVYPVVINEEEFELVQELLKSRRSNAGRITVKKDGQEEVLIKSNLFSGIARCTECGGPMYHNVVRAKRTPKKGDPKIEEYRYIRCLNERDGLCENKAMTYETVERFVVEHLLGMDLSTVMKEQEFNPEIEVLRIQIDQVKDQIANYENGIERRKSTGKPISFEMREELDDAKSELERLLARQASLATVQVDVPVLQDVNVTELYDVNNVDIRTRYENELNKIVSNIRLKRNGTYYTIDINYKQNELKRHVLFVENKKKEQTLISEVIIEDVDGGKFYYTPSFMIRLKDGEIRFQQTNEDLSIVDYSLLLNYVDAIDRNDAVGVWMRNQFNFLTSN

SEQ ID NO: 16788 - protein, 590 aa, synthetic construct
MNTKVKVIKASNTGARNRNSIHLDLKRVAAYCRVSTDSKDQLESYKSQVDYYTNLIKNNKSWTLAGIYADEATTGTTATKRADFIRLISDCQNGDIDMIITKSISRFARNTLDTLKYVRLLKENNVGVVFEEENIDTLTMDGELLLTILSSVAQQEVENTSAHVKKGLKMKMEKGELIGFQGCLGYDYDPTTKSISINEEEAKIVRYIFKRYLEGNGGSVIGRELEEQGYLTPRGKTKWSDTTVLGIIKNEKYIGDILMGKTFTVDPITKRRLANFGESDKYHIENHHEPIISKEDFEKAQEIRLRRAQNRNTIANKDRKREKLSRQYAFSSMLECGFCGEILSRRTWHTSSIYKKINWQCVKSTKKGKKYCPHSKGIQEAAIEKAFVESYRQLCHADSTVIDDFLKIVEEEINDNTLVKDLKKLENQLNRIISQERKLVDLHLEDSIDEEVYAKKYKKLTKQKEELLDEKKTLELTIKDENSIKERLKQFKKVLENKEIIEEFNRTVFESIVDKVVVGRIDKDGTVHPYDLTFYFKTGVKDSQDSNNFKDKRKNAKDNDINKLCSYKNDEDKKLCSQSKDNARGVCKFT

SEQ ID NO: 16789 - protein, 599 aa, synthetic construct
MKKDVKVIKGDTTLKRTASGCVERSIKRVAAYCRVSTDTEDQINSYNSQVEHYTEFIQKNNEWTLAGIYADEAITGTQVDRRIDFQRLINDCINGDIDMIITKSISRFARNTLDTLKYVRKLKEFNVAVFFEEENINTLTMDGELLLTILSSVAQQEVENISANVKKGLRMKMERGEMVGFQGCLGYDYDPETKSISINEKEAEIVRYIFRRYIEGVGGMVISRELEEQGYLSPRGNKRWTETTVLGIIKNEKYKGDLMMGKTYTVDPISKRRLDNYGEQDKFYIENHHEPIISEEVFEKAQGIRLRRSKNRNTVANNGGKREKYSRKYAFSSMLECGFCGHNLSRRNWHSSSEYTKVIWQCVNATKNGKKYCPHSKGIEEEAIEKAFMESYRQVCHNNVEITNEFLKTVEEELKDNSLAKDLKKITNQLDKVLKKEKDLVELRLNESISMDIYQDKYNEIAISKEKLLAEKRTLEVTLTDEKALKKRLEGFKKILESNKYLEKFDRAVFESIVDKIIIGGTNDEGEIDPTMITIIYKTGKKDSQDGRLFKSRRKNAKEVNEETDNKLYPQSSDEVNNLCSYPMDNTRRVRSVANQGVR

SEQ ID NO: 16790 - protein, 612 aa, synthetic construct
MIEYTNKITALYSRLSVGDEDRDGGESNSIVNQKAFLERYARQHKLMNIRHYIDDDESGRFFDRSAYTQMISDVENGKIGIVIMKDMTRWGRDYLQVGNAMEIFRRNNVRFIAINNGIDSKDQNTLEFAPFINIMSEWYARDISKKVTTGIKTKGASGKPVATEAPYGYIKDPNNKDYWIVDKEAAEVVKFIFTLFMEGKNRNQIAVCLKEKEILTPTFYMKQQDRGTAKNRKLNEENRYNWNKATLTRILKRQEYCGDVINFKTEKHYRDKRNHYVDKSKWQIIENVHEPIIDRSTYENVQRILKNAPVKRPNGDGEIHALSGLMYCKDCGTKMHIRTIHKNNKVQHVTYCSEYAKGKARHPKCHSPHRIDVDDVMETLKEVLRKIGKFSFTNKTEFEKLVKSSLAREQTEEVGKQKKRIPQITDRMEQIERVMNKLYEDNALGNIEANRYELLSRKYAEEYYSLKEEKEKIEERLSEFENANQRAKNFIKLAESYSDFEKLTPTAINEFISKIVVHERDVKRAKYAVQRIEVYFNYIGRFENELTKDIEPTEQEMIQMREEIEETKKEKSRAYHRAYSKEYRAKNIEKFREYERIKAREYRARKKLQATT

SEQ ID NO: 16791 - protein, 550 aa, synthetic construct
MSRKKQVYEKITALYCRISLDDGGDNESMSISNQKLMLRDFAEKHGMFQYEYYVDDGYTGRNFNRPSFQRMIVDIEAGKIGCVITKDLSRLGRNYIEAGSYIEIFFPKHNVRYIAVTDGVDSLTRQEMDITPFKNILNDMYSRDISKKVLAGRMTRSRQGKFCGGQPPLGLMRDPEEKGHLILDPETAPVIRKIYDMALDGWGCMRIAKQLMEDKIPITRVKSNTECDVNYYSWGSARISHILRNPFYKGAHLVCRTHQKGIRSNTYDIIPREDWEVIEGCHEAIVTPEEWEQVQEIIDRRPTIMKGNACPFYNLFHGLVYCTTCGKSMQVRYEKVGRTGKNRFTGEMREPIDRAYYICQTYNRLGKNACTSHKIEARDLYNLVLKDIQELAAQAMKDADAFYQRLSSRMERRYLVDASQTEKERKRLEARNQEIDGMFLSLYTDKAKGVLTEQRFMKLTAALEQEQEANQKRLHDLAVMQSRADAQESEVRTFIKEIRRYAAIEKLDEAVLNRLISRILIGEVKKVDGQKVQEVRIVYNFVGEIPEIAA

SEQ ID NO: 16792 - protein, 515 aa, synthetic construct
MKTAIYLRKSRADLEAEARGEGETLAKHRSTLLKIAKEMNLNVLAVREEIVSGESLVKRPEMLALLEEIEDNKYDVVLCMDMDRLGRGGMKEQGIILETFKRSNTKIMTPRKTYDLNDEWDEEYSEFEAFMARKELKIITRRMQRGRVASVEAGNYLGTHAPFGYDIHRLNKRERTLTINSEEASVVRMIFDWYANEDMGANAIRSKLNDLGYKSKLGNDWNPYSILDILKNNVYIGKVTWQKRKEIKRPDALKRSCARQDKSDWIIADGKHEPIISESLFEQVQEKLNSRYHIPYNTNGIKNPLAGIIKCAKCGYSMVQRYPKNRKETMDCKHRGCENKSSYTELIEKRLLEALKEWYINYKADFEKHKQDDKLKETKVIQMNEAALRKLEKELVDVQKQKNNLHDLLERGVYTVDMFLERSNVVSDRITEITSTMENLKKEIKTEIKKEKVKKDTIPQVEHVLDLYFKTDDPKKKNSLLKSVLEKAVYKKEKWQRLDDFELVLYPKLPQDGDI

SEQ ID NO: 16793 - protein, 514 aa, synthetic construct
MRAALYIRVSTQEQAEKGYSIQAQKHTLIEYCKSQGFNDYQVYVDEGISGTSTNKRIALQRLLEDAEQQHFQGVFVWKINRLVRNLVDLLSIVEHLEKYNVPLKSVSEQFETTTPQGRFILTMMGAVGQLERETIVDNTKLGRQQRNKEGWYCGAKILGYDVIAKKVCIQEELETNLKVNKREAAVVKEIFELFASGKGYKAIVNQLNKKGIRTKTGKLFTTGVVCKILKNQVYIGNIVCKIDEKVCVINGRHPVIISNELWEKVQQKRGDKKKGGIGPRRSYPLNSFLKCPMCQKSMKGTRVVAKRKSGDKKVYDYYQCLGYLNGGIESCYPNLIPALEIELEVYKVLQNFLNQPTIVKDVFSRINEPSSKQKENMVLLNTVKLQLERLIKKKKKLLFHFEEGLVCSEDFLQEIERISEDITVVQDRIRSIEHELKRCKDATLSKVQVRNMLRNFVSLLNESNKKDMDKLFSSFLYQVEVSKEHKLKLVYLKINEYVIQVVEKKEGKQRWKVS

SEQ ID NO: 16794 - protein, 515 aa, synthetic construct
MYRPQELDVFIYLRKSRKDLEEEKKAMEHGQHYDTLERHRTQLLELAHKEHHNIIDILEEVVSGEYISERPMMQKLLREVESGIGDAVLVMDLDRLGRGDMVDQGTIYRVFRYSETFIITPTEIIDPNDENQELTFSIKSLIAREELKTIVKRMQRGRRVSAKEGKSISRVPAYGYLRDNNLKLYPDPEKGWVISKVFELMANGMGRQTIAQELDRLDITPPQGEYWNPSTISSIIKNEVYLGHIIWGKIRYTKQNGKYIRKKVPKERWQRHDYAHPPLVSEELFQKANMAHSKRWRPPTIKTKKLSNPLAGILLCELCGHSMLYQPRKDRPNPQIRCVQPSCKGIQKGASLTLVEQRILDGLKQIIESFEIQENMVQKKQPKNNIQLQQKALEKKEQQVNDLQKQKNKLHDLLEKGVYDIETFLERQKSIVVRLKATQEEIKQLEHEIKHILEREKHIHEFVPKIKNVLEAYYVTEDVEKKNRLLKSVLEKGTYLRKKSWKNPDAFIIELYTKI

SEQ ID NO: 16795 - protein, 522 aa, synthetic construct
MKLSHILQPNMKAAFYGRHSTDKQDMDMQLNSVMEVIRKYDCIHTHSFLDKAVSARKNKITSRKELENMFEAAKRKEFDFVIVYKSDRLARDPLEHQTIRIVMKTLDIPIIISSTESVYNTDTDLIVQLMEDGFTKYEVDTIIARTRSGLENKAKQGKWLGGKPPFGYTYDKNSGQFIEHPEELCYVKEIFNLYLNGHGFQHIANTLPNGSRRGKDWGKENVKAIVLNPFYCGLLSWRRQTGGKQNVRDIWVEAPNYYVKPIISRTTWESCWRIYSEKRNGNMVPKYYKTSFLLQGLLSCEKCQELMKTKNQQTISSTNKKYGGKIYFCSNCKLRIDADLLHDKVVNQTLTDVKISGFHNVYHAIEQKIQYEIQELNNNIQKHQHLFENYTIKLHNITEELKQRMKNNDDKRFLKSLAIYRSDVQRKLDGIIQQMNGFKQQIILKEKIEKSKETWLHTLNKVFQDDVKLQEISDMDKRRFLLPLIQSVSIKENKKRNEYDISLQLRTDFSKRDVKNQISLIL

SEQ ID NO: 16796 - protein, 603 aa, synthetic construct
MPVAYSYIRFSTAEQKKGDSLRRQAELSEAYAAQHGLTLDTSLHLRDLGLSAFDRSNVVRGALGGFLEAINRGRIAAGSYLLVESLDRLSRAQVLDALKVFISILEKGITIVTLADGMVYNTESVGSNFGSLMFSITIMARAHEESATKSRRLKAAWTSKRKNIGTKKLTGQCPRWMGLNADKTEFELVPDRVALVREILSLARDGIGQAQIAKRLNERGVQPFSRHGKGWHGSYVHKIITSTALYGEMQPHALVDGKLVPQGDPVPNYYPALITKDEFHFLQSARSQRMVGGAKARKGTDVPNILSGVAKCGYCGSSMIMAGASVRKRQADETTPQKKVANKVLVCDGGRRGLGCYAVQWSYKDFEKSFLTFCRSLDLRQLLGSVDINAEERLVQLTVGDQLHSVQSSIAESRKRMDRLMEALELGDVPATVLSRIRELEAEIAAASEREKALKAQLQAVESSSRYRSVEMETVRELVGQIESLTGDQLFRVRAALAEHIRRLIEVVKVYPAGFLETPERIEQLRAELIGSGFSAERADAYIADTFRTEPKRQGRGVRGRYASRRDMGRHFLVKAKTGGFRVVYPDFDDPSQVTVEMGGNGG

SEQ ID NO: 16797 - protein, 475 aa, synthetic construct
MEINKLKAALYVRVSTTEQANEGYSIQAQTERLKNYAKAKDYFIIKTYTDPGFSGAKLDRPALQEMITDIENNQLDIVLVYKLDRLSRSQKNTLFLIEDVFLKNNVDFVSMQESFDTTSAFGRAMIGILSVFAQLERDTITERMGMGRTERAKEGYFHGGGSARIPVGYDYVDGLLQVNEYEAEIVRSIFELYNSGKGVNSISNAIRDKFPSKRKFGVSLTRSILTNNLYVGLIKFNDGVYEGKHEPIISKDIFDKAQYEFKRRTTGKLKLFTSKYLLTGTTYCGHCGARVKGTGSSKLKDGTRLSYYSCYSRAGSPAHMVKDLNCPSKINRTEILDEYVISQMKEITKTDISIEIDSEFTDDSDIDNTVIQNEIKSIEERINKLLELYQFGNVPLDVLNSKINSLNSEKAKLNEILNESTTEIIDDTIDKVEIFNNLKKVDWNTITHEEIKAIISQSIEKITIFNEKIEIEWKF

SEQ ID NO: 16798 - protein, 495 aa, synthetic construct
MRALGVARVSTQEQATGDRFSIPHQRQRITEYCIQRGWDLVDVVEYVQSGGSNYRELQEILARVDHEQIRVVVVNELDRLARDMVSTLLFLEDLQKVGCRFAAVADDLDLTTPDGELKMMILSVFAHYFRKQLARKVKGGLAERARHGKHHGGRPPYGFQFNGDKLEPHPEQAPVVRQIYEWYVHEGLGAREIAKRLNVQGIPTQTGRSQWASTEILRLLRKPANVGDLQHGALEFYKERTGVTHKRHREDAVIIRDAHPAIVDRVTWETAQRIMQSRGQRSGRSADSPYLLSGLVFCGYCGKPMTVIKGGRNRQPRYSCRSYHMSGLCQPNTVPVAEVEQAVVDHWLQHMAQPTPSEIQAWAEWKIGQDRTYDETLRERHRLERRLDELRTMRQRAEDALLQGVFTIPQFQEAQTRLDQEKERIQGRLQQLAHEMQRPPSTEEAQRLMAELAAAPDAFRAAATVHERRELVKQYINRVEVQAGTVTIQYRGGSS

SEQ ID NO: 16799 - protein, 500 aa, synthetic construct
MNVVIWARVSSREQREGYSIDAQLRAARTKAQQSGWTIVREFVVAESARRGAERLAFNDMLKWVRPNARREKIKFILSHKLDRICRNMRDAVRLQELDDECGVELAFVDNQFGPGAAGMLSFNVMAAVAQYYSDNLRSEVLKGLDEKVRQGWPIGSAPFGYMNVAGDTDAPVQPHPEKAAAVVRIFDLYSRGNSTFKSLAETLYREGHTYRISEPRFRRTTLSYILNNRFYIGEIIRNGQVFPGRYEPLISRELFDACQDVLKGRNRRLSRPDLPLAGGLIRCAHCGFAITGERIRRRLRDGSVNEHLYYRCGNNSPPADHPTVRWKAADLEQAIAADLSRLRFESPEIRDLFRRTRAEAFRDISDHQRRKAAALTKRRTELVNMQDRLLNAYLAGTIADEALKAKSEELRQELARVDEALEGHAGRSDEAGDVALRLFDWCQNAAENWERSTATARREILDAVSLNRRLSANSLEISKRKPFDVLAEGSVLETSRGDRI

SEQ ID NO: 16800 - protein, 515 aa, synthetic construct
MYRPQELDVFIYLRKSRKDLEEEKKAMEHGQHYDTLERHRTQLLELAHKEHHNIIDIFEEVVSGEYISERPMMQNLLREVETGIADAVLVMDLDRLGRGDMVDQGTIYRVFRYSETFIITPTEFINPNDENQELTFSIKSLIAREELKTIVKRMQRGRRASAKEGKSISRVPPYGYSRDNNLKLYPDSEKSWVIPKIFELMANGIGRQAIAQELDRLSVAPPEGEYWNPSTISSIIKNEVYLGHIIWGKISYTKQNGKYIRKKVPKERWQRHDHAHPSLVSGELFQKANMAHSKRWRPPTIKTKKLSNPLAGILLCELCGHSMLYQPRKDRPNPQVRCVQPSCKGIQKGASLALVEQRILDGLKQIIESFEIQENMVQKKNSSNNIDLQQKALEKNEQQINDLQKQKSNLHDFLEKGVYDVETFLERQKSIAVRLKTTQKAIEKLKHEIKKILEKEKHIHEFVPRIKNVLEAYYATNDIEKKNRLLKSVLEKVTYLRKKEWKRKDEFVVELYTKI

SEQ ID NO: 16801 - protein, 522 aa, synthetic construct
MKLSHILQPNMKAAFYGRHSTDKQDMDMQLNSVMEVIRKYNCVHTHSFLDKAVSARKNKITSRKELENMFEAAKRKEFDFVIVYKSDRLARDPLEHQTIRIVMKTLGIPIIISSTESVYNTDNDLIVQLMEDGFTKYEVDTIIARTQSGLENKAKQGKWLGGKPPFGYTYDKNSGQFIEHPEELCYVKEIFNLYLNGHGFQHIANTLPNGSRRGKDWGKENVKAIVLNPFYCGLLSWRRQTDRKRNARDIWIEAPNHYVKPIISRTTWEACWRIYSEKRNGNMVPKHYKTSFLLQGLLSCEKCQELMKTKNQQTVSSTNKKYGGKIYFCSNCKLRIDAGLLHDKVVNQTLTDVKISGFHNVYHAIEQKIQHEIQELNNNIQKHQRLYENYTIKLHNITEELKQRMKNNDDKRFLKSLAIYRSDVQRKLDGIIKQMNGFKQQIILKEKIEKSKETWLHTLNEVFQDDVKLQEISDMDKRRFLLPLIQSVSIKENKKRNEYDISLQLRTDFSKRDVKNQISLIL

SEQ ID NO: 16802 - protein, 638 aa, synthetic construct
MKPKLYSYVRFSSVKQREGNSLERQQDTALKIAARYNLELDTTAFHDLGMSAFKGKNAHEGKLSEFIKQIGGKVPVGSWLVVENLDRISRDDAWSALDIFKNILSKGIVVVTGMDEKVYKYADVKNNPTDLIISLLMFTRAHDESLTKKNRVEAQARSLIRHNLTREPGTPAKAIESVGQNVWWVDTKSGFVTPHPIYFTAAQKIIELKQNGETLLGIQRYLNEHYPAPKKRVYKDQTGQALKPKTEQWGKHLIRTFLNPTVHGQKTFTLDKRDESGAIIYDSESDEPLKEIFIIPDYYPALMPEVDYLTLSKLDRHRAITRNSSKYPAGNPEPEIPLLSGIGILFCGKCGSFMFKSGSCENKYRYICGSKIVQGKPCGKKGFTAYQLEHTVLQLIADHVWNNHKEDKTAWYEYEIEKASEAVKKLLKLATLTDELEELADQINANKQKKITLEREFQQYKISRSEIQTAGWEQFRNFDVHDTKNPDRKRIRLKVKQAIKRIDCYDIDRRHGHFEVTFADETKQRIVIKFNRNRSPGVAYVEVQTVNDHDLLKMQGLVLHSFIDELISPDKFAQYIKEKHEVSLLNPTYITELENGTSQDEGNGMAIIVDGSTSKTYATVNGTKYEINSLEDLEKLSH

SEQ ID NO: 16803 - protein, 534 aa, synthetic construct
MEQVRNGMWDSSILVVESIDRFSRQNPFDVMGYINALMAHNVAIHDVMANIVISRSNSKDLPFVMMNAQRAYDESKYKSDRIRKGWAKKREQAFNKGTVVTNKCPQWIEVENDKYVLNHKAAVVKEIFALYQTGMGCPTIAKQLQKKEGEQYKFNRPWTGELVHKILTNRRVTGKIFISEIIRNHDDIDNPVTQKKYDMDVYPVVINEEEFELVQELLKSRRPNAGRITVKKEGQEEVLIKSNLFSGIARCTECGGSMYHNVVRAKRTPKKGEPKIEEYRYIRCLNERDGLCENKAMTYETVERFVVEHLLGMDLNTVIKAQEFNPEIEVIRIQIDQVKDQITNYENGIERRKNAGKAVSFEMREELDDAKLELEQLLARQASLATVQVDVPVLQDVNVTELYNVNNVDIRTRYENELNKIVSNIRLKRNGNFYTIDIIYKQNELKRHVLFIENKKKEQKLISEVIIDDVDGAKFYYTPSFIISVKDGEIRFQQTKEDLSIVDYSLLLNYVDAGDGIDAVGVWMRNNMSFLFTN

SEQ ID NO: 16804 - protein, 541 aa, synthetic construct
MPKAISYIRFSTKIQLVGDSTKRQSKYINDWLKRNPDYYLDESLRFQDLGISGFSGANAKSGAFGEFLAAVESGYIEAGSVLLVESLDRVSRQDIDTAGEQLRKILRSGVEVVTLVDNEWYTKESLKDSLSMIKAMLVMERAHEESAMKSTRLRSVWAAKRERAAKGEIMSKRCAAWLKVSEDRSRFEFIPENVKAVQRVFQLRLEGLSHVKIAKQMNDEGFSTLNQFKSVTGGWSQSSVTELLSNRSVIGFKVPSKSMAVKGVSEIPNYYPSIITDEQFYAVQQLKQGSGRKPSSDLPLLTNLFKGVLRCSECGFIVVVAGVSAKRSGIYKCSMKSEGRCNSVGFSRLQTDRALVQGLLYNTNRLSLNRDNGSAIGSLQSELEQLQKQRERLIKLAMLADDTESMAKDLKALNSQIKDAEKAVSEVHQREQSSQLETISHLDLTVKKDRIEAQIIIKRIVKEIRLNTAGKKCDVFLHNGLKLLNFPLDRVVDGAQWLEVLPLIDGDEFDFVEFTTKPRHIALEEAPDWVKEMDEQSNQPL

SEQ ID NO: 16805 - protein, 508 aa, synthetic construct
MKKAIAYMRFSSPGQMSGDSLNRQRRLIAEWLKVNSDYYLDTITYEDLGLSAFKGKHAQSGAFSEFLDAIEHGYILPGTTLLVESLDRLSREKVGEAIERLKLILNHGIDVITLCDNTVYNIDSLNDPYSLIKAILIAQRANEESEIKSSRVKLSWKKKRQDALESGTIMTASCPRWLSLDDKRTAFIPDPDRVKTIELIFKLRMERRSLNAIAKYLNDHAVKNFSGKESAWGPSVIEKLLANKALIGICVPSYRARGKGISEIAGYYPRVISDDLFYAVQEIRLAPFGISNSSKNPMLINLLRTVMKCEACGNTMIVHAVSGSLHGYYVCPMRRLHRCGRPSIKRDLVDYNIINELLFNCSKIQPVENKKDANETLELKIIELHMKINNLIAALSVAPEVTAIAEKIRVLDKELRRASVSLKTLKSKAVSSLGDFHAIDLTSKNGRELCRTLAYKTFEKIIINTDNKTCDIYFMNGIVFKHYPLMKVISAQQAISALKYMVDGEVYF

SEQ ID NO: 16806 - protein, 508 aa, synthetic construct
MKKAIAYMRFSSPGQMSGDSLNRQRRLIAEWLKVNSDYYLDTITYEDLGLSAFKGKHAQSGAFSEFLDAIEHGYILPGTTLLVESLDRLSREKVGEAIERLKLILNHGIDVITLCDNTVYNIDSLNEPYSLIKAILIAQRANEESEIKSSRVKLSWKKKRQDALESGTIMTASCPRWLSLDDKRTAFVPDPDRVKTIELIFKLRMERRSLNAIAKYLNDHAVKNFSGKESAWGPSVIEKLLANKALIGICVPSYRARGKGISEIAGYYPRVISDDLFYAVQEIRLAPFGISNSSKNPMLINLLRTVMKCEACGNTMIVHAVSGSLYGYYVCPMRRLHRCDRPSIKRDLVDYNIINELLFNCSKIQPVENKKDANETLELKIIELQMKINNLIAALSVAPEVTAIAEKIRVLDKELRRASVSLKTLKSKAVSSLGDFHAIDLTSKNGRELCRTLAYKTFEKIIINTDNKTCDIYFMNGIVFKHYPLMKTISAQQAISTLKYMVDGEVYF

SEQ ID NO: 16807 - protein, 562 aa, synthetic construct
MEKRKLYSYIRWSSDKQAKGSSLQRQLETARRVAHENDLELVEIIDAGLSAFKSKHLKHGNLGAFIEAVKAEEIANDSWLTVESLDRISRDEILKAQRLFMELLELGITIYTGLDNRIYNKASVTDNPTELMLSIMTFSRANQESMVKSQRQKSAAQLKIDKFKAGERAENGYPFAIRSSGANVFWADVSDGTVKPHEYYFLIARLIVNLRLKGWGYMRIAKQLNENYTPPKGTAKRKHFKDMWSPKLICNFLQSRTLMGEKSIRVDGVEHILKDYYPQVINEKEYYNLQNVINRKLANEPNNYIPLLTGIRRFKCECGAPMVAFFQYNKIRYRCDGMKSLDKRMHCGAKSFNGAAIENAIVQICADKIFKDVKRLRSNVGAIQAMLNDAQKRHKRGMDILLNDNAPQGLNIMLVEIEKDIEGLQKQLNDELISDAGNDTSVSWDAVPENYKDVFNLERLEIKQKIQASTLSIVCTTIKTKGHLFDIKFNDGDVIRFFSDKRSIHVDIHSINNAALLQSDGIILHDHFDYLLDSEEFIERIRLKHQQMKSMQERTLDELFDI

SEQ ID NO: 16808 - protein, 674 aa, synthetic construct
MRTTPKIYNYARVSTTKQTKGVGLETQQQRSVLENLSQEHNLPIHDENFVDQGLSAYHGKHKDGAFGVVLSRIESGEIASGSILVVFSLDRLSRETVNVAMEQFLSIINRGVRVYTHIDCKMFDSESQNQTADLIGSLITMQRANEESETKSKRIIAAQKIALKRWKDTGKPQGALGRSPFWIDQPTNTLNINAEGVKKAVEMKLAGYGDLKIKQYLDANFEYKQTRTKGTVKQSNTWDYTAISQLWANRSLIGEKNFHIEGVSHVFENYYPPIIDEATFRKLKMCKSEKRGRNTSSGKIPLLKGIARCGICGGAMVFVDKGDNRVNYVCNLAMKGEHDREVYNVNMLDLLTLEICKDAYLAESDKANNTFVENEKIKIEAELVEEREVLDELVARFKSKRSNAILDLIGDSENKIDELEARLDALNSADVILSADELASLPDIFTDDVRKDYLRPERLAIRNNLYRFISSITLNRMFEPCSDAKTKFANCVDITWHFKNGQKRRLAMLPYEYTKTESGGKGLYLPFVYMYCSKNLIKVEDGDQLLSDILTKLHKLDLTKCLYPSKGQYQWSQRTLECGKTYWVPLDEGVFLEPEALQFDFGGIHTEKSTSQNYISLMYSHLWAEGEYTNDYPLLKFRDLARGFNFVESYAFYDTLRDNLFDQELYLARDFLMS

SEQ ID NO: 16809 - protein, 534 aa, synthetic construct
MNTIRPLISLRSPTAYSYIRFSSAIQAQGDSLRRQTKLAQEYCQKHSLTLSEQSFTDLGISAFNSANSQEDSGLGQFLKALEQGVIPSGSFLLVESLDRLSRAKVQTALRQLLNIIEYGITVVTLIDNRTYSSESETTDLIISLAVMERAHNESKTKSERIKAAWANKRANPTTTNRTSLAPFWLKLNKDKRTYTVIEKNAETVRRIFQMSINGHGIIGIARRLNEEKIPSPKGGSWSNTSICRILNSKAVIGEYTPNIGRTSTNTPISDYYPSIIDESTFYLSQSRKAERSKPKSAGRKTTFPNVFNQVAKCGVCGATMYYDNKSPTLKYLTCREFKKKNCTNRPIRIEFMHKFIIEQYLLPKNFQHHINMTTETSKQGDSISSIEEKIKEEEQALNQLMKIAKNLTSHIAIQHMENRDRKIMQLKEELEETKAQQAEVTLTPRIGFKQAQQLVANALQMEVNDKKPNCTDPELIREYRVTLNRSLKDVFNSLRIHNLKSASEITVECNQLTYAIDRKSLKLIHENLYWKSKV

SEQ ID NO: 16810 - protein, 531 aa, synthetic construct
MSIAYSYIRFSSAQQAQGDSLRRQTQLAQRYCEDNNLTLSDTNFQDLGVSAFHSANAQEDGGLGQFLTALSEGLIPEGSYLLVESLDRLSRAKVQTALEQMLGILRRGVKIVTLMDHCIYDGDSDSRDLIISLTIMERAHNESKTKSERLKAAWDNKRQNPNSTNRHGSTPFWLTLNSDKRTYTVKEEYAELIRKIYQLSIDGWGLVKIVRYLNECGIPAPKGRSWAITTVSKLLNSKAALGHYEPSQGRKSLNTVIEDYYPSIIDEKTYYTSLQRKKERSAPESAGRKTTYPNPLVHIAKCRLCGSSMFFENKQPSLNYLTCREFKKKNCTNKPIRMELIYRFIYEVFNSPMYHQQHAKLVDKSKQKDINYHAELKGRYEAERKAYEELLEASSSFSDPFILKELQKRSTLILELSKQLEEAKAKETVEKARTVHINFTEALQLTVNAFHLPLEEVKVEELSTDELFNTRVRLNRILKQAFNHLSIFHCNESKRITIETEVTEDYPIDLRYETNQKAIKEPMKNRIWSVY

SEQ ID NO: 16811 - protein, 568 aa, synthetic construct
MEYVAYLRISSFNQKEKGDSIDGQRKSITRWATERGGNIIKWYIDDGVSAYKGKRNNFDLMLQELENDIVKVDGLIVYSLSRFSRNLLAQLEATKVLQRKEIRLISATEALPESYEESYVMSTILGLMNEHSSMQNGKVVRDRLRDTALKQYFTGGPIPFGYHSVTVSGVTSKCRKKLQILEEEAELVLEIFNLSEKGVNGKPLGVKSIAEMLNKRKSYRRGTKWNRNSVCRILNNRAYIGEFIYNSSDSEPIVVNIPNIISKDQFYNVQEGLKSRDIFSFESRRIRSKCLLTGLLKCAVCGASMVVTSGKSGKYSYYQCSKKVRHAPDSCTSKRIRRDKAELLVKDKFMNELLAEAHLKTIHCQAKQRLKETSKLLLVEKTKLSKRISNLETRYSRLITMIADGDLVPDVRINKTITDLSTQLDVLEAEMAKLAVRINLPVKNFGEARLVEVAAAVQKYLQQIDNEALKQLMLATVTSVKVVDAKKKLIFEGSNMAVLYLIANAKTGTDFSVPAFITKWRRDRDLNPRYAINVCRFSRPVLSTTQPSLRCGTYNREWSSRCKALNYN

SEQ ID NO: 16812 - protein, 503 aa, synthetic construct
MPQRNNGIAYSYVRFSSKRQELGDSLRRQTEMAEEYAIKNGLKLSSKNFQDLGISAFREGKRASLVDMLAAIEEGQITAGSTIIIEALDRLSRRGIDATLETVKEILRKDVQVVSLSDGLLLTKNSLNDLQSVIRIAVAADLAHKESERKALRLRETKGQQREAALSGKPINKILPFWLQRTEAGYAFSDKAGVARQIVQLKQEGKGSNMIAKTLNRLGIAGVRTAQWNHASITKMLKNPALYGAYQTGETTKDRELIKLELVEAYYPALINKEEWLLLQSDQSKSKRGRRSANNPYSGLLRCECGGALVKRQHTVKGKLYVYHGCLNAKDGRCKQNISIKGLDGALTTILGRLEFKKKQTLSQSIHQERQQLEARINDLNSKLQVLDDIPLSVIKSIGTMESRLKEITDQIAKDEREQRGIEAVKSEKLSSITDGLELNLLLKRVLKSITVIRSGRGWAVKVLHLSGHKQNFLMVDGEIKFLSDTIALQKLLAGFRETTENS

SEQ ID NO: 16813 - protein, 547 aa, synthetic construct
MRTAYSYVRLSSKKQIQGYGQERQWEAIQAAALAHGWSLSEKTFSDLGVSGWKGANIETGALSQFLQCVEDGYIEKGSVLIVENVDRLSRAGVQRAVSLLMQLLASGISIYTFTDSKLYEPDSHNPLMDLMAWALSAQRAFEESERKSQMILNAKAKAREKARLTGEIITRRCPSWLRVNQDKTEFELIPERVETVRKIFDLYVNGYGTPRIGRLLTEEGRKPLTGRAWYPRSISRILQYRAVLGEYQPTLHGKPEGEAIKNYYPAIIDEDQFNEVQAVLKEGGAGKGRRGKEMRNYFAGLLRCSCGEGMHIVSSCVKGKRYYQLRCLQYRISCFDSPWNFYRLSSFVLFALRRLPILEVMGSQDNNNIKELNAKERELTFLLEDTRRQLDNTINAIAALGLNDQLQSKFRELKTSVTNIEKQLSNVKTELETSQGKLVIQKQDSEMLTGRFLELIDSTKDIDGRIKLNQVLRRYLSKIEMHADKKEEYRYIKIYRKDGDELVSIQCDHSLKGALFESKDGLETFELLPATDAKRNEISNTLLCTPK

SEQ ID NO: 16814 - protein, 515 aa, synthetic construct
MKAYSYKRFSSKQQRKGDSLRRQNKLINDYCHQHNLTLSEHNFEDLGVSAFRSTNSNEDSGLGQFLLALQENKISTPCYLLVESLDRLSRDNVKTAMRQLWSITDYNVTVVTLSDSKQYTRDMDFTDFLMAGLIMQRANEESQTKSCRLLATWENRRTNPNAPKTKNCPFWLTLAVDKQGYSVNDSVQLLHRVYDLALNGLGSPTIAKTLNREGIPSPTGKTWTDATITKTLNSRSVLGEYQPHQRIYQDGKRKDVPIGEPLKGFYPTIFSEAYFNQVQAAIKSRAKSKNRGATKSHLNVVKGIATCSLCGGNIRLKKQSELYYLQCAEREKGLCKSKPINLRFLSDWLSEVWTRADYAPISASETPESEKLKQLESKLSNVENVISGLLRLLDGTNDYQILSSLESRMVEKRELMESIEKLEAELAPYNLNTKAMRKRYTLVKLAFMQSSEQDIIIARNQLALLLNQLKGFKIGMVEGTAYFDVVTPSGELKRYQSVNRPYYKGRMPQKIWTSI

SEQ ID NO: 16815 - protein, 515 aa, synthetic construct
MTKAYSYIRFSTKGQIEGRSLQRQLETARKYAEENGLELQSLSFQDLGVSGFKGRNSEQGALSQFIEAVKEGTIPEGSWLLLESFDRMSRQPVEKSMRLLMELVELGIIVVTLMDKQVYRRGQLDMTKLIISLVIMSRAHEESAAKSKRLADVWHAKQAVAHLKPLGTHLPAWLEYNEDKTKIQINYEKAVVVRYIFELSANGYGRSALIRKLNSQGIAPIGSRAKRWHLSYVTKLLNNTAVLGEYIPHVTDKLGQRVPTGEVIENYYPPIIEKDLWLRAKAAAQSRKIRGTGAIRRGHTRNILSGMVSCECGSSMQFVNKGSSDKGGYYLVCSTARHGAGCQYIGHRYYSVQWVVLIALQKLLHTFANKADNHEKEMQLEGELVELDRKLNNLINDLEENGSSKYISAAIRKTEQRMDIVKNELLMLQSSKAVENDEVDLQEITLRLNENFERLRLHQYLKRHITNIVVYKNKERLEINLKTGEDITLTFIPSENLWQSNTGVSFSVTFDTRWG

SEQ ID NO: 16816 - protein, 545 aa, synthetic construct
MNKYHLYQRVSKQIQAEEGHGIQRQEQACEHWISDYNKRLLSEGKSAYSKGLIYEDRGKSAYTAANFKRGELGALINDIENGKIEKGDLIVIELIDRFSRANVDFVRSQFQRILDAGVKIAITKWNLVFEENMESVSSVTGRILLEIGMYLAYQESSQKSSRIKASRKLLEDSGRKSIAKPPFWLARNLDLKSYTIIEENAEIIRKIFDLKLNFNYGPQKIIKSLGDLDIYRYSFDENGKLIKTTKNSPLSESSINAYIRNTNVIGKLDGKDYYPRIIDDRTFYAVQKRTRENTGGVGEIFRNVFVGVGKCGCLIRKENENGCDSLAKCGYIMAFSSRKVKNPTKGMYLKCNRKRKSTKCDSENINYYLAQNKIYNVLKSLKFDIDQSVDISHLEEKINTIDKSMSKIREYMTQYSDDEEWENQYKIKRMEREKIENEIKASKSRITGKLSNLDIDFSKEKDRVLFNQFLKDNRITVYFTKERMEIIIGSLNNFSIKCGYDDSNRDIDHIIESYSKNGLVGIEEKSSKSESKGLLRFNLPTASGS

SEQ ID NO: 16817 - protein, 547 aa, synthetic construct
MRTAYSYVRLSSKKQIQGYGQERQWQAIQAAALAHGWELSEKTFSDLGVSGWKGANIETGALSQFLQCVEDGYIEKGSVLIVENVDRLSRAGVQRAVSLLMQLLASGISIYTFTDSKLYEPDSHNPLMDLMAWALSAQRAFEESERKSQMILNAKAKAREKARLTGEIITRRCPSWLRVNQDKTAFELIPERVETVRKIFDLYVNGYGTPRIGRLLTEEGRKPLTGRAWYPRSISRILQYRAVLGEYQPTLNGKPEGDAIKNYYPAIIDEDQFNEVQAVLKEGGAGKGRRGKEMRNYFAGLLRCSCGEGMHIVSSCVKGKRYYQLRCLQYRISCFGSSWNFYKLSSFVLFALRRLPILEVMGSQDNNNIKELNAKERELTFLLEDTRRQLDNTINAIAALGLNDQLQSKFRELKTSVTNIEKQLSNVKTELETSQGKLVIQKQDSEMLTGRFLELIDSTKDIDGRIKLNQVLRRYLSKIEMHADKKEEYRYIKIYRKDGDELVSIQCDHSLKGALFENKDDLETFELLPANDAKRNEISNTLLCTPK

SEQ ID NO: 16818 - protein, 475 aa, synthetic construct
MKTTNKVAIYVRVSTTSQVEEGYSIDEQKDKLEAYCKIKDWKIYDVYVDGGFSGANTQRPELERLISDVKRKKVDIVLVYKLDRLSRSQKDTLFLIEDVFAKNDVAFISLQENFDTSTPFGKASIGMLSVFAQLEREQIKERMMLGKEGRAKNGKSMSWTTIPFGYDYSKETGVLSVNPTQALIVNRIFTEYLNGKPVVKIIRDLNAEGHVGRKRPWGETITKYLLKNETYLGKVKYKDKVYEGQHEPIITQELFDLVQLEVERRQISAYEKYNNPRPFRAKYMLSGLMKCGYCGASLGLRYTRKDKNGISHHKYQCRNRHSKDLEKRCESGWYSKEELERGVIKELERIKFDPKYKNETLAKKEETIKVEEIKKQLERINNQVSKLTELYLDEIITRKKLDEKNDKIKTERQFLEEQLENQKSNVLSIRKRKLTRLLKDFDVEKLSYEDASKIVKNIIKEIIVTKDGMSITLDF

SEQ ID NO: 16819 - protein, 481 aa, synthetic construct
MKTMNKVAIYVRVSTTNQVEEGYSIDEQKDKLSSYCDIKDWNVYKVYTDGGFSGSNTDRPALESLIKDAKKRKFDTVLVYKLDRLSRSQKDTLHLIEDVFIKNGIEFLSLQENFDTSTPFGKAMIGLLSVFAQLEREQIKERMQLGKIGRAKAGKSMMWAKTSYGYDYHRDTGTITINPAQALAIKFIFESYLRGRSITKLRDDLNEKYPKHVPWSYRAVRTILDNPVYCGFNQYKGEIYPGNHESIISKEEYDKTQSELKIRQRTAAENVNPRPFQAKYILSGIAQCGYCGAPLKIMLGVKRKDGSRLKKYECHQRHPRTLRGVTTYNDNKKCDSGFYYKDKLEASVLKEISKLQDDADYLDKIFSGDNAETIDRESYKKQIEELSKKLSRLNDLYIDDRITLEELQSKSAEFISMRGTLETELENDPALRKNKRKADMRKLLNAEKVFSMDYENQKVLVRRLINKVKVTAEDIVINWKI

SEQ ID NO: 16820 - protein, 481 aa, synthetic construct
MITTNKVAIYVRVSTTNQVEEGYSIDEQKDKLSSYCDIKDWNVYKVYTDGGFSGSNTDRPALESLIKDAKKRKFDTVLVYKLDRLSRSQKDTLHLIEDVFIKNGIEFLSLQENFDTSTPFGKAMIGLLSVFAQLEREQIKERMQLGKIGRAKAGKSMMWAKTSYGYDYHRETGTITINPAQALAIKFIFESYLRGRSITKLRDDLNEKYPKHVPWSYRAVRTILDNPVYCGFNQYKGEIYPGNHEPIISKEEYDKTQSELKIRQRTAAENVNPRPFQAKYILSGIAQCGYCGAPLKIMLGVKRKDGSRLKKYECHQRHPRTLRGVTTYNDNKKCDSGFYYKDKLEASVLKEISKLQDDADYLDKIFSGDNAETIDRESYKKQIEELSKKLSRLNDLYIDDRITLEELQSKSAEFISMRGTLETELENDPALRKNKRKADMRKLLNAEKVFSMDYESQKVLVRRLINKVKVTAEDIVINWKI

SEQ ID NO: 16821 - protein, 515 aa, synthetic construct
MNKKVKAGIYIRVSTEEQKQGHSLEAQESMLKEFADRKGYEIYDVYNDGGYSGKNFNRPEIQRLLRDLKDDKIDAILVWKVDRLSRNNTDVMSLIDTELTPRKKNLIITSIDMDSSSPTGHMFISLLSTFARYERATIIDRVKAGMQKRAEKGYWNGGSILGYDSVDKKLIINENESEIVREIFQLRAEGKGYKFIVNILNNKGIKTKTGKNFSIPAIKVIVNNHIYNGKMVWKKHQDWNTRRRTGKSEPIIVEGIHDAIIDEELWTRVQKVNELQKNSFSSNRNFNGNFLLTGILKCPKCGAGTVMSKTKKRNSDDYHLYYMCQAYHNKGSSVCSANLIRKDQVEQQVLNIISLLVNENDIINALIDELNSDNNKTNESHIAHIKMLKKQLGKAYDKRKKLDNDYFEGNIEGSTYNRLMNELQLDINKLKRNVRESESEIIKNDSTINKEEVIYALENFNKLFKIVNDEEKKLLIRSLIREVQMEANRKDVKEITFWFLPSSVLPSNKVRRTVS

SEQ ID NO: 16822 - protein, 599 aa, synthetic construct
MKKEVKVIKGDTTLKRTASGCVERSIKRVAAYCRVSTDTEDQINSYNSQVEHYTEFIQKNNEWTLAGIYADEAITGTQVDRRIDFQRLINDCMNGDIDMIITKSISRFARNTLDTLKYVRKLKEFNVAVFFEEENINTLTMDGELLLTILSSVAQQEVENISANVKKGLRMKMERGEMVGFQGCLGYDYDPETKSISINEKEAEIVRYIFRRYIEGVGGMVISRELEEQGYLSPRGNKRWTETTVLGIIKNEKYKGDLMMGKTYTVDPISKRRLDNFGEQDKFYIENHHEPIISEEDFEKAQGIRLRRSKNRNTVANNGGKREKYSRKYAFSSMLECGFCGHNLSRRNWHSSSEYTKVIWQCVNATKNGKKYCPHSKGIEEEAIEKAFMESYRQVCHNNVEITNEFLKTVEEELKDNSLAKDLKKITNQLDKILKKEKDLVELRLNESISMDIYQDKYNEIAISKEKLLAEKRTLEVTLTDEKALKKRLEGFKKLLESNKYLEEFDRAVFESIVDKIIIGGTNDEGEIDPAMITIIYKTGKKDSQDGRLFKSRRKNAKEVNEKADSKLYPQSSDEVNNLCSYPMDNTRRVRRVANQGVR

SEQ ID NO: 16823 - protein, 515 aa, synthetic construct
MKTAIYLRKSRADLEAEARGEGETLAKHRTTLLKIAKEMNLNILAVREEIVSGESLVKRPEMLALLEEIEDNKYDVVLCMDMDRLGRGGMKEQGIILETFKRSNTKIMTPRKTYDLNDEWDEEYSEFEAFMARKELKIITRRMQRGRVASIEAGNYLGTHAPFGYDIHRLNKRERTLTINPEEASVVRMIFDWYANEDMGANAIRSKLNDLGYKSKLGNEWNPYSILDILKNNVYIGKVTWQKRKEVKRPDAVKRSCARQDKSDWIIADGKHEPIIPESLFEQVQEKLNSRYHIPYNTNGIKNPLAGIIKCAKCGYSMVQRYPKNRKETMDCKHRGCENKSSYTELIEKRLLEALKEWYINYKADFEKHKQDDKLKETQVIQMNEAALRKLEKELVDVQKQKNNLHDLLERGVYTVDMFLERSNIVSDRITEITSTMENLKKEIKTEIKKEKVKKDTIPQVEHVLDLYFKTDDPKKKNSLLKSVLEKAVYKKEKWQRLDDFELVLYPKLPQDGDI

SEQ ID NO: 16824 - protein, 595 aa, synthetic construct
MNTKVKLIKASNIGARNRNALHLDLKRVAAYCRVSTDSKDQLESYKSQVDYYTNLIKNNKNWTLAGIYADEATTGTTATKRADFMRLISDCQNGDIDMIITKSISRFARNTLDTLKYVRLLKENNVGVVFEEENIDTLTMDGELLLTILSSVAQQEVENTSAHVKKGLKMKMEKGELIGFQGCLGYDYDPITKSISINEEESKIVRYIFKRYLEGNGGSVIGRELEEQGYLTPRGKTKWSDTTVLGIIKNEKYIGDILMGKTFTVDPITKRRLANFGESDKYHIENHHEPIISREDFEKAQEIRLRRAQNRNTIANKDRKREKLSRQYAFSSMLECGFCGEILSRRTWHTSSIYKKINWQCVRSTKKGKKYCPHSKGIQEAAIEKAFVESYRQLCHADSTVIDDFLKIVEEEINDNTLVKDLKKIENQLNRIISQERKLVDLHLEDNIDEEVYAKKYKKLTKQKEELLDEKKTLELTIKDEDSIKERLKQFKKVLENKEIIEEFNGTVFESIVDKVVVGRIDKDGTVHPYDLTFYFKTGVKDSQDSNNFKDKRKNAKDNDINKLCSYKNDEDKKLCSQSKDNARRVRSVANQGVR

SEQ ID NO: 16825 - protein, 485 aa, synthetic construct
MAEKRKVAVYCRVSSMHQAIEGYSIEQQRDSLTKYCEAMEWNIYDIYIDAGFSGGKLERPAMDKLIREAEAGKFDTVAVYKLDRLSRSVQDTLHLIRDVFKEHDIDFVCLQENIDTKSAMGNLFLTLLSAIAEFEREQITERMAMGRHGRAKSGKSMMWARPAYGYRYDRESQTVSVVQSEAMIVKRIYKEYLEGKSVSQIKNDLNSEGHITKEKPWVYKRITYILQSRVYTGVNEYKGEIYDGKHEAIIDTETFELTQMEFAKRQQQTKDKKNNPRPFQAKYMLSGLARCGYCKAPLKLRLGAVRKDGTRAMVYDCHNRWNRKITYLTIYNDNKQCTESGRYQKADLEAYVLDKIKELQLNPDTIREKMDLNEKPTANTEEIKKQIAKTNQQIDKLNDLYLNDLITVEKLKERANKLKKERELLEAELSKNSDHLFKAKKKQLNDLLMNKDIDSMTYEEQRNLVKMLIYKVDVTKEDINIIFDF

SEQ ID NO: 16826 - protein, 515 aa, synthetic construct
MKTAIYLRKSRADLEAEARGEGETLAKHRTTLLKIAKEMNLNVLAVREEIVSGESLVKRPEMLALLEEIEDNKYDVVLCMDMDRLGRGGMKEQGIILETFKRSNTKIMTPRKTYDLNDEWDEEYSEFEAFMARKELKIITRRMQRGRVASVEAGNYLGTHAPFGYDIHRLNKRERTLTINPEEASVVRMIFDWYANEDMGANAIRSKLNDLGYKSKLGNEWNPYSILDILKNNVYIGKVTWQKRKEVKQPDAIKRICARQDKSDWIIADGKHEPIIPENLFEQVQEKLNSRYHVPYNTNGIKNPLAGIIKCSKCGYSMVQRYPKNRKETMDCKHRGCENKSSYTELIEKRLLEALKEWYINYKADFEKHKQDDKLKETQVIQMNEAALRKLEKELVDVQKQKNNLHDLLERGVYTVDMFLERSNVVSDRITEITSTMENLKKEIKTEIKKKKVKKDTIPQVEHVLDLYFKTDDPKKKNSLLKSVLEKAVYKKEKWQRLDDFELVLYPKLPQDGDI

SEQ ID NO: 16827 - protein, 538 aa, synthetic construct
MTNQSTNNLKITALYVRLSNDDEREGESNSIVNQKKMLSKYASDHNLRKTTFYIDDGVSGTTFNRKGFQAMITDIEAGIVGTVVVKDMSRFGRDYLQVGMYTDIMFPEHDIHFIAINDDVDSEQGDNEFTPFRNIINEWYAKDTSKKIRAVFKAKGLSGVPLTANPPYGYIKDPNNQTQWLVDDYSAMVVRRMFQLTMEGYGPTQIAKKFQAEKILVPTHYAISQGRKTNTVPSQSPYYWSDRTIAKLLEKPEYLGHTVNFRTTRKSYKDKRKIERDKKDWVIFENTHEAIIEQSVFDTVQELRKHKRRLTKQKELPLFSGLLFCADCGGKLYFCRGKGVTRNQENYICSSYRRRTTECTSHYIRSVVLEEVVTNNLRKTMAYIQANGKSFFGDVLKGDQQAKKKEAQNQQKQLHDAQKRITELDAIFPQLYEDMVSGRINSERFDKLSSNYEEEQVLLKQQVVDISKEIQTELDVNVYIRELRKFVHKHVNFDSLTPELLHEMIDKIIVHTGKKIEVHYKFGLGELGNLVDEHIIKK

SEQ ID NO: 16828 - protein, 599 aa, synthetic construct
MKKDVKVIKGDTTLKRTASGCVQRSIKRVAAYCRVSTDTEDQINSYNSQVEHYTEFIQKNKEWTLAGIYADEAITGTQVDRRIDFQRLINDCMNGDIDMIITKSISRFARNTLDTLKYVRKLKEFNVAVFFEEENINTLTMDGELLLTILSSVAQQEVENISANVKKGLRMKMERGEMVGFQGCLGYDYDPETKSISINEKEAEIVRYIFRRYIEGVGGMVISRELEEQGYLSPRGNKRWTETTVLGIIKNEKYKGDLMMGKTYTVDPISKRRLDNFGEQDKFYIENHHEPIISEEDFEKAQGIRLRRSKNRNTVANNGGKREKYSRKYAFSSMLECGFCGHNLSRRNWHSSSEYTKVIWQCVNATKNGKKYCPHSKGIEEEAIEKAFMESYRQVCHNNVEITNEFLKTVEEELKDNSLAKDLKKITNQLDKILKKEKDLVELRLNESISMDIYQDKYNEIAISKEKLLAEKRTLEVTLTDEKALKKRLEGFKKLLESNKYLEEFDRAVFESIVDKIIIGGTNDEGEIDPAMITIIYKTGKKDSQDGRLFKSRRKNAKEVNEETDNKLYPHSSDEVNNLYSYPIDNTRRVRSVANQGVR

SEQ ID NO: 16829 - protein, 484 aa, synthetic construct
MNEQSSQFIALYCRVSTDDQAKEGVSLEEQQERLEAYCRAMGWGKDVVVYVEDGYSAKSTDRPHLKRLIEDVKAGDIKKIIVTKLDRMSRKLLDLLTLIDLFQEHDVSFVSISESFDTNTPSGRLTLQVLGAVAEFERERIRERVFENMYHAASKGKWLTQHPFGYRLENKELVIYENEAKIVRDIFIWYTQEGHGFYAIAKKLNLLGIPSRQNKQWSIRSVKLLLSNPVYKGTVVWNRKDRSKKKEQFKKEDEWVIQENAAPAIVTDELWNEAQKRMQTSTLAPRAQTSPHLLGGLLKCGKCGSGMSIGWSGSTKNRYRVYRCSANKNKGTCTSKQYKAHQLEELFKKGLSNLCESFSFSLHPSLSLQKRHTDVTNQMKLATAKKRYKRKVEAFTAGLIELEDLQEEKRRLETLELALQPTTELNENINLPQIEEWMKSKLKNIYDALSIVPVEELKPLIQTIIEKVILHSEEELEIVLQPII

SEQ ID NO: 16830 - protein, 543 aa, synthetic construct
MSQKIAYQRLEDILKKGSRIALYARYSTNKQDEHAQIHSVRNFLSDYGCELLDDNIYIDPKTSAVKISMDQRKDLQKLIKDVKENKFDCIVSYKNDRIARNTKEHNEFRTEMQRLGMPVVLSSTREIYTAGEIVPLTIKDALTQIEPALIAERTRDTFSSKIENGEWTGGQAPYGYIYDKETERFEIVDKKVEVVQEIFRLFKLGYGLQQIANKLTTDKRDIGQKWYKDKIKYIITNPFYAGYMTMNRYVKGKLQLKMETWTWSKKQENIPAIMSRDEWEYCFYLYVERRKSQTVRKSSTSFWLRDILHCNECQQPLKTKNQKTKSKRKNGEEVEYGKVLYECRNCGLKLETEKIHDKFKEDMGKVLKKLLEKHRENLIQQTYLQIEKEHEEIVNVQKELVNKRIKHIESIDVLDKKINQLYKGITTGKVDKTNNAEDASSKEEKLVDWNEKLIEILLTGRSKKYSDMEEVKQQQQLLEDKKERLNIAMNALKNQYQDELLNFSFDLENVQSMRNFLLQFVKAVYVSKDMRLDYKVYENLISE

SEQ ID NO: 16831 - protein, 515 aa, synthetic construct
MKTAIYLRKSRADLEAEARGEGETLAKHRTTLLKIAKEMNLNVLSVREEIVSGESLVKRPEMLALLEEIEDNKYDVVLCMDMDRLGRGGMKEQGIILETFKRSNTKIMTPRKTYDLNDEWDEEYSEFEAFMARKELKIITRRMQRGRVASVEAGNYLGTHAPYGYDIHRLNKRERTLTINSEEASVVRMIFDWYANEDMGASAIRNKLNDLGYKSKLGNDWNPYSILDILKNNVYIGKVTWQKRKEVKRPDAVKRSCARQDKSDWIIADGKHEPIIPESLFEQVQEKLNSRYHVPYNTNGIKNPLAGIIKCSKCGYSMVQRYPKNRKETMDCKHRGCENKSSYTELIEKRLLEALKEWYINYKADFEKHKQDDKLKETQVIQMNEAALRKLDKELVDVQKQKNNLHDLLERGVYTVDMFLERSNVISDRITEITSTMENLKKEIKTEIKKEKVKKDTIPQVEHVLDLYFKTDDPKKKNSLLKSVLEKAVYKKEKWQRLDDFELVLYPKLPQDGDI

SEQ ID NO: 16832 - protein, 452 aa, synthetic construct
MKAAIYIRVSTQEQIENYSIQAQTEKLTALCRSKDWDVYDIFIDGGYSGSNMNRPALNEMLSKLHEIDAVVVYRLDRLSRSQRDTITLIEEYFLKNNVEFVSLSETLDTSSPFGRAMIGILSVFAQLERETIRDRMVMGKIKRIEAGLPLTTAKGRTFGYNVIDTKLYINEEEAKQLQLIYDIFEEEKSITTLQKRLKKLGFKVKSYSSYNNWLTNDLYCGYVSYADKVHTKGVHEPIISEEQFYRVQEIFSRMGKNPNMNRDSASLLNNLVVCSKCGLGFVHRRKDTVSRGKKYHYRYYSCKTYKHTHELEKCGNKIWRADKLEELIIDRVNNYSFASRNVDKEDELDNLNEKLKTEHTKKKRLFDLYISGSYEVSELDAMMADIDAQINYYEAQIEANEELKKNKKIQENLADLATVDFDSLEFREKQLYLKSLINKIYIDGEQVTIEWL

SEQ ID NO: 16833 - protein, 515 aa, synthetic construct
MKTAIYLRKSRADFEAEARGEGETLAKHRSTLLKIAKEMNLNVLSVREEIVSGESLVKRPEMLALLEEIEDNKYDVVLCMDMDRLGRGGMKEQGIILETFKRSNTKIMTPRKTYDLNDEWDEEYSEFEAFMARKELKIITRRMQRGRVASVEAGNYLGTHAPFGYDIHRLNKRERTLTINPEEASVVRMIFDWYANEDMGANAIRSKLNDLGYKSKLGNEWNPYSILDILKNNVYIGKVTWQKRKEVKQPDAVKRSCARQDKSDWIIADGKHEPIIPESLFEQVQEKLNSRYHIPYNTNGIKNPLAGIIKCAKCGYSMVQRYPKNRKETMDCKHRGCENKSSYTELIEKRLLEALKEWYIDYKADFEKHKQDDKLKETQVIQMNEAALRKLEKELVDVQKQKNNLHDLLERGIYTVDMFLERSNVVSDRITEITSTMENLKKEIKTEIKKEKVKKDTIPQVEHVLDLYFKTDDPKKKNSLLKSVLEKAVYKKEKWQRLDDFELVLYPKLPQDGDI

SEQ ID NO: 16834 - protein, 451 aa, synthetic construct
MTKAAIYIRVSTQDQVENYSIEVQRERIRAFCKAKNWDIYDEYIDGGYSGSNLERPGIKKLITDLKHIDAVVVLKLDRLSRSQRDTLELIEEHFLKNNVDFVSITETLDTSTPFGKAMIGILSVFAQLERETIAERMRMGHIKRAENGLRGNGGDYDPAGYTRQDGHLIIKKDEAEHIKRVFDLYEQYYSITKVQEILKEEGYPIWRFRRYRDILSNTLYIGQVTFSGKEYKGQHEPIISSEQFKRVQALLKRHKGHNAHKAKQSLLSGLITCSCCGENYVAYSTGKSKDVESKRYYYYICRAKRFPAEYEERCMNKTWSRKKLEEVIISELKNLTEEKKQTNKKEKKTNYEKLIKDIDKKMERLLDLFMNTTNISKSLLEQQMEKLNLEKEKLLLKQQRSEEESISHEVTLSAIDDAFETLDFKEKQVMINNFIEQIYINQNNVKIIWRF

SEQ ID NO: 16835 - protein, 452 aa, synthetic construct
MKAAIYIRVSTQEQIENYSIQAQTEKLTALCRSKDWDVYDIFIDGGYSGSNMNRPALNEMLSKLHEIDAVVVYRLDRLSRSQRDTITLIEEYFLKNNVEFVSLSETLDTSSPFGRAMIGILSVFAQLERETIRDRMVMGKIKRIEAGLPLTTAKGRTFGYDVIDTKLYINEEEAKQLRLIYDIFEEEKSITTLQKRLKKIGFKVKSYSSYNNWLTNDLYCGYVSYADKVHTKGVHEPIISEEQFYRVQEIFSRMGKNPNMNRDSASLLNNLVVCGKCGLGFVHRRKDTVSRGKKYHYRYYSCKTYKHTHELEKCGNKIWRADKLEELIIDRVNNYSFASRNVDKEDELDSLNEKLKIEHTKKKRLFDLYISGSYEVSELDAMMSDIDAQINYYEAQIEANEELKKNKKIQENLADLATVDFNSLEFREKQLYLKSLINKIYIDDEQVTIEWL

SEQ ID NO: 16836 - protein, 487 aa, synthetic construct
MGSYAVYVRISTDRDEQVSSVENQIDICRNWLERNGFIWDGKRVFKDEGISGTLFINRPAIQLLLQKAKAKEIDMVVFKSISRLARDLKDSLEIREVFLAHNVRIISVEEGYDSVKAGKNDMAFELWSLFSAQYSRTLSSSITAALAVKVRRGEHIGKIPYGYDRINQKLAINEEESNVIRRIYQWYIDGWGYKKITNELNRLAVKSKTKKNWQMTSVQRILRNPIYKGTFILNQYTSVKVGGKKKQIRNPKEKWFVFPNHHPAIIDDGTWNQANQKDITVNKTKITAWNEFRDLAKCGVCGSNMTIVQSHLLKKNGERTEWKYLKCSKYRRAGKYGCVNHVPIQYRDFRQFIIELLIKKGESVTLKLQSNVEQGQEKKIKKLKQQMNVNEQKKKSLLDLYLEELINKEEFEKKRNDLETEITKASQELFILQQGDVVQTDIKTIKEAFEQLQQREHDLYHVFQILIRKIVIHQDGTVDIAYIFEKT

SEQ ID NO: 16837 - protein, 525 aa, synthetic construct
MKTIRDVLEKGKKGAFYARVSSDRQTIDAQRHHVYEFIKNYECEIVKEYVDHGESAFKKKLIKRPQIMALLRDVEQGKYDFVITYADDRLARSEIEHVQIRVIMKEAKTDVILTSTGELYTERDIITQLIREGGTRYEVERISARTKDAYGQRTDYGQWMGGPVPFGYVQDENTKNFFILEDEKEIILKIYQLYQSGEGFADIAKILNEQKAKTNTIHWKKERVKHILTNPIYAGYVTFGRLKPGSGNSIEDLSKWKMAKCEEIPPIMTKEEWLATFQMFEKKRNKELPPKQLKTEYVLRDLIYCKSCDAPLLPKNQETRGKNGKKYGIKKYMCSNKLCKVWFSTDELHALVFDSVIKEVTDKVISKSQTELMYEMEQILEKDIKQIKKEIQRLKKQVDNCLVWIKDAEREIDELYNQKKKLVEVDPKLDPLLDVMLDYRLHLLHEIRETEELIAKKEAEMKHIEDVDSNQSMLQKNVLQAFRIEFTNLQKDMKRVRQLLVYLIDKIIIDQNGKTEYILKINLEQ

SEQ ID NO: 16838 - protein, 462 aa, synthetic construct
MKRAGIYIRVSTQEQANEGYSIGAQTDRLTKYVEAKEYKLYKKYVDAGYSGSKIDRPAMKELIEDVCNNTLDVIIVYKLDRLSRSQKDTMYLIEDIFRPNNVELISMQESFDTSTAFGNATVGMLSVFAQLERKSISERMITGRVERAKKGMYHTGGQSRPPAGYEFQNKKLVVNEYEAAAIRDLFRLFNEGLGRRSISDYLQKNYPGRNKWLPCSIDRMLKNDLYIGKVKFSGESFEGIHKPIIDDVTFFKTQKEIKKRKANNSQKYDYVALLGGLCECGICGAKMANRRSVGRKGKVYRYYRCYSKKGSPKHMMKISDCPSSAQQQDFIDEAVITKLKTLDIDSEIKKRTTPKVNNESIEKQIENINNQINKLIELFQVDSIPMEVLTKKIDKLNLEKESMKALIDKSQTVNINEFRSRLKVLENFDWDNSEKSEKRKIIEMLIHKVIVYETHIEIILIE

SEQ ID NO: 16839 - protein, 452 aa, synthetic construct
MKAAIYIRVSTQEQIENYSIQAQTEKLTALCRSKDWDVYDIFIDGGYSGSNMNRPALNEMLSKLHEIDAVVVYRLDRLSRSQRDTITLIEEYFLKNNVEFVSLSETLDTSSPFGRAMIGILSVFAQLERETIRDRMVMGKIKRIEAGLPLTTAKGRTFGYDVIDTKLYINEEEAKQLRLIYDIFEEEQSITFLQKRLKKLGFKVRTYNRYNNWLTNDLYCGYVSYADKVHVRGIHEPIISEEQFYRVQEIFSRMGKNPNMNKESASLLNNLVVCSKCGLGFVHRRKDTVSRGKKYHYRYYSCKTYKHTHELEKCGNKIWRADKLEELIIDRVNNYSFASRNIDKEDELDSLNEKLKIEHAKKKRLFDLYINGSYEVSELDSMMNDIDAQINYYEAQIEANEELKKNKKIQENLADLATVDFNSLEFREKQLYLKSLINKIYIDGEQVTIEWL

SEQ ID NO: 16840 - protein, 522 aa, synthetic construct
MKLSHILQPNMKAAFYGRHSTDKQDMDMQLNSVMEVIRKYDCIHTHSFLDKAVSARKNKITSRKELENMFEAAKRKEFDFVIVYKSDRLARDPLEHQTIRIVMKTLDIPIIISSTESVYNTDTDLIVQLMEDGFTKYEVDTIIARTRSGLENKAKQGKWLGGKPPFGYTYDKNSEQFIEHTEELCYVKEIFNLYVNGHGFQYIANTLPNGSRRGKDWGKENVKAIVLNPFYCGLLSWRRQTDGKQNERDIWIEASNHYVKPIISRTTWESCWRIYSEKRNGNMVPKHYKTSFLLQGLLSCEKCQELMKTKNQQTVSSTNKQYGGKIYFCTNCKLRIDADLLHDKVVNQTLTDVKISGFHNVYHAIEQKIQYEIQELNNNIQKHQRLFENYTIKLHNITEELKQRMKNNDDKRFLKSLAIYRLDVQRKLDEVIQQINDFKQQITLKEKIEKSKETWLHTLNEVFQDDVKLQEISNMDKRRFLLPLIQSVSIKENKKRNEYDISLQLRTDFSKRDVKNQISLIL

SEQ ID NO: 16841 - protein, 452 aa, synthetic construct
MKAAIYIRVSTQEQIENYSIQAQTEKLTAFCRSKDWDVYDIFIDGGYSGSNMNRPALNEMLSKLHEIDAVVVYRLDRLSRSQRDTITLIEEYFLKNNVEFVSLSETLDTSSPFGRAMIGILSVFAQLERETIRDRMVMGKIKRIEAGLPLTTAKGRTFGYDVIDTKLYINEEEAKQLRLIYDIFEEEQSITFLQKRLKKLGFKVRTYNRYNNWLTNDLYCGYVSYKDKVHVKGIHEPIISEEQFYRVQEIFSRMGKNPNMNRDSASLLNNLVVCGKCGLGFVHRRKDTVSRGKKYHYRYYSCKTYKHTHELEKCGNKIWRADKLEELIIDRVNNYSFASRNIDKEDELDSLNEKLKIEHTKKKRLFDLYISGSYEVSELDAMMSDIDAQINYYEAQIEANEELKKNKKIQENLADLATVDFNSLEFREKQLYLKSLINKIYIDDEQVTIEWL

SEQ ID NO: 16842 - protein, 515 aa, synthetic construct
MKTAIYLRKSRADLEAEARGEGETLAKHRSTLLRIAKEMNLNVLSVREEIVSGESLVKRPEMLALLEEIEDNKYDVVLCMDMDRLGRGGMKEQGIILETFKRSNTKIMTPRKTYDLNDEWDEEYSEFEAFMARKELKIITRRMQRGRIASVEAGNYLGTHAPYGYDIHRLNKRERTLTINSEEASVVRMIFDWYANEDMGASAIRNKLNDLGYKSKLGNEWNPYSILDILKNNVYIGKVTWQKRKEVKRPDAVKRSCARQDKSDWIIADGKHEPIIPESLFEQVQEKLNSRYHVPYNTNGIKNPLAGIIKCSKCGYSMVQRYPKNRKETMDCKHRGCENKSSYTELIEKRLLEALKEWYINYKADFEKHKQGDKLKETQVIQMNEAALRKLEKELVDVQKQKNNLHDLLERGVYTVDMFLERSNVVSDRITEITSTMENLKKEIKTEIKKEKVKKDTIPQVEHVLDLYFKTDDPKKKNSLLKSVLEKAVYKKEKWQRLDDFELVLYPKLPQDGDI

SEQ ID NO: 16843 - protein, 698 aa, synthetic construct
METTTIVKVAVYCRVSSDDQAERGTIDVQRDFAKNYIELYHLSLYDYYCDDGVSGTIPMKDRPEGARLLQDAAGKQFDSVLFYKLDRIGRKTTVILDAIQAFTAYGIAVRSMTEPLDTNTPTGKFLITTLSGIAELDRDSTLMRMHSGALVAAKKGKWLGGIVPFGYLTDKDGFLVINREKIPGLDYTEEDIVKIVFSLCANENKSSIEIADYVNALGVPTRYIPNRNHLLRKRPGKRLRNNAPLWGPSRVLRMLRNSLYKGYRIYGLRATLKDYEPIEQRVPAIVDEDTWNRANRVISSKYFLTPRRRQGRHLLQGYLYCGHCGHTYCGYADRLKKDRQTYYYRCNGRDAYNPAWRCDSSAGINADWIEQLVLDYCASVLREHSFLDPAPATDKKEDCTALELHTLDSAIKRLATEKDSILSLYRKNLITMDDLTRQLELIRQERKALQKRVEELNQPTTEEIIAQNRQTSAEFFRRFQDIFPRDYDLRNLSFQTCRDILELFIDRVTIYTVKNNDKSFYASFRVELQDKLGNTRTYSIAATDRLKTQQNKIGKKLSSLGEKLRSLRLERGYTQKTVAEHIGLSVNAVNAFENQRRSQTNPAFQHHTIRKLADFYGVPYEALAIWNYSSVETGGHKLFAQIRDVKGITNDELLADIGVSKPTFRKYLKGIATEQTRQKIESYFATARKWLKKIMQSR

SEQ ID NO: 16844 - protein, 498 aa, synthetic construct
MNAAVYARVSTDLQAEKGYSLETQVQACTKKATELGANVIKTYVDDGYSGAYLERPQLDALRDAIADKLFDLVVIYEPDRLSRETAHLLLLTQEIERSGAKLEFVLTEYKNTPEGQLFLTIKGAFASYERATIRERTMRGKRGKLRQGKVVEDSGVYGYDYDKETNGYVINPYEAGVINRIFKWYNSNEKGGCHSIAAELNKRRTIPPKGTRWHMSTVRSILRRQMYTGEYYANTYYHGRVGAKKEIRIPRDKSEWIPMKAPAIIDKDVFAIAQDKLSRNRSLSEFKRVAEVYLLRGLLFCEECGRKKHILRTEPAKGMVYYGCAARPSRYTSSIKCPSKYANVYDTDAIFWGLLEKICKSEKSLLNYVKGQRSKSAAKSDNDVEAYAKKLKDIAREREAVMQWFNHSLLTQEEATKRLTELKDSELMLQRKIENADSIKKESTLNASAICSMIKNCPATPEARRAVLLQIVDKIYMKRTDNSYRHNYHLSFRILFKD

SEQ ID NO: 16845 - protein, 496 aa, synthetic construct
MFSNTDMKDLIRPTIEQPRRTAAIYVRISKDRVGAGLGVERQENDCRKLAEREGYEVVTVFSDNDISAYSGKKRPGYQALLAAMKSGAIQAVFAWHTDRVHRRPTELEPYIEASDQFNIPTFTVQAGPLRLDSPSGRMGARIHGAVASYEVEIGIERQKAAKLQAAENGEWSGGQRPFGWLAGAMQVDEREAAVVREIIDRFIAGTSWRTIALDLNARGIRTQHDKGWNALKVRNIAIRPRNVGLRDHNGTAQYEAKWEALVDQDTWQRLQTAIVMSRNHHTQRGPFRKHLLKGFAYCGRCGNQMNSFSKQQRDGSYKATYRCRAMDDEKGHIGCGAVSRLGAPVEDLVKDAVFFRLESDNLGRLVSASSTETPKLRQLLADRHAQEVRLSEIVSLYGSGDLTFEEYKAAKSSAASRLDELSRRINAATASSAYANIPIGSSLSDAWDGADLLWRRELLDLIVDRVWIDPVPRGESLTRYKSWTFNPVHVRIDWKV

SEQ ID NO: 16846 - protein, 472 aa, synthetic construct
MSRAEAKPRAILYLRQSTYREESISLELQETAGRDHCAKHGYVVVGVEADPGISGRTWKRPAVVRVMDMIESKQADVVVLWRWSRLSRSRKDWALAVDRIEVAGGKIESATEPNDVSASGRFARGVMTELSAFESERIGEQWREVHVNRVSRGLPSGRLPWGWSSHERGVAQNPEQAPAIPQLYDLYLSGLGSRQLAAWLEQNGYRTYYGKPSWSHSTVTAILDSPFHSGQITYRGELFPGGHEGLITVKKFQQYQAMRVERADERAPRISYLLSGLMKCACGGTMHGFSNLMGKRSKVPFYGYRCHDAALNPNHGPANISIKFIDPNIFAWLETVGTMSDPAPDYAAAAAKVDSQRFAREILAVDAQMSTLTQHLAQGIVPERAYRAAVADMESRREVLSDSLRAIESMVVLAPENPAKIAQSLVEGWPTVPLQTKRAVIRSLVSSIVIDFSAPRTLTIVPRWGAPLAMDV

SEQ ID NO: 16847 - protein, 473 aa, synthetic construct
MAKKIPAVRSAAVYARISADVEGKSLGVQRQLEDCRKLAAERGWVVGREYVDNDVSAYSGKARAGYEAMCTDLAAGVRDAVIVYNLDRLHRRPAELEEFVALCEAAGVNQVATVTADIDLGNDDGLFMARIFAAFAAKESGRKSARMRRKYEQKAAQGLPHGPNRPFGYEEDKITIREAEAEVIRELVTRVIAGESLNSLTVWLNETGVAPVRGTRWASTAVRNIVSSPRIAGLRAYKGEVVGDAAWPAIISVAERDQVLAALAVRAWSRKRSPRKYLLSGLCRCGRCQARMFSAARLEAGAHKRRYVCSSSPDHGGGGRMTVVAEPLEKLITDAVLTRLDSKALADALAGKARANPDTAALSTQVEQAQARLDELTGLYSTGAISAREWIMARDPITDTITRLRREIAETLDTGPLAELAGQGSKLRAQWDELGLDRCHAIIRTVVDHVIIKPGQPGARGLDMGRVDPIWRT

SEQ ID NO: 16848 - protein, 522 aa, synthetic construct
MKRTFDHIKHVAIYLRISQEKRGENVETLENHRQILCDFCKENGYTYEEYGEVISGGKSEIEQRKELQRLLEDIEKFDAILCFELTRLSRNGLISQTVKQYCIDYDKPILTPYQSYDLANSETDRLLYDVGSMISSHEHGTIGKRSKANKKQMSKAGLHVSGNVPFGYRRNKETKKLEIYEEEAKVVRYIFKLHSEGLGSFKIRDILNAEGYKSATGKAFELPTIKRIIKNPTYKGTIVFNDRKKVKKNGKFVYEPVETIQVDNAHPAIIPPEEWDRANRERISRAKQAAVIREKPASTTGTTMLKDLVYCGVCGRKMRIFFDDKSSTGYVIQRCYHLYNGEKCPNRGIKLELVEKEVTKALPNFKSLLEKSVQRLQQEKEAGVETDIKRKIKQQERKLNDLNEQQDKLIDLALKGIFNEEEIRNKKQELIDEIKYTESAIVDLKEKIGNIDLNDHINSLMNIIELIEKLPNMEPDEVNQSLKTFISKIVYTRVLPPELLKKSTRNKQRKEYPFEIEIEFIE

SEQ ID NO: 16849 - protein, 556 aa, synthetic construct
MIYRTTNAGPAPKALIVVRLSRLTDESTSPERQRRECEKLCSERGWEVVGVAEDLDVSAGSTSPFDRPSLREWLAKPEEYDVIVFYRVDRLVRRMHHLTDMIRWSEDYGVNLVSATESHFDLSTAVGKVIAQLVASFGEMELEAISERNSNAFRHNVRAGKWRGGIPPWGYLPEQQDDGTWRYVQDAATALVIRSVVDRVLSNEPLRAIAHDLTERGIPTAKDRFAQHQGREVQGYKWHPGPLKRSLSSPTLLGYAVTREPLTDAQGRIQRESNGKKKFGPETIVRADDGSPIVRAEPILTVAVFERLQAELGNRENRKEPTKRSNALLLQVIKCGVCGNPAYRLKGGTGRAVRYRCSSAQYKTTCGNRTIRQDYADDVVTTLVLGMLGESERKERVWDSGSDHSAELAELDSTLTDLVGQLGTGPFKAGTPQRIKLDQRIAELAARQEELAKAETKAAGWTWQPTGELFSDWWERQTIEQQNVWLRTMGVELTWTFDGDAKEPNVRLDLGDLETLTKQLNPAGSVQEWQKVFDAMTGTGVSSIELPSSGDRLRSR

SEQ ID NO: 16850 - protein, 482 aa, synthetic construct
MRIAGYIRVSTEEQAEKGFSLDEQRERLISYCKAMGWPAPTIYEDDGYSAKDLRRPELTRLLGDVKTEKYTLIITTKLDRLSRRLFDILSVIDYLEKHNCSYVSASESFDTTTPAGRMTLQMLGMVAEFERERISERVRDNMRAIARKGEKIISRPCFGYNVKNGVMEINLEESLAVQQMAKWALEGYGAWEIAKRLNERGIATKDGNQWQDRVVRDLLKRETLVGDFVYNRTYRKGTRIFTRPEEEWIRIENHHDPILDRDTFDAIQKIFRSRKQSASRYVDETNYLLTGLLVCTHCGGKMVGRKDSKRGKNIYYRYVCNTYMKKGGCYFHHLHRDDLESVIINEIKRITTADANNLEITVVKTNSAKKTNKTDIYEQLHKLDLKAQRQIEAYEDDLITAHDLKKAKERIERDRARLLEQLKELERSDQKNGGDVVKQKAKRLIDDILSLDRAKSKNAIRQLIHHVDVSNASEVVITWHAD

SEQ ID NO: 16851 - protein, 496 aa, synthetic construct
MKSAYLYVRVSTDEQKRKGYSLPEQEDRLLKYCKYNNIEVKGIYREDYSAKNFNRPEWKELFLEIKKKSSAEEKNILFIKWDRFSRNVEYAYEMIGKLRKYKTIAMAIDQPIDFSVPESTVMLAVYLAVPEAENTRRAQNTANGIRRAKLMGRYPNKAPIGFINLTLMDGKKTIAPKEPEADIIKWSFHQVAQNDHKISEIMRMANEKGLICSRSHFFRILRNPVYCGLISVKLKSNEEQMIKGLHEPLISESLFYQVQSVINTKRKTTAKRDDLKAMFFLRGFLICPVCDRKLTGSIAQGSSKKYPYYHCHDRCRTRINAVFLNDCYQNKLQQLILSNNTIDLFKCILQDQNIKTLKASYLHNQNLIERKIKEEGQVLSQGRKLFLAGVLKIDDYNELKKENQVNIRHLKKEARDIFLKLKAIDKKDQIKDKELVEVFRKFSEFDTSDKRCLVSLIPPVDIDYKTGDLSLGLNQAFSKILLKKSNRKTNKKNEFH

SEQ ID NO: 16852 - protein, 490 aa, synthetic construct
MKAVAYARYSSDNQNEDSIEAQLREIKKYCRDSNIDLVHSYIDEEKSGKTDDRPAFQQMISDAKKGIFNAIILHKIDRFARNRYDSAIYKAQLKRLGIKLYYVAQPISDSPEGRLMEGILESFAEYYSENLANEVMKGLKTKAYHGEFTGGFAPLGYDIIDKKYVINEQEAVIVRKIFELYANGYSYGDLLNELNLKGYKTKFNVPFGKNSLYSILSNKKYIGIMEYNKAVSRIPGQRNGHKTKPEEQIIIVENVIPQIIDLNTWNTAQERKINSKHKAQFKAVDTYLLTGLVECESCSSNMGGHRTKNNQKKIYSYYLCKKCRNKVKKESIEQKVLNTLITKIFSDESINEYAQKLNEYSAKKYNESEAEINKLKSVVSQFEREINNIVNVIMKGISSSALEEKLQTLEQAKKDTLFELACAKNSQDMVLFTPDEIKSSLIKYKNILEKGNIDECKPIVKKFIHKITIAENDKITFSYCLDTIGADEGT

SEQ ID NO: 16853 - protein, 533 aa, synthetic construct
MKVKVGAYCRVSTEKDDQVNSLQSQKKYFEEYIRNRPDWEFVDIYADEGISGTQAENRMEFQRMISDAKYKRLDLILTKEISRFARNTKISIDYTRMLKELGVGVIFINDNINTLDGDGELRLTIMSAIAQDESRKTSERVKWGQKRRMEQGVVFGRELFGYNLYKGALTVNEEEAEIVRLIFHKYTIEGKGTHVIAKELYEDNIQSKRYIKRWSNTVILRLLKNEKYAGDLAQKKTITPNYLNHKKKYNRGEEEIVYIKNHHTPIISRELWDATQEQISHRSASKEQKSKYSNKYWCSGKLLCGECGSKFVGKSKKLKNGEVYKAWRCSQAKSYGSLKIDVNGNRVGCNNKSINHIVLGKIVKSVLYSINSNKEKIKSELVSEIRKSNKLTDIKSTDSFTRKIEDLNRKKQEVINLMIEGSISKDDMVLMNKRYDFEMNKVKTDIKNIEDINLINSSADKLQIYIDRINSLVNQIEGIDSEEVFKLTVKKVILYKNNILELYLTCMPEPIKLKYKSKGKNGNYSVEYSFMDN

SEQ ID NO: 16854 - protein, 548 aa, synthetic construct
MRCVAYCRVSSDSTEQMNSLENQIKHYTELFNKNGFTRAECGMYYSKDKKNEVVKYIPSIFADEGISGTKLKNRGAFNYMLECAYRKEFDAILVKNVQRWARNVEDGAGILKKLKVMGIKVIFEDGWLDSLNPANEATINILFVMAQEESRAKSTAVQFGIRKAQEAGKFTSALPYGYKNNKGYLEPVKEQLDVVKKIFDLYLEGWGSTKIVKYLNSEKILTQKGRRWSTSQIFGIISNEIYTGKQITHRQINTDINLDRFVHDGQVYKSRKPVPEDEWIINQREELRIISDETFQEVQREYSKRKEMYSKASRPSNANIFSNLLYCRNCGIAMRRKKLWGWKRKDGTRKFGVEWVCIQHDQYHNDICQYRNSWHEDVLIERVKKEIKKLRTNKDSLDKMFSEYMQSFFSSEEVEGKITELQARLDEIKAEVSANLKLFSKNIIDEEQYKQQNDELQNNKKMIDTELAKIKRIDHARNEVKRKYNNYLDFINKVDVDNLNNALLKRVINKIEAYTIKDEKGNEVKDIYIDWNMLDKSFDDVFYLRAKE

SEQ ID NO: 16855 - protein, 552 aa, synthetic construct
MRAAIYSRKSRFTGRGESIENQIQMCKEYAINNIGLSENEFLIFEDEGFSGGNTNRPEFKQMMREARSKKIDIVICYRLDRISRNVSDFSQLINELEKYNVSFISVKEQFDTTKPMGRAMMYIASVFSQLERETIAERIRDNMLQLAKTGRWLGGVTPTGYKSEMLDKKDSSLKQTRIFRLKILPEEAELVKDIYDKFIIFKSITKVEKNLLENRLTTKNGVDFSRFSLRFLLTNPVYAIADEALYHYLSGKGYEVYSDIKEFNGVNGLMAYNKTRQGKNTLGEKYRDPKDWVIAVGMHPGIIPSGKWIEVQKLLQRNKTKAYRNVKNTNALLSGILKCENCGSFMRPKTMSRVDSEGKRVYYYICELKEKSNKTRCDTPNINGNLLDSLILERLISLIKDYYPAVNPGLLLTLHDSTQTAQNPEIKLIKGKLMAAETEMKNLIRLASKQADEKVQSLILKRMENISKDINIYTNRIKQLDGLPEKKDIEEADEEKIIQILSNPGYCIMNLMDIKQKREILKSLIEFIAWDCTQVKVWLNSRKMLPECKDCK

SEQ ID NO: 16856 - protein, 551 aa, synthetic construct
MQTATAKKKNISMIPSRPEYDRSIKPQFKALRVAAYCRVSTTLEQQETSYEAQVSYYTEKIKSNPNWKLAGIYADDGKSATNTKKRDDFNAMIEDCMAGKIDMIITKSVSRFARNTVDSLQNIRKLKEKNIAVFFEKEGVNTLEGTGELLITILSSQAQEESRNLSENTRWGLVRRFENGVVSVNHNKFLGYTKDKNGELVIVPEEAELVRRIFRLYLEGKSIVEIIKVLETEGVTTVTGLDKWCPGTINKMLSNEKYMGDVLQQKTYTIDFLTKKRVKNQGIVPQYYIEDDHEAIIPKELYYQVQEEKARRASLSKTAAARRAKQEKEKSKYSSKFALSDIMVCKECGQPYRRQVWSKYGQKSAVWRCENRLKNGTKNCKHSPTFKEDILYEAIMTAINSVVENRGEFVGAFRENVIRVIGSYSTKNVPTEYDGQIEKLQGEMLALIEQNAKQGSITEDFDEQYQRIAEQIRDLKQKKLELVRAQKIAENFQQRLDDMDTCLKKTTCEVREFDNDLVRRLLQNIKAVKEDLIEIQFKSGIVMNQRISYFD

SEQ ID NO: 16857 - protein, 551 aa, synthetic construct
MQEKGGKSMAKKVVKIDPVKQQITRQLQPKKRVCAYCRVSTDSREQQNSFSAQLAYYKSLIENQEDWQFAGIYADEARSGTKLQKRDDFLRMMKDCEDGKIDMIITKSVTRFARNTVDSIQAIRKLKELGIAVFFEKENINSLSEKSEQMLTILSSLAQGESENASTNNKWAAVKRFQDGTFIIGTPAYGYTKGENGELVIQEEEAAVVRRIFREYLNGKGAYAIARDLSEEGLPTIRSAEKWNDGVIREMLLNPIYTGELLQQKTMTTDVLPFKRQRNKGQLPQYLIEDNHEPIIPYKQAEAVKEIFEYRRKQIGADDLEKYQSRYAFSSKILCGECGSFFRRQKIYIGKPYEKTQWCCRQHIFDSAKCSQKAVREDDIQWTFTVMWNKLVSNHTEILIPLLDMLKKLRIDEQQEQEIGECSNRIMELTEQGHILSRLVSKGYIDHAVFIERQNALTLELAAAKKKRSQLLDSNGFDREVAGTEQLLELIRNNPHVIEEYREDLFLQSIDKVIVQKNGQITFRLINLLELSEACRKEVAEDDAKAYANRI

SEQ ID NO: 16858 - protein, 549 aa, synthetic construct
MQTATAKKKNISVIPSQPEYDRSIKPQFKTLRVAAYCRVSTTLEQQETSYEAQVSYYTEKIKSNPNWKLAGIYADDGKSATNTKKRDDFNAMIEDCMAGKIDMVITKSVSRFARNTVDSLQNIRKLKEKNIAVFFEKEGVNTLEGTGELLITILSSQAQEESRNLSENTRWGLVRRFENGIVSVNHNKFLGYTKDKNGELVIVPEEAELVRRIFRLYLEGSSIVQIGKILDDEGITTVTGLTQWCPGVIDKMLSNEKYMGDVLQQKTYTVDFLSKKRVKNNGIVPQYYIQDDHEAIVPKELYYRVQEEKTRRASLSKSAVARKAKKEKSKYSSKYALTDIMVCKECGQPYRRQIWSKYGQKSAVWRCENRLKNGTKNCRNSPTLKEEVLQEAVMTAINSVVENRGEFVGAFRENVIQVIGSYSTKNVPTEYDGQIEKLQGEMLALIEENAKKGSLTEDFDEQYQRIAEQIKNLKQKKLDLVRERKQAESFQQRVTDMDVCLKKTTCEIREFDNDLVRRLLQNIRVINEELIEIQFKSGIVMKQRVSYYD

SEQ ID NO: 16859 - protein, 543 aa, synthetic construct
MAKKITKIDPVKQQITQQLQPKKRVCAYCRVSTDSREQQNSFSAQLKYYKTLIEDQEDWQFAGIYADEARSGTKLQKRDDFLRMMKDCEDGKIDMVITKSVTRFARNTVDSIQAIRRLKELGIAVFFEKEHINSLSEKREQMLTILSSLAQGESESISTNNKWAAVKRFQDGTFILGTPAYGYTKDENGELILQEEEAAVVRHIFREYLNGKGTYVIAKDLSEAGIPTIRSAEKWQDGVVKEILQNPVYTGDLLHQKTLTTEVIPFKRKPNKGQLPQYLIEDNHEPLITREQAEAVMEIFEYRRKQMGMDDLEKYQSRYAFSSKILCGECGSTFRRQKIYIGKPYEKIQWSCHRHIEDSTRCSQKAVREDDIKWAFTVMWNKLISNYTEMLIPLLDTLKKLRIDEQQEQEIGECSNRIMELTEQGHILSRLVSKGYIDPVVFIERQNALILELAATKKKRSQLLDNNGFDREIAGTELLLELIRNNPDVMEAYREDLFLQTTDKVIVQENGQITFRLINRLELSEPYRKEAAEDDAEAYAHRL

SEQ ID NO: 16860 - protein, 520 aa, synthetic construct
MAEKNITVIPARKRVGSTAAKEIIKKLRVAAYCRVSTETEEQNSSYEVQVAHYTEFIKKNTEWEFAGIFADDGISGTNTKKREEFNRMIDECMEGKIDLVISKSISRFARNTLDCLKYIRQLKEKNISVFFEKENINTMDAKGEVLLTIMASLAQQESQSLSQNVKLGLQYRYQQGKVQVNHKRFMGYTKDEDGNLIIVPGEAKIIKRIYREYLEGKSLAGIGRDLEKDGILTAAGKPKWRPETLKKILTNEKYIGDALLQKTTTVDFLTKKRVKNEGHLPQYYVENNHDAIIPKELFLQAQEELHRRNNIYTGEDKNKRIYSSKYALSSITFCGDCGDIYRRVYWNIHGRKEIVWRCVTRIEQGPEVCKSRTVKEGDLYDAVMTAINRLLAGGDNMIKTLEENIHAVIGDATEYQISEINTLLEEKQKELISLANKGKDYEPLADEIDNLREKRQNLLVEDASLSGENERINELIEFIRNNKYRTQRYDDALVRKLIQNVTVYNDHFVICFKSGIEVEV

SEQ ID NO: 16861 - protein, 536 aa, synthetic construct
MRAVTYVRVSTEQQAKENKGSIDHQINACDKAIKDHGWELVMAPIKDIESGREVKGREAFEALITQLWLGNEIMPEEVPEDMKGFFGLLRSTNNGRPFDVLVVYDYDRLGRDHADSQTICKLLLKRGIQVYSCNQPVEPDDPQNINIYNDQRVFSQTFGALKSAIEIHSTRRRYWQGMGNKVKRGDLPHPSSPPYGYDPKVTDLGNGKSKIEVVVTDADAEIVRQIYDRYLENKSYRDIANYLNDRGIPSPSGKLWYYSTVKLVLTNPVYAGLVRWQHKRTFFGKQKKQPASKWVITKGNHPAIIREEIFWQVQSIIDAKSTIKGRASNATALLSGLVKCAHCGSTMWAYNAGDDSHAPPYYVCAKFHAFRKCGNKYIAMELLDSVVIDKFVEIANNKELLSQLIQDQKASESKRVEREVKAVSLQESKNREKLARLVTAYENGVLDIKMFGERKTKLDGEFKKIAQERERLDTHLMRLRAKDYAFKSIQKIEALKDNLAANKPILRNILLSTVSRVEVLRESVDANRFGVELVFK

SEQ ID NO: 16862 - protein, 593 aa, synthetic construct
MPRKPAKHPAKPKRGKKLEIEEPGVLYGRYSSHNQKDISVEQQFEKGYELAAEYGIRIIDTYADRAVSGRTDKRRDFQRMMTDAAKGKFRYVIAWKSNRMGRNMLEALINEARLQDLGVRVLYVEEDFDDTAAGRFAARSMMNVNQFYSENMAEDIKRGLYDNAANCMVANGHLPYGYKADETLHYAIDEPKAAVIREIFTRVSCGEAFVDIMASLNARGIKTSYGRPWGRSSFQKILSNERYRGIYIYGDVRKEGGIPRIISDELYFKVQEVITTKKNPQGRHRVNGDYLLTGKLFCGHCKSPMTGISGTSRSGNLHYYYVCQKRRTEKTCEKKNLRRDDIELQVAKAIKRRTLDDDTINWIADSVVEYSQHQESASGIGLLEDQLKDTQRSIKNLMAAIEQGIITPTTKARLMELEKEQSDIDRKITMAKADVIPVNRDQLVGWLKKLQAGDVHDKKYQAELFDTFLIAVYVYDNPDGQDYMKVVFNYAGSKNTVEIPLDPSVIDNVENIETGAVRLSSAQVHQNRRTFQKGMSFFCFGGRWLWIRKVALRNSPVGCFNHRGFRRNGSESTTERAGTHVAVRLGDCTRRSS

SEQ ID NO: 16863 - protein, 521 aa, synthetic construct
MGNVMVIPAKRQVGNTARMRDNEKPKLRVAAYCRVSTDSDEQATSYEAQVEHYTEFIQKNPEWEFAGIYADDGISGTNTKNRDEFNRMIEECEAGNIDMIITKSISRFARNTLDCLKYIRQLKEKNIPVFFEKEAINTMDAKGEVLITIMASLAQQESQSLSQNVKLGLQFRYQNGQVQVNHNHFLGYTKDADGNLIIDPEQAEVVKRIYREYLEGSSMDKIAAGLEKDGILTGAGKTKWWASTVKKILTNEKYIGDALLQKTYTTDFLNKTRVKNNGIVPQYYVEGNHEAIIPKDIYLQVQEELVRRRVVKTSANGKKRSYSCNHCFAQIVVCGDCGEMFRRIHWNNRGCKSIVWRCISRLEPGLECHARTVNETILEDVVVQAINKLLGDKSTYQAQLQQNIAKVIREAQQTTADGIDERLQELQKELLKKANNKEAYDEIADEIFKLREQRQQNTVDTAARDAQIGRINELQDYIKDQDATLTEFDEALVKRWLKQITVFEDHFTVELKSGLTIDIEG

SEQ ID NO: 16864 - protein, 537 aa, synthetic construct
MIRQTTQNLITALYPRLSHEDELQGESNSISNQKRILESYAKQNGFTNLQWYTDDGYSGANFQRPGFQAMLADIEAGKVGTVIVKDMSRLGRNYLQVGMYTDMIFPQRGVRFIAINDGVDSAQGDNDFAPLRNIFNEWMVRDTSKKIKAVFRSKGMSGKPITSQPVYGYLKGEDGRFIVDEEAAPVVKQIFSLCLAGNGPTKIARVLTEQQIPTPGTLEYRRTGSTRRYYPDYPYKWATNTIVHILERKEYLGHTVNFKTEKVSYKVKSSVENPEEKQVIFENTHEPIIDLATWERVQELRKQRKRPNRYDEVGLFSGLLFCADCGSVLYQQRYENKTRKQDCYICGNYKKRTHDCTAHFIRTDLLTAGVTANLRKVTSYAAKHEKQFMKLLIEQNEDGGKRRNAAKRKELDAAEKRIAELSAIFKRLYEDSVTGRISDERFAELSADYEAEQKQVKSRAAELQAELAKAQEATVNAEKFMKVVRKYTSFEELTHTLLREFIEKIVVHECSYDENGTRRQDIDIYYSFVGKVELPDE

SEQ ID NO: 16865 - protein, 553 aa, synthetic construct
MTTAFRLHTFTTNEPPAVMYSGGRNHPLQSTSQKAMLEEFAARQGFTNIVHFTDDGISGTCFDRPGFLAMMKEVEAGNVEYLCIKDMSRMGRDYLKVGQIMEILRQRGVRLIAINDGVDSARGDDDFTPFRNIMNEYYARDTSRKIRSTFQSKGKSGKHLTGTVIYGYLWNEARDQWLVDPEAAEVVKRIFAMTIEGYGPYQIASKLKEEKILIPSAYLAQHGEGVNKNKTFKDVYGWGEAAPLTGLLYCADCGGKMYVHRTNNGKRISQYTCSQYTKVPCGTLCKTQHRINEDVVLSLVSEMLKAIAEYAKHDRAEFVRVVQEAQSSQQTAEVRKQRTRLATAKQRVSELEVLLCKIYEDNILGKLSDSRYATLDAQYEKEQSELTAEISVLEKAVKSYEKHEKDADRFIALIGKYENFDKLTIAMLNEFIEKILVHERDRKGSIQTTQEVEIYFNFVGRFVPPAFGEVELTPEELEEIRKREERKDRLHQNYLKRKASGAQKRYEDKIKERKKAEIEAKKAAIRAEDIAKGVFVPVSSLPQREPMKGVQTA

SEQ ID NO: 16866 - protein, 560 aa, synthetic construct
MKKQQKCYIYTRVSTSMQVDGYSLDAQKDKLRKYAEYQKMSIVGEYSDEGKSGKSVEGRPQFKQMLADVESGKDNVDYVLVFKLSRFGRNAADVLSSLQKMQDYGVNLICVEEGIDSSKDVGKLMISVLSAVAEIERENILVQTMEGRRQKAREGRWNGGFAPYGYQLVNGELIIAEDEAEIIRIIYDKFVNTTMGMAAIAAFLNNSGYEKKLRQNNTIEGFSTSFVKGVLDNPIYCGKLAFGRRKNEKIPGTRNEYHIVKQKDYLLSDGVHGAIISEEMWNQAHRKRQETGVLQVKTHSLEHEHILSGIIKCPVCGSGMYGNVNRKKHPDGGYYKDYFYYACKHRKLVDGHRCTYKRQWNEDRINAAVEEIIRKFVKNPKFEQEIRKQIGSSIDTSELDKEYDGLKDRLSQTTGAKNRLADQMDHLSVSDKNYDKKYNDMQERLDKLYDEITDIEDAMEEVETRLYNIRQDKISEDNVYQFLLFFDKLYDKFTDLEKKTFLKSFLSDVFIYEEEQKNGRILKGLRFKFPIYMNGRNVLGVDWDNESTDETVCLLSRKAQ

SEQ ID NO: 16867 - protein, 592 aa, synthetic construct
MEVEVIKANNPFDESAKIRKTDRLRVAAYCRVSTDDEDQIKSYNSMVKYYTDLIKNNNQWVFAGVYADKAITGTKVDKREDFQRLIQDCMDGKIDMVLAKSLPRFARNTLDTLKYVRMLKEKGIAVYFEVEKINTMKDGEFLMTILSSVAQQEVENTSAYVKKGLKMKMKRGELVGFQGCLGYDYDVATKSLSINANGAETVRYIFDRYVAGAGSTMIARELNEQGITTIKGNPWTTSSVMGIINNEKYKGDILLGKTFTVDPISKRRLENLGEEDRFYIRNHHEPIISEETFARAQEIRERRNGGRKSPTPGKREKYSRQYAFSCMLECGFCGASLSRRRWHSSSKYKKTIWQCVKSTKSGKRYCPDSKGIPEQVIEEAFIESYKMLCSDNKDVLEEFVTRVEKTLSEDTARDKLMKYQKSADNLQTKRKALLEKYLEGIVSQDIYEETDVGYERKLSDIRANIEMLEQQMEDEVSLKRRVEDFKKALSQNEVLQEFDRGIFESIIEKVIVGGYDADGNKDPYKITFIYKTGFRNEVGNAKQRFDKTKSVGDKAKELCSHIADEVKDVCSYVSDNTCGNGCSFVPTETKAR

SEQ ID NO: 16868 - protein, 514 aa, synthetic construct
MNVVIYARYSSHNQQETSIEGQLKVCHEFCERNNYTVIHEYIDRAISGRTDNRPDFLQMIQDSANRNFEFVIVYQLDRFSRNRYDSAHYKNKLKKNGVRVLSARENINEDASGILMESVLEGMAEYYSAELSQKVKRGMEINASKCLCTGGNRTLGFYIDKDKKFQIDPNTSPIIKLIFEMYADGKSIVEITDYLNAQGYKTIQNKPFGKNSIRNILGNKRYIGTYTYKDTEIAGGIPRIISDELFNKVQEVLKKNKKAPARARAKEEYLLTTKLFCGYCKEMMTGFSGTGKLGKVYRYYECKGTKKHTCKKKRVKKEYIEDIVIEVCRGLLTKENINRISKEISKLFENNQDTFNLKRLKKQLSENERKHRNLINAVSECDIESLRKTFYSEILELESQKEKIEEEIREEEKLHIVLTEPEIKFFLTSLKNGSADNIKYRKVLITTFINAIYLYDDKITLIFNSGDKPVTINNILLSEIEANESNNTDTEGLFIDNVALPFKSTSKRRYASRF

SEQ ID NO: 16869 - protein, 478 aa, synthetic construct
MNKVAVYVRVSTTSQLEEGYSIEEQKAKLESYCDIKDWNIYKIYTDGGFSGSTTDRPALEQLVQDAQSKLFDTVLVYKLDRLSRSQKDTLYLIEDIFLKNDIEFVSLLENFDTSTPFGRAVIGLLSVFAQLEREQIKERMQLGKLGRAKSGKSMMWAKTSYGYDYDKETGSMTVNEFEALAVKEIYASYLSGISITKLRDKMNAEYPKKPAWSYRTIRGILANPVYCGLNQYKGQTFQGTHKAIISLDDFEETQRELKKRQQTAQERLNPRPFQAKYMLSGLAQCGYCHAPLKVVLGQKRKDGTRTKRYECYQRHPRTTRGVTVYNDNKKCNSGYYYMDILEHYVLTRIAMLQNDPDKIQEIFSGGTSPVIDKQAIQKQIDSLSLKLSKLNDLYLDDRITLDELRSKSSDFIKQRAILEEEIKKASTDKQVGRRKKIEKLLDASSVFEMSYDNQKVIVRELIEKVQVTSDKIVIRWKI

SEQ ID NO: 16870 - protein, 533 aa, synthetic construct
MSKKVTVIEPTQKNETIEESKLRVCAYCRVSSIHEEQLNSFSNQVTHYTQYINSNQNWYFVGIYADEGISGTSKEKRTDFMRLINDCECGLIDLVITKSISRFARNTADCIEVVRKLKEIGIGVFFEKENINTLSEESELVLSILSSIAQEEMISLSKNIRWANQRRYSQGKFQIAPKKFLGYDVDPVKQTLVINQEEAKLVKYIFEQYLSGKGTAVIARELNQKGIPTITNATWQGSTINRMVKNEKYCGDVLMQKTITGDEITFKRKRNKGEQPQYYIKDNHEPIISREDFERAQKLSIERRLAKGLTEDVAKKMQNRYPLTSKIICGKCGCILRRTTQNSGTTYPRVAWDCSSKRRTYGTTKCKGGSIHDDSITKLTIVVLKKLYFSLDNLLVPYRSTLRNIEKLKDNKEIAEYDLQIQQVISQMRVLADLSAKGNLTPMLYTAQNNELCAKMDELKKRKQVLADKYFSTIRNLNDTDKIISRLKDTQGVIPSLDKELVDAIIDTIIVYSRNNIVFKLKNGIELPEKIGD

SEQ ID NO: 16871 - protein, 532 aa, synthetic construct
MRIVTRNVAVIPARPVFEIAGRQEIAKLKVCAYCRVSTDNEEQLTSYQAQMNHYSDLIAQNPSWDFAGIYADEGISGTSTKNRAQFNKMIADCKANKIDLVLTKSISRFARNTLDCLKYIRILKEYKVAVFFEKENVNTLDSKGEFLLTLLSSLAQEESRSVSSNTRWGITHKFQQGEIMLNYTQFMGYTKDEQGHLVIVPKEAKIIKRIYKDYLEGKSAKQIARELTKDRVTPPGGGKKWFDSTILSILRNEKYYGDAILQKSYTEDFLTKKRIKNTGQLPLYYVENSHPGIVTKEVFMKVQEEILRRNNLPGASKGGTMTYQSKFALAHRIVCSECGTTFRRCTWTYTGEKIRVWRCGKRIATGGKECKAEAIYETDLQSAFIKVMNELVQNQEEFIGPLLVNINKVLEQQLQNKDKIETRIAELSEILTSLVESQSRMRPSTNISGEEYINISNEYNELVKQQDEMLAKEKECAMRKLQIKELVEVMTSKREVITEYDDKMLRQLVERIYALENQRVRFEFKCGVEIIY

SEQ ID NO: 16872 - protein, 468 aa, synthetic construct
MARSITLIPVITEETTNEVTQVIKKRVAAYCRVSTDQEMQLNSFEAQTRFYREKIEANPEYELAGIYADEGISGTSTKNRDQFNKMIDDCKANKIDMIITKSISRFARNTLDCLNYVRLLKGLGIGIMFEKEGINTLDSTGETLLTILSSLAQEESLSLSLNSTWGVRRRFEQGKVTINEKKFLGYDKDSEGNLIINERQAVIVRRIYKDFLDGKGTAHITRELEEEKVKNWNGTSKWYESTIKSILRNEKYKGDAILQKTYTVDFLTKERVKNTGKVPKYYVEESHPAIIELETWEAVQLEMERRKKFCEEHNIKKLDTRLPFWGKVICGVCGTVYCRKTWMNDGGKNKRKVWICSNRYRTKGVKGCDSKHVDEEVLKKAFMEVVNVLVENKQHFLDKWRAELEDSNALKQYRFKMFIRILEPTSMTGEFDESLCLKILDQIKVIDGKGKMYITLLDGTSMQCKNNN

SEQ ID NO: 16873 - protein, 522 aa, synthetic construct
MQYCIYLRKSRADIEAEAHGEGETLARHEHALIELAQRQNLNVTQIYREIVSGETISTRPVIQHLLKEVECGIWDGVLVMEVERLARGDTSDQGTISKTFKYSETKIITPSKTYDPLNEFDEEYFEFGLFMSRREYKTINRRLQAGRLASIKEGKYVGNTAPFGYTRYKLENQKGYSLKPNSDSDTVKLIFDLFTHGKKNADGTFTRLGVSLIVRYLNDLHIKPQKNSDWTPSSVRGILENPVYIGKIVWNRRKTVKKMVDGERKISRPRSNPDIYDGLHEPIIDNETWELTKKLLVQNKMAPVPSKKVIANPLSGLIKCGKCGRTMIRRPYGAKYPDTLMCPSTACTTVSTQLSVVEKRVLIALEKWVNDFKLEWESKVKGENNNLQIKEKRKAVTKLESELNALNTQMNSLYTFLERGIYTTEVFLERSRVINESINSVKNAYELLKSELEQDLQANEHTHNLIPNIENVISLYRVAETPAEKNALLKSILSKVVYTKETSGRWHSSPEDFELHVFPKID

SEQ ID NO: 16874 - protein, 548 aa, synthetic construct
MSMNIAIYSRKSRFSTSGDSIENQVQLCKEYAQRYDYKDTNFIIYEDEGFSGKNTNRPKFTELINDIKNKKIDVLMCYRLDRISRNVSDFSSTLELLEANSVAFVSIKEQFDTSTPMGRAMIYIASVFAQLERETIAERVRDNMIELAKNGYWLGGTTPLGYISIPVDYLDNDMTERKMYKLEKNEPEIETVKLIYKKYIELKSLNKVETYLMQHNYKTRKNGFYSLSSLKFILTNPVYVKANKDVIAYLSETGMNVSGAPDGKHGILIYNKTKTVSGKTTKDARDITEWVAAVSRHIGILDPEMWLDVQKTLADNRDSYPNMGKTHNALLTSILRCKCGSFMRINHGHISTKTGNCTYYYSCALKKRSKGSQCDNGNVKVSDIDESVVSYLENIGIKKDTILYNFIDFNKAQRKDITRSNRKGELITLISSKQNQITNLVNKLSMTDDDIAKILLAKIKTLKEEIATSELELKTIQEENKALDNQEIEIAMLGIMLDKCADIRNLAFEEQQQLIRMVLKNIVWDSDTGSLAIEPVESIIEGIKKKPH

SEQ ID NO: 16875 - protein, 508 aa, synthetic construct
MKKAIAYMRFSSPGQMSGDSLNRQRRLIAEWLKVNSDYYLDTITYEDLGLSAFKGKHAQSGAFSEFLDAIEHGYILPGTTLLVESLDRLSREKVGEAIERLKLILNHGIDVITLCDNTVYNIDSLNDPYSLIKAILIAQRANEESEIKSSRVKLSWKKKRQDALESGTIMTASCPRWLSLDDKRTAFVPDPDRVKTIELIFKLRMERRSLNAIAKYLNDHAVKNFSGKESAWGPSVIEKLLANKALIGICVPSYRARGKGISEIAGYYPRVISDDLFYAVQEIRLAPFGISNSSKNPMLINLLRTVMKCEACGNAMIVHAVSGSLHGYYVCPMRRLHRCDRPSIKRDLVDYNIINELLFNCSKIQPVENKKDANETLELKIIELQMKINNLIAALSVAPEVTAIAEKIRVLDKELRRASVSLKTLKSKAVSSLGDFHAIDLTSKNGRELCRTLAYKTFEKIIINTDNKTCDIYFMNGIVFKHYPLMKTISAQQAISTLKYMVDGEVYF

SEQ ID NO: 16876 - protein, 508 aa, synthetic construct
MKKAIAYMRFSSPGQMSGDSLNRQRRLIAEWLKVNSDYYLDTITYEDLGLSAFKGKHAQSGAFSEFLDAIEHGYILPGTTLLVESLDRLSREKVGEAIERLKLILNYGIDVITLCDNTVYNIDSLNEPYSLIKAILIAQRANEESEIKSSRVKLSWKKKRQDALESGTIMTASCPRWLSLDDKRTAFVPDPDRVKTIELIFKLRMERRSLNAIAKYLNDHAVKNFSGKESAWGPSVIEKLLANKALIGICVPSYRARGKGISEIAGYYPRVISDDLFYAVQEIRLAPFGISNSSKNPMLINLLRTVMKCEACGNTMIVHAVSGSLHGYYVCPMRRLHRCDRPSIKRDLVDYNIINELLFNCSKIQPVENKKDANETLELKIIELQMKINNLIAALSVAPEVTAIAEKIRVLDKELRRASVSLKTLKSKAVSSLGDFHAIDLTSKNGRELCRTLAYKTFEKIIINTDNKTCDIYFMNGIVFKHYPLMKTISAQQAISTLKYMVDGEVYF

SEQ ID NO: 16877 - protein, 507 aa, synthetic construct
MKRVISYIRFSSEKQAKGDSLRRQSKMVTDWLKAHPEYYLDQDLSFRDLGVSGFTGKHLKGGLGDFLTAIEKGLVKAGDTLLIESLDRLSRQDIDIASELLRNILRSGVDVVTLSDGEHYTRESLRDPLALIKSILIMQRAHEESLRKAERIQAAWDAKKEAAKAGIKVSKRCPAWLKLNDDRKSFSVIPEKVETVKRCFQLRLEGKSIWEIVRTLNDEGHQSMSQYKPGKFGQTSVQDLLKNRSVIGYFTPKGCEEIAGYYPAIIDETTFYKVQQLSHSRYGRKPVSAKPLSVNLFKGVIRCSECGHALIITGFSDTRNGIYRCPLRNENRCNAKGLSRKQTDGTLLALLSRLDRFDSDTTNTIDTLKLHREHLSSNIEKLVQLSLEIEDLNAITNKLKQLKNELSQVDADIEKETQRLKSIDVGCLSDCDLTTKAGRIEAQLIIKSAVKEVVLNTAKRRCKVTFHNGRAITLSITENPSEDVTEAIQSLSEVTERGLIDVDVVAI

SEQ ID NO: 16878 - protein, 559 aa, synthetic construct
MKTKLYSYIRFSSMRQNDGSSYERQIRMAREIAAKYDLELVNDYQDLGVSAFKGANSKTGALSRFLDAIGRSVPVGSWLFIENLDRLSRADIVSAQELFLSIIRRGITIVTGMDNKIYSLDTVTANPMDLMFSILLFIRGNEESQTKRNRTNSSALIKIKAHQENPQNPAVAIEEVGKNMWWTDTTSGYVLPHPVFFPIVQEIVELRKNGRSTAEILDHLNETYAPPPAVSNKKHSKWSRAMVERLFHTRALIGIKEVSVDGVNYELKDYYPRVIDDATFYHLKKNIGARAWNFGDKEEVKPIPLLSGIGLLKCDHCGCAMVKVKGTNKRSDQYRYTCDAIRSRRLDCEHPNWSFRGDQLEKAVLQLLADKIWIAEDKANPVPALKVQVDEISRKIDNLITLSAMTGATKELADQITTLNSERETLYNQIKMAEEEMYSVDSQGWEKLAEFDLEDVYNEERLKVRFKIKQALKRIGCSRIDRNKNLFVLEYIDGKTQRVVIENSRGTRKGRIFVDLKTINDRQILESNGLVLHPCLDMLTDKNWKPEEEIPGPLQEFGI

SEQ ID NO: 16879 - protein, 522 aa, synthetic construct
MALARSVTVIPARRRTRNVDAEKKEKLKVAAYCRVSTDSEEQATSYEVQVEHYTTYIQNNPEWELAGIYADDGISGTNTKKREQFNKMIEDSMNGKIDMIITKSISRFARNTLDCLKYIRQLKDKEIPVFFEKENINTMDAKGEIMLTIMASLAQQESQSLSQNVKLGIQYRYRQGEVQVNHNRFLGYTKDENNKLVINPEQAKIVKRIYREYLEGASLVQIARGLEADEILTAAKRTKWRPESIKKILQNEKYIGDALLQKTYTVDFLTKKRVVNNGHVPQYYVENNHEAIIPREIYLQVQEEMMRRANIRNGKTGKKRVYSSKYALSSIVFCKECEDVFRRVHWNNRGCRSIVWRCVSRLEGKTHLCNPETIREDELHHTIVQAINEVLGNKDDYLSILLENIETVLNENADKPTTDIDEKLEELQMELLRLANSKEDYDDVAEEIYRLRELKQEVMMKNAAREGLRQRIEEMTKFLKEQPQKLETYDDLLVRRLIEKITIHERLLTIVFKSGIEVKKEI

SEQ ID NO: 16880 - protein, 542 aa, synthetic construct
MKQLKKKRIGLYARVSTEMQTDGYSIQGQLNQLTEYCQFQGYEVVDEYTDRGISGKTMQRPELQRMLKDANEGKLDCIMVYKTNRLARNTSDLLNIVEELYKINVEFFSLTEKIEIASSTGKLMLQILASFAEFERNTIVENVYNGQRQRAIEGYYQGNLPLGYDKVPDSKKELMINQHEANIVKYIFKSYAKGHGYRKIANALNHKGYVTKKGKPFSISSITYIISNPFYIGKIQFAKYRHWSDKRRKGLNEEPIIADGKHAPIIDKALWDKVQFKRQESRKKPQVHGKGTNLLTGIVKCPKCGAAMAASNTTNTLKDGTKKRIRYYSCSNFRNKGSKVCSANSVRADVLEKYVMDQILEIIKSKKVLKQLVEKVNKKSQIDVSSLNHDIAYKQSQCEEIKAKMHTLTKTIEDSPDLDSVLKPTILSYQDELNQINNQIHQLEQDKQAEAPHYDADMIANVLQAIFKDIDKLEKSQLKSLYLTVIDRIDIRKHEHHKKQFYVTLKLNNDIIKQLFDNHPLDEVLLSTSSLFLSQTLYITIE

SEQ ID NO: 16881 - protein, 628 aa, synthetic construct
MAGIRTENKIYEVGIYCRLSKDDGTDNESASIATQKSILTDYVKRQGWHLAKTYVDDGYSGTNFQRPSFQNMIKDIENGLINCVITKDLSRLGRNYLDCGLYLEVFFPEHNVRYIAVNDGVDTLNKSAMDITPFRNILNEMYSADVSVKIKSAYRARFQQGKFMGTTAPYGYVKDPADHNHLLIDDKVAHVVREIFDLALAGNGIAKIRKHINKQHILRPAAYAVEQGATGYERYFEDNEENRYIWSENSVRGILRSPIYAGNLAGYKRIAANMKSKKRPSKLPEEWEVIPDTHEGIVTQEEFDTVQQLMTSRRREQNAGGFENIFSGVIKCADCGYAMRAASANRRKRPDIIDCVQYTCNNYGRYGNVMCTAHSIEARDLFNAVLADINRFADMAVNDEKAVRAIERRLTETDQSRAKSLEKEKKKLNKRLAELDRLFSSLYEDKVMERITERNFEMMSGKYQKEQLEIEARLKEVTETLNDSYEKSQGVRDFLSLIRNYQGLKELDATIINALIDKILVSEREKLADGTVRQEIKIYYKFIGFVGELHITPTKRWTALKPKNCTVCGVEYVPSSGISKYCPACAKRIQREKSNESKRRSRERNRRACIELSAKNDRLTLSREPEEL

SEQ ID NO: 16882 - protein, 481 aa, synthetic construct
MITTNKVAIYVRVSTTNQVEEGYSIDEQKDKLSSYCDIKDWNVYKVYTDGGFSGSNTDRPALESLIKDAKKRKFDTVLVYKLDRLSRSQKDTLHLIEDVFIKNGIEFLSLQENFDTSTPFGKAMIGLLSVFAQLEREQIKERMQLGKLGRAKAGKSMMWAKISYGYDYHRETGTITINPAQALAIKFIFESYLRGRSITKLRDDLNEKYPKHVPWSYRAVRTILDNPVYCGFNQYKGEIYPGNHEPIISKEEYDKTQSELKIRQRTAAENVNPRPFQAKYILSGIAQCGYCGAPLKIMLGVKRKDGSRLKKYECHQRHPRTLRGVTTYNDNKKCDSGFYYKDKLEASVLKEISKLQDDADYLDKIFSGDNAETIDRESYKKQIEELSKKLSRLNDLYIDDRITLEELQSKSAEFISMRATLETELENDPALRKNKRKADMRKLLNAEKVFSMDYEGQKVLVRGLINKVQVTAEDIVIKWKI

SEQ ID NO: 16883 - protein, 527 aa, synthetic construct
MTTRNVTVIPARKRIGNSAKAEELPKLRVAAYCRVSTDSEEQATSYEAQIEHYTNYIKSNPEWELAGIFADEGITGTNTKKREEFNRMIEECMQGKIDMIITKSISRFARNTLDCLKYIRQLKEKNIPVYFEKENINTLDTKGEILLTIMASLAQQESQSLSQNVKLGIQYRYQQGKIHINHNRFLGYTKDKDGNLVIVPEEAEIVKRIYREYLEGSSMLQIARGLEADGILTGAGNTRWHTSTINKILRNEKYIGDALLQKTYTVDFLSKKRVPNNGIVPQYYVENSHEPIIPREIFMQVQEQLVKRRCVHISKNGKKRNYSNNHPLSQMVFCGNCHEIFRRVHWNNRGKKSIVWRCVSRLENTGLFCTASTILEDTLKEKIVEAINVAVSGKNSFLAILKKNIETVLSEDLDESTADIDKRLEELQTELIQKANSKEAYDNIVNEIYRLRDLRQETLSRNALRQDKRDRIAEMTDFLNTQTGDITEFDDKLVRKLVEKATVYDDRLVVEFKSGLEIEVSLGSYNG

SEQ ID NO: 16884 - protein, 522 aa, synthetic construct
MRKVTRIDGNNALQAFKPKVRVAAYCRVSTDSDEQMASLEAQKDHYESYIRANPDWEFAGIYYDEGISGTKKENRTGLLRLLADCENKKIDFIITKSVSRFARNTTDCIEMVRKLTDLGVFIYFEKENINTQRMEGELVLTILSSLAENESLSIAENSKWSIRRRFQNGTYKISYPPYGYDYVDGKLFINKEQAEIIKRIFSEALDGKGTQKIADGLNSDKIPTKRGSHWTATTIRGILSNEKYTGDVLLQKTYTDENFKRHYNHGEKDQYMIKDHHEAIISHEEFEAAQEILKQRGKEKGVIKGSSKYQKRYPFSGKIKCAECGSNFKRRIHGSGNRKYIAWCCTKHIKDASSCSMKFVREDAIHQAFVVMINKLIFGHKFILRPLLQSLKKTNYSDNITKIQEIETKIKENTERVQVIMGLMAKGYLEPALFNTQKNELLKEAVLLKEQKEAIKRAIDGSQTILVEVEKLLKFATKAEKQIDAFDSEIFEDFTREIIVFSQEEIGFKMKCGLNLRERLVK

SEQ ID NO: 16885 - protein, 510 aa, synthetic construct
MLKIAIYSRKSVETDTGESIKNQIAICKQYFQRQNEECKFEIFEDEGFSGGNINRPDFKRMMQLVKIKQFDVVAVYKVDRIARNIVDFVNVFDELDKLNVKLVSVTEGFDPSTPIGKMMMMLLASFAEMERMNIAQRVKDNMRELAKLGRWSGGTAPSGYSVQKVKENGKEVSYLKKEKDADNIKLIFQKYASGYTAFEIHKYFKLKGFTYNPKTIYGILTNPTYLEATEESIKYLENKGYTVYGEPNGCGFLPYNRRPRYKGIKAWKDKSMMVGVSRHEPAVDLNLWIAVQSQLEKKTVAPHPHESKFTFLTGGIMKCRCGAGMGVSPGRIRSDGTRVYYFTCSGKRYRQNGCSNLSLRVDWAESKVKTFLEKMRDKETLTKYYNSNKKKSNVDRDIKSINKKIASNKKAVDSLVDKLILLSNDAAKPLAERIEDITQESNALKEELLKLEREKLFNSNDRLNIDLIHKAIIQFLDTDSLEEKKKFAKDIFDKITWDSASKELLFFLQM

SEQ ID NO: 16886 - protein, 443 aa, synthetic construct
MAAYCRVSTDQLEQLSSYEAQVNYYTAFINGHPDYELAGIYADEGITGTNTKKREQFNKMIEDCRTGKIDMIITKSISRFARNTLDTLNYVRQLKDLGIGVIFEKENINTLDSKGEVLLTILSSLAQDESRNISENSTWGIRRRFEQGKLHINHKKFLGYDKDKNGNLIINEKQAKTVRRIYREFLDGKGINSIARDLEKDKVPKWNGTFKWYESTIRKMLGNEKYKGDALLQKTYTVDFLTKKRAENKGQVPKYYVEENHPAIIDKEMWEAVQLEIERRRAFAEKYNLKKSNYATTDNPFAAKIICGRCGSYFGRKTWRSTKETPRVKVWICSSRYRIKGKKGCDNKHIYERVLYQAFINTFNAMIENRDYFMQKWKEHLKSGNALVRYKAGQFIKIIEDAEPIKEFDMDLFCKITEKMTVFEGKEIIVSLLDGTEVDAIIE

SEQ ID NO: 16887 - protein, 426 aa, synthetic construct
MRVRIIQPVKEADKKKRVCAYARVSTGSEKQGESLENQITYYKKLISDNPNYEYAGIFADRGITGTVDKRPEFQKMMELCREGKIDLIITKSISRFARNTVITLQIARELKNMDVEIRFEKENINTLSGDGELKLAILSSFAQEESKNVSDNLKWRVRKKFQQGELIINTARFLGYDKNEYGELVINLGEAEIVKRIFSEYLSGSGSFTIAKGLNRDSIPTVGNKKWHDNTVREILKNEKYKGDAILQKYCILDHLKKKKIRNNGEVDSYYIEDNHSPIISRDVWERVQKEIRIRAEAKGNFKGDKYKRRYALTGKMYCSKCGAVLRRRTWNSKFSCRKIVWQCSNYIENGKNACRGTVIDDETAVGLNIKEEIVVREEFIDGKKHYSYSCKNKQKQSITEYKAPEKENGSLLQSVYRPIRTVIKL

SEQ ID NO: 16888 - protein, 510 aa, synthetic construct
MLKIAIYSRKSVETDTGESIKNQIAICKQYFQRQNEECRFEIFEDEGFSGGNINRPDFKRMMQLVKIKQFDVVAVYKVDRIARNIVDFVNVFDELDKLNVKLVSVTEGFDPSTPIGKMMMMLLASFAEMERMNIAQRVKDNMRELAKLGRWSGGTAPSGYSVQKVKENGKEVSYLKKEKDADNIKLIFQKYASGYTAFEIHKYFKLKGFTYNPKTIYGILTNPTYLEATEESIKYLENKGYTVYGEPNGCGFLPYNRRPRYKGIKAWKDKSMMVGVSRHEPAVDLNLWIAVQSQLEKKTVAPHPHESKFTFLTGGLMKCRCGSGMGVSPGRIRSDGTRLYYFTCSGKRYRQNGCSNLSLRVDWAESKVKDFLEKMRDKETLTKYYNSNKKKSNVDKDIKSINKKIASNKKAVDSLVDKLILLSNDAAKPLAERIENLTQESNALKEELLKLEREKLFNSNDKLNIDLIHKAIIQFLDTDSLEEKKKFAKDIFDKITWDSASKELLFFLQM

SEQ ID NO: 16889 - protein, 498 aa, synthetic construct
MQAAIYVRVSTEDQARHGYSLAEQRDACYRRAVSLGAASILEFADEGVSGALLDRPGLNALREAVREGRVDVIVVRDPDRLSRKLAHQLLLTEEFEKAGVRLDFLDFTWQDTPEGKLFYSIRGAIAEFEKEKIRERMTRGKTQKAKQGGIPIGFYNYGYSYDPETETVSVLEEEAAVVKNIFQWFIEEDLGVNGVAKRLNEQGIPTRKRKNLWHRMVVRQILTNPAYKGLWRYKGIDIPVPAIIEPHTWDKAQEKLREARRLWAGKSQQDYLLSGLVTCADCGNTMTGVYAKWWGVKDRRYTCRKSSQGARNRGCIPIKMILAAPVEAVVWEQVCSWLQDPECLVTAALEASPQAEEVRCELQRIERHLKEVEKGRVAILDAMAAGLLELDAQTKNKLGELKRRKERLEQRQRELAAALQGIEGAAGKLAEFRALAQEVLAKLDELNFAEKKALVRALVTQVIVSGRVSPGKQGLNGVNVTVLARIPEPGKSGNITII

SEQ ID NO: 16890 - protein, 508 aa, synthetic construct
MNVAIYLRKSRADLEAEKNGEFETLKRHKSSLLKLAKKEKYNIVEIKEELVSGESIIHRPRMIELLQEVENEKYDAVLVMDIDRLGRGGMKDQGVILETFKNSNTKIITPQKIYDLENDLDEQYTELESFIARQELKMIKKRLERGRKKSIEEGKFIFSTAPIGYDIAKNDKKEKILIKNDKAYIIKLIYDLYVNEDMGIYKIANHLNNKGLSPIKIDKWTPSTINRIIQNKAYCGYIMYSKIVNTKKYNENGNEIRVKNSAENVLCYEGKHEPIIDIETWEKAQEIRENRIKSLHFGGHHALQNPFAGILKCKTCNHAMQRKVKDEERTYLWCKHSCGNLSIRISYLEKLLLEFLEDTLNNYQVMVRKEDIKNKTVDEKKILDEKLIKRLNSELDELEKQKISLFNFLERGIYDEGTFLDRSEYIKDKTENINKNLRNLNSNLKKYQENDYSKVVLKLRNVLEYYDLAKTPKEKNKLLKSIIDDVYYYKDETHKTDECNLEIKLKVY

SEQ ID NO: 16891 - protein, 505 aa, synthetic construct
MNVAIYLRKSRADLDAEKNGEFETLNRHKTTLLKVARENNLNVIEIKEEIVSGESIIHRPKMIELLKEVEAKKYDAVLVMDIDRLGRGDMKDQGVILETFKDSSTKIITPRKVYDLTNEFDEEYSEFEAFMARKELKLITRRMQRGRIKSLEEGNYIYTDAPFGYDIVNINKKERSLEPNEHADTVKLIYDLYINSDMGYTKISNYLNNRHIPAYKSDQWSVSSIRNIIQNRIYTGVLEWQKIKSTKQMNENGNSIRVRNDEENVIVAKGKHPAIITEETWEKARKIRQTYTHTNHTNKLSNPLAGVLKCKLCGKVMYAHHGRGTKHVTCRNKCGNKGTRFEYVEKALLDTLQENLNIYEIKTDKSDIKSVNTYSEKEINEKALNELENELEELEKQKNKLFDLLERGIYDDDTFLERTQIIQYRTETLNKSIDEIKARMKTVLKDDKQIAAGIRKVLELYPITDSAKEKNNLIKSVVKEAIYYKRQDQRKDDFELYVELRVLED

SEQ ID NO: 16892 - protein, 520 aa, synthetic construct
MITKSVTMIPATKRVGTLRFDAEEKPKLRVAAYCRVSTDSDEQASSYEVQVEHYTNFINNNSDWVLAGIYADDGISGTSTNKREEFNRLIQDCMDNKVDRIITKSISRFARNTLDCLKYIRQLKEKNIPLFFEKENIDTLDSKGEIMLTIMASLAQQESQSLSQNVKLGLQYRYQQGEITINHNRFLGYTKDEDGHLIIEPTEAEVVKRIFKEYLEGSSLIQIARNLETDGILTGAGNKKWAGTTVKGILVNEKYMGDALLAKTYTVDFLTKKRVKNDGIVPQYYVENSHEPIIPKNLFLQAQEEITRRANLKNKKGSINYSSKYALSGITYCGKCGEIYRRLHWNNRGKKSIVWRCYSRLDKTKDCDARTILEKDLKQAVVDGINRVFADEGRIKEILNSSIRNLLKVDNTAEVEIIDSQLQELQQQLLEKSNGNQDITTIGEQIVQLKEQKQNILLGKAVNDNSKQRMDEMLEFIDKNEHESLEFDEILVRRLVEQIMVYDEHITIKFKSGIEIKVQS

SEQ ID NO: 16893 - protein, 435 aa, synthetic construct
MTETPATSRPRAVLYVRLSKESALSTSVAGQHDDLTAIAAREGWEVVKVYEDNGLSGGKERAKAQAAFDMVARGDADVLAVYAYDRWSRQGIEKAADVIRLIREREESGRPALFVAEREGIRSDRDNWEMQLAFAADVAKKERDRTRARQIAARDRMRREGRNPGYGTPPLGYKTGPHPTLPAGRGLIVIEEEAEVIREVAERLVDGESTVKIATDLTERGFARARSPYRRAVLAGTNPTGLDTGVWSSPRIRDTWTSDHLLGRVSFGGRPVTDATTGLPLTPFEPILDLDTVLRIRERFSEKRGQNAKRRAARLLSGVAYCGLCGTKMYAKVSREVPYYQCSAVAHGIKCTQPRIDAKLVEDMVTGLYLKARGHAPRSRSSSTSATRPQPLSSRLSPSRSQRRPPAGPRSTATRPTPYSPRSATSRSVARSYRR

SEQ ID NO: 16894 - protein, 452 aa, synthetic construct
MKAAIYIRVSTQEQIENYSIQAQTEKLTALCRSKDWDVYDIFIDGGYSGSNMNRPALNEMLSKLHEIDAVVVYRLDRLSRSQRDTITLIEEYFLKNNVEFVSLSETLDTSSPFGRAMIGILSVFAQLERETIRDRMVMGKIKRVESGLPLTTAKGRTFGYNVVDTKLYINEEEAKHLQLIYDIFEEEKSITFLQKRLKELGFKVKSYSSYNKWLMNDLYIGYVSYSDKVHVKGVHEAIISEEQFYRVQEIFSRMGKNPNMNKESSSLLNNLIVCEKCGLGYVHRAKDTVSRGKKYHYRYYSCKTYKHTHELEKCGNKIWRADKLEELIIDRVNNYSFASRNLDKEDELDSITEKLKTEHSKKKRLFDLYINGTYEVAELDKMMADIDAQINYYNSQIEANKELKRNKKVQESLAELATVDFDSLEFREKQIYLKSIINKIYIDGEQVTIEWI

SEQ ID NO: 16895 - protein, 612 aa, synthetic construct
MRAAFLIRCSTKKQDYERQVNDLTRLAKKFGYTSSDNMIFGEHITGKDDASKRDRQSIQRLKDAAINKEFDVVLVSEVSRMSRDPMSGRLYVRQLINMDIPVYFRDIDTWTIDPVTGKKVRDAETIIGAAFDAAWKYIKSMKTQIASGRRDELDNNQMSIGQPFFGYKRYGGRDKGKKNSWVINDDAAKVVVDVFEEYVKDGATLKSTALAITAKYGEQFNKKFSIGTIEHILTFEPYCTGIKVVSLTDPDTEDVDEFEVEIPTIITRAMFDKATTKRATNRTARTPYPKQATYILSKLLKCPICEHSLTPQKRGGDKGDKYRLMNGKVAIRWSCMSGINNATDCSSRITISNEKLEAIIWGLVKQELIGFANLNDEDRVAKVEELTDKITNLEMNIANFTSHISNMDRLIERAYSAYMDAPDSVMDIAKDKYYKTLTKCENERAECKDKIEALSAEKLRLENMRTFFNQPTLPKDAIEKAESDPIKMRNLVMELIDKIYPYRITTYVSPATNRIMRNGIVLLEVYTINGIYNVLYDGNQRNNKVAYYISSVYATFQNGRNKFDAYDTGEYFVISHATLVTETEDVDMLVTFNELIKICMQNGWEIDYTYKM

SEQ ID NO: 16896 - protein, 528 aa, synthetic construct
MKVPVWSYARVSTISQIDGFGIQRQVNTINQFIQYLVLDHRLPFTLDVDNITQMVAEGKSAFRGKNWNPKTKLGQYRKMVMDGLIPDSVLIVENIDRLTRLDPFQAVEIVSGMINRGTTILEIETGMTYSRYIPESITVLTMQINRANGESKRKSIMMQKSHQNRFGNVSKVRPRWFDVVEIDGVKQYRTNDTAKAIQRMYSDYINGIGAAQIVRTYGKTDNGKSWTLVTVLRALSDKRVADDPRYPPIVDKAIYEKVQAIKIRSNKGNTHQKNMLNIFSGMTRCPICKQSIIVKRNSHGGLYTICLGKRTNKTCEARCIAYNAFERPLLNAIRGLDFSEVYNREESNVVTLRDQWIQNERDISAFRERLVKASRHEKFAILDELETLSKEQEELSIRLKSVDAPKDVKITYNDTKLDLDVEYRIELNSRMKKLIQCIDIGRVDNSKSSYTIYCTIKYWTDAIKHLVIIDAESVRIGKGGANKLTTTLRSVSSIDANGTISGNPDIEALEYWEKVIDKAVVMAKEQVG

SEQ ID NO: 16897 - protein, 624 aa, synthetic construct
MIKTFIYSRVSSQEQLSGGGLDRQETDVREYVTRNGLDQYEIVAMVDRGISGYDGSNMRDGELGKWYKDAITGMYWGSHLVLEAIDRFSRRDPMLAMEDFTVLVNKGGIKVHIVKFNTFINGDNLPMLSMMMNLAHSESKQKSDRISKGWQRRRRMALDNGTAITARTPYWIDVRDNEYRLNNSSIAVVEAFAMYKQGLSCGLIAKKLNELKHYFPYMWTKTAVQHIVDGLNTSGIIDAPRAIKTIKAFYKSGFSVEDIAKKMNAEFQFMKEWNAPAVHKLLQNKSVTGLVEIQKRKLIQEFDSDGKPLELRTKSEGEKYFESIYPQIISIDDFELIQKLLESNRKVDTKTGKGQTTGGTVTQNEDGELVKQFILSSLCRCYKCGGAMFNNIVRSKRKNGKVDTYSYLRCLNERNAHCDVKALNYPVIERAIIEHVKGLNFDTMFKGTNNSELELLKTREVELLRDIATYEDAIAARKAAGKNTSPVLVTSLVDAQDDLEALQKKIRAISGVTVNAEELTSLNESVFDVAEYELRNMVELELQKIIKRITFNCTEKNIYFITIQYNTGTVLQHGLKVDKKKGVIETYELHEGNKGYVSNGEVITPALIEAAESKNIGIFEGKVM

SEQ ID NO: 16898 - protein, 531 aa, synthetic construct
MKPRVLIVVRLSRVTDATTSPERQVTACRELCATRGYEVVGVAEDLDVSASKTTPFDRPQLGRWLADPSKFDVIVFFRVDRIVRRLFDLADLIRWSREHSVTLVSATETHFDLSTDFGDIIALLVAKVAEMELEAISERNASAFRHNIKAGKYRGGMPPWGYMPSRDEESGDWRLVQDPIQVSVIHDVVERVLKGEPLRAIAHDLTAQGIPTPKDRFAQTQGREASGYEWHSAPLKRALTSPTLLGRVVTREPLLDAQGRIQRDTKGRKVFGPETVVVGDDGSPVIRAEPILSREVFDRVGVELSGRENRKEPTKRSSGLLLRVIYCGECGRPAYRLKGGTGRKARYRCASAQYKDPCPNRTIALDWAESELERRILMNLGPLERKRRVWFPGNDHSDELSEVNELLSDLTDQLGTGTFKRGTPQRVRLDERIQSLTKRQEVLAALPQEPAGWRYEATGELFSDWWESQDTEARNIWLRQMNFRVVWKSHAEGVSTVVDEFKLDGDLTMDLDADQLFGPIVDVVAELSNLK

SEQ ID NO: 16899 - protein, 567 aa, synthetic construct
MAIKKIKSYLYTRISSLQQQAGYGIERQINTVMDFLSEASLPAGLGYELDPNDYELLESDLGKSAYKGHNFTKGELGRFKEKVVKGEITEGILLIENVDRFSRLPDYEAIEHFNALIKRGIDVLEVESGQVFSTKLDGTLSKLAVSIERSHQESKRKARLTTRNWEKMKRNALETGKALKNNCPNWLSIRDEQYEIDEPMVAIMKVAFERFAEGYSAASVVRFMNDSNQLINNRKWSTMNIYHMFRNRRLIGYIDKVKYYPAVIELELFNRVQSMIGSSNKSQKTTQHQRSIFNGITKCALCGSGMIVHSTGKGILYLRCIGERSQNGCKNGLIRYPVVERILLNHINKLDLSRIYNSGNDVSVIGELHNKLASLNHSIQEYQSELEGADDIVVLQLARVLKKLNTERDELASKIAGHNLTSYEKVDYDIESIVNQENWELRQKANIELKKIIKQIQVQRRGDEKVLYLINIQYYTDILKHVLIMNNSGSLISEITITEKENERIYQVREDGETVFKVESDGDAWVLNASRTKKIDDLLTYISVMMVGREPEGFVYQLNEDQIEWID

SEQ ID NO: 16900 - protein, 482 aa, synthetic construct
MKYAVYVRVSTDRDEQESSVENQIDICRYWLEKNGYEWNQSSVYFDDGISGTAWLERHAMQLILEKARKKELDTVVFKSIHRLARDLKDALEIKEILLGHGIRLVTIEENYDSLYEGKNDMKFEMYAMFASQLPKTLSVSISAALTAKVRRGEHTGKIPFGYDRVDKKLVINQDEATIVKKIFDLYEKGTGYKTIAKYLNEQGTRTKTGNIWSAPTVKSILVNSLYKGESIMNKYSTVKIDGRKKRIKNPMEKWTVLENHHPEIISNTQWSRVNNVDKLRQNKTKVDKRNEFRGMMYCAHCGTAIRAVYSGKYTKGEKREWVYMKCARYKRYGTCVNHEPIQYHDIRQVILSMLKEKEKYVDIQLSPQNGDRNQEKIKTIKREIKQLKSKKDKLIELYIEELIGREVFSKRDARLDNDIKEKELQLIKLNDIKAQTEEKKEVKKAFSLLHEKQDLYEVFNILINRITLYQNKKLQIEYTFGV

SEQ ID NO: 16901 - protein, 522 aa, synthetic construct
MKLSHILQPNRKAAFYGRHSTDKQDMDMQLNSVMEVIRKYDCIHTHSFLDKAVSARKNKITSRKELENMFEGAKRKEFDFVIVYKSDRLARDPLEHQTIRIVMKTLDIPIIISSTESVYNTDNDLIVQLMEDGFTKYEVDTIIARTRSGLENKAKQGKWLGGKPPFGYTYDKNSEQFIEHTEELCYVKEIFNLYVNGHGFQYIANTLPNGSRRGKDWGKENVKAIVLNPFYCGLLSWRRQTDGKRNARDIWIEAPNHYVKPIISRTTWESCWRIYSEKRNGNMVPKHYKTSFLLQGLLSCEKCQELMKTKNQQTISSTNKQYGGKIYFCTNCKLRIDADLLHDKVVNQTLTDVKISGFHNVYHAIEQKIQYEIQGLNNNIQKHQRLFENYTIKLHNITEELKQRMKNNDDKRFLKSLAIYRLDVQRKLDGVTQQINDFKQQITLKEKVEKSKETWLHTLNEVFQDDVKLQEISDMDKRRFLLPLIQSVSIKENKKRNEYDISLQLRTDFSKRDVKNQISLIL

SEQ ID NO: 16902 - protein, 515 aa, synthetic construct
MKTAIYLRKSRADLEAEARGEGETLAKHRSTLLKIAKEKNLNVLTVREEIVSGESLVKRPEMLALLEEIEDNKYDVVLCMDMDRLGRGGMKEQGIILETFKRSNTKIMTPRKTYDLNNEWDEEYSEFEAFMARKELKIITRRMQRGRIASVEAGNYLGTHAPYGYDIHRLNKRERTLTINLEEASVVRMIFEWYANEDMGANAIMRKLNELGYKSKLGNDWNPYSILDMLKNNVYIGKVTWQKRKEVKRPDATKRSCTRQDKSEWIIADGKHDPIIPESLFEKAQEKLNTRYHVPYNTNGLKNPLAGIVRCGKCGYSMVQRYPKNRKHTMDCKHRGCENKSSYTELIEKRLLEALKEWYINYKADFEKNKQDESTKETQIIQMNEAALRKLEKELVDVQKQKNNLHDLLERGVYTVDMFLERSNVVSNRINEITETMENLRKEIKTEITKEKVKKDTIPQVEHVLDLYFKTDDPQKKNSLLKSVLEKAVYTKEKWQRLDDFKLVLYPKLPQDDDK

SEQ ID NO: 16903 - protein, 493 aa, synthetic construct
MGESLRALVGARVSVLRGEQKVSHIAQKETGTKWVTDRGHTIVGTFEDLDVSASISPFNRRDLGPWLTAEREHEWDVVVFSKIDRMFRSTRDCVRFAEWAEEHKKILVFAEDGMTLNYRDKDASGSIESMMSELFIYIGSFFAQLELNRFKSRTSDSHRVLRTTARWAGGTAPLGYRVVDHPDGKGKVLDTDPDGKALLHDIAGKLFDGWSLIRIAQWLNDTGVPSNRDKARIVNGKEAKERPWAVSTLTRTLTSYKTQGFKMHRQKPLLDASGEMIRMAPPTFDDDTWKKIQEAIALRQATKSRTNSPNPMLGIGYCDICGASLAQKFRRKGDVAYRYYRCGRSPVQCPGVNIRADEADETLENSFIANYGNENTSHKVFVPGEDNSHDLEQVRATIERLRRESDMGLVVTPEDEEIYLQRMKSLIERRTVLEATPVRPAGWATVVSDKTYADAWETEDHHKLLVDRGVKYFLISGTPRRFRLYVPELEGAT

SEQ ID NO: 16904 - protein, 505 aa, synthetic construct
MKDKLNKIKNVAIYLRKSRKSDGLNVEESLKAHRDTLVRLANKYKWNYTIYEEVGSSMDMAIREELQRMLLEVERGIYDAVVVMDQDRLSRNRYDSAVIKKILLDTYTFIVTAEEECIDLRDASDSLMTDFKDIIASYEYRQTSKRLVRGKDASARKGNWAAGRVPLGYKYNRDTKKLDLEESEARIVREIYKLYLEGEGIREIAIKLNKAGYRSKTSKLFGNKGIWDILKNPIYKGIVRQRHYAFESKSHQYLRDESEWIVHKDIYPRIVSPEEWEEVRKLAEKRSRLPYKARARKHGLTGLITCGYCGQKHGIQWRAQKTKPYRTIKTCWKRSLETGELCRNKGLRYDEVLEYIISKISERRSIIREEISKISSDVSEFTKKKEEQKVKLKEELERVEKQLSRLNYMFINEILSEEEILKEKPPRMAEKEEIERKLFELEGETQESNVSELKFNLKSLERIIRDYRELPDKDLNDLLSNVITNVELFNYNGKDLEPRISIEFK

SEQ ID NO: 16905 - protein, 522 aa, synthetic construct
MATSPVRAVVGARVSIFTDGKESQITQRTKGTAYAESQGWTVVGTFEDLDVSAIKQSPWDRPDLRQWLTDRADDWDALIFAKTDRVFRSAADCVKLSEWCRDHKKILVLVDDGIKLDYFHPDSQQDAFAGAMSKVFLILASVFAEIEGQRFVQRALDRVTQYRHQPRWAYGVPPYGFQVVDRPEGGKALGHDLEAQRVLEGIATQLLSGDSLTRITSELNDAGVPSPADRLRQRAGKELRGSRWTVITVQTILTNPATQGIKTAKGKPVLDAGGEPVRVGPASFDPETWGRIHSELAQRSQSGQQRRHSDNPLLGVAKCGVCGKNMRHFQRTKGERHYRYYICGSTPKACPGVLINADNAELAVETSFLDVHTNRRIKERVWRAGSDHSAELEQTTDTIKALWEDRALGLFTTPEDQDMFRSQMAALVAKRDALAQTPVIKAGWIDVETEQTYGAVWPDATPVERRKMLTDAGMKLTVYRANQYETYVNLDKAIGEGAVGEALHNELEARAADERRRFGIPD

SEQ ID NO: 16906 - protein, 417 aa, synthetic construct
MHVGEMRVIPAKLARPQRLKVAAYARVSTEHERQLSSIAAQVSHYSRLIQSTPGWDYAGVFIDEGITGTSTKHRDGFNDLMDTARAGGIDVILTKSISRLARNTVDLLETVRELKALGVAVRFEREQIDTATADGELLLTLLASFAQEESRSMSKNVKWGIRKKYADGFMHSRQPYGYQYVGSDLVVIEAEAEIIRRIFTEFLAGISPEATAAQLNAEGITPRRGAKFRGKTIRKWLENEIYTGRVILQKYYRPKVSESNCHTNTGELPRYLVEESHLAIIDQATFDAVQAEFARRRHLGRGATPSGGTTGLTSRIECSVCGRFYHRRTKKRRASTYKFWWCETATKGKGNPCRASQIRETHLTRVCASVLGLDDWDDEHALTHLTKIVVNADRTLTIHTTSGEAPVTVSLDERSAR

SEQ ID NO: 16907 - protein, 529 aa, synthetic construct
MTTTQIRRKRVTAIPATKTPGHNATAQGVQRRRRVAAYARVSTEAEEQASSYEAQIDYYTRHIQSRSEWEFAGMYADEGITGTTTRHREGFKSMIADALAGKIDLILTKSVSRFARNTVDTLTHVRQLKDAGVEVYFEKENIWTLDSKGELLITIMSSLAQEESRSISENVTWGHRKRFADGKIMVPYSSLLGYKKGEDGNLAIDETEAPIVRHIYARFLQGATPQTIAKELTADQIRTPRGKQIWSPSTVRSILANEKYKGDALLQKSFTTDFLTKTMKVNEGEVPQYYVTGNHEPIINPATWDAVQAELARRAGKGTSNTHPFANMITCSDCGGSFGRKVWHSTSKYRRYIWRCNNKYKKTHRCATPHITDEQIKDAFVAALTERVTSNDSLDDTMRLLDDTIYNTRELETQQNRLGEWLEETITLMNQLITTAASSAHDPDDYDRRYRELEDRHHQLETEHQHISEQIDDLRHRRAQAIKVRDYLATQPPLAYSDQAWNTLVDHATVTADGVITILLKDEISTSKD

SEQ ID NO: 16908 - protein, 528 aa, synthetic construct
MLDNSNVAPGKNKTLRCAIYTRKSHEEGLEQEFNSLDAQRESAEHYIEAQRMRGWTALPDRYDDGGFSGGNMERPGLRRLLADIDAGKIDVIVVYKVDRLSRSLLDFMKMIDLFNEKGVSFVSVTQHFSTTDPTGRMFLGILITFAQYEREVIAERIRDKVAAAKRRGKYCGGVPILGYDVDRDNKKLLVNPDEAMTVQYIFRRFIQIGSAKKLGQELNEQGYRTKAWTTKKGKVREGSEWNTAHIYRLLNNRIYIGEIAHKDRSYPGEHEGIIDRATWDKVQAILEDNKPVKVSMARTKMVAPLKGVIRCGHCGCAMGPTYARKNGRHYTYYICQKDSKRTVSRCPLKRIPAGDIEQAVIEQLSAVFRTPTLVAKTYFAARDIEQAERERLFKQKAQLEMELSQAREQALELMKPGSDQPGKTEMLTAVNRQAVELSKQLTHVSERCKAYQGNSITEQDVSEAFQNVEGFWDDLFPVERNRLIRLLVDKVEVRETGIDMELRTNGLTTLIAELAGLACEVTERRASR

SEQ ID NO: 16909 - protein, 546 aa, synthetic construct
MIESMTTKTVAIYARVSTIEQAEEGYSIDEQIRVLNKFCEREGYLVYDEYVDRGISGKNISGRPAIQRLLLDAEQKKFEVVLVWKMNRLARKSLDLMNIVEKLDSKNIAFRSYTERYETETSTGKLQFQLMAAIAEYERNNIAENVKMGMIARAKEGRWNGGQVLGYDVVEISSDNRKRKNTHLVINEREANTVQLIFQMYSSGHGYKSIANYINKKGYRTKKGKTFSLNAIKIIVTNPVYAGYIRYNVRKDWNEKRRNNINPNPIIQKGEHEPIISEEVWQIAQNVYQSRSCKPNRIHDGEFPLTGIMRCPACGAGMVISRTTNTLKDGTKRVLEYYVCGAWKNKGTLVCRSNGVRTEYADAFTLDKLQRLMHSDKLIKELVKSVNSRNGKIFVPLQKEFDMYAKQMNEAEQKLSKTFDAYTDELISKAMYVEKAKRLEGQIQELKELMEPLRKQMQGNTVKVVSYEMIKEVLLNFSKAFQNALTREQRKRLLHLLIYKITINEDRKIESIQLKLNNEVLKELKIGVDDSSSDESSTSFSVLVAI

SEQ ID NO: 16910 - protein, 564 aa, synthetic construct
MTRAALYARYSDDKQSPASIEDQFLVCREQAAREGWRIVGSYKDAAISGASVILRPGIQALLQDAQMGRFDVLLAEALDRVSRDQADVATLYKNLQFAGVKIVTLAEGEVSELHVGLKGTMNALFLKDLAKKTHRGLRGRVEKGKSGGGLCYGYDVVRRFSSEGEAVHGERTINDAEAEVVRQVFRQFANGLSPHAIACRLNEAGIAAPTGKLWTSTTIRGHAKRGTGLINNELYIGKLVWNRLRYLKNPQTGKRVSRINPQSEWIVTDVPHLRVLDDELWQAVKARQEDIAIQYAGVIEATRSAHNAMNRTHRPKSLLSGLVYCGCCGGSYTLRGQGRFACSNHIDTSSCANGHSIAREKLEARVLDGLRDRLMSPEVAAEAIRTCVEETNRINRQRRATDTADRAELDKVLKAIKGLVTLATEGKGTRSLVDQLLELEAQEDAIRARLAAAPADVPDIHPNISEIYRRKVERFAEALAHPEERQEAADALRALIERIVLTPGAKRGEVNATLHGEFGTILEWLERRNWANADSPSDAFASGGPGMSVSVVAGVGFEPTTFRL

SEQ ID NO: 16911 - protein, 451 aa, synthetic construct
MTKAAIYIRVSTQDQIENYSIEVQRERIRAFCKAKNWDIYDEYIDGGYSGSNLERPGIKKLITDLKNIDAVVVLKLDRLSRSQRDTLELIEEHFLKNNVDFVSITETLDTSTPFGKAMIGILSVFAQLERETIAERMRMGHIKRAENGLRGNGGDYDPAGYTRQDGHLIIKKDEAEHIKRVFDLYEQYYSITKVQEILKEEDYPIWRFRRYRDILSNTLYIGQVTFSGKEYKGQHEPIISSEQFKRVQALLKRHKGHNAHKAKQSLLSGLITCSCCGENYVSYSTGKSKDVESKRYYYYICRAKRFPAEYEEKCMNKTWSRKKLEEVIISELKNLTEEKKQTNKKEKKTNYEKLIKDIDKKMERLLDLFMNTTNISKSLLEQQMEKLNVEKEKLLLKQQRSEEESISHEVTLAAIDDAFETLDFKEKQVMINNFIEQIYINQNNVKIIWRF

SEQ ID NO: 16912 - protein, 482 aa, synthetic construct
MKYAVYVRVSTDRDEQVSSVQNQIDICRYWLEKNGYEWDSNAVYFDDGISGTAWLERHAMQLILEKARRNELDTVVFKSIHRLARDLRDALEIKEILIGHGIRLVTIEENYDSLYEGGNDIKFEMFAMFAAQLPKTLSVSISAAMQAKARRGEFIGKPGFGYDVVDKKLVINEKEAEVVREIFNLSKNGFGFKKIARILNDKGSYTKLGQLWSHTTIGKVLKNRKYKGDLVLNSYKTVKVDGKKKRIYTPKERLTITEDHYPAIVSKELWSAVNKERTTSEKKTKQDMRNEFRGMLFCNHCGEPITAKYSGKYAKKDKKEWVYMKCSNHVRFNRCVNFDPIHYDELREAIIYRLKQQEKELEIHFNPKIREKRKDKSMEIKKHIKLLKDKKEKLIDLYVEGLIDKEVFSKRDYSFENEIKEQELDLLKLMDQNKRNKEDQQIKKAFTMLEEEKDMHEVFKTLIKKITLSKDKYMEIEYTFSL

SEQ ID NO: 16913 - protein, 484 aa, synthetic construct
MKYAVYVRVSTDRDEQVSSVENQIDVCRYWLNQQGYDWDENSIYFDDGITGTVLLERHAMQLILEKAKKRELQMVLFKSIHRLARDLKDALEIKEILIANGIRLVTIEEGYDSHYEGKNDMKFEMFAMFASQYPKTLSVSISAALSAKVRRGEHTGGRLPYGYRDQDKKYVINEPEAEVVREMYDMYSKGIGYIGIAKYLNERGIPSKTGGKWQMSSVQRIIRNPIYKGDYILNQYTTVKIGGRKKQIRNPEEKWTIFNKHHPAIVSDEKWLLVNQPNKEKKRRTALWNEFRGIVFCAHCGSAMRVVYSAKKKKDGTKEEWRYLKCSRYKRYGKGECVSHKPIQYKHFREFVLEELEREQNELKTEFESQGQNIHKGKIDNIKKNLKRLEERKKKLVDLYMDNLITKNEFSVRRADMERSIKEQELQLMSTEDIKLANEIHKEFQEAFALLKKEEDLYEVFKRILQRIDISQNGDIKMTYVLDV

SEQ ID NO: 16914 - protein, 522 aa, synthetic construct
MKLSHIVQPNMKAAFYGRHSTDKQDMDMQLNSVMELIRKYDCIHTHSFLDKAVSARKNKITSRKELENMFEAAKRKEFDFVIVYKSDRLARDPLEHQTIRIVMKTLDIPIIISSTESVYNTDTDLIVQLMEDGFTKYEVDTIIARTRSGLENKAKQGKWLGGKPPFGYTYDKNRGQFIEHPEELCYVKEIFNLYVNGHGFQYIANTFPNGSRRGKDWGKENVKAIVLNPFYCGLLSWRRQTDGKRNARDIWIEAPNHYVKPIISRTTWEACWLIYSEKRNGNMVPKHYKTSFLLQGLLSCERCQELMKTKNQQTVSSTNKKYGGKIYFCSNCKLRIDADLLHDKVVNQTLTDVKISGFHNVYHAIEQKIQYEIQELNNNIQKHKRLFENYTIKLHNITEELKQRMKNNDDKRFLKSLAIYRLDVQRKLEEVTQQINDFKQQITLKEKVDKSKETWLHTLNEVFQDDVKLQEISDMDKRRFLLPLIQSVSIKENKKRKEYDISLQLRTDFSKRDVKNQISLIL

SEQ ID NO: 16915 - protein, 515 aa, synthetic construct
MYRPQELDVFIYLRKSRKDLEEEKKAMEHGQHYDTLERHRTQLLELAYKEHHNIIDIFEEVVSGEYISERPMMQKLLREVETGIADAVLVMDLDRLGRGDMVDQGTIYRVFRYSETFIITPTEFINPNDENQELTFSIKSLIAREELKTIVKRMQRGRRVSAKEGKSISRVPAYGYLRDNNLKLYPDPEKSWVIPKIFELMVNGMGRQAIAQELDRLGISPPEGEYWNPSTISSITKNEVYLGHIIWGKIRYTKQNGKYIRKKVPKERWQRHDNAHPPLVSEELFQKANMAHSKRWRPPTIKTKKLSNPLAGILLCELCGHSMLYQPRKDRPNPQVRCVQSSCKGVQKGASLAFVEQRILDGLKQIIESFEIQENMVQKKNSSNNIDLQQKALEKNEQQINDLQKQKSNLHDFLEKGVYDVETFLERQKSIAIRLKTTQKAIEELKHEIKKILEKEKHIHEFVPRIKNVLEAYHATNDIEKKNLLLKSVLEKVTYLRKKEWKRKDEFVVELYTKI

SEQ ID NO: 16916 - protein, 499 aa, synthetic construct
MEFVAIYMRLSRDSTQNGIEESLENHRLALTRICKTNGWKYDIYEEIASGVFPEREQLNLLLSRLNDYTAILTMDVDRIGRDPEHNEKVLKMLILNGIKIITPSGEYDFANENSQMLYRMQSMLSSFEYSAIRKRLGRGKFLEASKGHWVMNNIPLGYLKNPETKRLEIDENEAEIIRYIFEKTIEGYSVNKISQDLDAFGWRSKKGKVLSTAHISQMRRNPLYYGVVRYERKNELGRVLENCWVEDAHPGIVTKEEFLRCQEIIKNNNNKKFKTHGKVKHILQGLIYCAKCGRKRYICVDRNGTPYIKADGAKIENVRCSDAGMALKPVTDAVIEDIKNLKSDLEEEIIKLKKRDTTKLEKEISNKLIETESNKDKLNKKKKNLVEMRMNGEITKDEFLQFKDGLEKQIRHTDDMIQLLQMKLNNLSYTEDEVKKLEKVIWTIDNLDNLSVEKINSFLRSIIKKVLFSRNIESNPNTVKREKVEPTVDIDWIERIPMR

SEQ ID NO: 16917 - protein, 517 aa, synthetic construct
MNGVIYARYSAGPGQTDQSIDGQLRDCREYAAKNDITIIDTYIDRHISGTDFKNRTEFNRLMNDCKKHQFSAVIVWKIDRFGRNREELAMNKVKLKKQGVKLLYAKEHIPDGPEGIILESLLEGMAEYYSAELAQKVSRGLLESVEKGHVLGANPLFGYDLHDKRYFINPTTMPIVVEVFERYASGDTAKVIMDDLNRRGYRTMKGNNFNENAVYYMLRNRKYIGEYLYKGKVYPNVPQIVSSDLFERVQDILGLNSRNKSRTRCTAPVEFLLTGKVFCGYCKNTVIGDSGTGRSETYYYYKCSGRKNKNACCQLKTYRKEFLEKYVARYTINNVLKPDLIEFLARKIVELQNADDETILLRNLNKRRKEIQKGLDNIMKAIEMGIITDTTKDRLVELESQRSDLDAEIAKAEIKKPDITADQARYWLYNFKNGDIDDVEFCTKLINTFVNSLYLYDDYIVIVYNFCDREGSPEEVNAALEEIKIDHELSNLNGSAVHGQVPATGIEPVREISPAGF

SEQ ID NO: 16918 - protein, 515 aa, synthetic construct
MKTAIYLRKSRADLEAEARGEGETLAKHRSTLLKIAKEMNLNVLAVREEIVSGESLVKRPEMLALLEEIEDNKYDVVLCMDMDRLGRGGMKEQGIILETFKRSNTKIMTPRKTYDLNDEWDEEYSEFEAFMARKELKIITRRMQRGRVASVEAGNYLGTHAPFGYNIHRLNKRERTLIINSEEASVVRMIFDWYANEDMGANAIRSKLNDLGYKSKLGNEWNPYSILDILKNNVYIGKVTWQKRKEVKRPDAVKRSCARQDKSDWIIADGKHEPIIPESLFEQVQEKLNSRYHVPYNTNGIKNPLAGIIKCSKCGYSMVQRYPKNRKETMDCKHRGCESKSSYTELIEKRLLEALKEWYINYKADFEKHKQDDKLKETQVIQMNETALRKLEKELVDVQKQKSNLHDLLERGVYTVDMFLERSNVVSDRITEITSTMENLKKEIKTEIKKEKVKKDTIPQVEHVLDLYFKTDDPKKKNSLLKSVLEKAVYKKEKWQRLDDFELVLYPKLPQDGDI

SEQ ID NO: 16919 - protein, 515 aa, synthetic construct
MKTAIYLRKSRADLEAEARGEGETLAKHRTTLLKIAKEMNLNVLAVREEIVSGESLVKRPEMLALLEEIEDNKYDIVLCMDMDRLGRGGMKEQGIILETFKRSNTKIMTPRKTYDLNDEWDEEYSEFEAFMARKELKIITRRMQRGRVASVEAGNYLGTHAPFGYDIHRLNKRERTLTINPEEASIVRMIFDWYANEGMGASTIRNKLNDLGYKSKLGNDWNPYSILDILKNNIYIGKVTWQKRKEVKRPDAVKRSCARQDKSDWIIAEGKHEPIIPESLFEQVQEKLNSRYHIPYNTNGIKNPLAGIIKCAKCGYSMVQRYPKNRKETMDCKHRGCENKSSYTELIEKRLIEALKEWYINYKADFEKHKQDDKLKETQVIQMNEAALRKLEKELVDFQKQKSNLHDLLERGVYTVDMFLERSNVVSDRITEITSTMENLKKEIKTEIKKEKVKKDTIPQVEHVLDLYFKTDDPKKKNSLLKSVLEKAVYKKEKWQRLDDFELVLYPKLPQDGDI

SEQ ID NO: 16920 - protein, 606 aa, synthetic construct
MLRLVFILLIFLTVLRRMMHFGERYVYLGLGLDSLAQYLDHMLMKLPQRFVGWLINFFDYIFTFLHKLFLQNLTVVIFDDVSSKMLNILLGWRQKFNKFGVEAIMESKTIKHVAVYLRKSRDDGEFEDVLSKHRDTLLALVENRNWTYRLYEEVASGEKIESRKEMQKLLRHVEDKLYDGVVVMDIDRLGRGENKDWALIKDTFLNSETVIITPNKIYDLEIDNDDVSFDFMSIFARIEYKTIKRRMKQGKEAGAKKGMWTNGKPPFPYYYDKNTRSVLVDETKRAIYRAIVEKYLNGTNLGHIAIWLTDNKIPTPYNIKPDGKNKGWSNITVQRLLASEIHLGYITYGKTRSKRGQVELVPEEERIKVMGTHEKLKTPEEHEAIMERLLKNRMLNPNSRRNIFPLSGLLYCEKCGSRMRFRVGENKKQGQHWSALCYHQYKDGSKCEQRGKVMDADFFNALYDRIIHVDPNILREIELHGSRYNDTQTIIEVKEQELKKQKRALDKLYESYEEDMLTKQVFLERKAIRSRQIQKLEEELKDLRKVVVDEGNYPTVEQIYERIGEFRELWSGSVTSEEKNRALKKLVERLVYNREGNRVELVVCYK

SEQ ID NO: 16921 - protein, 547 aa, synthetic construct
MLRQSDKITALYCRLSRDDEMAGDSNSIVNQKAILSKYAKENHFLNTLFFVDDGYSGTNFNRPSWCELLERIENGEVATLIVKDMSRLGRDYLKVGFYTEVLFVEKGVRFIAINNGIDSANQQDSDFTPFLNIINEWYAKDTSKKIRAVMKSKGEAGEHLCTNPPYGYMKDADNPKQWVVDNEAAGVVKRIFSLCLEGSGPTQIARILKADKVITPTIHFQRTGRATRNTPPENPYHWTGDTVADILERPEYQGHTVNFKTYKQSYKSKKTCYNPIEKQLVFENTHEAIIDADTWERVQELRKNKRRPTRTGKTNLFSGIVCCADCGEKLYYCTSKNFEARQDHFVCSTSRLKGKEICPTHFIRAVVLEQGVLAHMRLVIACVSTYEERFRKAMGAKQKAEAKGELAAKRRQLTQAERRIEELDRLFKRIYEDNANGKLSDSRFQMLSDDYEREQEELREKLLQLNEEITQQEEQAENIDRFIGKIRKYLDLDELTPAVLNDMVKAVYVHAPDKSSGQREQQIDISYDLVGILPASLLNNLQNGETA

SEQ ID NO: 16922 - protein, 570 aa, synthetic construct
MKQSNNRKHSINTAALYCRLSRDDNMDNESNSITNQKALLKKVAKEKGYTDTLFFVDDGITGTTLDRPGFNEMIKAIEAGYISAVFVKDLSRLGRDYLKVGYYTEEFFPEHDVRLVAVSDGVDSEDGDNEFTPFRNIMNEWYAKDISKKRRIVNKLKGNSGVPLSPPPYGYMKDPEATPTRWIVDEAAAVNVRRIFRMALDGRGIGEIAAALAEDGVLTPTAYWQSKGVGWGGKKTKFSPTDWRHSTVAKILSLQEYCGDVINFKTFSKSYKMKKRIENPEENRAVFLNVHEPIIDRETWEKVQKKRGTRKKPNKTDGECSIFSGLLKCPDCGGNLNYHVNYNNADIKYFNCANNNSARGRCATTHYIRLDFLERVVLEEIRRLTRFANEYEDDFARAIVGRSIKTAERDRIRKQKELEGLLARDKELDVLFERIYEDNVAGKISDERFSRMAQKYEQEQGEVAGKIKALRKELRKEGSQTMTAELFLDTIRQYTDVRELTQRMVTELIDHIDVYHAEKVDGVTRQRVVIHYHFIGAFIAPKCKDIPEAAILMQTRKGVAVRYSPEQIAS

SEQ ID NO: 16923 - protein, 538 aa, synthetic construct
MSRAILYVRVSTDEQAEKGYSQRDQEERLRNWCKYNSVEVVEVIVEDHSAKTFLRPKWQMLLARLRENKRLRIDQILFTKWDRFSRNAGDAYQMINILRKAGIEPQAIEQPLDIRIPENKIMLAFYLAAPEVENDRRALNVFHGMRRAKKEGRWVATAPIGYRNARSFDGKKIIEPDTNKAPIMKWVFEELALGRFNTEQVWKQAVRKGLKCSKNNFWLAIRNPVYCGQIFIPEFEEEKAQRVKGLHEPIVSPSTFNLVQDMISGRKRNPYQKPKIVSDDNLPLRGFLRCTKCDRMLSGSASKGRSNYYYYYHCSSSCGVRFKADNVNEKFERQLNMLLPRPGRMKIYSDLVLSSYKEQTKIREKERRDLVDELDKINERLRNARIKLVDGLIATEDFEHVKSHCTKRIEELEIKLNSFSDDQAEIGAYLKHILTGLEHLSKLYKSGTLEEKRQIIGSIFPENLTFDGMEHRTARLNEGIDLIYQITSKLRTQKKGTSAFKNDLSLRVLPKGFEPLSMVPETIILSIELREHSLAFGR

SEQ ID NO: 16924 - protein, 581 aa, synthetic construct
MKVALYARYSSDNQRDASIADQFRMCRLYAEKQGWQIVEEYSDHAISGASLLRPGIQALISDATHGRFNVILAEAMDRLSRDQEDIAGIFKRMSYADVKLVTLSEGEVTHLHVGLKGTMNALFLKDLADKTRRGLRGRVESGKSGGGLCYGYNVVRTADPDERGHREINTAEASIIQRIFKDYLEGKSSRTIAMTLNREGVPGPQGKEWGPSTIHGNPKRGTGILNNELYIGKLVWNRLRYMKDPDTGKRVSRPNPESEWVVQEVPELSVIDRSLWDAVKARQASLAFDKSEKSSNPMNNRRRPKHLFGGLIKCGCCGGGYSMISKDLMGCSTARNKGTCDNRVNIRRDALEASILNGLRKHLMGPELFKEFCAEFTKEVNRLRMERGADLEVWKSELERTDRELDKMVDAILQGFPPAKLKDKAEKLEARKAELTELLANADEPPPFLHPNMAQIYQDRIRQLYENLQREEERAQAAEVFRSLVDQVTLIPEDGELAIVLRGDLGAILRFAAGKKNPDFLSEAEAFDNLLSQGSLVAGGRNQRSLRNGSWNAKTSAAGALEVSQVSLVAGAGFEPATFRL

SEQ ID NO: 16925 - protein, 539 aa, synthetic construct
MTPLVAAETFIESDLEPFIGYIRVSTWKEEKISPEIQQAAILEWARRSRKRIVRWITDLDATGRNFKRKIMQGIEAVERKEAVGIAVWKFSRFGRSRDGVAVNLKRVENTGGELVSATEPIDARTAIGRLYRGIIFEFSAYESDRAGEQWSETHALRRAAGLPATGRDRFGYIWHRRFNPQTRKVQQERYEPDGEVAPTIVEAFLRYVAGATGFSALAGWLNGLGYRTTRGTLWSADTLKRFMDSGFAAGLLRIHDPGCRCNGRKTNGSCPNYQYMEGAHEEIIGPEIWQQYIERRKLIKESAPKSRKGIYALTGAMACGDCRHGATLNAAVRKRVTILGFAYRCGNRARTAGHACGGVYMKRSEVEAEVMQFLAAHSQGVDESPAAEVQRARESDAARKRATEQRTALEKEYKRLTVALSRIAVDKNLNPENYDEDVYEMAVADLKRDRAKIARELEQATVVVEHQTFGDVRPLVVGLMAEWDTLLVGERNAIIRKLIRRVALVRKSKDEVVVEIHPVWMPDPWLKEDTAGAEHDLAA

SEQ ID NO: 16926 - protein, 524 aa, synthetic construct
MQSTEGYSIDGQINQIKEYCDFHHFEVKDIYADRGISGKSMNRPELQRMLKDAKEGNIDCVMVYKTNRLARNTSDLLKIVEDLHKQNVEFFSLSERMEVNTSSGKLMLQILASFSEFERNNIVENVFMGQTRRAQEGYYQGNLPLGYDKIPDSKHELMINQHEANIVKYIFECYAKGHGYRKIANALNHKGYVTKKGKPFSISSITYILANPFYIGKIQFAKYKDWSEKRRKGLNDKPVIAEGKHSPIINQDLWDKVQMRKKQVSQKPQVHGKGTNLLTGIIHCPQCGAPMAASNTTNTLKDGTKKRIRYYSCSNFRNKGSKVCSANSVRADVIEDYVMKQILEIVKSDKVIQRVVTHVNQENQVDGAALHHDIAYKQQQYDEVQIKINNLIKTIEDNPDLTSVIRPSIQKYEKQLNDITNQINQLKNQQNEDKTLFDAKEISKLLQHIFHDIKHIEKSRLKALYLSVIDRIDIKKDGNHKKQFYVTLKLNNEIIKQLFNNKQLDEVHLSTSSLFLPQTLYLTI

SEQ ID NO: 16927 - protein, 564 aa, synthetic construct
MPRVALYARYSDDKQSPASINDQFLICREQAAREGWRIVANYKDAAISGASVILRPGIQSLLHDAQMGRFDILLAEALDRVSRDQADVATLYKNLQFAGVKIVTLAEGEVSELHVGLKGTMNALFLKDLAKKTHRGLRGRVEKGKSGGGLCFGYDVVRRFSSEGEPVHGERSINAAEAEVIRQVFRQFANGLSPHAIACRLNDSRISAPTGKLWTSTTIRGHVKRGTGLLNNELYIGKLVWNRLRYLKNPQTGKRVSRINPKSEWIVTEVPDLRIVDEELWQAVKARQENIAIQYADVIEATRSAHTALNRTHRPKSLLSGLVYCGCCGGPYSLRGQGRFACSNHVDTKSCSNGHSITRDKLEARVLDGLRDRMMTPDIAAEAIRTFVEESNRINHQRRASESADRTDLQKVLKSIKGVVKLAEEGKGTRTLVDHLLELEAQEDAIRARLAAAPADVPDIHPNISEIYRRKVERLTHALSQPEERQEAADALRALIERIELTPGAKRGEVNAMLYGEFGRILEWIEQRRLAENAQSPGALASGLCGMSVSVVAGVGFEPTTFRL

SEQ ID NO: 16928 - protein, 555 aa, synthetic construct
MKLAYSYVRFSSPEQAKGDSLRRQTESARDYCERKGLKLADLTLKDLGLSAYHGVHFKDGALGEFIKAVEAEQIPKGAYLLVESIDRFSREKIHVAYRRFSELLELGINIVTLQDERVYTEASLNNLGDIMISLVTMSRAFEESDVKAKRLREAHAAKRAAARKNKTPTGYRPPDWLVQASQGYDLIPERVAIIRRIFQLTIDGLGAIAISKLLNREGVPTWGRSKTGWQTTYIKKLLRTRTVLGEYQPHKTVNRKREPDGEPIHGYYPPIIDPQTFRKADLAIRSRDRRPVSVRKAAVNNIFTGLVKCKNCGNTMHYVNKGRDSVKGGQYLVCSMARTGALVNGQKCSYSSMRYQVIEDAVLHIASIISLDLSPPDNSQELQSLKNELAVAESVRAELESTVESLIDKLEKVDDDELLLNRYNKRSQELKEQRQSCTEILKAIDELECKPTELHIFKKLSETVKKLKTEAADRENVVLRTRINSQLVSMLESIDIDGSNKLVSIQVDGTKTIDLRFDKRQKNYMVKPSWDRREFPPKTFAVKYATGSFRTQLFS

SEQ ID NO: 16929 - protein, 604 aa, synthetic construct
MVKIIGYARVSTTKQDLSRQKLKIKEFCENNNYELIEIIEDFGISGVVADRKGYIELQSKTYKDADMIVISELSRLSRQEDVTETVYNIQQIINKGLSVILLDSPSKIYEANKLLDITEILILTIKAWAAAQERLDIKKKNQDGKQALFQAYPYAVVDQKIPYGYKAVPNPNGKRPKYILEEVPEEVENIKRLFALVNSGKTLGAVARYFNERNITFRGYYSTVAILSNYIHSDIYRGIRRRTQRLGREEPYTIEVRIKPIISEEDFMKAQELIKNNYKSTPTGKVNHNPLKGIIRCRCGRAMTVKDKKPAAGISKLTYRCSCVDRKSHPDFCKYNIDEVSYDLTNEILYSLFKSMHTAEYINFFRNQTDNRVTELQEEIAGIEKRLSTLYLDKENLSNESQDNANKFLLTTNPTLLNIIQEKQNQLDEKIKSIDKEIIKYKKSQSKKMADIERIKDNNGKEKLQNLSIEEQGELYHKYLERVNYIPVTTMQGYYIVQFLNGIKFYIAITKVRNIAMASLLLDNWTIDEKGLITANYDTLKSSDMKNFSIEMIRKAKTMTLQEYLKSDLAKERALHLDLSYRERYLEQLHKAGLDGRHRPLKKE

SEQ ID NO: 16930 - protein, 525 aa, synthetic construct
MAYYGLLKGSNMKAYIYSRISSAIQKKGHGLDRQQDITLTYATQLGFDISEEVLQDVASGYHGKQMEGRLGVFLEGIKRGKIESPAALIVESLDRLGREHTMDALPRFIDIVNHGVEIHEVSTGIVYNREETHKIHIAIAIMERAHNESLMKSKRARAAANKRLQRAQQGENVVINVNLPCWIRSQDGKLELVPEYAVVIRRIFELYLEGKGSNKVAQILREENHPYFTSNIHSKKIRSRVWTDQRVMDIIKKDSTCGVFRSTVNPDTVIDGYYPAAIDKATFERAQALRMSRVRTAKKSKKGLNILSGLLRCGHCGSSLQYTRSYSNKKKTRMYENLRCRDRAARMNCDSRSVPLRPLEKLILGWVGTIPLFDIKAASNDELEQKKAELTQLEQQAENLVELLATGLTRVKDKYLQLEQQIDSVKKEISSLSVTNSSSVDKIDYFKAIDLENEEYREQVQQELALIIDRVSVKCDGEDAEIDIFLNSRIHNRQRFIGKKKQLDKARQTIRTLRPCAAHIDSFVD

SEQ ID NO: 16931 - protein, 575 aa, synthetic construct
MTKIAYSYTRLSTEKQIKGHGFTRQREAIEKVCCQHGWQLSDQTFNDLGVSAWKGANVTTGALSHFIELTKKGAIKPDSVLIVESVDRLSRQQVDKSLRLMLELLDVGISIFTLSDSKLYTTNSDNVMLDLMMWLMTAQRAHEESEMKSLRIRAAKRKNKELIRQGVIVSRKCPEWLSVSDDKSCFIVNEERAEIVRKVFIWYSQGFSTKPIALKLNELGVPYWGKSSTWSYRHIRSLLKHRAVIGDIQPLIRVNGKDVPDGDVVSDYYPAIVDKGLWATCQQIKSSKTTARGRTVEIGMANLFRGLLKCECGSGLAINSSTVKGRTYRFLRCSQLKTTGCQAKNWHYEKTERILLIALRHSLSSFSEEDHAVALRESQHYLARINEELKEKERQAENAINYLLDKPSRLLEARLQTLEDDIARLKAIQEQAEHRVEAVHYEKSTALDKVEELQRVLEDIANDDDSRHKANGLLRRLIDTVTLGSISNPRSKEFMELSGNDYHGLIVIKRRDGLEVRVEVLKNYELSISWEGDEFTVIECSPTQQPNSQHEHQKFINVGEQTVDLWDDEGWVASS

SEQ ID NO: 16932 - protein, 524 aa, synthetic construct
MKTAYSYIRFSSKAQELGDSLRRQLDDTRRYCAEHNFKLSETSYQDLGISAFKDRDRASLEDMLAAIKSGSIQRGSVIILESVDRLSRAGIDKTQEIVKSILRHDVEIVSLHDGLHLTKGSLNDLIAVIRLAASADLAHQESVKKAERVKSAKKRQKDDARQGKAIKKRLVWWLSRESDTYKLNENAQHVREMIKLRQQGAGYHKIAMKLNESGIQTRYGKTWSDTAVREMLSHDALYGGYQVGTVRNGKFIKEELIHNYYPPLISYSEFKELQSEYVNRTGGHKKHNHLSGLVRCGHCGSAMQKKVSKRTTKKRTIEYKQWICVASVSGGCEFKNGIRDLDEHIFKVAKNLVIENSATISEAENTAIARVDELQSRLIMQKDKLANADGVAFDLILEATERTKAELDSASSHLAQLQANSRDITGEDVDRLAEYSNDAVKFNLHLKKLIQRIVVSKKGSNLWHVKLFQRNQHTVNLTVFRETQRSAFKYFLGGSEDRANLIEDAKNSFAEMHEWEKDYGDEVT

SEQ ID NO: 16933 - protein, 600 aa, synthetic construct
MIHPKEQLDAYIYSRVSKDVQVQGDGIRRQIDGAIRFVESKNKENLQNGLPTYSIADEFITDRGLSAYKGFNTAANGSLGAFLEAARKGEIKRGSLLVVEAVDRISRMPADESRKTFSLFKEYGIDVAIVKFGIIIKHSESTTLENDLLITAAIHLAHMESQQKSNRINDYFENKRMKEKEGGEKRTSICPSWMKLSEDKRSFELIPDRARVMKRIINMKLDGLGCHRIASALNSEGVPYFNGKTWSTEIVRKYCKMIQLYGAFQRVKHVRTNAGTKKQPWGDIEQNYYPAIIDEQTFLRLKKSFKRSGGRQTGAFSNLFSNLLICPQCGSSMSYYKPNRGRKKVRCRKQIDNQGCTQRSLNYEEIETRLVKALAGLDYAKINDSSFTDLSAELSSLEANIAELNENVEVVTKQLMENTNPRLYSILTEKLTKLDDEIHSEKAKFDELSILHRNYDTTIINSLKLDNNEDRERYNNFVKQFVKYIICTDEEQGGSLRVVFKADAIGELPFSFSDEKNDKAVSEVFTANRSISDTQAVRLINLDKSSSMYLPLLKEITDVKQPNDLSDSRELIRYMHAVRMAVKRNPSKWKEIAEQAKLRY

SEQ ID NO: 16934 - protein, 499 aa, synthetic construct
MKRAVGYARYSSDNQREESIDAQIRAIQSFCNENDYKLIEVYVDEALSASSAKERENFLRMIQDSKNKNFEIAIVHKFDRFARNRYDHAIYEKKLNDNGVKLLSVLEPLNDSPESVILKSVLTGMNEYYILNLSREVKKGLKENALKCIHTGGTPPLGYDVGEDRKYVINELEADSVRIIYKMYLEGAGYRKITEYLNKIGRVNKRKKPFKMTSIRDILLNEKYIGTFVFGKKDAHGHLTGNEIKIENGLPAIVDKEIFWRVQKKIKTRATGSRSKAITPYYLTGYCTCAECGSAYTGGYRSRSRNGELVYGYVCTGRKSKGTNCVNRNIRKELLENLVFKAIQTKILTDEAIKQLAEEIKVQAKEIKTKKKKVVEKHEKEIEKLKIKVDKILNLLLDGALPEDVYKEKSKELNDRILFLKLEIEKAKKEEEVDYKKIVNFLQKIQKDFHKEEIKKSVIETFVHSVKIGYTEIEITLKKINSKTDLIGGSGGNRTRVRN

SEQ ID NO: 16935 - protein, 529 aa, synthetic construct
MRKVYSYMRFSRPEQAKGTSIERQSSFAEQYALEHGLELDKSLTMMDKGLSAFHGVHKTKGAFGQFLAAVTAGKVPSGSVLVVESLDRLSREDPLIAQAALTDLILSGITVVTAADNQVYSREEIQQNPFKLIMSLVVMIRANEESETKQRRSNAFLKSALNQYQANGKIRRLGSDPSWLDFNKDNDTYSFNERVEVIRRILNLYNQGIGSLKIARQLTEENIPTLSGKRSAWGQTTVANIVKSHALYGMKRINVQGVEYDLEDFYPALITKSKWLALQQHRTKRSKSMHGRGEVVHLITGHGKGVTTCGYCGGGLGAQTQKQYKRSGEYSRTVTRLHCLTHKETSSCCSSVFLEPIESAVLFAACIGVEPQSLVPTVNNVNYSALIDEVENKVKHIVEQVTAGAPWDLFKDAHDKLKLEKQKLIKERDSQKPDVNQSDVQKWVNKLVELADKARANDKEARLKCRTLINSICKSIVIKLRGHDLKSEPVVTITFVTDEQFEFKVGKNGAVQFVDNGMAVNRRLKPLLA

SEQ ID NO: 16936 - protein, 655 aa, synthetic construct
MKPTIITYLRYSSKQQADGLSEFRQSEINRKFVEKFCEEHGVDLNEVISLKDLGVSAYRGLNLTLGSFSQTIKKFKSGEIKKRFNEDGEINTYLIVESLDRITRTGPFKSTQIFTELLEYTNIVVLADGEKKIYSKKSIDSTHGMMDLFMALISLQRSHTESLMKEYRSRKSWEKKREDLLNYFTLPEDEREGLERPKNATAMCPFWLTAKKDGRGYDFIPENKKVMDFLIEKLLDGNGMTRAVRLLNDEIDNGNLKPKLKKANRKTRHFRAAAYSGLFNSVISTVKGDYLLTESYYPTEDDVEQGKYPEKHLGKRVRKEVAVLKNYYPALMTESQAAYIRKMMDERRTSGTKPNKSIKNLAQGILRCPYCNSTYIKSKDRRNVYLRCNLAREGLCNAKVIKHDVFEHNLLQFCKGLNINKIISNQASDQVLDSSLKELEQKMIPLKVRKSELEDDIEQIVKNISSIKIPSLLEKVQDDYLAKENELKKVVQEIDLIETSIMKLQQQIAMSDGDNSLQELIDLTLDENADDEIRQRFNVELKKVVKSMTVLYRDTEDNPFGYHMISIQFLDGVHRLIPVHEKMTDKIHNILPYQDAVKVDSVDFSETVILPTDYLEGLESGKYPHLDGMAKYYQENPAKYLKLKHQIDQSQEIYE

SEQ ID NO: 16937 - protein, 529 aa, synthetic construct
MRKVYSYMRFSRPEQAKGTSIERQSNFAEQYALEHGLELDKSLTMMDKGLSAFHGVHKTKGAFGQFLAAVTAGKVPSGSVLVVESLDRLSREDPLIAQAALTDLILSGITVVTAADNQVYSREEIQQNPFKLIMSLVVMIRANEESETKQRRSNAFLKSALNQYQANGKVRRLGSDPSWLDFNKDNDTYSFNERVEVIRRILNLYNQGIGSLKIARQLTEESIPTLSGKRSAWGQTTVANIVKSHALYGMKRINVQGVEYDLEDFYPALITKSKWLALQQHRTKRSKSMHGRGEVVHLITGHGKGFTTCGYCGGGLGAQTQKQYKRSGVYSKTVTRLHCLTHKETSSCCSSVFLEPIENAVLFAACIGVEPQSLVPTVNNVNYSALIDEVDNKVKHIVEQVTAGAPWDLFKDAHDRLKSEKQKLIEERDSQKPDVNQSDVQKWVNKLVELADKARANDKEARLKCRTLISSICKSIVIKLRGHDLKSEPVVTITFVTDEQFEFKVGKSGAVQFVDNGMAVNRRLKPLLA

SEQ ID NO: 16938 - protein, 545 aa, synthetic construct
METTPTKRVALYIRVSTQEQALEGHSIQAQEQNGRQFAERMGYEVVEVYADEGISGKSTKNRFAYQRMMNDARNHRFDLLVIWKLTRLGRNMLDVLQTVEELLRYDVGLHSISEQFDVTTSTGKLMLQLLGSFGEFERNQIAENVQMSMQSLVKDKKRYAGGRRLGYVSGIDTNGQKQLVIEPEEAKIVRLIYAKYLGGAGYRAIANFLNRQGYQTVKKNAFSTTAVKDILRNKIYAGYLEYARYINWETKRRKGKNPKPILVKGTHEPIISEEDYQKVQERLALEGKQPKWNHTGENVLTGLLRCPECGSPMAASNVTNTLKDGTKKRIRYYSCSVFRNKGASVCHANSIRAEQAETFVADRLKEIVQLPEVLPRLVAALNEEIARQSQPLEQELVVLLERKEELKTKIEKWEAALEDSPELFPMLKDRLDELTEKRRQLHIRENEILGIFQQQGEPIQVKDVQRILTSLDRFLAKSEKKQVKALYRTFIEKITFDPKQKEILEITMKFTPAVVQQLNEQYQIAVSKTRDTAIFVLKTPFTLTI

SEQ ID NO: 16939 - protein, 473 aa, synthetic construct
MRACIYTRVSTAGQAEEGFSMQAQYDKLIDFVKLQGWDLIRVYTDPGVSAKDLNRPGVKELIDDLKVGKFEAVIVHKLDRLTRNISDLYDLVELVNKYEVKLISLSENIDTSTPMGRMFVYLLGIFAQMFRENLSEEIKKGLSKRADLGFRNAGAPFGYKMDERGNLIIIPEEAELVRVIFSLHISKKWGFYTIAKYLNKLGFLGRRGGIFHGSSIEKILKNHTYVGKNHWKLKGRPESERMVRDANHEPIIDQDTFNKSQEIIRRRSQKEMSRSFYSYPFSSIIRCGQCGAPYHGIMQPYKGIKYYYYRCFNVIKGRCNQSSISELKFETMFFDYFIVQHQGVNFEEVAATKSDTSEVKRKIERELEKSEQRRKNWQYAFGDGTIPYKDYVALIDEEMRKVEELQLQLSDLPVDESPVKITIKEVIETVAQLKDNWAYLERETRKDLINSLFKSITITKFDYGWVITDVDWV

SEQ ID NO: 16940 - protein, 458 aa, synthetic construct
MKIGYTRVSTREQAQDSSALDQQTHRIKSAGATVIFCDVESGKSFTRKEFKKMIALCNEGRVSELIITRIDRLGRSVIGIHQTIEALQKLNIKINVLDSPVDPSSAYGWYSINQMAGLAELESRMLSERINNGMEYFRLMKKASPRPPFGYARVNEKYEPDLEEFNNTSKWAIAQQAIKFFLNNGTLRSLSQYLLEHEIKITPSGLRYWLLNPCLRGHTVYGSRGNIDRPEKWTICENTHTPLISNLEYHKILKILETNKIKHCYGNDKKDKERYPLSGQIICADCGYKCFIKKRGSKIRVRCKQHEVSGSLFCENKFTTYLDNIIYHVDSVLHQRYLDVISFTESEIISDSEARPRNQDNPLIADQERQLRSLRQLPKSPIIDGAIASTLLEIQRLKSLQTVQQEISQELKKTLISSFSDLDFWQNIPWKDKCEIYKELIKSVSVSNGEIIEIELFI

SEQ ID NO: 16941 - protein, 561 aa, synthetic construct
MTSLPVASSPLQPQPSLRAALYLRVSTGRQAEHDLSIPDQQRQAEAYCAAKGWEVVEVFIEAGASATDDRRPEFQKLMEAASEKPGRFDVVVVHSFSRFFRDHFELEFNVRRLAKQGIRLISITQELGDDPSSVMMRQIVALFDEYQSRENAKHTLRAMNENARQGFWNGSRPPFGYRTVEAERRGQKIKKKLEIDPVQSETVRFIFELYRHGDGQSGGLGIKAIVNLLNAKGYRTQTGSRFSCKFIHDVLTRETYAGTHAFNVVEAKTGRKKASDEVITMDAPIIIPRSEFAEVQRRLKQNTPRVTAPRIVNGPCLLTGLAVCATCGGGMTLRTGKYGRYRYYTCATQARQGKTACKGRSIRMDLLDTLVMEHLATRLLTKDRLGVILEALLAHYAANHNRDAARKESLRNASREAEQKVQRLYAAIENGVVDATDPTLRERLDALKAQRDETRRLCAMAEAPAMVVPVITDEMIGRFSHDLRAKLADGPVAMRKEYLRAIVDRIEVDDREIRIFGRKDRLMNQLVSDRPKLNPKVPSFGREWRPVRDSNPCCRRERAVS

SEQ ID NO: 16942 - protein, 520 aa, synthetic construct
MNTAHSYIRFSTKQQASGDSFRRQTQLAMDYCLANDLTLNTQSYQDLGVSAFHSSNAFEDSGLGQFLVGLNEGKVVTPCTLLVENLDRLSRDSVETALTQFMNIIQAGVTIVTLFDKHVYKKGMTVVDYLTAILQMQRAHDESLVKSKRVSAAWEQRRKGLSATKPKTSPFWMDLSDDKKSYVLNDRVELVHRIFAHANDGLGSQVIAKMLNSEDIKAPRGGNWSDATITKTLNNISVLGQYQPRTRYDENRKRVDAIAGEPIKNFYPAIMDEEYFYLTQAAIKSRSKTQRRGATKNHLNVIKGVASCAHCGSSVRLKQQGHLYYLQCNQYHLGTCQGSKPINFRFLTDWLNEVWLSVEYAPITAQDTPENRKLKSANAKLEAVNETIKKLVSLVGDDSDEIIMARILEKKAEKKLLTIEIADLSEELAPYNLANEALRHRHVLVKTAFMTEHTEQTIKARCQLALLLNQLKGFKIHMDASKLVTFEVITAQNESKVYHSAINPYHVSSKHSGKVWSKGY

SEQ ID NO: 16943 - protein, 690 aa, synthetic construct
MNTKITPQHQSKPAYIYIRQSTLAQVRHHQESTERQYALRDKALALGWPETAIRVLDRDLGQSGAQMTGREDFKTLVADVSMGNVGAVFALEVSRLARSNLDWHRLLELCALTHTLVIDADGCYDAGDFNDGLILGLKGTMAQAELHFLRGRLQGGKLNKAKKGELRFPLPVGLCYGDDGRIVLDPDDEVRGAVQLAFRLFQETGSAYAVVKRFAEEGLRFPKRAYGGAWAGRLIWGRLSHGRVLGLIRNPSYAGIYVFGRYQYRQRITPQGEVHKHVQPVPKTEWRVHLPDHHDGYITPEEFERNQEHLARNRTNGEVTVLSGAAREGLALLQGLLICGDCGRALTVRYQGNGGLYPLYLCSARRREALATTDCMSIRSELLDNAIGEAVFTALQPAELELAVTALSELEQRDHAIMRQWHMRIERAEYEVALAERRYQECDPANRLVAGTLERRWNDAMLHLEAIRTESTQFQSQKARVATSEQKAQVLALARNLPRLWRAPTTSAKDRKRMLRLLIRDITVEKWSATRQAVLHIRWQGSACTDVTVDLPKPAADAMRYPAAFVERVRELSQHLPDRQIVAHLNQEGQRSACGKSFTLEMVKWIRYRYEIEATCFKRPDELTVQQLAHRLHVSPHVVYYWIERQVVQARKLDGRGPWWVTLDAAKEQQLEDWVRTSGHLQRQHSDTQL

SEQ ID NO: 16944 - protein, 515 aa, synthetic construct
MKTAIYLRKSRADLEAEARGEGETLAKHRTTLLKIAKEMNLNVLSVREEIVSGESLVKRPEMLALLEEIEDNKYDVVLCMDMDRLGRGGMKEQGIILETFKRSNTKIMTPRKTYDLNDEWDEEYSEFEAFMARKELKIITRRMQRGRVASVEAGNYLGTHAPFGYDIHRLNKRERTLTINPEEASVVRMIFDWYANEDMGANAIRSKLNDLGYKSKLGNEWNPYSILDILKNNVYIGKVTWQKRKEVKRPDAVKRSCARQDKSDWIIADGKHEPIIPESLFEQVQEKLNSRYHVPYNTNGIKNPLAGIIKCSKCGYSMVQRYPKNRKETMDCKHRGCENKSSYTELIEKRLLEALKEWYINYKADFEKHKQDDKLKETQVIQMNEAALRKLEKELVDVQKQKNNLHDLLERGVYTVDMFLERSNVVSDRITEITSTTENLKKEIKTEIKKEKVKKDTIPQVEHVLDLYFKTDDPKKKNSLLKSVLEKAVYKKEKWQKLDDFELVLYPKLPQDGDI

SEQ ID NO: 16945 - protein, 507 aa, synthetic construct
MKRVISYIRFSSERQAKGDSLRRQSKMVTDWLKAHPEYYLDQDLSFRDLGVSGFTGKHLKGGLGDFLTAIEKGLVKAGDTLLIESLDRLSRQDVDQASELLRNILRSGVDVVTLSDGEHYTRESLKDPLALIKSILIMQRAHEESLRKAERIQAAWDAKKEAAKAGIKISRRCPAWLKLNDDRKSFSVIPEKVETVKRCFQLRLEGKSIWEIVRTLNAEGHQTLNQYKAGKFGQTSVQDLLKNRSVIGYFTPKGCEEISGYYPAIIDETTFYKVQQLSYARYGRKPASDKPMAVNLFKGVIRCSECGHALIITGFSDTRNGIYRCPLRNENRCSAKGLSRKQTDGTLLALLSRLDRFDSDMTNTIDTLKLHREHISSNIEKLVQLSLEIEDLSAITSKLRQLKNELSQVDADIEKETQRLKSIDVGCLSDCDLTTKAGRIEAQLIIKSAVKEVVLNTAKRRCKVTFHNGKSITLPITENPSEDVTEAIQSLSEVTERGLIDVDEVIV

SEQ ID NO: 16946 - protein, 530 aa, synthetic construct
MSESKAVIYARFSSDKQREESIDGQIRECTKFAEDQGLEVIGTYIDRAMSARSDNRPDFLRMIADSARGQFQYVIVYQLDRFSRSRYDSAIYKNKLKKNGVRVLSAKEHIGDDPSSIILESMLEGYAEYYSAELSQKVKRGMTENILEGKWVGCRVPLGYKLTADKTLQIVSRDADAVRLIYTMYNANERIIDIVRYLNAHRYKTAAGRAFTRSSLTKILGNKIYIGTYEWDGHVVEQFAPPILDDDVWEAAQKRTQQHKLNPRPKRRSADYALTGLIYCGECGNPMTGQSGRSKNGSMYRYYRCSTKNNYHSRGKKQHIKCKSRNISREKVEDLVLDETVRILSNPKAVKIIAKQAANVQKIDPTAQEQARIAQERKTIQAKLENSIAAVEKGLCSKTIAENIERYESRISELDQQIDELKFAYAPIRIDAVAVEFFLKSLLNKKKDHDKYRLDMFRTFIRQVIVYADKIEIRYNYTACPQILKNPVSIALTGLPECSGNDSVVHQKNKKRLSHSDSRFLSIKFAVCSF

SEQ ID NO: 16947 - protein, 575 aa, synthetic construct
MTRVALYARYSSDNQRDASIEDQLRQSRDYAERQGWSVVESFTDRAISGASLIRPGIQKLMADVQGGRFDIVLSEALDRISRDQEDVAAVYKRLRFAGVQLITLSEGEISELHVGLKGTMNALFLKDLALKTHRGIRGRVEAGKLGGGNAYGYRVMKQLDARGEPIRGEREIVEDEAEIVRRIFREYAAGKGPQRIAADLNRKGIPGPTGGRWSDTTIRGNRAVGSGILNCELYIGIIRWNRQRRLKDPATGSRVMRMNPQSSWVRKEVPELRIIDDALWEAVKARQTELGEVYRKNIEGGLKALEQRATANALNATHRPRTMLSGLMFCGCCEQPYVRRGQDRYCCTSHLMGTGCTNSRTVTRDKLEERVVNGLKHRLMAPDKAAEAMRAFAEETNRLNRERRASSESDRQELAQVETAIREIVAVIEQGGFHRALLDRLTVLEAKQAELQESLARAPVDVPDLHPNIAELYRRKVERLSEALDHPEDRYEAIDAIRQLVTRVVLTPGAKRGEVHAVLHGDIVAIADWVLKETERPRKAGHPTHRAHALARVSEPVEARAWPGDPRLAGRSKRY

SEQ ID NO: 16948 - protein, 525 aa, synthetic construct
MIYSIKRKWGETMRRITRIDAVNDSSKKKLRVAAYARVSTGSQDQLVSLETQKIHYERYIKARPDWEYAGLYYDEGISGLKMSKRKGLLRLIEDCSKGLIDYIVVKSISRFSRNTVESIEVVRKLCQDGVYIYFEKENIDTGKMEGELLLSILSGLAENESRSISGNVKWSIQKRYLNGTFKICYPPYGYDNVDGKMVVNKEQAKIVRRIFAEIIAGKSSADIAKELNKEGIITKRGKRWGRGVVCEMIRNEKYTGDVIFQKTYTDSCFKRHRNYDDKNKYQMKNHHEAIISYEDFKLANLIVDANGCQKGIHKNDFKYKNRYPTSGKIICGECGGHWNRRKIGNMFGFACNTHINDMNACSMKSIKEDSVKAAFVTMMNKLTFARKSVLIPYSEMLRRSKEDSDVERLDEIETLLQKSSERRQQLMEFFSQGILDHEVYAYETVALSKEECRLMAEKNFLSVRMNGSQEWQSALVKLLRYTAKGNVLTEFEGGLFTEHVEKVVVYKRTEIGFVMKCGPIFRERI

SEQ ID NO: 16949 - protein, 575 aa, synthetic construct
MENFELKGFAKGKKQQKEQVGGNAIIYTRVSSSEQVDGQSLEVQIDKCREYANMHSYNIVGEFGGTYESAKSDKERKEFSRMLAFIKQSNKKGSSQVIKTVIVFSTSRFSRTGSTTIIEEVEARGAYVVSATSNYDPRTPVGKYMQLMELANARFQNDEKRATTVENSVKALLKGRWIGKAPRGYDQKTTKKEQIITINEEGKLIRKAFLWKANNKLSNEEIRHRLAAEGFHICKQKLSELFKNPFYCGYMAHKFLQGDIVQGNHPPLIPKEIFLKVNGELSKNHSGYEQKIDKEYAPLLGSIKCPCCGNNLSASISTKMRKKFGRTDIGYYVCSRKGCKYNSSTKNVHEAFEEEANKYVLSDKVSELLKLQLTITFENMNKENKERAQSIKSNIKAKEKELEQVETNYALCSDTKKQEICVKVMTRLEAEIRGLQVEYSKVNTEILNLDKFIDYAFAMRSNLFNLWELQGLEGRRRLQKLVFPDGFIYDKNNEHIEPKTVNQFFMLNYSFPTNNRDKKRETNSENHRSSLQVLEAGLEPAQPQWPKDFKSFVSTIPPFEHPFKESGKRDSNSRP

SEQ ID NO: 16950 - protein, 558 aa, synthetic construct
MKRVIGYIRVSTDNQDLERQRVLIRKYCENKGYSLLRIEEDYAISGTVSNRNGLNSILNITNSVADMVVVSELSRLSRQDDIFETLTQIHTIIRNVDLVILDEPDKVYEAGKTIILSDFLMLAIKAYGAADERKKIVSRMTTGKDSKVQAFPLMLTDSNIPTGFKAVPNPNYIKGATPKMLLVEDEERMQLVRDIFNYVANGLSLGKTAEKLNMLGYRTARNKPFYEQSVRTIINDSIYNGVRYWKGMKLELPVKFISDEIWNLAHKKVQENKNYSGEAQKHYNPLKGIIKCPCGQTSMYGRTSSCITYRCLDRIKMGIKSPCTNVGIKAETLIYAVWKDVRLRTLDETYQAKSNEKIAEIEAENIKLTQSIKEKDSEIAKLQSDLKTVIDNVMASTNITIVKALNGKADSIDSQIKSIEAEKKAIDEEIASNNRRIADEIKSQSRKELDSLSLEGKGEMFRELLSKVVYYSVSLNSGFIVITYKNDLETIIAYHNRNKPFLWALPITFRFNKVKRTVIVPTLPEQPKMTSFVLERIKEKEYTFKQLQESFNLEEYKI

SEQ ID NO: 16951 - protein, 679 aa, synthetic construct
MNNMDKKVLIYCRVSTQQQTTDRQKEELLKFAAENHWNVEEEDIFIDVISGFKKGEFRPEYVKMLERVEYGDIDIILFSEFSRLARNATELLEQIKLFIDKGINLYFDKQKLWVRDSNKDVGSIILLHVLAVMSSYEIELFVERSLSGKITKVQAGHGGGDERAYGYMHNENKQIVINPIESKIVTRIFEMYVGGYSSIQISEILNAEKVPAPYVRKLNEYKKNREAKGLEVKEYKFDTDNLKWRISTINRLMHNELYKGNRRITFYKPDPTNPLPLSERQDREIVYEYSEHVESLRIVSDELFQQAQDKLSKAHYNKNNAVRHENLLKHLMVCGECGANFSVGKSNETSKNYISGGRTYKCYGRVNRKDKPRTCTNGAELRQWKLDGLVLQLSIQMFAEINIQQTNILKIENLGKEIEELVQIKSSKNTELVEAENLYKKTLKRLIAIEDDEVAKNLISDAKHKYDETKNVLNKTMDKLSREITTKRITIDNLKRLNANPLLINKMDEIRKNRDLIKTMVDEYIDKITIFRLHELWLLVVVSYKGGEEMWGTIKCARYKKEEMFYSELHCHYGVEFQGWLLNNTEHCFSYDKSTRIITYHGGSKIYVEFKSGEYDYDTFNQMIQETGWMGCFPFYAYEDSDKNLSVPFNEEFRKSLQENRIDWKAHNDKVLERLLSKS

SEQ ID NO: 16952 - protein, 604 aa, synthetic construct
MVKIIGYARVSTTKQDLSRQKLKIKEFCENNNYELIEIIEDFGISGVVADRKGYIELQSKTYKDADMIVISELSRLSRQEDVTETVYNIQQIINKGLSVILLDSPSKIYEANKLLDITEILILTIKAWAAAQERLDIKKKNQDGKQALFQAYPYAVVDQKIPYGYKAVPNPNGKRPKYILEEVPEEVENIKRLFALVNSGKTLGAVARYFNERNITFRGYYSTVAILSNYIHSDIYRGIRRRTQRLGREEPYTIEVRIKPIISEEDFMKAQELIKNNYKSTPTGKVNHNPLKGIIRCRCGRAMTVKDKKPAAGISKLTYRCSCVDRKSHPDFCKYNIDEVSYDLTNEILYSLFKSMHTAEYINFFRNQTDNRVTELQEEIAGIEKRLSTLYLDKENLSNESQDNANKFLLTTNPTLLNIIQEKQNQLDEKIKSIDKEIIKYKKSQSKKMADIERIKDNNGKEKLQNLSIEEQGELYHKYLERVNYIPVTTMQGYYIVQFLNGIKFYIAITKVRNIAMASLLLDNWTIDEKGLITANYDTLKSSDMKNFSIEIIRKEKTMTLQKYLKSDLAKERALHLDLSYRERYLEQLHKAGLDGRHRPLKKE

SEQ ID NO: 16953 - protein, 575 aa, synthetic construct
MRGAIYSRVSTLDQDYKRQTNELKEYAQYMGIEITHVFEEKESGFNDDRPEFAKLKELTKDDIDIVLVWELSRLSRRSLYLQQQIEYFTKKGICVYAKKENLRTLDEKGEEDRNTKFIIGIIAMIAEQEVATLKSRSISSKRNKIINEGNSYTYKAPYGYDYSTETKKLSINEEEAKTVRRVIELSANGYSSARIALILNAENIPTRSKTKIWTMGTINTMLSNPVYKGKAEYMLKGTEPKKGKRYKRPIDVAIVNTPAIVSAELYDLSREKMKGRAFRSKSTGVKHFQLLRGLIYCPYCKIKYTYEGGRDLYVCHDKHKKSKNKPDCFSKAIKATRIEKIVWELVKLLFSQELATGKAQEQEEPLRQEIEAHKKLLMGIEEKLNDLTAQTNAIVNAAIDIKREMPNMPDLYINKIREAASLDKESKKYQYEKDRLNKLILSCEDKIKAINSLSNEKVLVDSITDDMERYELIHKVIDHMIIYGEDSAYSLVVVTFKTGQEVYIGYKSKGYQYYTIFYPSQSVWVDTKKRLGCIMTMKAPTSLEFSLETLTKEYSITDFVKMFNTPENRHYYENQ

SEQ ID NO: 16954 - protein, 481 aa, synthetic construct
MITTNKVAIYVRVSTTNQVEEGYSIDEQKDKLSSYCDIKDWNVYKVYTDGGFSGSNTDRPALESLIKDAKKRKFDTVLVYKLDRLSRSQKDTLHLIEDVFIKNGIEFLSLQENFDTSTPFGKAMIGLLSVFAQLEREQIKERMQLGKLGRAKSGKSMMWAKTSYGYDYHKETGTVTINPAQALTIKFIFENYLRGRSITKLRDDLNEKYPKHVPWSYRAVRTILDNPVYCGFNQYKGEIYPGNHEPIISKEEYDKTQSELKIRQRTAAENVNPRPFQAKYILSGIAQCGYCGAPLKIMLGVKRKDGSRLKKYECHQRHPRTLRGVTTYNDNKKCDSGFYYKDKLEAYVLTEISKLQDNAGYLDKIFSGDNAETIDRESYKKQIEELSKKLSRLNDLYIDDRITLEELQSKSAEFISMRGTLETELENDPALRKNKRKADMRKLLNAEKIFSMDYEGQKVLVRGLINKVQVTAEDIVINWKI

SEQ ID NO: 16955 - protein, 481 aa, synthetic construct
MITTNKVAIYVRVSTTNQVEEGYSIDEQKDKLSSYCDIKDWNVYKVYTDGGFSGSNTDRPALESLIKDAKKRKFDTVLVYKLDRLSRSQKDTLHLIEDVFIKNGIEFLSLQENFDTSTPFGKAMIGLLSVFAQLEREQIKERMQLGKLGRAKSGKSMMWAKTSYGYDYHKDTGTVTINPAQALTIKFIFESYLRGRSITKLRDDLNEKYPKHVPWSYRAVRTILDNPVYCGFNQYKGEIYPGNHEPIISKEEYDKTQSELKIRQRTAAENVNPRPFQAKYILSGIAQCGYCGAPLKIMLGVKRKDGSRLKKYECHQRHPRTLRGVTTYNDNKKCDSGFYYKDKLEAYVLKEISKLQDDADYLDKIFSGDNAETIDRESYKKQIEELSKKLSRLNDLYIDDRITLEELQSKSAEFISMRGTLETELENDPALRKNKRKADMRKLLNAEKVFSMDYESQKVLVRRLINKVKVTAEDIVINWKI

SEQ ID NO: 16956 - protein, 481 aa, synthetic construct
MKTMNKVAIYVRVSTTNQVEEGYSIDEQKDKLSSYCDIKDWNVYKVYTDGGFSGSNTDRPALESLIKDAKKRKFDTVLVYKLDRLSRSQKDTLHLIEDVFIKNGIEFLSLQENFDTSTPFGKAMIGLLSVFAQLEREQIKERMQLGKIGRAKAGKSMMWAKTSYGYDYHRETGTITINPAQALAIKFIFESYLRGRSITKLRDDLNEKYPKHVPWSYRAVRTILDNPVYCGFNQYKGEIYPGNHEPIISKEEYDKTQSELKIRQRTAAENVNPRPFQAKYILSGIAQCGYCGAPLKIMLGVKRKDGSRLKKYECHQRHPRTLRGVTTYNDNKKCDSGFYYKDKLEAYVLKEISKLQDDADYLDKIFSGDNAETIDRESYKKQIEELSKKLSRLNDLYIDDRITLEELQSKSAEFISMRGTLETELENDPALRKNKRKADMRKLLNAEKVFSMDYESQKVLVRRLINKVKVTAEDIVINWKI

SEQ ID NO: 16957 - protein, 452 aa, synthetic construct
MKAAIYIRVSTQEQIENYSIQAQTEKLTALCRSKDWEIYDIFIDGGYSGSNMNRPALNEMLSKLHEIDAVVVYRLDRLSRSQRDTITLIEEYFLKNNVEFVSLSETLDTSSPFGRAMIGILSVFAQLERETIRDRMVMGKIKRIEAGLPLTTAKGRTFGYDVIDTKLYINEEEAKQLQMIYDIFEEEKSITTLQKRLKKLGFKVKSYSSYNNWLTNDLYCGYVSYADKVHTKGVHEPIISEEQFYRVQEIFSRMDKNPNMNRDSASLLNNLVVCGKCGLGYVHRRKDTVSRGKKYHYRYYSCKTYKHTHELEKCGNKIWRADKLEELIIDRVNNYSFASRNVDKEDELDSLNEKLKTEHAKKKRLFDLYISGSYEVSELDAMMSDIDAQINYYEAQIEANEELKKNKKIQENLADLATVDFDSLEFREKQLYLKSLINKIYIDGEQVTIEWL

SEQ ID NO: 16958 - protein, 558 aa, synthetic construct
MTKLYSYIRFSSTRQADSSSFERQKRTAKEIAEKYGLELVTSYQDLGVSAFKGANSKTGALSRFMEEIGRSVPIGSWLVVENLDRLSRQSIIEAQELFLSIIRRGITIVTGMDGKVYSKESVNANPLDLLLSVMMFARANEESQTKRNRTNSSALLKIKAHQQNPQSPAVAIEEIGKNMWWTDTTSGRVLPHPVYFPVLQKIVQLRQEGHSAGVILDYLNEHHEPPAPTSNKKHGKWSRAMVSRLFNTKALIGVKTVNVDGVEYELRDYYPRVLSDSEFYFLRKNIVKKAWDYSHDKEKVIPLLSGIGVLRCVHCGATMVKQTAANGKREQYRYCCDGRKSGRTDCPYPNWGFRAVTLEGAVLQLLADKIWIAEDKTNPIPEIQVKIDEISRKIDNLINLSAMTGATKELANQITDLNSQREALHEEIRLFEREMYSVDSQGWDKLAQFDLSDVQNEERLKVRLKIKGALHEIECSRIDSKKNLFVLVYLDGLRQRLVIENNRGLKKGQIFVDLKTINDRQILESAGMVLHPCIEMIIDSDWKAPEEIPSLLSEEFGI

SEQ ID NO: 16959 - protein, 522 aa, synthetic construct
MAVNANVTVIPARKHKRKSPDEEKPKLRVAAYCRVSTDSDEQATSYDAQIEHYTAFISGHPDWQLAGIFADDGISGTNTKKREEFNRLIDECMAGNIDMVITKSISRFARNTLDCLKYIRQLKDKNIAVFFEKENINSMDSKGEVMLTIMASLAQQESQSLSQNVKLGLQYRYQQGEIQVNCKWFLGYTKDENKKLVIVPEEAEIVKRIYREYLEGASMLKIARGLESDGIKNGAGRDKWHTSNINQILRNEKYIGDALLQKTYTVDFLTKKRVKNNGLVPQYYVENSHEAIIPREIFMQVQEELIRRRIVHTSPNGKKRTFSSNHCFSQMIICGTCGEVFRRVHWNNRGKKSIVWRCVSRLENTGLFCDARTVQESSIEQILIKAINETLGEKDTFLSILENNIATVISQENNQTLADIDKRLGELQAELLKLASTKSDYEDVADEIYSLREEKQRVQVDSASKDEIKKRIVDMSAFLKEQPTIITEYDEALVRRLIEKVSVHEDKFTVEFKSGLTVDIKE

SEQ ID NO: 16960 - protein, 507 aa, synthetic construct
MKRVISYIRFSSEKQAKGDSLRRQSKMVTDWLKAHPEYYLDQDLSFRDLGVSGFTGKHLKGGLGDFLTAIEKGLVKAGDTLLIESLDRLSRQAVDRASELLRNILRSGVDVVTLSDGEHYTSESLKDPLALIKSILIMQRAHEESLRKSERIQAAWNRKKELISEGIKISKRCPAWLKLNDDRKSFSVIPDKVETVKRCFQLRLEGKSIWEIVRTMNAEGHQTLHQHKPGSFGQSSVQDLLKNRSVIGYFTPKGCEEISGYYPAIIDETTFYKVQQLSYARHGRKPASAKPLSVNLFKGVIRCSECGHALIITGFSDTRNGIYRCPLRNENRCSAKGLSRKQTDGTLLTLLSRLDRFDSDTTNTIDTLKLHREHLSSNIEKLVQLSLEIEDLNAITNKLKQLKNELSQVDADIEKETQRLKSIDVGCLSDCDLSTKAGRIEAQLIIKSAVKEVVLNTAKRRCKVTFHNGRLIDLPITENPSEDVTEAIQSLSEVTEKGLIDVDVVEI

SEQ ID NO: 16961 - protein, 507 aa, synthetic construct
MKRVISYIRFSSEKQAKGDSLRRQSKMVTDWLKAHPEYYLDESLTFRDLGVSGFTGKHLKGGLGDFLTAIEKGLVKAGDTLLIESLDRLSRQAVDRASELLRNILRSGVDVVTLSDGEHYTSESLKDPLALIKSILIMQRAHEESLRKSERIQAAWNRKKELISEGIKVSKRCPAWLRLNDDRKSFSVIPEKVETVKRCFQLRLEGKSIWEIVRTLNDEGHQSMSQYKPGKFGQTSVQDLLKNRSVIGYFTPKGCEEISGYYPAIIDETTFYKVQQLSHYRYGRKPVSDKPLSVNLFKGVIRCSECGHALIITGFSDTRNGIYRCPLRNENRCSAKGLSRKQTDGTLLALLSRLDRFDSDTTNTIDTLKLHREHISSNIEKLVQLSLEIEDLSAITSKLKQLKGELSQVDADIEKETQRLKSIDVGCLSDCDLTTKAGRIEAQLIIKSAVKEVVLNTAKRRCKVTFHNGKAITLPITENPSEDVTEAIQSLSEVTERGLIDVDVVEI

SEQ ID NO: 16962 - protein, 686 aa, synthetic construct
MNKIRAEHLSRLAYVYVRQSTLDQVQHNRESQLRQYGLADRARVLGWPEVTVIDDDLGRSGSGIHRPGFERLLAALCSGAVGAVFCIEASRLARNGRDWHTLLEFCRLVGTILVDEDGVYDPREPNDRLLLGMKGTLSEMELSTFRQRSQAALDQKAKRGELFMTAPIGYMRVPNNRIEKDPDLRIREALDLVFRKFREFGSVRQVLIWFRQERIELPAASYGPEGRYIVWKLPVYNTLWHVLTNPTYGGAYAFGKTKTIVRIESGRKRLYSGTHVNREEWQVLIVEHHAGYISWDEYESNRKLITDNANMKGNMVRGAVKRGGLLLAGLIRCGHCGRKLHVAYSGTKGDIGRYSCQGSMINHGGPRCISFGAVRVDQRVAEEVLHRLEPLGIRASLDAIERKRLSEDERVRHKELALEQARYEAARARRQYDAIDPDNRLVASELERRWNDALATQAQRQCELDALREQPADSLSATARDELMRLGTDLPRLWNHPASAIEIKKRILRTVLKEIVVTKQDHTIRALLHWQGGDHTELEFETNRTGQHRWATDVETIDIVRALARTLADQGIAAVVNRLGKRTAKGLSWTAARICILRKDHAIAAYREGERQERNELNVTEVAALLGISTPTVFRLIRIKRLPATQACLGAPWILRRVDVETFITARSAIEGPQSADPNQLSIDLQ

SEQ ID NO: 16963 - protein, 685 aa, synthetic construct
MSKIGAEHLSRRAYVYVRQSTLDQVRHNRESQLRQYGLADRARGLGWPDVTVIDDDLGRSGSGTLRPGFERLLVALCSGEVGAVFCIEASRLARNGRDWHTLLEFCRLVGCLLIDEDGIYDPRQPNDRLLLGMKGTLSEMELSTFRQRSQAALDQKAKRGELFTSVPIGYVRAQGNRIEKDPDVRIREALDLAFRKFREFGSVRQVLLWIRQERIELPAVNYGPDGRNIVWKLPVYNTLLHILTNPTYGGAYAFGKTRTIARIVDGRKRVFAGNPLRREDWQALIIEHHAGYISWDEYEANRKLITHNANMKGNMVRGAVKRGSSLLAGLLRCGHCGRKLHVAYSGTKGTVARYNCQGSMINHGGPRCISFGAVRVDHRVSKEVLQQLQPLGIRASLEAIERARTEQDERVRHKELALEQARYEAARARRQYDAIDPENRLVAAELERRWNETLKTQAELQTELDFLREQSSRALSAGARDELLRLGEDLPRLWHHPGSSVEIKKRILRIVIKEIVVTKKDDTIRALVHWQGGDHTEIVFEKSQTGEHRWTTDVETIDIVRALARTLPDQAIAAVINRLGKRTARGHTWTTARVCTLRNHHHIATYREGERQERGELTVAEVSGLVGVSGPTVIRLIRVRRLSASQACPGAPWIIRQSDVDAYLARQAESGPQSADPNQLSIDLQ

SEQ ID NO: 16964 - protein, 433 aa, synthetic construct
MSQKISAEHLCRGAVVYVRQSTMSQVVEHTESQNRQYALAESARAMGFASVTTIDDDLGRSGSGSVERPGFQKLVASVCAGSVGAVFCLEASRLARNGRDWHHLIDLCALVGTVVVDHDGIYDPRLVNDRLLLGLKGTMSEYELSLLRQRGIAARDSKARRGELRFALPPGYCWNELGQIEMDADERVAEAIRVLFRKFRELGSARQVLLWAIQSDVKLPVTRHGPAGIRIEWSRPAYHTVVQILEHPVYAGAYVFGRTTHRTAVIDGRARKTEGHSKPMRDWSVLLRDHHPGYITWDQFEEHQRMIAENTHMKKRASRRSARGGRALLTGLARCGRCGRMMRVNYGTRAGHAHRYYCRGDEAHVGAFRCIGIGGIRIDKAVAAAILEAVSEHAVEAAVRAAQQTSRAGDDVRRAFGRRQLSWPVVDDCFGRW

SEQ ID NO: 16965 - protein, 527 aa, synthetic construct
MKKVYLYIRVSTDEQKKKGYSLPEQEERLKNYCDFHGLEIVDIYREDHSAKNFNRPAWKRLLSILKKRGKTKSKEEVKVLFVKWDRFSRSVEAAYAMIGILRGLYVSADAIDQPIDFGVPESAVMLAVYLSIPEAENLRRGLNVLDGMRRARKQGRWMGAAPKGYVNRITPDGERKYITPKPGEAEIMKWVFEELAKGVQPAEQIRREANEKGLKCERNNFWKLIRNPVYCGLIIVPQYKNEEMDIVDGQHEPLINKTLFYRVQDVLNGKRRPKTTKIKASEQTLVLRGVIRCPQCTRMLTGSGSKGRHGGRYYYYHCSCNECKFRFKADVVNNYFEREVMQYSLRPETGELFKLVVKDVFQSQNEVEWDDRRDISRQIEEKEAMIAKARQRLMQDEIDAEDFKIIKTECRADVRELEDRLAELPAKTQTMKTLDVLLDRVVTKFMNVQQRYYNAEPHEKRKLVASLYPDFVTFNGEQHRTPRPNEALEVILLINRTLNGIKKGEKSSILDFSPKVARRGIEPLFQE

SEQ ID NO: 16966 - protein, 569 aa, synthetic construct
MKAVGYIRVSTDHQDLSRQESLIRQYCQKNNYCLIKIIGEKVSGAKKDRKSLAELHILDKSLADILVVSELSRLSREADYANVIFIINNILQNGLDVVFLDEESKVYKAGKSLDIIDIITLAIGAKTAADERMKIATRMKTGKTTKIQIEPYMYTGGTAPYGYKIIDNPLYHGQIDNIPAKRLITEDEYQMSNVRLVFQMVLNGTTLRDIAEHLNKSGTLTKQNKPFCETSISKMIKNPIYNGRRRFKGLPLVIKKIISDEDWNKAQICVSQNKLFKDIATSNFNPLKGIVFCPCGYALMLHQMSPRSGQKYYVLACCRKNNKEYRKKCRNMGIKSDVLFKSVWNCVKRSLTLTEYSEKSNKKSEQINTIITQLNQQLVNNHKSMDNIKEEMRHIENAIIKVSDIPSLVDKYKIDYKKKQDEISSKEDSNKAIEEEITKNKQQLERIQKSQAYKQLHDMTDKEKSEIYKNVLDRVVYYSETMFTGFIVIDYKNGLQNIVVSKRHYNNLTLLLPTTFKFNKETRKVVIPLHKHDAKQPYNLDFIKEQEFSLAELSSSYDLEEWKINIDDK

SEQ ID NO: 16967 - protein, 557 aa, synthetic construct
MKAKANLALATPGRAALYLRVSTGRQAEHDLSIPDQRRQLRAYCEAKGIEVVAEFVEPGASATDDKRPEFQKMMDAASEKPAPFDCIIVHSFSRFFRDQFQLEFYFRRLAKNGVKLTSITQDLGDDPISGMMRQIMALFDEYQSKENAKHTLRAMRENARQGYWNGSRPPYGYRIIAAETRGQRTKKKIEPDPMLIDNVKLIFRLARVGDGDGPIGSRQIAGYLNDRGIRTQTGGRWGVGGVHQILTRETYIGKHRFNVSSWRNGVEKPADEVVEVEVEPIITVEEFEEVRDIMRSRSPQLRAPRFVSGPTLLGGVAFCADCGGAMTIRTSGKGTEYRYYTCCTAARQGPKGCKGRSIPMDELNDLVVTNVVERLLSPNFLEEALGALLKRRDDAAERETGRIVTLKRNALDAENKLTRLYEAIEAGLADLTDSNLKGRIAELKRIRDSAQADVERAEGRRGERIEITPEALRTFAAAAKERMQDPDGSFRRNYIQQLVQRAEVGTDEIRIVGSRARLLQTLVASGGKPGVETAAHGVRSFNLKWLPGPDSNRRPVD

SEQ ID NO: 16968 - protein, 537 aa, synthetic construct
MKIADLYIRVSTDEQADKGYSQRDQHERLEKYCQQNEITIGQVIFEDHSAKNFNRPEWNNYIQNIKKRSLRSNLILFTKWDRFSRNAGDAYQMIKLLLSNNISPQAIEQPLDMSIPENKMMLAIYLAAPEVENDRRALNTFYGMRRAQKEGRLMGTASYGYINKCSEDGRKYIALKEPEASNMRWAFNEIAKGKYSINQIRLKMNTMAGTKISRTSFYRAIKNPLYCGKIYIKPYKDEDACTVDGKHESLISESLFNKVQMVLSGITTTERPKGKINAAKEFPLRGFLKCPRCGGHISGSGSKGKKSIYYYYHCNSTCGYRYRSNIINCAFEKELQKYEYHEGVNTLLKEIIFTNFKYIQEDIDAQKKEISSQIQSLNNRLNNAREKYLEDRLDYDDYQLIKNECKKKIDDLEISLQNHKLSNKNSDIKLKLDRVIKIVPNLYKLYVQGNDETKNTILCSILAEKLEFHENSFRTPKLNSALSHILLISNKLKDKKKGKSTFENAFSRKVTAEGFEPSLSEPKSEVLSIKLCSRIHD

SEQ ID NO: 16969 - protein, 489 aa, synthetic construct
MEAVSAKPKRFEVVVVHSFSRFFRDHFELEFNVRRLQKLGVRLVSITQELDDSPSSNMMRQILAMFDEYQSKENAKHTLRAMRENARQGFWNGSRAPFGYRAVEAEKRGQKVKKRLDIDPVQAEAVRLIFDLYLDGDGQSGGLGLKALVNRLNSQGMRTQSGAKFSCKFVHEVLTRPAYTGNHRFDVTEAKTGRKKPDEEMIAVKIPAIITASRFAAVQDKLRLNAPRVTAPRIVNSPCLLTSMAVCATCGGGMTLRTGKNGRYRYYTCASQARKGKTACKGRSIRMDLLDTLVMQHLAERLLTKERLGEVLGSLLAQYAANQNSDAARAESLRTAAREAEQKLHRMYAAIEDGIIELSDPTLKARLDALKARRDETKRLSEMADAPAGIAPHITEEMIDNFARGLQGRLLDGPVAMRKAYAQAIVDRIEVDDREIRIFGRKDKLLSQLMSEKPKLRSKVLSFGRQWRPQGDSNPCYRRERDVYKTVSV

SEQ ID NO: 16970 - protein, 573 aa, synthetic construct
MAKAYSYVRISSKVQAKRDGVRRQLEVSRAYAEKAGLTLDEELTDIGLSAYHGKHKAIGALGGFLDLVKTGKIEPGSVLIVESLDRLSREDVLTAQSQLLGILSADIDVATLIDNQRYSKGNDYTQLIISLTIMARAYDESKTKSERLKAAAAKRKTDILAGQKRYVTNPPMWLTNFQTDGQWDCVVNGFGSVVKEMFELYDSGLGGHSIARLFNERGVPTFKSATSEVETKGVWYSPTIMNLLKHEAAIGTYRAGDQVAENYFPAVVDRDLFYRVQDRLKSQNNVRRGRKGDSYTNLLQGLAVCHHCGHAIRLNRGGVKNKVLYLSCQTRFIGSNCDSEGRKFLPYQAFEDAILRLVMDYYIDQSKGGNKPKDSIASDLTSHRQTRADMARRIANIRAVIETAEDDDDRISFMTRLNDLRKDTASVDAKIEALERQLRDFDETDKAEKNIHDEIRSEVSKWSSMSKEELFVSRSKIARNLRRVITTVQVDVPGEQVIVVVGGFIRWWIIGVDGTVRTTGDWSALPFDILVARSKEFFGDRIDVGAMRAVYDRIDLPRADPALWDNERAARGL

SEQ ID NO: 16971 - protein, 537 aa, synthetic construct
MQENRAAIYARFSTDLQNERSVDDQIAVCREFAARNGLVVAGEYHDKARSGASIFGRDGLLGLMEDARDGKFKTVIVEALDRLSRDQEDLAGLHKRLSFAGVEILAIHDGKTDAIQVGIRGLVSTLFLADLKNKIRRGMTGVVRDGRHAGGKAYGYQPTLGQPGVMQIFEPEAEIVRRIYRETIEGKTSREIAAGLNEDKIMPPRGAQWNASTINGSAQRGYGIVRNPLYAGEIVWNRVHMVRDPETGKRISRPNPESEHKRAPAPHLAIVDQETYQRALALLEGKSRRGQGGSNTRNPKRLLSGILRCGRCGGGMSIHDHSGNAVRIRCSRSTQSGVCGNDKRYRLDKIERAVINGLKDQLSHPEILVEYVKAYREERRLDVDNFVRERASYERRVAEIAGQLDRLMQAMTRGILPIEAVEAQYGPLKAEKEEIEAKLANIPTTPVVELHPAAITRYKHSIDALAERLTSMDRITDSGVHVAFRDLVDHVTVLDREDGGVEAEIVGHIAALVGGPAEMLGGRMVAGEGLEPPTRGL

SEQ ID NO: 16972 - protein, 565 aa, synthetic construct
MTRVALYARYSSDNQREASIEDQLRICREQAKREKWKIVGTYKDAGISGASMILRPGIQALLQDAQAGQFDIVLAEALDRISRDQADVATFYKHLKFAGVPIVTLSEGEISELHVGLKGTMNALFLKDLAAKTHRGIRGRVEDGKSGGGLCFGYNVVKQLDARGDPIRGDREINDAEANVVRRIFREFAAGVGPRTIARTLNEEGVPGPAGKLWSDTTIRGHVKRGTGLVNNELYIGRLIWNRLRYIKDPSTGKRVSRLNPESEWIIKDVPELRIVDDELWHSVRVRQGEIAEKFANVTEAVRKHHKKNRLNGTRRPKSLLSGLVFCGCCGGPYSLRGADRFACSNHISKGACSNSRTIPREDLEARVLSGLQDRMMAPEIVEEAMRAYAEETNRLNRERRSSGDAWKAELVKIEKQIRGIIEAIKAGMFHESMKAEMDTLEARKTELNTLLADAPEDTPDILPSASAIYAKKISALTKALNRKEERQEAAQTLRGLIEKISLTPGPERGEIYATLHGELGTILNWTERQAIEKAVKTTKPAADATGLSLSVVAGAGFEPAAFRL

SEQ ID NO: 16973 - protein, 532 aa, synthetic construct
MKRAALYGRYSTDLQNDRSVEDQFRLCQDFAGRLDATVVKQFYDRAKSGASMFGRSGLADLMSAAERGEFDILITEHTDRVSRDIADLAHVHKVLRFRGIEMHCVNGGLMDTVQIGMYGVVGQMQREEGARKVKRGMMGVVRSGRNAGGKAYGYRPIAGKAGELEIVEEEASIIRRIFDMYAAGISPRTIAAILNREAVPAPRGSQWNASTINGSHQRNNGILRNSIYAGKVMWNRVHMVKDPATGKRLSRANEQDQIETIDAPHLRIVADDLFETVQGRKAATAKMAQKAPRSRRLLSGLLRCGACGGGMVMIGPDRNGPRIQCSSHRESGVCHNTRRYYLDRIEALVMNRLRFIFADTKYIESYINAYQEEQKKLRSTALRDRTGATRLLEEAKAEITKVISLMAKELIGEDEGVALLAPLREQRDAQKAILEAIEEPTNVIELQPKAVVRFRENIESLTQIIAKEGAEPSPELVGPFREIVAAVVVHQTDSGQPYEIGIKGRLASLIGQELSVIKVVAEEGFEPPTQGL

SEQ ID NO: 16974 - protein, 662 aa, synthetic construct
MLAIYARISQDKGDNQSSIENQIHFGKQYADKLKLNYKIYQDIGVSGTLPIEQRAELFRLIQDIEAKEITYVFSYDQSRIERDNVVWNSIWLLFQQHNIKLYFHSGGEFNFNSPDTFLSSNVLSVFNSFFVKLTKQKVVNALQKNVETGRVHASPPYGYTKDINKLLIIDKEEAEIVERIYEMSLEGKGTDKIAEILNLEEVPTAYSKLEKGGIYKVRDRYNPNLITEKKKSDAKWRGRTIQGIIKNTIYKGQRFWRGNYYPAPAIFDEVYWQKVNENLQKNRNNTGKKVEHKYLLKGIIKCNCGRNMYGRTRVSKRDHTYICSSRRYKGENCGNRAINIDKIEKIIWEHFFIRKELLELLNNSTDSQNEILEDLKQEESLLDKKIEDNQKSRSNLVRAISNGVINDEDARDEISKIKENLTKYNLDKALIASRVADVQNFESLIVDTRTDFENFSNDIDFDTKRSLIHKYVERIIVVYDDGREHKKGFKYPPYTYHIQIEFKNGIVKENYIYNVKDNIILSLRDRAFKLLTENGIVETMDSDMIEKSIIPLSNGKLLLKPFLGKDNCTYILDNTIIPHGDLRTWNVKKVVDFYTLSKTWLCKESGINILTENKTDESYQWFVRNYKNYQDKPLIEWVTFLFEALDYTDLLITPKAKSKLKE

SEQ ID NO: 16975 - protein, 533 aa, synthetic construct
MTKKCFPYVRFSSTRQEDGSTRTRQNELIEAFVAKHGLEVDRHLEDAGTSAFHGKHAGSDGVLGQFLKEVRKGEIEKGSYLLIENFDRLSRDKIVRSNKIFTDLLFSGIKIVILDKNKIYDADNLDFGDWITALVEFERANAESQRKSDFSSKAWKLNRDKMHNGEIVTKKVPTWLKVENNTFIIDEVKIDRIRTLFRLSLSKGLQEATKEYNSLYGEKLAIHQAQYLLSNRKLIGEHQPQKIHYNENGRLIRKDEGNPIPDYYPQVIDEDLFLKVQSVITSRKPFSGRYSAQRYNVFRDLIFCRFCGGTIRYMNKGERDYFICTNSMTGKCGLKGQQSIRGKKVFSRFFKFTNGINIGTLLEENTNADEIKNELMKLENQKTKISNRLDDFKSQIKKMIMEGETIPETYNEIIVDLENSIIKLDDEIEIKNKELNKIISSFKSFYDLKEIDIEKIIYDKSQEAIEKRVQYNNELKNIIKKIQIDYLNDILHVEFSNGVNRHILNDEFANEYNKEEIENSWASVVKSIAQKTN

SEQ ID NO: 16976 - protein, 582 aa, synthetic construct
MTKPRAYSYVRMSTDAQLKGDSLRRQTEASKLYAEQNGYELIDDFKLEDIGVSAFNGRNVSQGALGRFLDAVQQARVPHGSYLLVESLDRISREPPQVATGLFLQILAAGVNIVTLTDGRVYRTASSDPTDLIFSVVIMSRAYEESLTKSLRVGAAWENKRKNLTSKKLTEVAPAWLALSSDRSSFDLIERNADTVRRIFDEADAGKGSYQIARGFNLEGLPPFTRSNGWHESYITKILTTRAVLGEFQPCKYINGKRVPHGESIEGYFPPIISREQFERVQLARKARKNRGSGRKGKSHVNLFSGVAKCGYCGSSMYVVDKGPKPKGGVYLRCDSARRGNGCKASAWPLAHFETAFLYFVRELDLAALLSAEKRQQELRQTEGALASKQADLEKQKRVREDAFALLATSSASYDFVGQKIDDATVAIGKIECEIGALKDLLAGYRTASVRVDLDIKSIIEKLLSESDAQFENRVKVADWIRTNVNSLRVYADGTDGPADRIAEMRGEVETALDPEALAIVDRITREARRKGALTSDFDRRFVVSFDHGGFRSVRIDRDDPTKHVTSIHYAEGEWSIDDRRL

SEQ ID NO: 16977 - protein, 538 aa, synthetic construct
MSTSEQLKGFSLERQRNLIADFARKNGLSLEDSHILEDIGRSSFSDDTEQKELTKFFEDLGNDKFQKGDVFALENIDRLTRRGPIDALMKVNQIISKGLKLAIISDKEQRILEEIDVFSIITLSIDASRANKESQVKSDKGLQNWAFKRELAATHKIAMTAQAPAWIDTETYYIMDETKNKQVKRRRYVLNEDRAKTVKLIFELFQNGNGSLKIKNILNEQNIPTFKGIEYWEPSTISKIIRNPATYGMYQPKKQNTGKRDLVAIGEPIENYFPAVIGKEVFDQCQQITATNTTRKGRRGKLFTNLFTGLLKCADCDGPIHLLNPGIDKRAKNPKPVNYLICKKGKFTKECITKRLRYEDFENAMLKAIQEINLADVLHENNPLENLIKKQRNLQADIDKKKKLLENFERNFVENDGDLPSFMIAQAKQAEIDIKALDIEIKSTQFEISQLNVYNSNIDNAIDELKTNGTYEARSKINLILHEIIKYIVIDFELDDYGVMFKNGAKRFINNGIVQNVFRTESNKQRDDEINEILNHKI

SEQ ID NO: 16978 - protein, 525 aa, synthetic construct
MPSAFSYVRFSSGKQAKGSSEQRQRSMLGQWLEQHPSFTLSDLRFEDLGRSGFSGEHLDHGLGQLLAAIDSGAIQSGDVILVEAVDRIGRLEPLEMLPLFSRIVRAGVSVITLEDGHIYSKDSVNETSLFLLVAKVQQAHDYSNRLSRRINASYTARREKARAGLGVKRETPVWLTTDGQLVPHVAPHIAQAFQDYADGLGERRICRKLRESGLEEFSKTNATTVRRWLKNRTAIGYWNDIPDVYPHVVDPALFYRVQQRLDAPKVDRAKPSAHYLTGLVKCAVCGRNYNFKQRKHTDPAMLCTSRARLAGEGCTNSKTYPVIVLDQVRKLTSLPFLQHAMENASSQADPSSQRLAVIDGEIGELSRKISEATKALLVLGFTPEIQESLEQLKTAREALEEERATLLLPQAEKLTAAQLEAFSNGLLDDSPMKLNHVLQTAGYSMVVHPDGSIDVDGKRFVYEGASRKEKVYKLRLLGEDKQWSLPILTPARAESLAKSVAGGYLPPNTPEDVARYFEKVKHLVR

SEQ ID NO: 16979 - protein, 689 aa, synthetic construct
MISTDLIPTVLLERKAVVYVRQSTQSQVMTNLESQRRQYDLVDVARQRGFLDVEVIDDDLGRSASGTVARPGFDRLVAMLCAGKVGAVLCFDASRLARNGRDWHHLLELCGLVEARVIDHDGVYNPCRPNDRLLLGMKGSISEFELGVLRARMLDAARSKARRGELRLSVPFGYIWHREAGLGLDPDLRLQDVIRSIFARFHELGSARQVLLSMTKDQIHFPRPSDERRMTNFVWTPVRYRNVIGILKNPFYAGVYVYGKSEKRTAIVDGRARRSYGHGKPVGTWEVMIRDHHEGYISWDEYERNQQQLALNNYGRSGGTKSGRGGKALLSGLLTCGRCGRRLSVAYTGNPHNPVYRCDKQNLMMGLPRCMTFGGPKVDAAVARELLRAVEPLAIEATFEAERMHRERQEDQRHIHDLELQQARYEASLAERRYAACDPDNRLIAAQLEKNWETALRRVRDLEERKPADSPSTIAVDPGTFANLADNLLAAWESPDVTMRVRQQLLRTLIADIVVDVDDAVRDVVLTVHWKGGQHSELKVRKPQTGEHGCATTEDALAVMRSMAGRWSDEHIAASLNRMGMPTGQGKTWTAHRVASVRRVRAIHAYKSADKDGEWLTMTEAAAALGVTNHRIRHLIKMKVLSAEQVVRGAPYQIRVSDLASATVQAAIALKGRPCRIADTETLPMFTDT

SEQ ID NO: 16980 - protein, 695 aa, synthetic construct
MKSELVKPTHLARRAVVYVRQSTPHQVISNQESLRLQYALRERARELGWHEADIDVIDADLGISGASTTGRNGFKELVGRVGLSEIGLILSIDVTRLARNCSDWYPLLDICGLRGCLIADRDGVYDPGSANGRLLLGLKGTISELELHTIRSRLTAGLLAKAERGELALMLPVGLVRDASGVVVKDPDLGVQERLELVFRTFLKFRTVAKVMRVLNDRDLPLPRRDRFGELRWARATVSAVARILKNPAYAGAFVYGRTRFRAAGRDGGSEAKTPKDIKDWRIIVKDRYPHYIDWSTYEKIRDIVRDNRAEYMRAKTRGAPRDGELLLHGIAWCGRCGYKMYVRYKGGGEYACNHLHSHSGLPDCQRVRAAQIDAAVADAFLAALAPGELDALARARQAQQQVNKALRAGAERELERKRYAAALAERQFNRVDPDNRLVASELERRWEAALSELRAAEDAVAQRASTEPAKRSGFSKDLNNKVVALFDSLPQIWANDATTDAHRKALLRCLVEKVVLDRGERDVALARIVWRGGAVTDLHVKMKVNSVAKLTRGEELRARLLELALTGVPDDQIAEILTREGHHSPNCEDKVLPITVQRLRLAAGIKAKAQRNRWTHEPTLLSAVQLAARLDIPVNWIYVQIRRKRLLIDQQSTGAYLFQNSPAIVNAVRDLRNRTINHLDLRIIQPHQEGHQHA

SEQ ID NO: 16981 - protein, 522 aa, synthetic construct
MNSILNDIALGVRFAPYVRVSTTLESQKDSLENQTSFFINYIKDKKGELFNIYSDDGKTGTSLTKRDEMKNLLKDAKKGLFDVVLIKSITRWARDTVDSITLVRDLKGSGVRVVSIEDGYDSFDDHGEMKLTLLSMMAQQESDNISKNVSFGIREKARHGIFHGTPPYGYSNEKGKLIPRYPEAQIVQEIFKLYLKNGWGMQRIANHLTENKVPTPRTVLGAKNAGSIWHQSSIKIILANVHYVGDLLQGKSKTDPSDKAFSQRHGYKKRIIMDEEEVIFVPETHSGLISREEFHEVQTRMKSRAKMRFCGRGKKSLFARIAYCADCGAGMVFKNNRNTYICGSYQKRGGKVCTSHRIKSNILKEKVLSDIRILAEESIDTNALQKVVQKQSGNKSEDLKDQLTELNKTFKQLDNEKIQLVRALTRETVDDTTFKKQQQVIDSEIKVVKEKKAEIEKSLFQQKDDEKRLISFHHEVKRFVQLKIDEDEVLRQALHSLIEKIDVAENGKIEAIHYNFKKPMGT

SEQ ID NO: 16982 - protein, 689 aa, synthetic construct
MTSNNLLPATVLKRKAVVYVRQSTPGQVQNNLESQRRQYELVDVARRWGFRDVDVIDDDLGRTASGAVDRPGFERLVSGLCTGKIGAVLCLDASRLSRNGRDWHHLLELCGLVEARVIDLDGVYDPCRPNDRLLLGMKGSISEFELGILRTRMLDAARAKARRGELRLSVPIGYIWHRDYGLGYDPDFRVQEAIRLIFARFRELGSARQVLISLTADNFHFPRPSDGRKTVSFDWVPIRYRSVISILKNPFYAGVYVYGKSEKRTEIVDGRARKSYGHSKPFATWDVLLQDHHEGYIDWVEFERNQRLIAVNAFGQKGGIKSGRGGRALLAGLLTCGRYGRRLGVVYSGRPPGHPYYRCERINQMLAKPRCMTFGASRIDPAIGKEILRAVTPMAIEAAMEADRMHRDNLEERHRMAELDLQQARYEASLAERRYAACDPDNRLIAAQLEKSWEAALRRVEKCEAVLIQDRQAEQATPIPDFAGISTDLETAWRAPNVDMRCRQQLLRTLVSDIIADVDEEKREVLLTIHWKGGQHSQLRIRKPNAGEHGQSTPEAALAVMRSMATRWSDADIAATLNRMGMQTGQGKTWTARRVGALRTVHKIHGYRSAEKNGEWLTLTEAAKKLGVSAHRVRRLIKEGVLPTEQVVPDAPHQIRASDLEKDEVTQFPRHRGPCRIKMENQKSLFPGI

SEQ ID NO: 16983 - protein, 689 aa, synthetic construct
MTSNNLLPATVLKRKAVVYVRQSTPGQVQNNLESQRRQYELVDVARRWGFRDVDVIDDDLGRTASGAVDRPGFERLVSGLCTGKIGAVLCLDASRLSRNGRDWHHLLELCGLVEARVIDLDGVYDPCRPNDRLLLGMKGSISEFELGILRTRMLDAARAKARRGELRLSVPIGYIWHRDYGLGYDPDLRVQEAIRLIFARFRELGSARQVLISLTADNFHFPRPSDGRKTVSFDWVPIRYRSVISILKNPFYAGVYVYGKSEKRTEIVDGRARKSYGHSKPFATWDVLLQDHHEGYIDWDEFERNQRLIAVNAFGQKGGIKSGRGGRALLAGLLTCGRCGRRLGVVYSGRPPGHPYYRCERINQMLAKPRCMTFGASRIDPAIGKEILRAVTPIAIEAAMEADRMHRDNLEEWHRMAELDLQQARYEASLAERRYAACDPDNRLIAAQLEKSWEAALRRVEKCEAVLIQGRQAEQATPIPDFAGISTDLETAWRAPNVDMRCRQQLLRTLVSDIIADVDEEKREVLLTIHWKGGQHSQLRIRKPNAGEHGQSTPEAALAVMRSMATRWSDADIAATLNRMGMQTGQGKTWTARRVGALRTVHKIHGYRSAEKNGEWLTLTEAAKKLGVSAHRVRRLIKEGVLPTEQVVPDAPHQIRASDLEKDEVTQFPRHRGPCRIKMENQKSLFPGI

SEQ ID NO: 16984 - protein, 472 aa, synthetic construct
MAHGVQLQSSSLLRAVGYCRVSTDKQLERDLSVPDQQRQINQHCEKNGWRLVNHYIEGGLTATDDNRPEFQRMIERATDDDHPFDVIVVHSFSRFFRDLIGLELYIRRLAKSKVQVVSITQPLGSGPEHDMLRQMIGLFDEYTSKEISKHVRRGLKENARQGFWNGSRPPLGYRLEEAERRGERIKKRLAVDEIEAETVRLIFRLYRVGDGKSGPIGIKSIAKYLNAAGHRTRQGGYFGSSLIQVMLRNTTYKGEFLYNKRNYKTEEENPVEETVLVAVPVIIDPTEFGVVQALLSARNRLVTPPRIVTGPILLTGLTFCSKCGGAMTMSSGTSHTKKVYNFYSCLAFRKKGKLACDGCNVSMPALDKLVVGRLTERLFTKERIAEIIREIAQRRATKSTQADKRAAELRRRALDGEVRLNRLYRSIEEGIVELDDLLREKVAALQSDRRKAQDALDRLTEATIPAPEVSEG

SEQ ID NO: 16985 - protein, 695 aa, synthetic construct
MKSELVKPTHLARRAVVYVRQSTPHQVISNQESLRLQYALRERARELGWHEADIDVIDADLGISGASTTGRNGFKELVGRVGLSEIGLILSIDVTRLARNCSDWYPLLDICGLRGCLIADRDGVYDPGSANGRLLLGLKGTISELELHTIRSRLTAGLLAKAERGELALMLPVGLVRDASGVVVKDPDLGVQERLELVFRTFLKFRTVAKVMRVLNDRDLPLPRRDRFGELRWARATVSAVARILKNPAYAGAFVYGRTRFRAAGRDGSSEAKTPKDIKDWRIIVKDRYPHYIDWSTYEKIRDIVRDNRAEYMRAKTRGAPRDGELLLHGIAWCGRCGYKMYVRYKGGGEYACNHLHSHSGLPDCQRVRAAQIDAAVADAFLAALAPGELDALARARQAQQQVNKALRAGAERELERKRYAAALAERQFNRVDPDNRLVASELERRWEAALSELRTAEDAVAQRASTEPAKRSGFSKDLNNKVVALFDSLPQIWANDATTDAHRKALLRCLVEKVVLDRGERDVALARIVWRGGAVTDLHVKMKVNSVAKLTRGEELRARLLELALTGVPDDQIAEILTREGHHSPNCEDKVLPITVQRLRLAAGIKAKAQRNRWTHEPTLLSAVQLAARLDIPVNWIYVQIRRKRLLIDQQSTGAYLFQNSPAIVNAVRDLRNRTINHLDLRIIQPHQEGHQHA

SEQ ID NO: 16986 - protein, 547 aa, synthetic construct
MKLLVTYIRWSTREQDSGDSLRRQTNLIDAFYAKHKDDYYLLPAHRYVDKGKSGFHQQHKAQGSDFRRMFENVMSGAIPEGSLIVVENFDRFSRADIDTAIDDVRQILRKGVSILTLGDGELYDKSALTDPVKLIKHIIIAERAHQESLVKQKRIAQVWNHKTQLARELKKPMGKQAPGWLELSEDGSHYIVDEDKASLVNIIYDKRLSGMSMFAICKWLNEQGYPTINQRKVRISKTKKPDGNWSALSVKHILTSRSVLGYLPAKISTEDRKTVLREEIEGFYPQIVTDSKFYAVQQLLEETGKGKTSSGDHWLYVNILKGLIRCKCGLVMTPTGIRKPVYQGTYRCNGNKESRCSYGTVSRKLLDTQLCSRLFSKLSQLHDEATDTAKLDELQRRLNTVDSELEKLTETLIQLPNITQIQEALRVKQEEKDELIVQLSREKARVKSVSSLDLSGLDMESVEGRTEAQIIIKRLVKEIVVSGNEKLVDIYLHNGNMIRGFPLDGKDDHTLTLEEATDEMQSLDDMLIFGEPVTRIYPAGDMEEVDA

SEQ ID NO: 16987 - protein, 493 aa, synthetic construct
MSGDSLNRQRRLITEWLKVNSDYYLDTVTYEDLGLSAFNGKHAQSGAFSEFLDAIEHGYILPGTTLLVESLDRLSREKVGEAIERLKLILNHGIDVITLCDNTVYNIDSLNEPYSLIKAILIAQRANEESEIKSSRVKLSWKKKRQDALESGTIMTASCPRWLSLDDKRTAFIPDPDRVKTIELIFKLRMERRSLNAIAKYLNDHAVKNFSGKESAWGPSVIEKLLANKALIGICVPSYRARGKGISEIAGYYPRVISDDLFYAVQEIRLAPFGISNSSKNPMLINLLRTVMKCEACGNTMIVHAVSGRLHGYYVCPMRRLHRCDRPSIKRDLVDYNIINELLFNCSKIQPVENKKDANETLELKIIELQMKINNLIVALSVAPEVTAIAEKIRLLDKELRRASVSLKTLKSKGVSSLGDFHAIDLTSKNGRELCRTLAYKIFEKIIINTDNKTCDIYFMNGIVFKHYPLMKVISAQQAISTLKYMVDGEVYF

SEQ ID NO: 16988 - protein, 695 aa, synthetic construct
MKSELVKPTHLARRAVVYVRQSTPHQVISNQESLRLQYALRERARELGWHEADIDVIDADLGISGASTTGRNGFKELVGRVGLSEIGLILSIDVTRLARNCSDWYPLLDICGLRGCLIADRDGVYDPGSANGRLLLGLKGTISELELHTIRSRLTAGLLAKAERGELALMLPVGLVRDASGVVVKDPDLGVQERLELVFRTFLKFRTVAKVMRVLNDRDLPLPRRDRFGELRWARATVSAVARILKNPAYAGAFVYGRTHFRAAGRDGGSEAKTPKDIKDWRIIVKDRYPHYIDWSTYEKIRDIVRDNRAEYMRAKTRGAPRDGELLLHGIAWCGRCGYKMYVRYKGGGEYACNHLHSHSGLPDCQRVRAAQIDAAVADAFLAALAPGELDALARARQAQQQVNKALRAGAERELERKRYAAALAERQFNRVDPDNRLVASELERRWEAALSELRTAEDAVAQRASTEPAKRSGFSKDLNNKVVALFDSLPQIWANDATTDAHRKALLRCLVEKVVLDRGERDVALARIVWRGGAVTDLHVKMKVNSVAKLTRGEELRARLLELALTGVPDDQIAEILTREGHHSPNCEDKVLPITVQRLRLAAGIKAKAQRNRWTHEPTLLSAVQLAARLDIPVNWIYVQIRRKRLLIDQQSTGAYLFQNSPAIVNAVRDLRNRTINHLDLRIIQPHQEGHQHA

SEQ ID NO: 16989 - protein, 629 aa, synthetic construct
MPQLYSYIRWSTDRQDKGTTRNRQLAAAKAYADENGLEMVEILEPGVSAFRGKNRTEKLGGFIDAVKNNAIPSDSYLYCENLDRISRDQVDKALSLFLELIGLGLTIITGMDRKVYNRDTIRQNPTDLMISILMFIRGNEESETKSNRTVGNVVALVERHKEGLPVNIKSVGRHPFWIDDTGSQYEAVKKHPFYWNIAREIIDMFLSGNGVYSVKKYLDEKYPNGLKGREWDYQVLKKMRDNRALIGERTINLRGVPYKLENYYPWLCKDEAEFFLLEKRKQQNNYKSKKEGADTIKLLSGLSILRCSKCGGTMHSFMNHGKARYICTNGVHLQKNCSGWSITAQLVEHCTMIALLIGYMDKSRKNGSDTTLIEEELNEKEKFIKALDSKISNLVTAIAIAPDVNSLAHSLNEINSKRKELVLSVEKLKERLVSFQGKGSFEVDIMEFLILIQWAVFTNMEDNDRDKIRKIIDAIIEYIVVDKTNDCITIKIKYYGNDEVLVFGGVDRKPHWRFSIDFDTGKEGALTVLENDLKDVPEIQKAVSYLHKLEKGYLAMYDSAVTMLAEVGYPEIKGTQFWPNTGKHEKVTVAFDGVEHTISFNGRLPKAIASAIEKTGLTRQQFIEKFKIQ

SEQ ID NO: 16990 - protein, 607 aa, synthetic construct
MTTKRPGKKSAVMHEPLPKTGLRRASVDERRKRLEADTVVSISPPKETVAVIYCRVSDSKSVKSDLSIPDQEKQGLAKAAENGWTVAYVYKELGVSAKTDQRPQFQKMLTLALSEQRPIQKIIVHSISRFARSVADYNSLTNQLYINGVEIVSVTQKFSNDTGGFIAETTSAVFDEYHVHRTSTDVIRAMTSMAKDGYAVGGVQPLGYKLEPDSINPRRKRVVINELERPLVVRIFRLALYGDGDSPPMGTKAIITKLNREGELTRSGSRFSSNLLHSMLTNPIYMGRKIYNENAVAKRWSPVPPERVEIPVPAIISQEEFDELQALLRSKNPRKGVGKARVLSSPMLLAGLAYCKCGAAMTLRTGTGKLGTVYRYYHCARVSRQGFQDCSGPCIPQAQLDEVVAEAVISQVLQEDRLATILNVMREKISSAVLQREERAIEIRKELELSERAFRNLMTIIASAEALASEPILLKKLVETEQDLTRNRNALKLLLSQGQPQAEITSEKIKFFSHLVTERLRDPDKVKMKAYLMSVVARVEVGEEYIKIVGRLADLQKCVADEANMASGESDGSTVRRYKRNWCPRQGSNPGPPDYKSGALPTELQGQ

SEQ ID NO: 16991 - protein, 506 aa, synthetic construct
MRSVITYLRYSSAIQGAEGADSTRRQNDLFKQWLKKNSDAQVVASFSDEGLSGYKGKHLTGQFGDMLARIESGEFPEGTILLVESIDRIGRLEHLETEALMNRILGNGLEIHTLQDGLIYTKDALADDLGISIIQRVKAYIAHQESKQKSFRVSQKWEQRAKLALAGEQRLTKMVPGWIDPDTFKLNEHAETVRLIFKLLLSGESLHNIARHLQSNGIKSFSRRKDANGFSVHSVRTILRSETTIGTLPASQRNDRPAIPNYYEAAIDASTFNKAQEILGKNRIGRTPASDNPLTINIFKGLFRCQCGASVHPTGTKNKYQGVYRCNNHLDGRCDVPPLKRKPFDKWMLENFLGMIDVGNDGEAEGKIASLQHEVEIVTTRIKKATALLLEMDDIDELKIQLKELNQKRTELQTTIDNMRRKASLTDKELPQLKDIDLTTKAGRVECQLILSKHLKGLTLGKDSVIVTLQNDTEITIPTNPLPLNDGSPIFEIADKELLDIDAYQL

SEQ ID NO: 16992 - protein, 508 aa, synthetic construct
MKKAIAYMRFSSPGQMSGDSLNRQRRLIAEWLKVNSDYYLDTITYEDLGLSAFKGKHAQSGAFSEFLDAIEHGYILPGTTLLVESLDRLSREKVGEAIERLKLILNHGIDVITLCDNTVYNIDSLNEPYSLIKAILIAQRANEESEIKSSRVKLSWKKKRQDALESGTIMTASCPRWLSLDNKRTAFVPDPDRVKTIELIFKLRMERRSLNAIAKYLNDHAVKNFSGKESAWGPSVIEKLLANKALIGICVPSYRARGKGISEIAGYYPRVISDDLFYAVQEIRLAPFGISNSSKNPMLINLLRTVMKCEACGNTMIVHAVSGSLHGYYVCPMRRLHRCDRPSIKRDLVDYNIINELLFNCSKIQPVENKKDANETLELKIIELQMKINNLIVALSVAPEVTAIAEKIRLLDKELRRASVSLKTLKSKGVNSFSDFYAIDLTSKNGRELCRTLAYKTFEKIIINTDNKTCDIYFMNGIVFKHYPLMKVISAQQAISALKYMVDGEVYF

SEQ ID NO: 16993 - protein, 547 aa, synthetic construct
MKLLVTYIRWSTKEQDSGDSLRRQTNLIDAFYSKHKEEYYLLPAHRYVDKGKSGFHQQHKAQGSDFRRMFENVMSGVIPEGSLIVVENFDRFSRADIDTAIDDVRQILRKGVSILTLGDGELYDKSALTDPVKLIKHIIIAERAHQESLVKQKRIAQVWNHKTQLARELKKPMGKQAPGWLELSDDGSHYIVDEDKASLVNIIYDKRLSGMSMFAICKWLNEQGYPTINQRKVRISKTKKPDGNWSALSVKHILTSRSVLGYLPAKISTEDRKTVLREEIEGFYPQIVTDSKFYAVQQLLEETGKGKTSSGEHWLYVNILKGLIRCKCGLVMTPTGIRKPVYQGTYRCNGNKESRCSYGTVSRKLLDTQLCSRLFSKLSQLHDEATDTAKLDELQRRLNTVDGELEKLTETLIQLPNITQIQEALRVKQEEKDELIVQLSREKARVKSVSSLDLSGLDMESVEGRTEAQIIIKRLVKEIVVSGNEKLVDIYLHNGNMIRGFPLDGKDDHTLTLEEATDEMQSLDDMLIFGEPVTRIYPAGDMEEVDA

SEQ ID NO: 16994 - protein, 562 aa, synthetic construct
MQKILYPYVRFSSEQQSGGSSYQRQLGDILKYAKENGYTVNDSLELRDLGLSAYKADHIKKGSLGDFFDAIDSGVIETDGSAYLCVEQIDRLSRQSLDDASDVLRTILRANINVITLMDKMIYTKESLNDLMSVLYSSMLMVQANKESAVKSERILKSFDRRIDKLNNGEPIQYVGIFPGWIDNKGTKQKKDFVVNDKAKIVQRVFKMYIAGTSMGDIARIFNDKGIEQVAKRRHKNFTNSWSSAKINHLLKNRCVLGDLHIKKTGEVFKNYYPQIISIDDWDVVQSMTTTKKTIKYSGRKSINIFTGKIFCSGCGQKYHFETDDKITKKGRTLYYMLKCQGRRILGCKSKSIKYDDFLSSTPNMFGMITKTKKDNSEEIKKIKQQISDISSETREIEKNINTLENMNDNGSLDYETYLKESSKQRKKIRINDTRVADFKANIARLSSDNKLNHFDKTDPISIIKGKRFVNENFAGFVISSDSKSCTALYLNGQVVHFLLQNSKIEKKENIKPVDGFGEFFELKEEIINAYKSGKMDGRFIEILRAANFWGVDTSEKDYSIE

SEQ ID NO: 16995 - protein, 399 aa, synthetic construct
MNVVLYIRVSSVRQVNEGHSLEGQLKDLRAYCSANSHTIVKEYIESGNSAYKGSRPIFNQMLNEVTSRVFNVDAVVVYSLSRFARDLLYQLSTIKRLEDSGIRLFSATENLPEDDTTFKYLTVMLGLVNEMNSKQNGINVQSRLTQTAKDGYFTGGRVPLGYRSVKCEEGKKNTRKKLVIVEEEAAVVRKIFELSLTGTSGKGLGIKAIADFLNRHGFKYRGSSWSNNTVHKILTSTTYYGEFVFRKKTDSPIVISVPAIIDKNKFIEVRKSLKERDAQQLWVKAIRSNNLLTGLLKCGTCGGGMTVCSGKSGRYKYYACTKKLKKSVDLCQSKWVPKQELDQLVESTIIEHVINVTNIQAIIDEVKTELLSGRERHKRQSLKTYSKAKSYRAKVGKHL

SEQ ID NO: 16996 - protein, 506 aa, synthetic construct
MRHVITYLRYSSAIQGAEGADSTRRQNDLFKQWLKKNSDAQVVASFNDEGLSGYKGKHLSGQFGDMLSRIESGEFSEGTILLVEAIDRIGRLEHLETEALMNRIIAHGIEIHTLQDGLIYTRDALSDDLGISIIQRVKSYVAHQESKQKSFRVSQKWKQRAKLALAGEQRLTKMVPGWIDPDTFKCNEHAETVRLIFKLLLDGESLHNIARHLQANNISSFSRRKDANGFSVHSVRTVLRSESVIGTLPASQRNDRPAIPNYYEAAIDAATFNKAQEILDKNRKGRTPASDNPLTINIFKGLFRCQCGASVHPTGTKNKYAGVYRCNNHLDGRCDVPPLKRKPFDRWMIDNFLGMIDVGNDGESERKIAALQHEVEIVTARIKKATALLLEMDDITELKAQVKELNQKRTELQTTINTMKRKTSLSDKGLPQLKDIDLMTKAGRVECQLILSKHLKGLTLGKDSVTVTLQNDTEITIPTNPLPLNDGSPIFEIADKELLDIDAYQL

SEQ ID NO: 16997 - protein, 568 aa, synthetic construct
MGRPVKAYSYIRFSTPKQAQGDSYRRQLQQAMDYCAEHNLQLDDKTIDDFGTSAFRGANMTEGALGRFVDAVKHGEIEQGSYLLVESVDRLSRQAVEEALEQFLAIVRAGIVIVTLSDKQVFRRGQVDFTKLIVSIVYMARANDESEMKSRRSRAAWSNGREQARKNNKVIANSRLPSWLTRDGEQIVPIPERVAIVNEMFEMAKSGCGYEQIAKVFLEKGYKTFGKEADWRPAGIQAVIKSQAVIGVFQPHVIENGHRVPADEPILGYYPTIVSPALFEEVQHLISKRNKHSGSYRKGTFNNLFSGVLRCQCGESLRYQNKGRAGSPRNYLVCPKQNTAGCKLPNMLYDKVEPQLLQAVFLLNRVMKQRVEGEDKTIALKTMLAELRVQLEVETQKRKKAAQLVLDNDNDADYRVLFEQCKKKTQALEKQIQRAESDLMSRELSVKTLKYIVDPEDLSSTEQRQRFNGQLKTALKEIRFRFDGGYLWAEYMDIDGSRVLTQIFEDRLAGSSIYDGSSYLVRKTQTEAPYGVDPSVMQQEMDDYIRNLQRNDDGTDPDFEDLSSEYSK

SEQ ID NO: 16998 - protein, 525 aa, synthetic construct
MTAFSYIRFSSKEQASGDSFARQMEASRDWCKQRGIELSEKNYADLGISAFREKTRASLADMLEAIELGSIREGDHIILENLDRLSRQGIDATQEIIKSILREGVKIVSLQDDLELDRSSLNDLVSVIRIALSADLAHKESLKKSERVSAAKASQREQAKQGKAINKRLPYWLEKDGDGYQFNDGVDAVKLMIQLRTDGLGFHKIAARLNASEHKPRWAVHWSDTTIRNILSSPALYGRYQFRNGDGVDDYYPALVSYAEFKAFQSTYTASAGGQEHHNHLFGLVRCGACGAAMSKKVSKRKVAGAMKYYKGWICTKTLSGACAQKTPMMDLDDLVIKAVKRLKVSDSKKASREANQLDREIDTKKARLNEITQELVSGSSSVNLLNVAASTIEKQLKELMAQRKESVRTSHSEIQTLYGLRDDAERFNIALRRVVDRIKVFHKGDSTWHVAIHQRNGHLISVAAFRKNQRSPWEYMFGNTAEIVAISANTELDSWEADEVSANPEDWETGITNPEYEHTEVCED

SEQ ID NO: 16999 - protein, 481 aa, synthetic construct
MKTMNKVAIYVRVSTTNQVEEGYSIDEQKDKLSSYCDIKDWNVYKVYTDGGFSGSNTDRPALESLIKDAKKRKFDTVLVYKLDRLSRSQKDTLHLIEDVFIKNGIEFLSLQENFDTSTPFGKAMIGLLSVFAQLEREQIKERMQLGKIGRAKAGKSMMWAKTSYGYDYHRETGTITINPAQALAIKFIFESYLRGRSITKLRDDLNEKYPKHVPWSYRTVRTILDNPVYCGFNQYKGEIYPGNHEPIISKEEYDKTQSELKIRQRTAAENVNPRPFQAKYILSGIAQCGYCGAPLKIMLGVKRKDGSRLKKYECHQRHPRTLRGVTTYNDNKKCDSGFYYKDKLEAYVLKEISKLQDDADYLDKIFSGDNAETIDRESYKKQIEELSKKLSRLNDLYIDDRITLEELQSKSAEFISMRGTLETELENDPALRKNKRKADMRKLLNAEKVFSMDYENQKVLVRRLINKVKVTAEDIVINWKI

SEQ ID NO: 17000 - protein, 481 aa, synthetic construct
MITTNKVAIYVRVSTTNQVEEGYSIDEQKDKLSSYCNIKDWNVYKVYTDGGFSGSNTDRPALESLIKDAKKRKFDTVLVYKLDRLSRSQKDTLHLIEDVFIKNGIEFLSLQENFDTSTPFGKAMIGLLSVFAQLEREQIKERMQLGKLGRAKSGKSMMWAKTSYGYDYHKETGTVTINPAQALTIKFIFESYLRGRSITKLRDDLNEKYPKHVPWSYRAVRTILDNPVYCGFNQYKGEIYPGNHEPIISKEEYDKTQSELKIRQRTAAENVNPRPFQAKYILSGIAQCGYCGAPLKIMLGVKRKDGSRLKKYECHQRHPRTLRGVTTYNDNKKCDSGFYYKDKLEAYVLKEISKLQDDADYLDKIFSGDNAETIDRESYKKQIEELSKKLSRLNDLYIDDRITLEELQSKSAEFISMRGTLETELENDPALRKNKRKADMRKLLNAEKVFSMDYENQKVLVRRLINKVKVTAEDIVINWKI

SEQ ID NO: 17001 - protein, 509 aa, synthetic construct
MKKAIAYLRFSSPIQQYGDSLKRQNRLVEEWLEANPDYLLDDLTYKDLGISAYHGTHATRGAFSDFMDAVEGGYIEYGTALLVESLDRLSREKIGEATERLKSILKAGIDVVTLSDHTHYTKDSLDDPYSLIKAILIAQRANEESEIKSRRMKSAWKKKREEAAASGKIITRSCPRWLKVNQRGDSFELIPEHARTIKEIFRLRLKGQSLNGIVKMLNDKKVITLTGEIGVWNPSTIEKILVNKALIGINVPSYRTIANGIQEIPGYFPRVISDTTFYAVREFRKPPFGKDKHTDNPYLINLFRSVMKCKVCGHSIILNSIDGKGMGYYVCPMRRLHRCNTPSIRRDIADVNLITTVVIHADKFQTNSTSRGSTRSLQDRNIEVLKSIDKLIEALQIAPEVTALAEKIKALHKEFKSNEVTMRVAKNKQRLAVSEDVTNLDLTLKEDREKCRRFIFKTFKEIVLDTENKTCDICFSNGFKLINFPLLKSTNSEQLISALAYTDDSTLIL

SEQ ID NO: 17002 - protein, 481 aa, synthetic construct
MIATNKVAIYVRVSTTNQVEEGYSIDEQKDKLSSYCDIKDWNVYKVYTDGGFSGSNTDRPALESLIKDAKKRKFDTVLVYKLDRLSRSQKDTLHLIEDVFIKNGIEFLSLQENFDTSTPFGKAMIGLLSVFAQLEREQIKERMQLGKLGRAKSGKSMMWAKTSYGYDYHKETGTVTINPAQALTIKFIFESYLRGRSITKLRDDLNEKYPKHVPWSYRAVRTILDNPVYCGFNQYKGEIYPGNHEPIISKEEYDKTQSELKIRQRTAAENVNPRPFQAKYILSGIAQCGYCGAPLKIMLGVKKKDGSRLKKYECHQRHPRTLRGVTTYNDNKKCDSGFYYKDKLEAYVLKEISKLQDDADYLDKIFSGDNAETIDRESYKKQIEELSKKLSRLNDLYIDDRITLEELQSKSAEFISMRGTLETELENDPALRKNKRKADMRKLLNAEKVFSMDYENQKVLVRRLINKVKVTAEDIVINWKI

SEQ ID NO: 17003 - protein, 481 aa, synthetic construct
MITTNKVAIYVRVSTTNQVEEGYSIDEQKDKLSSYCDIKDWNVYKVYTDGGFSGSNTDRPALESLIKDAKKRKFDTVLVYKLDRLSRSQKDTLHLIEDVFIKNGIEFLSLQENFDTSTPFGKAMIGLLSVFAQLEREQIKERMQLGKLGRAKSGKSMMWAKTSYGYDYHKETGTVTINPAQALTIKFIFESYLRGRSITKLRDDLNEKYPKHVPWSYRAVRTILDNPVYCGFNQYKGEIYPGNHEPIISKEEYDKTQSELKIRQRTAAENVNPRPFQAKYILSGIAQCGYCGAPLKIMLGVKRKDGSRLKKYECHQRHPRTLRGVTTYNDNKKCDSGFYYKDKLEASVLKEISKLQDDADYLDKIFSGDNAETIDRERYKKQIEELSKKLSRLNDLYIDDRITLEELQSKSAEFISMRGTLETELENDPALRKNKRKADMRKLLNAEKVFSMDYENQKVLVRRLINKVKVTAEDIVINWKI

SEQ ID NO: 17004 - protein, 553 aa, synthetic construct
MSTITKIQGYQHDVKQLRVAAYCRVSTDNFEQLESLENQRAHYQKYINNHPNWELAKIYYDEGISGTKMTKRNALKELLTDCHNHRIDLVVTKSISRLSRNTTDCLQIVRELQQLNIPIIFEKEHINTGAMASELFLSILSSIAQDESHSTAGNLRWAIRKRFASGKFHVSSAPYGYSIEDGNLVINHTEAKTVRQIFQRFLSGTSASQIAKELNRRQVSTKRGGQWRSNTVINILRNSNYTGDMLCQKTYRDDQYHRHFNQGELAQYLIEDHHPSLINHENFNRVQVLLKEAVKKRHIETGSHKYQQHYLFSGKIICGQCGTIFKRQTRPHKIYWACQQHLRSAQQCPTKAVSEASLKAAFCNMINKLVYSKKFLLQPLLEGLKEEANVNSDGQLISLTKQIKANDHKAETLTELMHAGLLDKAIYVNQTARLEQDTYQCQEKIKQLNGQNTDSANDFEDVRTLLRWCHQGKQLTEFDEGVFQEFVQQIVVNSSNKATFILKCGLKLPEKLNKNATIDGHFYRDIIKQRYNDPIKQAEYLYSIIESEGDLIG

SEQ ID NO: 17005 - protein, 525 aa, synthetic construct
MGKVRIIPAHQQKGNSVQPQKNRLPFEQLRVAAYCRVSTDYDEQASSYETQVAHYKELIQKEPTWEFAGIYADDGISGTNTKKREQFNQMIAACKAGKIDLIVTKSISRFARNTIDCLKYIRDLKAINVAIFFEKENINTMDAKGEVLITIMASLAQQESESLSQNVKMGIQYRYQQGKVFVNHNHFLGYTKDAQGNLVIEPEEAKVIKRIFYSYLNGMSMKQIADSLKADGILTGGKTKNWQSSGVSRILKNEKYMGDALLQKTYTVDFLSKKRVKNNGIMPQYYVENDHPAIIPKPVFMQVQQLIKQRQNGITTKNGKHRRLNGKYCFSQRVFCGKCGDIFQRNMWYWPEKVAVWRCASRIKRSKSGRRCMIRNVKEPLLKEATVQAFNQLIEGHKLADKQIKANIMKVIKNSKGPTLDQLDKQLEEVQIQLIQAANQHQNCDALTQQIMDLRKQKEKVQSRETDKQTKLHSIDEINKLVEFHKYGLVDFDEQLVRRLVEKITIFKRYMEFTFKDGEVIKVNK

SEQ ID NO: 17006 - protein, 525 aa, synthetic construct
MGKVRIIPAYQPKGNSVHHQRSPQPFEKLRVAAYCRVSTDYDEQASSYETQVAHYKELIQKEPTWEFAGIYADDGISGTNTKKREQFNKMIAACKAGKIDLIVTKSISRFARNTIDCLKYIRDLKAINVAIFFEKENINTMDAKGEVLITIMASLAQQESESLSQNVKMGIQYRYQQGKVFVNHNHFLGYTKDAQGNLVIEPEEAKVIKRIFYSYLNGMSMKQIADSLKADGILTGGKTKNWRSSSVAKILKNEKYMGDALLQKTYTVDFLNKKRVKNEGIMPQYYVENDHPAIIPKSIFMQVQQIIKQRRNGITTKNGKHRRLNSKYCFSQKLFCGKCGDILQRNMWYRPEKVAVWRCAGRIRRSKTGRRCMIRNVKEPLLKEATIEAFNQLIEGHELANKQIKANIMKVIKDSKGPTLDQIDHQLEKVQMKLIQAANQHQDCDALTQQIMDLRKQKEKVQSRETDQQAKLHSLDEINKLVKFHKYGLVDFDEQLVRRLVEKITIFQRYMEFTFKDGEVIRVNK

SEQ ID NO: 17007 - protein, 553 aa, synthetic construct
MSTITKIQGYQHDVKQLRVAAYCRVSTDNFEQLESLENQRAHYQKYINNHPNWELAKIYYDEGISGTKMTKRNALKELLTDCHNHRIDLVVTKSISRLSRNTTDCLQIVRELQQLNIPIIFEKEHINTGAMASELFLSILSSIAQDESHSTAGNLRWAIRKRFASGKFHVSSAPYGYSIEDGNLVINHTEAKTVRQIFQRFLSGTSASQIAKELNQKQVSTKRGGQWRSNTVINILRNSNYTGDMLCQKTYRDDQYHRHFNQGELAQYLIEDHHPSLINHENFNRVQVLLKEAVKKRHIETGSHKYQQHYLFSGKIICGQCGTIFKRQTRPHKICWACQQHLKSAQQCPVKAVSEKSLEAAFCSMMNKLIFSQKFLLQLLLEELQNQANSNSNGELGKLAEQIKANDHKAETLTQLMQSGLLDKAIYVNQTAKLEQDTYQCRQKIKLLNSQNTDSANNFEEVRSLLRWCQKGQTLTSFDPNLFQTFAQQIIVNDPTEVIFKLKCALELTEKLTKKAAVYQQFYRGIIKQRFNEPIKQAEYLYSIIESEGDLIG

SEQ ID NO: 17008 - protein, 525 aa, synthetic construct
MGKVRIIPAHQPKGNSVHHQHSPQPFEKLRVAAYCRVSTDYDEQASSYETQVAHYKELIQKEPTWEFAGIYADDGISGTNTKKREQFNKMIAACKAGNIDLIVTKSISRFARNTIDCLKYIRDLKAINVAIFFEKENINTMDAKGEVLITIMASLAQQESESLSQNVKMGIQYRYQQGKLFVNHNHFLGYTKDAQGNLVIEPEEAKVIKRIFYSYLDGMTMKQIADSLKADGILTGGKTKNWRSSSVAKILKNEKYMGDALLQKTYTVDFLNKKRVKNEGIMPQYYVENDHPAIIPKSVFMQVQQIIKQRRNGITTKNGKHRRLNGKYCFSQKIFCGKCGDIMQRNMWYRPEKVAVWRCASRIRRSKTGRRCMIRNVKEPLLKEATVDAFNQLIQSHELASKQIKANIMKVIKSSKGPTIDQLDQQLEEVQMKLIQAANQHQDCDALTQQIMDLRKQREKVQNRENDQQAKLHSMDEINKLVELHKYGLVDFDEQLVRRLVEKITIFKRYMEFTFKDGEVIRVNM

SEQ ID NO: 17009 - protein, 452 aa, synthetic construct
MKAAIYIRVSTQEQIENYSIQAQTEKLTALCRSKDWETYDIFIDGGYSGSNMNRPALNEMLSKLHEIDAVVVYRLDRLSRSQRDTITLIEEYFLKNNVEFVSLSETLDTSSPFGRAMIGILSVFAQLERETIRDRMVMGKIKRIEAGLPLTTAKGRTFGYDVIDTKLYINEEEAKQLQMIYDIFEEEKSITTLQKRLKKLGFKVKSYSSYNNWLTNDLYCGYVSYADKVHTKGVHEPIISEEQFYRVQEIFSRMGKNPNMNRDSASLLNNLVVCGKCGLGYVHRRKDTVSRGKKYHYRYYSCKTYKHTHELEKCGNKIWRADKLEELIIDRVNNYSFASRNVDKEDELDSLNEKLKTEHAKKKRLFDLYISGSYEVSELDAMMSDIDAQINYYEAQIEANEELKKNKKIQENLADLATVDFDSLEFREKQLYLKSLINKIYIDGEQVTIEWL

SEQ ID NO: 17010 - protein, 516 aa, synthetic construct
MKTIHKLERAKLPETQKLKVAAYARVSTASDEQLSSLQTQITHYENYIQKNDQWEYIGVYYDEGISGTKTDKRDGLHRLIKDAELGKIDLILTKSISRFSRNTVDCLNLVRKLTDIGVTMIFEKENINTSDMESELLLSILSSLAESESYSHSENMKWANRKRMAKGNYKGVPPYGYCRKGIDFHLVPDEARVVEQIFQWTLNGLSMHQIASKLNAANITTKRGVKWQASGVSVILHNIVYTGTMIFQRYFNDEQFKKRKNNGELPMYRIDNNHPAIVSMEEYERVQEIIRIRATSKGNTKDGKNTNRYAFSKKVLCDKCGNTYKRIHTYWKGNTRKVQWACKGHLKDKNSCVALPISDEQLKIAYLTMLNKLIFAHKVVLEPLLKNQSNAAELERALDEISNKASEIDEKLEVLASLNTSGIVSVKTSFEEQNKLQLELKNLQEEQQQIINSANGKSTQRIELEELHRFTKRSNMLTEWEESLFSRFADQVFVYNRQEVGFKLKCGLILKERLPE

SEQ ID NO: 17011 - protein, 452 aa, synthetic construct
MKAAIYIRVSTQEQVENYSIQAQTEKLTALCRSKDWDVYDTFIDGGYSGSNMNRPALNEMLSKLHEIDAVVVYRLDRLSRSQRDTITLIEEYFLKNNVEFVSLSETLDTSSPFGRAMIGILSVFAQLERETIRDRMVMGKIKRIEAGLPLTTAKGRTFGYNVIDTKLYINEEEAKQLQLIYDIFEEEKSITTLQKRLKKLGFKVKSYSSYNNWLTNDLYCGYVSYADKVHTKGVHEPIISEEQFYRVQEIFSRMGKNPNMNRDSASLLNNLVVCGKCGLGYVHRRKDTVSRGKKYHYRYYSCKTYKHTHELEKCGNKIWRADKLEELIIDRVNNYSFASRNVDKEDELDSLNEKLKTEHAKKKRLFDLYISGSYEVSELDGMMADIDAQINYYEAQIEANEELKKNKKIQENLADLATVDFDSLEFREKQLYLKSLINKIYIDGEQVTIEWL

SEQ ID NO: 17012 - protein, 452 aa, synthetic construct
MKAAIYIRVSTQEQVENYSIQAQTEKLTALCRSKDWDVYDTFIDGGYSGSNMNRPALNEMLSKLHEIDAVVVYRLDRLSRSQKDTITLIEEYFLKNNVEFVSLSETLDTSSPFGRAMIGILSVFAQLERETIRDRMVMGKIKRIEAGLPLTTAKGRTFGYDVIDTKLYINEEEAKQLQLIYDIFEEEQSITFLQKRLKKLGFKVRTYNRYNNWLTNDLYCGYVSYKDKVHVKGIHEPIISEEQFYRVQEIFARMGKNPNMNRDSASLLNNLVVCGKCGLGFVHRRKDTVSRGKKYHYRYYSCKTYKHTHELEKCGNKIWRADKLEELIIDRVNNYSFASRNVDKEDELDSLSEKLKIEHVKKKRLFDLYISGSYEVSELDAMMADIDAQINYYEAQIEANEELKKNKQIQENLADLATVDFDSLEFREKQLYLKSLINKIYIDGEQVTIEWL

SEQ ID NO: 17013 - protein, 518 aa, synthetic construct
MGSRVSHLDDDKATTRKVSHKAQTEEGERWAKSQGYEVVGAFEDLGVSVGKTTPFERPDLGKWLAPERLHEWDVLVFSKIDRAFRSTSDCVDFARWTKENRKILAFSGDGVVLDYLHPKGESLDQMMSEFFIYVGSFFAAIELNRFRTRATDRLSYLRMTDRVSHGVPPLGFRTVPHPSGQGKGLERDPEGYALLHEIKDKLLHENYSMTALVKWLHDPRCLANKETEPTTGRSRSVHVANCACRQTNAANARGGDKWWTATTLRRVLTSERTQGIRMSGGKPVLDTQGIPIRMAEPTFTDDEWELIQQAVNQRSTSGRARYMTENPFAGVVYCVCGYAVSLHRRKSSSGKEHTYVRCGQGCRGAWKLADVNELLDSGFLGRYGDEEMTRQVFVPGEDRSEEMTGIDRSLTRLRWESDNNLVDDEQLYQARMEALLTRKREIGQVVVPARWERQGTGKTYRQLWADPGTDRRQVMREARYRLVLHFVPNGSSSSFVTHAEFQDMWQSEPVVAQPKKEG

SEQ ID NO: 17014 - protein, 558 aa, synthetic construct
MTKLYSYIRFSSMRQSEGSSYERQIRMAKEIADRHGLELVNDYQDLGVSAFKGANSKTGALSRFLDEIGRSIPVGSWLFIENLDRLSRQDIISAQELFLSIIRRGITIVTGMDNKIYSIETVTANPMDLMFSILLFIRGNEESQTKRNRTNSSALLKIKAHQQNPQSPAVAIEEIGKNMWWTDTTSGRVLPHPVYFPVLQKIVKMRQDGHSAGSILDYLNEHHEPPAPTSNKRHGKWSRAMVSRLFNTKALIGVKTVNVDGVEYELRDYYPRVLSDSEFYFLRKNIIKKAWDYGHDKEKVIPLLSGIGVLRCVHCGATMVKQTAANGKREQYRYCCDGRKSGRTDCPYPNWGFRAATLERAVLQLLADKIWIAEDKTNPIPEIQVKIDDISRKIDNLINLSAMMGATKELANQITDLNTQREALHEEIRLFEREMYSVDSQGWEKLAEFDLSDVQNEERLKVRMKIKGALHEIECSRLDSKKNLFVLVYLDGLRQRLVIENNRGLKKGQIIVDLKTINDKQILESAGMVLHPCIDMIVDKNWKAPEEIPGLLSEEFGI

SEQ ID NO: 17015 - protein, 678 aa, synthetic construct
MSSNLSNTTTPKIYSYTRVSTLEQKKGSGVAMQINDKVLEALALEHQLPLAEETYQDLGKSAFHGQHLKHELGTFLQAIKDGVIAKGSIIVVYSLDRLSRLEIGHAKQTYLDLTNNGVSVYSIVDNHLYRAHNAADDIIATITFERAHNESKNKSSRVIDASKQGLKRWKETGEPQSSLGRSPFWIDQPTNEFNINAAGVKKAIEMKIAGYGDLKIKKYLDNHFEYKPTRRKGKVKQSNTWDYIAISKLWRRRSLTGENSYTIEGVTHVMENYYPALIDDDTFRKLQVKNTKKQGRDTSSGKIPLLKSLARCGTCGGAMVFVDKGESRINYVCNLAMKGEHAREVYNVNMLDLLTLEVCKDAYLSESSKSHNIHAEQQKLKLETELFEQQESRDNLRDYYKATPSKTLLDLIIDSESKIIDLEAKLDAINTNTVELNADELSNLPEVYTESIRTDYLNPTRHEIRNNLRRFISSITLNRSEEPCPDAKTKVANCIDITWHFKNAQKRRLAMLPYQFTKAVEGDKTLYLPYAYMYGSKSNIKVEDGDQFLSNIFNKLHSLDLTRFLYPSRGRYQWSNLNLECGKTYWAPLDRAVFIEQGMEHIAFTERGTPNEAGHAANYLSLMFNYPSSDGGAYDYPDSKFIELACKFGFVEEHDFSLFLQDNQFNQELYSSLDFLMS

SEQ ID NO: 17016 - protein, 527 aa, synthetic construct
MTTAYSYIRFSSTTQSQGDSLRRQTQLAQEYCLKHSLTLSEQSFQDLGISAFRSDNTNEDNGLGQFLKALEQGVVPNGSYLLVESLDRLSRNNTLIAMGQLLNIIGKGVTVVTLIDDHKYSSETKNPSMDILISLSHMERAHNESKTKSERIKAAWANKRANPFDTNRTSITPFWLKLNKDRRTYSVLENQAAIIKRIFQLSIDGHGVISIVRILNEEGIAAPKGGTWAQTTVSRTLNSKAVIGHYMPKRGRAKTNSLIENYYPAIISEDTYYLSQSRKSERSNPKSAGRKTTFPNAFNQVAKCSQCGSTMYYDNKSPTLKYLTCREFKKKTCTNKPIRIELMHRFIIEQFLHPQHFEQFNELVAEDNISNSGVIMLEGKLETEKEALKQLLSLSTDFSNSVIQEEIKTRSESIQSLEQQVENEKASTVNTTHSVHLNFRESCQLVADALQTEVYGKQPAPQSKEELFKVRVKLNRSLKQTFSEITVTHCPDTKKASITANDFVFEAHKSAMKTDLRDTVWRTISIY

SEQ ID NO: 17017 - protein, 514 aa, synthetic construct
MKDNKGLAYLYIRFSTKKQEQGDSLRRQIEVAEKWCSENNIELSAQTYEDLGVSAFKEGGKRPALEDLIAAIRMGKIVRGSYLLIEDHDRLSRRGWRHTQELVHQLVLSGVRLVMLKDGKVYDSSNIDNIFDNIMLMLSAERAQEESERKSRLIKASREKARRDKKVTGKLPAWISRDGDGFTFNDKKATIQELINCKLAGKSHQSTAKHLNSLKMTTGNDSAWSASGVRAIIQNHALYGAKAYFDTGKDGRMNKEPIEIISDIFPALITHEQYQVLNTRQQAGRTSKRGAYSRLLKCGACGGAMTTRTSNYKGKPRAYKMCVRATEGSCNQIERIREPEVYLNQALHFLKYESSSTLYVSRTSEYQQRLETLNATVDLLTKNGNVDALARVYTDIKEVSDLIEESKAQDQNNVDVKVDFNLISNIEDVEQRNIELRKVLREIRFYCIEKVGQTSKWKVVIEQINGIKKYLVLDQQYGFGNTVVDYASLLTQGTEDNREPWEIEDSEECESYSY

SEQ ID NO: 17018 - protein, 521 aa, synthetic construct
MNTLERDCIYLRKSRADREAEARGEEETLARHERILLDLAKRRGCHIGAIYREVVSGETISARPVMQRLLQEVESGMWDGVLVVEVERLARGDSIDQGVVARAFQYSDTKIITPAKTYDPNNEFDEEYFEFGLFMSRREYKTIKRRLNAGRLSSVQEGKYCGNKPPYGYERVKLQGKGFSLRPVPAQAQIVRLMYNWYAYGVSGERLGMQKIARKLNEMGIPTLSGKPWSPATVVNILDNPVYTGKIRWNRRKAVNKIEDGAVVKTRPRSNDYIISDGLHEPIISQELYDLAQCYRQQNPPRPIGVMNAVKNPLSGLVRCGKCGHSMVRRPYANRKQEDTLLCPYTSCDNVSSRLSLVEKAVIAGLAELVQSYKVNDTLNDNNGVDIIAAKEKILVEKRAELDNLTAQKTRQYDLLEQGVYTTEIFLERSGATAKQIEDCTAAIERIDAELVHDRELLDQKFNFIPKCEHLLSNYWDWDAPTRNSVLKELLERVDYYKDSRNEYKHGDEITFTLDIYPKIQ

SEQ ID NO: 17019 - protein, 582 aa, synthetic construct
MKTQINGKIAIYSRKSKFTGKGESIGNQIEECKKHIAYKYQITDMNQIVVYEDEGFSGKNTKRPQFQQMLKACRNHEISMIVCYRLDRISRNTIDFALLYQELERLDINFISVTENFDTTTPLGRAMLSISSAFAQLERDTIAERIRDNMLALAKTGRWLGGTTPLGYISTAKTSVDIEGKIRTAYRLKTDSDNFSLTRLIFDKFLEFRSLTKVETYLLNYHYKTRNGKNFSRTGIRDILKNPVYAAADEDTLCYFNEIGTPIFNESSEFNGTHGLMVYNKSNQASEIPHKQHNYSEWIVAIGKHKPLLTGKEWLQVQELLEQNKSKSYRKPKDNTALLSGILICADCGSYMRPKANRSLDENGNKRFSYLCETKEKSHGQLCSMNRPDGNLLDKMVCDKIKEIAQGEDVDKFHEQLKYAKKQLLSKEVSNTTEIDHLQKVLHDTDRKIENLVIALSAANNTPAFSHINKQINNFHEEKMKIEKQIHTLNELLQNQNILLANFDVLIEKLSSFSDSFDMMSIEEKRTTLRILVDKVVWDGTHVHLYLVGQNNQKTKPQQAGCKRNPDAFARTEKDVKRDFFI

SEQ ID NO: 17020 - protein, 465 aa, synthetic construct
MQEKILRCAIYIRVSTFEQSVHGKSLQAQKECLEQYATDNNMSIVGVYADEGKTARKELKKRKAIHALVEDVKRDKIDVIIFWRLDRWFRNLSDFYKVQDVLDEHGVRWISVSEPGINMETRDGRLQLNVVLSIGQNEVDTTSERIKFVNEASIRQKKLIFGDANMPFGYKTGVVDGKKCMVKDSETEHMVEDFFEYFRNHNSKKGAIRYMQETYGIDFSYGMLRTMLSSEFYKGTYRGYPYCPAYLSEKEWDEMQTISKRNIKNTPSGRIYLFTGLMRCPVCGQKLVGTGCSSIINRKTGEKRTYCYYRCNRALIDHICTYRHRVSQNLIEKYLLENLEREYEKYKVRTNQISEELKKQKKAKDPKKLRKEMERLNLLFQKGRISFEYYDTEYNRLEEEYVHSSNPCQQKEEARNTRYIEELLQTDFRQMYNSLLLENRRSFWRSTIQEIYLNDDNTIKAVDFL

SEQ ID NO: 17021 - protein, 556 aa, synthetic construct
MAMMNEMEYRTIGSALAGGYRAAVYCRLSKDDDLQGESASIANQRDMLEKYCEKQGWEVVAVYQDDGFTGLNMERPDLQRMLRAIERRQINLVITKDLSRLGRNYLQTGHLIEDFFPRNGVRYIAMNDGIDTLRDNNDIAPFKNILNEMYSKDISKKVHSSYLLKAQKGQFTGCLAPFGYRKDPEDKNHLLIDEETAPIVRLIFGYALNGHGPNYIRRRLEEEKIPCPTWWNRERGLRNTRTKWEKKDPENGRYMWDFSVIKDLLMNPVYTGAIASQKKDYRFKIGTIGEKKPEDWIVVEGQHEPLIDRMSFDIVQNKLKSRQRPGQTNEISLFAGLIKCGECGKSLTVRYTNAKHPQQIYSCKTYNAFGKNHCTQHRIDYDTLYSHVLRKIRECARAALMDGEAVADRLTNTCEAEQREQREAMERSLTRDEERIEVLDKMVMRLYEDMIAGRISEQNFNTMLERTQTEQTELKTKVSEGRKRLSDEVQLANDAKQWVEAIQEYANITELDAATLNRLIKEIVVHERIDEDKTRHISIEIHFNLKPIPEVEQVTA

SEQ ID NO: 17022 - protein, 536 aa, synthetic construct
MLRQTNQQPITALYPRLSHEDELQGESNSISNQKRILETYAKQNGFSNLRWYTDDGYSGANFQRPGFQAMLADIEAGKVGTVIVKDMSRLGRNYLQVGMYTEMIFPQKGVRFIAINDGVDSAQGDNDFAPLRNIFNEWLVRDTSKKIKAVKRSKGMSGKPITSKPVYGYLMDEDENFIIDEEAAPVVKQIYNLCLAGNGPTKIARMLTEQQIPTPGTLEYRRTGSTRRYHPGYECKWATNTVVHILENREYTGCLVNFKTEKLSYKVKHSVENPLEKQVIFENHHEPIIDTQTWERVQELRKQRKRPNRYDEVGLFSGILFCADCGSVMYQQRYQTDKRKQDCYICGNYKKRTHDCTAHFIRTDLLTAGVLSNLRKVTSYAAKHEARFMKLLIEQNEDGGKRRNAAKKKELEAAEKRIAELSAIFKRLYEDSVTGRISDERFTELSADYEAEQRELKERAAAIQAELSKAQEATVNAEKFMNVVRRHTSFEELTPTLLREFVEKIVVHECSYDENKTRRQDIEIYYSFVGKVDLPE

SEQ ID NO: 17023 - protein, 617 aa, synthetic construct
MNGNEKYIAIYSRKSKFTGKGESIGNQIELCKEYIQTHYTEIPQDHILVYEDEGFSGGNLNRPDFKKMMEAARQRKFKAIIVYRLDRISRNISDFSSLIEELSRLDIAFISIREQFDTGTPMGRAMMYIASVFSQLERETIAERIRDNMHELAKTGRWLGGTTPTGYASESVQKVTIDGKAKKACKLKLIPEESEIVRLIYSLYIEHDSLTSVEAELIKRGLKTKNNKLFTRFSIKSILQNPVYMIADVNAYNFFVKENADLNSAKDEFDSVHGMMVYNRTKQEKGKAVTYLPPDEWIVAVGLHQGIVPGKVWISVQESLDRNKSKAYRKPRNNEALLTGLLYCTCGSRMYPKISKRKTADGKPIYTYVCKLKERSKRSMCNSKNANGNTLDLAVIEQIKLLEDDKGFFIDQLEQSRKFYTGNRAAYEDQLASIRHEKEELEKKIEGLVDSLADLGDSTVRNQVARRIEQLNQKCEETDTRIHELEALTSQHTFSDIEFDVMRQLLSVFKTSIDEMTVEQKRAAIRTLVRKVVWDGVNAHIILFGVQDDEIEYPPLSYQANEADSTEDDLEELERFSDVDYEDEIADGSKTHWGEDSKRNPDAFARTEKDVKRDFFI

SEQ ID NO: 17024 - protein, 544 aa, synthetic construct
MRTAIYARYSSDLQDERSIDDQVALCRDAMLKRFGGIEAGIYADYAISGAHMANRPQINQLVADAKQGKFDAVLAEDLDRLSRDQEHIAAIHKQLTYHKVKILTVADGEINEMHIGLKGTMSAMFLKNLALKIKRGTTARAKAGSNPGGRCYGYDTVHEIGADGKAIRGKRRINPDQAKVVRRIFQQFASNISPRTIAHELNEDGIPGPTGGQWTASTINGNKARHYGILFNELYIGFQVYNRVQMVKHPDTGNRLSQPNPPDQWIVTEIPELAILDRELWDAAQARKAAISELYTVAKKRRPKHPLSGLVRCGMCGGAFTITNRTAMACNTRRERGTCDNAHRIKMEDLEKRVFQGLRDKLLTPDAIDAAITEYHAERARLRKLARANLQTYTRKRTTLRSQIENMVNAIANRPDSSALVNKLAELETELADVERKVAEADDSPVIEIHPNALEDYKRAVTKLAETIRTAKEPHRAEAISVIRDLIDHIEIHPTEKKHETRVEVLGVLEAIKNLAGLPTNEVPAECTVKVVAEEGLEPPTRGL

SEQ ID NO: 17025 - protein, 588 aa, synthetic construct
MPNVDTQTPLAYSYVRFSTARQALGDSLRRQLELTERYCEKKGLRLVRESAYRDLGVSAFRKKNMETGKLAEFIEAVKAGKVPPGSFLIIEQFDRLSRANVNVALRLLMDLIEAGIVVVTLVDEKEWTRDSLSDLADLFTAIIFMARANDESARKSDRLTAVWEQKKKRAADGTATRIVTSEAPRWLRAKADKTGFEPVPDLVESVRRVFEMRIDGAGAVAICSRANRERWPAPGKAPVRKAGETDEDFAQRKEASGQWHLSLVSRILKNRAVLGEYQPRRVDRDDSRNRIPVGEPIRDYYPAIIDETTFLRAQATSLRRGIRPGRRDAQARNWLYGLVKCGECGNSLVRKNKTSAKQPGYARYYCVARVRGLTKCASVGSSQLEGCVSHVVSTWLPNHWRTDTSFDALRARADLLETDIAKFKANIDGLADLASSVTAPSARKTLIERLDREGDALNASEQELARVRAELADHAHLGSDAESIAAFEKAFHEIDALAAGRDGVDGALRLREELARIVQKIVVHQPTGHIEFFIKGRGEPVWLPLDFVNAEPPSEPSAEQLEAAERDIDALRRAMLDLNVASDSAGTL

SEQ ID NO: 17026 - protein, 554 aa, synthetic construct
MMQTATAKKKSISLIPSKPEYDRSIKPQFKALRVAAYCRVSTTLEQQETSYEAQVSYYTEKIKSNPNWKLAGIYADDGKSATNTKKRDDFNAMIEDCMAGKIDMVITKSVSRFARNTVDSLMNIRKLKEKNVAVFFEKEGVNTLEGTGELLITILSSQAQEESRNLSENTRWGLVRRFENGIVSVNHNKFLGYTKDKNGELVIVPEEAELVRRIFRLYLEGSSVIQIAKLLESEGITTVTGGTKWWDSTINKMLSNEKYMGDVLQQKTYTIDFLTKKRVKNDGIVPQYYIEDDHEAIIPKELFYQVQEEKARRASLSKTAATRKAKQEQEKKKSKYSSKFALSDIMVCKECGQPYRRQVWSKYGQKSAVWRCENRLKNGTKNCKHSPTFKEAVLHEAVMTAINSVVENRGEFVGAFRENVIRVIGSYSTKNVPTEYDEQIQKLQGEMLALIEENAKQGSITEDFDEQYHRIAEQINDLKQKKLEMVRDQKMAENFQQRLDDMDACLKKTTYEVRDFDNDLVRRLLQSIKAVKDDLIELQFKSGIVMNQRVSYFD

SEQ ID NO: 17027 - protein, 543 aa, synthetic construct
MAKKIVRIDPVKQQVTRQLQPKKRVCAYCRVSTDSREQQNSFTAQLEYYTALIENQENWQFAGIYADEARSGTKLQKRDDFLRMMKDCEDGKVDMIITKSVTRFARNTVDSIEAIRRLKQLGVSVYFEKEHIDSLAEKSELMLTILSSLAQGEAESVSTNNKWAAIKRFQDGTFILGTPAYGYTKDENGDLVIQEEEAAVVRRIFSEYLNGKGTYAIAKDLSEEGLHTIRSAEKWNDGVIKEMLLNPIYTGKLLHQKTMTTEVLPFKRQRNKGQLPQYLIEDNHEAIISHEQAEAVKEIFEYRRKQMGVDDLEKYQSRYAFSSKILCGECGSLFRRQKIYIGKPYEKTQWCCRQHIFDSTKCRQKAVREDDVQWAFTLMWNKLVSNYTEILTPLLEMLKKLRIDERQEKEIGECSNRIMELTEQGHILSRLVAKGYIDHAVFIERQNTLAIELAAAKKKRSQLLDNNGFDREIAGTEQLIELVRNNPHVIEEYHEDLFLQAIEKVIVQKNGQITFRLINRLELSEPCRKEAIEDDAKAHANRV

SEQ ID NO: 17028 - protein, 559 aa, synthetic construct
MKKAALYIRVSTHHQIDKDSLKFQKEELENYSKYALGIDDYETFTDAGYSGKNTNRPGYQEMMQKIKAGEFTHLLVWKIDRISRNLVDFAKMYDELKEYSVAFISKNEQFDTSSAMGEAMLKIILVFAELERKLASERVSSIMIDRAQKGLWNGAPTPLGYDYNSDTQKLIINSDEAQRVKYIFNLYQQHKSLLKIQDILNKEGIKSKNDSKWHTKTLNQILRNPIYKGTYRYNYKESGRGDIKDEEEWVVVEDCFPAIISKDQFKDVNTILNENRNRMHTEVKYTHVFSSLLKCGDCGESYLAYLDRARSDGYRPSAYRCKANYFPKSSDEKCYNMIGEVNLGPFILDYIINLEKAKQTEITSEGQLQDILIDGKYFKEVVGLESNSLAMTYKILTQSSNKAFEDSANNQVQNKEIEILQKEKKKYERAFGRLEDLYLYSDDSMSKKDYLIKKKEIKDKIDEINEELFSLNKERQNPIFDLSFISEFPQYFLTKKVFEEGMNYKALVLQNKDLVKDFMRTILKKVVIDDKKVSEIEFINGLKHKFIWEEDAKGLKGRM

SEQ ID NO: 17029 - protein, 508 aa, synthetic construct
MKAVIYARYSSDSQREESIEGQLRECAAFAEKNGITVLRHYIDRAYSAKTDNRPEFQSMIKDSGKRLFDIVIVWKLDRFARNRYDSARYKATLKKNGVKVVSATEIISEGAEGIILESVLEGYAEYYSADLSEKVVRGMTDNALKCKFNGGMMPIGYVIDAEQHFQIDPLTAPFVLEAFKRYDGGETISSIMNWLNEQGLTNTRGRKMTFNSVGHILHNRRYIGEFQYRDVVVPDGIPAIVPQDLFDRVQEKLAKNKKAPARHKAEDDYLLTTKLFCGCCGAYLCGESGTSRTGKVHHYYKCVSVKKKRTECHKKPVRKEWIEDLVVGETMKMVMDDKAIEAIVSMLMDLQDRDNVNVPLYEQQLREADTAISNLLNAIQQGILTRSTKERLEELENRRDELENRLACEKLAKPKVSAEFMTFWLHRFRKLDVRQKSHRKMLIDAFINAIFLYDDKMVITFNYKEGTKTITFAELQEAISNKNGSDLDCLAAPFHNIGISLTVITYIS

SEQ ID NO: 17030 - protein, 522 aa, synthetic construct
MRKVTRIDGNNALQAFKPKVRVAAYCRVSTDSDEQMASLEAQKDHYESYIKANPDWEFAGIYYDEGISGTKKENRTGLLRLLADCENKKIDFIITKSVSRFARNTTDCIEMVRKLTDLGVFIYFEKENINTQRMDGELVLTILSSLAENESLSIAENSKWSIRRRFQNGTYKISYPPYGYDYVDGKLFINKEQAEIVKRIFSEALAGKGTQKIADGLNLDKIPTKRGSHWTATTIRGILSNEKYTGDVLLQKTYTDENFKRHYNRGEKDQYMIKDHHEAIISHEEFEAAQEILKQRGKEKGVIKGSSKYQKRYPFSGKIKCAECDSSFKRRIHGSGNHKYIAWCCTKHIKDASACSMKFVREDGIHQAFVVMINKLIFGHKFILRPLLQSLKETNYSENIAKIQELEIKIKENTERVQVIMGLMAKGYLEPALFNTQKNELLKEAALLKEQKEAIKHTIDGSQTILFEVEKLLKFATKAEKQIDAFDSEIFEDFTREIIVFSQEEIGFKMKCGLNLRERLVK

SEQ ID NO: 17031 - protein, 522 aa, synthetic construct
MTTRNVTVIPARKRIGNSAKAEELPKLRVAAYCRVSTDSEEQATSYEAQIEHYTNYIKSNPEWELAGIFADEGITGTNTKKREEFNRMIEECMQGKIDMIITKSISRFARNTLDCLKYIRQLKEKNIPVYFEKENINTLDSKGEILLTIMASLAQQESQSLSQNVKLGIQYRYQQGKIHINHNRFLGYTKDKDGNLVIVPEEAEIVKRIYREYLEGSSMLQIARGLEADGILTGAGNHRWHTSTINKILRNEKYIGDALLQKTYTVDFLSKKRVANNGIVPQYYVENSHEPIIPREIYMQVQEQLVKRRCVHISKNGKKRNYSNNHPLSQMVFCGKCHEVFRRVHWNNRGKKSIVWRCVSRLENTGLFCTASTILEDTLKEKIVEAINIAVSGKNSFLTILKKNIETVLSEDLDESTADIDKRLEELQTDLIQLANSKEAYDNIVNEIYRLRDLRQETLSRNALRQDKRDRIAEMTDFLNMQTGDITEFDDKLVRKLIEKATVYNDRLVVEFKSGLEIEVNL

SEQ ID NO: 17032 - protein, 630 aa, synthetic construct
MPQLYSYIRWSTDRQDKGTTRNRQLAAAKVYAAEAGLEMVEIEDPGVSAFRGKNTNTGKLGDFIDAVKQGAIASDSWLYVENLDRITRQNVTTAQKLFIELLELGLTLVTGMDKRVYTLDSVNKNPTELMISLLLFSRANEESETKSNRTIGNVVALVERHQAGLPVNIKSVGRHPFWIDDSGSQYQAVKEHPVYWSIAREAIDMFLDGNGIYTVKRYLDEKYPNGLKGKEWDYQVLKKMRDNRALIGERTINVGGATYKLDNYYPWLCKDEAEFLTLAERKQQNNYKAKKDKTEEIKLLSGLQVLRCSKCGGTMHSFMNHGSARYICTNGVHLQKNCSGWSISAQLVEHCTMISLLIGYMDKSRKDGIDTTAIEEEISRKEILITDLESRIANMAQAIAIAPDVSALAVQLNTFDLERKKTVLEVDKLKERLHSLKGKGSLEVDITDFLMLIQWSVFTNMEDADRNKIRKIISSIIESIIVEKADGCITIKIKCHHKDEWLVFGGVNRKPFWAFTIEYSTNDTKEIEGGDSSNFVSNPLFQKAVEQLDSIKQSYLKLFETANTMLGVVGYSDIRGASFWPNTGKYERANVEYEGITYNIAMNGRVSKAITAALEATGLSRKDFIERYKV

SEQ ID NO: 17033 - protein, 520 aa, synthetic construct
MNSKVIVIPAKKKKGNSIKESEKKKLRVAAYARVSTDSDEQATSYDTQVDHYTNYIKKNPDWEFAGVFSDEGVSGTYTKKRDGFNKMIEEAMEGNIDYIITKSISRFARNTLDCLKYIRKLKENNIPVYFEKENINTMDAKGEVLLTIMASLAQQESQSLSQNVKLGFQYRFQQGQVQVNHNRFLGYTKDEEGKLVIVPEEAKIIKRIYREYLEGASLRDIKEGLEKDKIVNGAGNKKWHVSNLNQILTNEKYMGDALLQKTYTVDFLNKKRVKNDGIAPQYYVENSHEAIIPKEIFMRVQEEIDRRANMVSGKGKRRIYSSKYALSSIVYCSKCGDIYRRIAWNNRGKKYTVWRCCTRVTHGPDACHARTIKEEDLQEAVVEAINQLISESSELMEIIKENIEKAITGDGSRQIEEIDKEMLEVQEKLLKVANAKKDYTDLAKRVEELRNEKEKILLDLAEEKNEQIRLIELEEFLDNQELEMESYDEELVRKLIEKIVVYEEKLKVIFKSGFEIEIEN

SEQ ID NO: 17034 - protein, 520 aa, synthetic construct
MKKITKIEANQKEESILRVAAYARVSTDEEAQLLSLKTQKAHYEKMIAENNSYTFAGLYFDEGITGTKKECRDGLLKMLKDCEDGKIDFILTKSISRLARNTTDCLEIVRRLLDLNIGIYFEKENIDTRTMESELMLSILSSLAESESRSISENNKWSIKKRFQNGTFIISSPPYGYENIDGKMVVNEEEGKIIKEIFEKYLSGKGTHKIAEDLNKRNIKGQKGASWHGSTINGILKNEKYIGDVIYQKTYTDDSYKRHKNKGEEDQYKIIDNHEAIVSREEFDKVQDLIKIRAIAKGNGKDTKRYQNRYSLSGKIKCGECGSSFKRRHHYNGKEKYIAWTCSEHLKDINKCSMKFIKDKDIKLAFVTLVNKLIFGKDSILMSLLESLKRVDSKEEVEKINKIEESLEKLRERKEVLSKLITSGVLDASIYTKESSEISNEERKLLIEKERSKKAILGNDEEIRELEKLIGILGKSEMIDHFEGELFEEIIDHIQVVNRETLDFHLRCGLVLREEVKEDV

SEQ ID NO: 17035 - protein, 563 aa, synthetic construct
MAKKLKGKVYSYLRFSDPKQAAGSSAERQMEYASRWAAEHDMQLDAALSLRDEGLSAFHQRHIKQGALGVFLRAVEDGRIQSGSVLVVEGLDRLSRAEPIQAQAQLAQIINAGITVVTASDGREYNRERLKAQPMDLVYSLLVMIRAHEESDTKSKRVKAAIRRQCEGWIAGTWRGIVRNGKDPHWVQQREDGAFELYPERALAIRTMIDLFFAGHGAMEIARILSERELYVSNAGNYSTHMYRIVRNRALIGEKSLTVDGEEFRLSGYYPALLTDEEFATLQDSMSERGRRKGKGEIPSIVTGLTITTCGYCGMAVVSQNSTKKRANGSEIVRRLSCSGSTFNAGCPVGGTCDTETVERALMRYCSDQFNLTRLLEGDDGAARRVTQLALARQRYAEIEAQIQRITDALLSDDGAAPAAFMRRARELEEEQAKLRREIEALEYQTAASNAHEIPAAADAWAQLVDGVLALDYDARLKARQLVADTFRKIVLFQRGFTPLDDAPADRWKRSGTIGLLLVTKRGGMRLLNIDRKTGQWEAEDNLDLAPRHADEVPLPHVVQGME

SEQ ID NO: 17036 - protein, 517 aa, synthetic construct
MKIDIYLRKSRADEELEKKLGEGETLARHRRALLKIVKERGYFVANIHEELVSGEELFFRPAMLELLKDVEQKQCEAVLVMDIQRLGRGDMEEQGIILKTFKRAGVKIITPKKTYDLNDEFDEEYSEFEAFMSRKEYKMINRRMQGGRIRSVEEGNYIATRPPYGYDVTKINKNTRTLVPNPEQSEVIRMLFDWYVNKHMGCSKIASELNLLGIKSYTGGKWERTTISNFLKNPVYIGKVVWKKKCIRKSKSPDKKKDTYTRNKSDWIVSDGKHVPIVEQELYDKAQDILASRYHVPYQLVNGIVNPLAGLVICGVCGSKMKRRPYGDSAPHLVCESKCGVKSNKFESVENAVIAILQEYMSGIKTSALEEAVREKTDLRPLENNKSLLEKELKTLETQRLRTFDLLEQGVYDSATFAERSNYISLRTTEVQTAINACDDEMEKLQQQQNVAGQFQEIQNVLDVYPGLQEPKEKNILLKDIIEKIVYYKEKGWKSDEFNLKVFPKALSRPLSAKRTT

SEQ ID NO: 17037 - protein, 531 aa, synthetic construct
MAKSITMIPQTRNLFTASPITSVRKRRVAGYARVSTDSDEQFTSYEAQVDYYTNYIKSNPDWEFVTVYTDEGISGTNTKHRDGFNRMIEDALAGKIDLIVTKSVSRFARNTVDSLVTIRKLKEHGCECYFEKEGIFTFDSKGELLITIMSSLAQEESRSISENVIWGQRKRFADGKVCMPYSHFLGYDKGEDGIPVINESEAAIVRLIYRLFLDGKTPFGICQQLEEMEIKTPAGKKKWCQSTIISILSNEKYKGDALLQKTFTVDFLTKTKKKNEGEIQQYYVEGSHEAIITPEEFDMVQAELLRRKRAGRSYSGNSIFASKLICADCGGTYGQKVWHSTDTYRKVIWRCNRKFDKKSGLPRCDTPTLDEETIKRMFLKAYNTIMGSREQLLEDCEIMRQTLADYSEQDRAIDALNEEIEVVAEMVKAQVRDNASRAQSQDEYSKKREALVQRYETACAELERQKQEKLLRIAKERDIRLFIANLKTQPLALQQWDEQVWTQLMDSAVVFRNGSIEFTFKNGQKALVEAD

SEQ ID NO: 17038 - protein, 431 aa, synthetic construct
MDRVVKLVAYPPKLEKAKRVAAYARVSCGKDAMLNSLSQQVSYYSDFIQKHVGWEYAGVYADEAKTGTKADRDNFQLLLNECRAGRIDMIVTKSISRFARNTVTLLETVRELRLLNVDVFFQEQNIHSISGEGELMLSILASFAQEESRSVSENQKWRIRHAFEKGELMNWRFMFGYTIEHGKIEVNHEEAEIVREVFQRVIHGESFNAICIDLNNRGIRGIRDGKWRGAHLREFLSNEKYTGNAMLQKCFRNNHLEKRELRNNGELPKYYVTETHPAIISQEEFEAAQAILRAIDVKIANRKHPEKSVFTGKIRCPHCGKNYKHITSNGSSGWNCQTYQMCGKQYCKGKKIPDSTLQRITASVLGMDDFNPDVFSELVDHIEVPKDNVLVFYFKDGRCEERIWEDRSRSMSWTPEMREKARESARRRKYG

SEQ ID NO: 17039 - protein, 530 aa, synthetic construct
MLKNKNAKEEARAYVRVSTLKESQKDSPEHQEGLIRENAATEGVAIHKVYLDRGTATNIIEREDVQQMVEDAKQGEFNTIYFASLSRFSRDTLDAISLKRILVNALGIRLVSIEDMYDSAKEDNEMIFTIISSVNQKQSETTSTSVKRGIRQSAKKGNFTGSIAPFGYRKVTIDGRKSLEIVPEEAKIVREIYDLYANKSMGEKAVTNYLNDVLELPSPKGGIWGLSSVQRILQNENYTGYLTFCKLETQKVYEDLNDMQNRRKKLVQRDNTLWEKTDFQTHEAIISPELYEKAQQIRGVRGGGKRGGRKDFVNVFSKMIFCKECGTAMVTMSSEKKLSKTEEPKRYRYLMCSKRRRQGEKGCSNNTWIPYEDTRDTIIAGIIERLNRKINLEGFTDEASETSEYANRDFDKDIKRLEKTIADNRRFLFEIRKSSMLGEITQDQYDYEKSQYEEEIADSERKIKSLSKTADEHKNRGQLKADMQETLKYLSEIESYDEVDKTRMNLLRLIEKIEVDRAGEVDVYSVLGQL

SEQ ID NO: 17040 - protein, 503 aa, synthetic construct
MDNRIDAIYARQSVDKKDSISIESQIEFCKYELKGSNCKEYKDKGYSGKNTERPEFQQLMRDIESGLVRKVVVYKLDRISRSILDFAKMMDYFQKYEVEFVSSTEKFDTSTPMGRAMLNICIVFAQLERETIQKRVQDAWHSRCQRGFKMGGKTPYGFRTEPYVMDGVRTKKLVIEPAEAAFVRQMYEMYADPQVSLHDITKKLTADGMRTYHGRPLSRATLSVILRNPIYVMADLNIYEFYKSQGTDIYNNAADFAGTNGCYYYQGKGNTEDKHKHLQGQTLVLAPHEGFIPSELWLKCRKKLLASHTYQPARKARNTWTAGKIKCGKCGYALMSAHSNGILYMRCTVHADSGACPGCGCVKLHELEAVVYGAMVKKLKDFKTLTGRKKAAKISPKLTAKRLELAQVESEIEKLLDTLTGASPVLLSYVNSRIEELDAKRQSISNEIAKLSADAVPAEKIESISGYLDDWENVSFEDKRQVVDALITVIRATNEKVEIEWKI

SEQ ID NO: 17041 - protein, 530 aa, synthetic construct
MEKQAPPYAVIYCRVSSQKQKTTGHGLDSQELRCRQHADSLGYKVEAVFPDDVSGGGDFMKRPGMVALLSYLDAQPHKRYVVIFDDLKRFARDTEFHIKLRRAFKVRNARIECLNFKFEDTPEGRFIETILAAQGELEREQNGRQVVQKMQARLMAGYWCFKPCVGLKFAKVEGHGKLLVRNEPLASIVEEALRGFASGRFASTTEVKRFLESQPSYPKEPDGTVHFQRVNDLLTRPIYAGYLDVPEWRIVMQPGKHEPLIDLRTWQAIQDRLKGPPKAPVRKDLSEDFPLRGFVLCDCCGRPMTAGWSTGRNRRFPYYFCQTKGCDERGRSVRKEKIKADFVEILEGMEPSRELFLLVYEMLSDQWNRRLSLANESAEAAKAELRKIDGKVEQLMNRIVRSDSETLVAAYENQIKKLEQERRLLKERSAPSAGPHKEFKETYRTAMEFLANPCKLWASPHIRDKRIVLRLAFSSGLPYSRKRGYRTGEIVKNSLPFRALGFISNRKEGLVELSGIEPLTSCMPCKRSPS

SEQ ID NO: 17042 - protein, 534 aa, synthetic construct
MEYAARWAAEHGMQLDASLTLRDEGLSAFHQRHIKQGALGVFLRAVEDGRILPGSVLIVEGLDRLSRAEPIQAQAQLAQIINAGITVVTASDGREYNRERLKAQPMDLVYSLLVMIRAHEESDTKSKRVKAAIRRQCEGWVAGTWRGIVRNGKDPHWVQQREDGAFELYPERVLAIKTMINLFLAGHGAMEIARILSERELYVSNAGNYSTHMYRIVRNRALIGEKSLTVDGEEFRLTGYYPTLLTDEEFATLQDAMSERGRRKGKGEIPGILTGLSITSCGYCDMAVVSQNATKKRAKGSEIVRRLSCSGSTFNAGCPVGGTCDTVTVERALMRYCSDQFNLTRLLEGDDGSARRTAQLAVARQRAAEIEAQIQRVTDALLSDDGAAPAAFMRRARELETEHAQQRREIEALEHQIAASNAHEIPAAAEAWARLVDGVLALEYDARLKARQLVADTFRKIVLFQRGFTPLDDAPADRWKRSGTIGLLLVTKRGGMRLLNIDRKTGQWEAEDNIDLAPHHADEVPLPHGMSGGA

SEQ ID NO: 17043 - protein, 549 aa, synthetic construct
MKYAIGYLRVSTPDQKKYGNSLSTQKNNIEDFCFKNNITLLKIFTEDFSGADFDRPEFLKLLNYLKQNKGEIDLLLIDRQDRFSRNTEHALTMTRKLKKVGVEVNFVSEWIENVNSQEGKLISNIRYTLAELERDKIKKICSMGSRTALKEGRYTKTPPRGFKRSKNQFNKTIIEPNEVANLVKELFVDYAFNIYSQKELLSKYRKKGMSLSKSSLSRMLTNILYAGFIDLKKHDIEPYNLIKGEHKAIISLELYQKVQRVKDNRNTKLKNTKIENENFPLSGFLKCPCCGENLTGSNSNNGNKKKIKKYYFYYECKSKKGCKIRYTANDVHDLLDKELSKLRPNKYIQKLFIDLLIEEYENFNYERLTILKQIDSRILKINELRFSLTEKFVANLIEEDYFKEINRKYVVNKSRLEREKNELGTYQKDLDKLLTFGLNMICNFNLLFKNSTNQLKKRLLGSILEDGLIFSNNNFRTVNYNRAVSLISKLDKGYKQFENKKGDNYKIVSQSVLKVGIEPTHPKVLDFESSSKWFNMYLFVLFFKQLPLF

SEQ ID NO: 17044 - protein, 628 aa, synthetic construct
MRKNEKITALYERLSRDDFGKDDDQQRESNSISNQKAMLEEFAARQGFTNIVHFTDDGISGTCFDRPGFLAMMKEVEAGNVEYLCIKDMSRMGRDYLKVGQIMEILRQRGVRLIAINDGVDSARGDDDFTPFRNIMNEYYARDTSRKIRSTFQSKGKSGKHLTGTVIYGYLWNEARDQWLVDPEAAEVVKRIFSMTIDGYGPYQIASKLKSEKVLIPSAYLAQHGEGVNKNKTFKDVYGWGSSTICNILEKREYLGHTINFKTRKHFKDKKSHYVPEDEWTIFENTHEPIIDQQTFDLVQKIRGNVRRYPDGWGEAAPLTGLLYCADCGGKMYVHRTNNGKRISQYTCSQYTKVPCGTLCKTQHRINEDVVLSLVSEMLKAIAEYAKHDRAEFVRVVQEAQSSQQTTEVRKQRTRLATAKQRVSELEVLLCKIYEDNILGKLSDSRYATLDAQYEKEQSELTAEISVLEEAVKSYEKHEKDADRFITLIDKYENFDKLTIAMLNEFIEKILVHERDRKGSIQTTQEVEIYFNFVGRFVPPAFGEVELTPEELEEIRKREERKDRLHQNYLKRKASGAQKRYEDKIKKRKKAEIEAKKAAIRAEDIAKGVFVPVSSLPQREPMKGVQTA

SEQ ID NO: 17045 - protein, 516 aa, synthetic construct
MAHAQKQVRIIEPLERFVNRINLVGCYARVSSDSEDQRNSYNNQVDFYESYINSLENSKLVKIYTDEGITGTRMDKRDGFLQMIEDCRKGLINRIITKSISRFARNITETLSVVRELKSIGVSVYFMTEKIDTAKMGSEMMLAVYAACAEVESKAISNAQKWAFRTRAKEGRYNQPKLPYGYQRIDGEVKVIEDEAKIVEDIFNKYVNKDFSVTKLVDYLNKHYFKKKKWSQSTVSSMLKNERYCGDMLLQKRYSPDVFPYKLVTNKDELAQYYVYDVFPKIIDRELFEKANEKLVNNKLKFNKKQTDGNREYLLTSKIKCEHCGGTFKRRVLRNKEYWSCSNHVASAKKCEVKMIGTDEIEDAFLKIFYKLKENIHVLEAYKKHIVNFTTNDDDRCELDLVNRELKKVTSSINTLVRYYQKDLISLEDYKKKHNELLVDKSVFEMQKCKLNEKIYQRFEVIQTQIIIECLESMKEITALDEEIFNTLVDSIEVGTLDIQFTLKNDLKLKVERKQF

SEQ ID NO: 17046 - protein, 555 aa, synthetic construct
MNYIIRDDKEHETTAPKVKVIAPRKKFQPSYNDRQNREIRVGAYCRVSTDSDEQELSYETQCEYYENYIGSHENWELIAIYSDEGITGTSTNKRSDFMRMIDDARAGKLDMIITKSITRFARNTVDSLMYLRILKEYNVDVYFEVENVHSLEANEMLLTILSSVAQQSSEDKSESIKWGYQRQFEKGKVYAANMYGYKSNRGTLDIIEEEAEVVREIFSKYLSGMSESKIARYLTENKVPKKNGSTKWDSGTIGRMLQNEKYSGDALLKKTFSIDFLHKKRYKNEGQKKMYFVENSHPAIVTKEVFKAAQVERTKRNMKSNDEKEVVESHHQNRYSSKNPLSNKIICSECGALYRRTVWTKRNKEKEPVWRCSNRLKNGKAICPNSVTLKEKPLLDALTSLINGKTKSKEKTRLELAKELSEYLNPKDIVEKKQKLNCELENVNSQINELLDKGMLLVARGVQDESQIEEHLAQCYQTKQMLKKELKKLDDKYNALKQGRQEKLLKTLEKNSNEHTVMTQEDLAVFIDRIIVKKDKIEIETIDDQKCELLLNQIS

SEQ ID NO: 17047 - protein, 570 aa, synthetic construct
MARLISYLRMSTSEQLRGFSLERQRKLIADFAAKNGLSVEEENTLEDIGRSSFSDDAQQKELTRFFENLNAGKYEPGDVFALENIDRLTRRGPVDAILKVNQIISKGLKLAIISGNEQRIIEDVNDVFTIINLSIDASRANKESKNKSDKGLSNWQEKRNLASTHKIAMTAQAPAWLDTEIFYIFDEEKKKNIKRRKYVLNEEKAEAVRLIFDLYLSGNGALKIKNILNERNIPTFKGAEYWEPSIITKILKNPATFGLYQPKKQGTGKRDLIAAGEPINDYFPAVITRELFEQCERIREGNGTRKGRKGKLFTNLFTGLLKCVDCGGPVHLLNPGIDKRNKVQKSIYYLVCKRAKFTKECTTKRVRYDDFETALLKAIQEINLADILNENNPLEILIKKQRSKETEINKKKKLIENFQRQFIENDGDLPAFMISQAKEAEISIKELEDQQREIASEIAQLNIYNSNVDNAIDELKEKPDYETRSKINLLFHEIIKNISLDTENQFYTVRFKNGVMRLISASGFVLTTDEQTPADINEILQSIEGPSIPRDIATDPEKLIEYLKARTPIV

SEQ ID NO: 17048 - protein, 571 aa, synthetic construct
MARLISYLRMSTSEQLRGFSLERQRKLIADFAAKNGLSVEEENTLEDIGRSSFSDDAQQKELTRFFENLNAGKYEPGDVFALENIDRLTRRGPVDAILKVNQIISKGLKLAIISGNEQRIIEDVNDVFTIINLSIDASRANKESKNKSDKGLSNWQEKRNLASTHKIAMTAQAPAWLDTEIFYIFDEEKKKNIKRRKYVLNEEKAEAVRLIFDLYSSGNGALKIKNILNERNIPTFKGAEYWEPSIITKILKNPATFGLYQPKKQGTGKRDLIAAGEPINDYFPAVITREIFEQCERIREGNGTRKGRKGKLFTNLFTGLLTCSKCGGPVHLINPGIDKRNKVQKSIYYLVCKRAKFTKECTTKRVRYDDFEIALLKAIQEINLADILNENNPLEILVKKHRSKETEINKKKKLIENFQRQFLENDGNLPSFMISEANAAEISIKELEEEQREIASEIAQLNVYNSNVDNAIEELKEKPDYETRSKINLLFHEIIKNISLDTENQFYTVRFKNGVMRVITAAGFIATTEHQTTAEMAEIMRIEGTQDIPAEIANDPEKLIEYLRQFDFIDQ

SEQ ID NO: 17049 - protein, 551 aa, synthetic construct
MPTAYAYIRYSSKAQGEAGRDSVDRQMASIQAITKQQGIELRTENIFSDTGISGFDGSNKNKGKLKDLIDLIISQKIQDGDFVFVESIDRLSRQKMRLSKDLVYTILDRGVTLVTTIDGQMYSRAKDGMEQDIMLSVIAQRAHEESKTKSVRRKSAWNRAKTLADEEKTIFNGHNPPYGISFNKEENRFEIVEDEAQEIRDIFESLKYVGVSLTIKKINEYSKRKWTNRNIKHLLDTKYVLGSYMAQRRDENKKKVFERYIENYYPQIVSFELFNEAVASMKNRAHRKHYGNQTVGSLNIFRHSIKCSNCNASMLFEKQTNPKGVVYPYFQCFTRKELKNGCNHPRFRFDLAFGVFLELVKFATTSSETINPNEWNNETASVGSFHKTLFKLLTSTEKDKKLEKKISHVKNLLLEQKNYQDNINKSFEAFTDGIIPAAFIKKASETEIKIEALERELAELNIESSTRNVSLMVHSYNDIIDLYKTEAGRQKINSFFTSNDIAFSFSFSQKTRMLRCKIYYKGIHVDVINKEFPLHNPLKEFGIDNLNQYFN

SEQ ID NO: 17050 - protein, 506 aa, synthetic construct
MRSVITYLRFSSAIQGAEGADSTRRQNDLFKQWLKKNSDAHVVASFSDEGLSGYKGKHLSGQFGDMLSRIESGEFSEGTILLVEAIDRIGRLEHLETEALMNRIIAHGIEIHTLQDGLIYTRDALSDDLGISIIQRVKSYIAHQESKQKSFRVSQKWGQRAKLALAGKQRLTKMVPGWIDPETFEVNEHAETVRLIFKLLLDGESLHNIARHLQANNISSFSRRKDANGFSVHSVRTILRSETTIGTLPASQRNDRPAIPNYYEAAIDAATFNKAQEILDKNRKGRTPASDNPLTINIFKGLFRCQCGASVHPTGTKNKYQGVYRCNNHLDGRCDVPPLKRKPFDRWMIDNFLGMIDVGNDGESERKIAALQHEVEIVTSRIKKATALLLEMDDITELKAQVKELNQKRTELQTTINTMKRKTSLSDKGLPQLKDIDLMTKAGRVECQLILSKHLKGLTLGKDSVTVTLQNDTEITIPTNPLPLNDGSPIFEIADKELLDVDAYQL

SEQ ID NO: 17051 - protein, 533 aa, synthetic construct
MKRAVIYARYSTDLQNDQSVEDQMRLCRAHAERLGLSVVGEYSDRAKSGASMFGRPGLAKLMQAADRDEFEVLVSEAPDRISRDIADLAHIHKMLKFRSIEMNCVNGGTMDTVQIGMYGVIGQMQREEGAKKVKRGMVGVVRSGRNAGGKAYGYRPVIGKKGELEIVDEEAAVVRRIFDLYSGGVAPRSIAAILNREAIPAPRGQRWNASTINGNGQRGNGILRNPIYAGRIVWNRVRMIKDPSTGRRISRVNPESEREEIAAPHLQIVDDELFQAVQQRKEATGGADRAKAPRSKRILSGLLRCGACGGGMALVGPDRSGNRIQCSTFRESGACQNGRRYYVERIETEVVDSLRRQFADTSIIEAYVEAYQAEQKRLRGDAQRARANAERALREAKDGITKIIEKISKGLIEDDEAAALLAPLRVERDRQKAILETTDEPTNIIEIQPKAVARFRENIESLVQIVREKDGEASPEIAAPFRQLVAAVVVNPTEKGQPYEINIKGYLSSLIESELSVIKLVAEEGFEPPTQGL

SEQ ID NO: 17052 - protein, 691 aa, synthetic construct
MSKITIDHLALSAFIYVRQSTAYQVANNLESQRRQYSLVERARQLGWETVEIVDDDLGRSGSGTARPGFEKLLAAICEGRVGAVVSLEASRLARNGRDWHTLLEFCGLVGTLIVDEEAIYDPRSPNDRLLLGMKGTMSEMELSVFRQRSVEAMRQKARRGDLHLTVAVGYVKTDDVRVEKDPDRRVQESILLVFRKFAELQTVRQVLLWFRQENVLVPSVLQGRGKRPIEWKAPVYHTLHHILTNPVYAGSYVYGRRATRVMIKDGRKRVTRDTLRRNPKDWDVLIHGHHEGYISWAEFERNQHLIAENTNGKSYMGRGSIRRGEALLPGLFRCGRCGRRLHIQYSGKGGNTQRYVCRGTFGDMAAGNCIGFGGMRVDRAVAQEVLERLQPLGIEAALQAMEAHTQRHSDQHQQLENSIKQAQYEAARARRQYDAVDPDNRLVAGELERRWNEKLIQLRDLELQLQTLTGDRDTPVLSADDRTRLMTLGRDLGKAWDSPNASIETRKKIIRLLIKEIIVDIVDDTLALIIHWQGGDHTRMTVKKNKIGQTRWAVKADLVDLVRALARQLPDLSIAAILNRSGKRTGHGASWTRSHVCNLRNIHGIPVYREGERAERGERTLDETADILKVSRATAYRMVSSGVLPARQLCTGAPWIIQLSDIQDDAVRREADARRSRRPISQDPVQNPLLF

SEQ ID NO: 17053 - protein, 635 aa, synthetic construct
MMHEKIGPHHLEREAILYVRQSSAHQVLHNRESSALQYAMRDRLAALGWSHIETVDDDLGRSAAGGVARAGFDRMVAEVCLGKVGAVAAREVSRFARNSRDWQQLIEMCRVVDTVLIDQEAVYAPRQGNDRLLLGLKGSLNEYELDLLRQRSLSARYEKARRGELVVTVPIGFLKAGDRIEKDPDRRIQEAIVLVFNKVAELGSARQALLRFLEQGLDLPVRYANGDVIWRRPNYATIHRMIANPIYGGAYAYGKSRSVPRYDGRSGIRRKTRDEWLALIPDAHEGYVSWERAEEIRKMVSDNVPASRHHGAPKHGDALLAGLFRCKRCGRKLTVRYTGSNHNIPRYSCWRGLLDNGEPRCIAFGGLRVDDAIEEALLGVVEPGAIAAAVEAEGNMASQRDQVQDALLRDLEAARYAAERAFRQYDAADPENRLVTSELEARWNKTLARVGEIEARIAKHQMAAPQPIPMSTSQMAALAGNLRAVWTAPSTDARLKKRIVRTLIHEVVADLDDVTSEIVLVIHWVGGVHTELRLPKRRRGQRNATPDDIIAAVRQLVLIANDDVIAGVLNRNGLTTGNGNRWTRERVTALRSYRKIPVFRPQIDGVEPWLNLGGAAKLLGVTPKTLRLGGRGRRD

SEQ ID NO: 17054 - protein, 689 aa, synthetic construct
MSNTDLIPTALLARKAIVYVRQSSQSQVMTNLESQRRQYDLVDVARQHGFSDIETIDDDLGRSASGTVARPGFDRLVALLCAGQVGAVLCFDASRLARNGRDWHHLLELCGLVEARVIDHDGVYNPCRPNDRLLLGMKGSISEFELGVLRARMLDAARSKARRGELRLSVPFGYIWHREAGLGLDPDLRLQDVIRSIFARFRELGSARQVLLSMTRDNIHFPRPSDEGRMTSFVWTPVRYRNVIGILKNPFYAGVYVYGKSEKRTAIVDGRARRSYGHGKPAGTWEVMIRDHHEGYISWEEYERNQQQLALNNYGRSGGTKSGRGGKSLLSGLLTCGRCGRRLSVAYTGNPQNPVYRCYKQNLMMGLPRCMTFGGSKVDAAVARELLRAVEPLAIEATFEAERMHRERQEEQRHIHDLELRQARYEASLAERRYAACDPDNRLIAAQLEKNWETALRRVRDLEVRKPADSPSTIEVDTGTFANLADNLQAAWESPDVTMRVRQQLLRTLIADIVVDVEDEVRDVVLTIHWKGGQHSELRVRKPQSGEHGCATTEDALAVMRSMAGRWPDEHIAASLNRMGMPTGQGKTWTAHRVASVRRVRAIHAYKSADKEGEWLTMTEAAATLGVTNHRIRHLIKTNVLSAEQVVPGAPYQIRASDLTSATVQAAIARKGRPCRTTDTETLPMFTDT

SEQ ID NO: 17055 - protein, 506 aa, synthetic construct
MRTVITYLRYSSAIQGAEGADSTRRQNDLFKQWLKKNSDAQVVASFSDEGLSGYKGKHLTGQFGDMLARIESGEFPEGTILLVEAIDRIGRLEHLETEALMNRIIAHGIEIHTLQDGLIYTRDALSDDLGISIIQRVKSYVAHQESKQKSFRVSQKWKQRAKLALAGEQRLTKMVPGWIDPDTFKCNEHAETVRLIFKLLLSGESLHNIARHLQANNISSFSRRKDANGFSVHSVRTVLRSESVIGTLPASQRNDRPAIPNYYEAAIDAATFNKAQEILDKNRKGRTPASDNPLTINIFKGLFRCQCGASVHPTGTKNKYQGVYRCNNHLDGRCDVPPLKRKPFDKWMIDNFLGMIDVGNDGEAEGKIASLQHEVEIVTARIKKATALLLEMDDIDELKIQLKELNQRRTELQTTIDSMRRKTSLSDKGLPQLKDIDLMTKAGRVECQLILSKHLKGLTLGKDSVTVTLQNDTEITIPTNPLPLNDGTSIFEIAEKNLLNIDTFQL

SEQ ID NO: 17056 - protein, 690 aa, synthetic construct
MSSTDLIPAALLARKAVVYVRQSTQSQVMTNLESQRRQYDLVDIARQRGFGDIEVIDDDLGRSASGTVARPGFDRLVALLCAGKVGAVLCFDASRLARNGRDWHHLLELCGLVEARVIDHDGVYNPCRPNDRLLLGMKGSISEFELGVLRARMLDAVRSKARRGELRLSVPFGYIWHREAGLGLDPDLRLQEVIRSIFTRFHELGSARQVLLSMTKDQVHFPRPSDEGRMTSFVWTPVRYRNVIGILKNPFYAGVYVYGKSEKRTAIVDGRARRTYGHGKPAGTWEVMIRDHHEGYITWDEYERNQQQLALNNYGRSGGTKSGRGGKALLSGLLTCGRCGRRLSVAYTGNPQSRPVYRCDKPNLMMGLPRCMTFGGPRVDAAVARELLRAVEPLAIEATFEAERMHRERQEDQRHIHDLELRQARYEASLAERRYAACDPDNRLIAAQLEKNWETALRRVRDLEVRKPADSPSTIEVDPDTFTNLADNLQAAWDSPDVTMRARQQLLRTLIADIVVDVDDAVREVVLTIHWKGGQHSELKVRKPQSGEHGCATTEDALAVMRSMAGRWSDEHIAASLNRMGMPTGQGKTWTAHRVASVRRVRAIHAYKSADKDGEWMTMTEAAAALGVTNHRIRHLIKTKVLSAEQVVPGAPYQIRASDLASATVQAAIARKARPCRIADAETLPMFTDT

SEQ ID NO: 17057 - protein, 690 aa, synthetic construct
MSSTDLIPAALLARKAVVYVRQSTQSQVMTNLESQRRQYDLVDIARQRGFGDIEVIDDDLGRSASGTVARPGFDRLVALLCAGKVGAVLCFDASRLARNGRDWHHLLELCGLVEARVIDHDGVYNPCRPNDRLLLGMKGSISEFELGVLRARMLDAVRSKARRGELRLSVPFGYIWHREAGLGLDPDLRLQEVIRSIFTRFHELGSARQVLLSMTKDQVHFPRPSDEGRMTSFVWTPVRYRNVIGILKNPFYAGVYVYGKSEKRTAIVDGRARRTYGHGKPAGTWEVMIRDHHEGYITWDEYERNQQQLALNNYGRSGGTKSGRGGKALLSGLLTCGRCGRRLSVAYTGNPQSRPVYRCDKPNLMMGLPRCMTFGGPRVDAAVARELLRAVEPLAIEATFEAERMHRERQEDQRHIHDLELRQARYEASLAERRYAACDPDNRLIAAQLEKNWETALRRVRDLEVRKPADSPSTIEVDPDTFTNLADNLQAAWDSPDVTMRARQQLLRTLIADIVVDVDDAVREVVLTIHWKGGQHSELKVRKPQSGEHGCATTEDALAVMRSMAGRWSDEHIAASLNRMGMPTGQGKTWTAHRVASVRRVRAIHAYKSADKDGEWMTMTEAAAALGVTNHRIRHLIKTKVLSAEQVVPGAPYQIRGSDLASATVQAAIARKARPCRIADAETLPMFTDT

SEQ ID NO: 17058 - protein, 551 aa, synthetic construct
MVKSLSKTLSEGTFAQASRAALYLRVSTGRQAESDLSIPDQRRQATEFCKARGWEVAAEFVDAGLSGTDENRPELQRLLELATGGGSPFDAVVVHSFSRFARDHFALEHAVRRLRKNGVRLVSITQDLGDDPMSVMVRQVFALFDEYQSKENAKHVLRAMKENARQGFWNGAAAPYGYEVVAAEQRGAKTKKRLAIDPVEAEAVRLMFRLVTEGDGGSGPLGIKAATSLLNERGHRTRGGARWGIGQLHKLLTSPTYKGEYRFNRKVWKTKEDKPETEQVIVPVEPIIEPAVFDALQARLKARNPKAVPPRVVSGPILLTGLATCASCGGGMMLRTGKSGRYRYYTCATCAVQGKAACKGRSVPMDRLDDLVTGKLAETLFTAERVKTILTGLLERQAARSEDHTQRMTGLQNKVADAESRLSRLYQAIESGLVDFGDETLKGRVAALKAERDHAKAALDRAFAELRPEARLTEDKVDAFARLMRENVTQGAIPFRRAYLRSVIDQVEVDDEEIRIHGRRDVLERLVMSGVAAAGVPSFVRKWRTRRDSNS

SEQ ID NO: 17059 - protein, 518 aa, synthetic construct
MPKAISYIRFSTKIQSVGDSTKRQSKYINDWLKRNPDYYLDESLRFQDLGISGFSGANAKSGAFGEFLAAVESGYIEAGSVLLVESLDRVSRQDIDTAGEQLRKILRSGVEVVTLVDNEWYTKESLKDSLSMIKAMLVMERAHEESAMKSTRLRSMWAAKRERAANGEIMSKRCAAWLKVSDDRSHFEFIPENVKAVQRVFQLRLEGLSHVKIAKQMNDEGFSTLNQFKSVTGGWSQSSVTELLSNRSVIGFKVPSKSMAVKGVSEIPNYYPSIITDEQFYAVQQLKQGSGRKPSSDLPLLTNLFKGVLRCSECGFIVVVAGVSAKRSGIYKCSMKSEGRCNSVGFSRLQTDRALVQGLLYNTNRLSLNRDNGSAIGSLQSELEQLQKQRERLIKLAMLADDTESMAKDLKALNSQIKDAEKAVSEVHQREQSSQLETISHLDLTVKKDRIEAQIIIKRIVKEIRLNTAQKKCDVFLHNGLKLLNFPLDRVVDGEIFLEVLPLLEADEFDLDTYRVIE

SEQ ID NO: 17060 - protein, 613 aa, synthetic construct
MRTTPKIYNYARVSTTKQLQGVGLETQQQRSVLESLSQEHNLPIHDENFVDQGLSAYHGKHKEGALGLVLSHIESGEIPSGSILVVFSLDRLSRETVNVAMEQLLSIINRGVRVYTHIDCKMFDAKSQNLTADLIVSLITMQRANEESETKSKRIISAQKEALKKWHIDKKPRGALGRVPCWIDQPTNKLNQNATGIKVAIDLYLQGWSSIKIKKHLDENYPYKRTRITRVKTSSTWDLGVIDQLWNKRALIGEKHLSIEDKTHVLKDYYPKVVDLNTYLRLKALREPKKGRATTTGSIHLLKGLAKCGVCGGAMVFIDKGTSRQNYVCNLATKGEHQREVVSTRMLEFLTLEVCKDFYLVNKVGATSNTNIKAEIQERILEEKAELSDLIERYKKKARGSLAELIEDQEDKIELLEKELDTFNINIFDEVLERLTEDLYTEKVRNNMSDPQRADLHEILCRILKSVKVYRRTETTKFTKTKKVNCIEIEWEFKSGQARKLVMNPFEYIHTENRKSLYIPYEYKHDIPFEEYRRSKNLIPKALKKLHDWNWLRGLYPTRGRYDWNEIDLELGYVHTITSPNFDAILDGTYMKKGTMYIQSDKNSLEDKDDIFC

SEQ ID NO: 17061 - protein, 655 aa, synthetic construct
MKPTIITYLRYSSKQQADGLSEFRQSEINRKFVEKFCAEHDVDLNEVISLKDLGVSAYRGLNLTLGSFSQTIKKFKSGEIKKRFNEDGEINTYLIVESLDRITRTGPFKSTQIFTELLEYTNIVVLADGEKKIYSKKSIDSTHGMMDLFMALISLQRSHTESLMKEFRSRKSWEKKREDLLNYFTLPEDEREGLERPKNATAMCPFWLTAKKDGRGYDFIPENKKVMDFLIEKLLDGNGMTRAVRLLNDEIDAGNLKPKLKKANRKTRHFRAAAYSGLFNSEISTVKGDYLLTESYYPTEDDIEQGKYPEKHLGKRVRKEIAVLKNYYPALMTESQAAYIRKMMDERRSAGTKPNKSIKNLAQGILRCPLCNSTYIKSKDRKNVYLRCNLAREGLCNAKVIKHGVFEHNLLQFCKGLNINKIISNQSSDQVIDSSLKELEQKMMPLKVKKSQLEDDIEQIVKNISSIKIPSLLEKVQDDYLKKENELKKVVQEIDLIETSIMKLQHQIAMSDGDNSLQELIDLTLAEHADDEIRQRFNVELKKVVKSMTVLYRDTDDNPFGYHMISIQFLDGVHRLIPVHEKMTDKIHNILPYQDAVKVDSVDFSENVILPEDYVEGREKGKYPNLDGMAKYYQENPTKYLRLKHKMDQVHEIHA

SEQ ID NO: 17062 - protein, 374 aa, synthetic construct
MSNFNMTPNQPPAKCYSYVRFSTVSQGKEGKDSYIRQTLAAKEYAERMGLEYQDKSFSDLGISGFRSSKKRDGLSSMLEAIQSGAIEPTSTICIDGFDRLSRASFEHTYDTVRLIVGTGVKLHVVQDDMTLDKSSLNDLISIVRLALQSDLAHQESAKKSYLIKQSRLRAREAHRVTGKLPAWIKRDDSTPTGFAFNEMVDCIKELVRLRVEGKSLQSIAKNLNAMGYTTTTGAPWSSAGCRSIIESRALHGSKSYHETDSETGRMLLEPVDIVAGIFPALIDFDVWKSIQQKSKSAPTKVTKVSKKGAYSGLLRCGCCSAGMVMRTTTYTPKESGVPEVRMYRKCIRATEGSCTQTEQVREPETYILYRHGVE

SEQ ID NO: 17063 - protein, 604 aa, synthetic construct
MIKIIGYARVSTTKQDLSRQKLKIKEFCENNNYELIEIIEDFGISGVVADRKGYIELQSKTYKDADMIVISELSRLSRQEDVTETVYNIQQIINKGLSVILLDSPSKIYEANKLLDITEILILTIKAWAAAQERLDIKKKNQDGKQALFQAYPYAVVDQKIPYGYKAVPNPNGKRPKYILEEVPEEVENIKRLFALVNSGKTLGAVARYFNERNITFRGYYSTVAILSNYIHSDIYRGIRRRTQRLGREEPYTIEVRIKPIISEEDFMKAQELIKNNYKNTPTGKVNHNPLKGIIRCRCGRAMTVKDKKPAAGISKLTYRCSCVDRKSHPDFCKYNIDEVSYDLTNEILYSLFKSMHTAEYINFFRNQTDNRVTELQEEIAGIEKRLSALYLDKENLSNESQDNANKFLLTTNPTLLNIIQEKQNQLDEKIKSIDKEIIRYKKSQSKKMADIERIKDNNGKEKLQNLSIEEQGELYHKYLERVNYIPVTTMQGYYIVQFLNGIKFYIAITKVRSIAMASLLLDNWTIDEKGIITANYDTLKSSDMKNFSIEMIRKTKTMTLQEYLKSDLAKERALHLDLSYRERYLEQLHKAGLDGRLRPFKKE

SEQ ID NO: 17064 - protein, 531 aa, synthetic construct
MSIAYSYIRFSSAQQAQGDSLRRQTQLAQQYCEKHNLTLSDTNFQDLGVSAFHSVNAQEDSGLGQFLAALRQGLIPEGSYLLVESLDRLSRAKVQTALEQMLGIIRCGVKIVTLIDDCIYDRDSDSRDLIISLTIMERAHNESKTKSERLKAAWDNKRQNPKSTNRHGSTPFWLTLNSDKRTYTVKEEYAELIRKIYQLSIDGWGLVKIVRYLNECGIPAPKGRSWAITTVSKLLNSKAALGHYEPSQGRKSLNTVIKDYYPPIIDEKTYYTSLQRKKERSAPESAGRKTTYPNPLVHIAKCRLCGSSMFFENKQPSLNYLTCREFKKKNCTNKPIRMELIYRFIYEVFNSPMYHQQHVKLVDKSKQKGVNKLAELKGRYEAERKAYEELLEASSSFSDPIILKDLQRRSALILELSKQMEKEKAKEAVEKARTVHINFTEALQLTVNAFHLPLEGIKVEELSTDELFNTRVRLNRILKQAFNHLSIFHCNESKRITIETEVTEDYPIDLRYETNQKAIKEPMKNRIWSVY

SEQ ID NO: 17065 - protein, 509 aa, synthetic construct
MGQRKQAISYQRFSSDRQRNNSSLDRQSDSIKSWLKQNPDVDLIDQYVDEAMSGWSGKHIEQGSLGKLLQAIEEGIVQPETLILVEHFSRLSRQNIDKTEELLRKIWQHGITIVTIRDNGLYPPSTINDMPLRIRLIVEIEQAFKESEWRSAKVKGSYVKREKDAKNGLTPRMRRPFWLNKDGTLNDHHVVIKDIFNWYMEGLGQQRIIVKLKQKYQSVPSVQKMNPSTVMRWLDSDVVRGMWRGYKVYEAAVDDTLYFNVQTVHNSRLYHNVKPDRNWPLSGLLQCGVCGRGMSIQKSKGSLPVIRCSSKQRDKSCQRKTTFPYALAHLYMFNTVRKRASRLYTQKTVSKENALKLGQIDNDLVKLKTQLKEEKQLYDEASSEGKSGRLILKIMLETDERIQDLERERDSIQSSIKASNNLFISDEANNLVLTPRNFNLEMHKLGFKIVVGEYSLNTEGLSDKAPEWQYLGYSRKKRAYEWEVLGKKYFMPTASFNEEVLMLEDKEKI

SEQ ID NO: 17066 - protein, 604 aa, synthetic construct
MIKIIGYARVSTTKQDLSRQKLKIKEFCENNNYELIEIIEDFGISGVVADRKGYIELQSKTYKDADMIVISELSRLSRQEDVTETVYNIQQIINKGLSVILLDSPSKIYEANKLLDITEILILTIKAWAAAQERLDIKKKNQDGKQALFQAYPYAVVDQKIPYGYKAVPNPNGKRPKYILEEVPEEVENIKRLFALVNSGKTLGAVARYFNERNITFRGYYSTVAILSNYIHSDIYRGIRRRTQRLGREEPYTIEVRIKPIISEEDFMKAQELIKNNYKNTPTGKVNHNPLKGIIRCRCGRAMTVKDKKPAAGISKLTYRCSCVDRKSHPDFCKYNIDEVSYDLTNEILYSLFKSMHTAEYINFFRNQTDNRVTELQEEIAGIEKRLSVLYLDKENLSNESQDNANKFLLTTNPTLLNIIQEKQNQLDEKIKSIDKEIIRYKKSQSKKMADIERIKDNNGKEKLQNLSIKEQGELYHKYLERVNYIPVTTMQGYYIVQFLNGIKFYIAITKVRSIAMASLLLDNWTIDEKGIITANYDTLKSSDMKNFSIEMIRKTKTMTLQEYLKSDLAKERALHLDLSYRERYLEELHKAGLDGRLRPLKKE

SEQ ID NO: 17067 - protein, 595 aa, synthetic construct
MSNNVEIIKANPLVTRRNDNSGSSSRRVAAYCRVSSDSDDQKNSYDSQVRHYREYISQHQDWNLVDIYADEGISGTQVGKRQDFQRLISDCLDGKIDYIITKAIARFARNTLDTLKYVRLLKDKQIGVFFEEENIDTLTMDGELLLTILSSVAQQEVENTSAHVKKGLKMKMQRGELIGFQGCLGYDYNQDTKSISINEKEAKIVRYIFERYIDGIGGKAIARELDELGYKTPRGLDHWQDTTVLGIIKNEKYKGDILMGKTFTVDPISKRRLINFGEEDKYYIKNNHDAIISPEIFTQAQEIRLRRSGNKKTIANTKGKRERYSRMYPFSSRLECGFCGTVLSRRSWHSSSEYKKIIWHCTTSIKKGKKHCIHSKGIEEKAIENAFLQSYQQLFYENNNLTEDFLEIIKEELTDDTLKVELNKIVSKLNSLYKKEEKLVSMNLDGKISDSVYEDKFNQIQIEKEKLLEEKVNLEVTLKSEVDIKSRLENFKEILTSQKTLTEFDKDIFDSIVEKIIVGGINSDGEIDPAMLTIIFKTGDSSTKDAKSYKSKRKNAKIENDKLCFNTVTDDEKKCTNKENNARRDGSTFVQTRCR

SEQ ID NO: 17068 - protein, 485 aa, synthetic construct
MSKKVAIYTRVSTTNQAEEGYSIDEQIDKLKMYCEAMDWKVSEIYTDAGFSGSKLTRPAMEKMITDIGLKKFDTVIVYKLDRLSRSVRDTLYLVKDVFTKNEIDFISLSESIDTSSAMGSLFLTILSAINEFERENIKERMTMGKIGRAKSGKSMMWAKTAFGYSHNQETGILEINSLEASIVKQIFNEYLKGTSITKLRDKLNEDGHIAKELPWSYRTIRQTLDNPVYCGYIKYKNNTFEGLHKPIISHETYLSVQKELEARQQQTYEKNNNPRPFQAKYLLSGIARCGYCGAPLRIVLGHRRKDGSRTMKYQCVNRFPRKTKGVTTYNDNKKCDSGAYDMQWIEDIVLKTLNGFQKSDKKLRKILNIKEESKVDTSVFQKQLKSINNKIQKNSDLYLNDFITMDDLKKRTEMLQGEKKLIQAKINEVDKPSTSEIFDLVKSELGEIPISKISYEDKKKIVNNLISKVDVTADNIDIIFKFQLA

SEQ ID NO: 17069 - protein, 539 aa, synthetic construct
MGRTKKYVAGLYCRLSKDDGNSVESMSIWSQKVMLKQFAESNSIAIYDYYVDDGYSGTNFERPSFKKMITDIENGKINCVITKDLSRLGRNYLQSGAYIEMYFPQKNIRYIAITDGIDTLNSNQNDIMPFKNILNEMYAKDTSKKVKSAIQSRMREGTYIGSKAPFGYLKDPNNKRRLIIDEKTKPIIELIYKLCLEGKGTQLISQELMKRKIPRPSAFVENAEKLYGLTEENKYQWSHRMVLNVLRDPVYCGNMARNKRPTLSFKNSKRMYIPKSDYIYARNTHEGIVSEEVWEQVQTMVDKRKCNNKKGLYYDNIFQGLVRCPKCGYALTPKTDYRLKKKELIDFVHFSCSTYKKYGVNACSSHRIEARDLYNIVLEDIQYHGSMALSAKEDFVEKIIEKIEVEKIDEGKELSNKLELKKNQLAELDRSYEQLYEDRLEGNITERNFNLMNVSISKKQDKLIEEIKVLEGDIEVSFETEDNYKKFMDNISKYAKIKSLNRYILNQIIDKIYVYDKEEIDGQISQKVEIHYKFIGKLN

SEQ ID NO: 17070 - protein, 485 aa, synthetic construct
MAEKRKVAVYCRVSSMHQAIEGYSIEQQRDSLTKYCEAMEWNIYDIYIDAGFSGGKLERPAMDKLIREAEAGKFDTVAVYKLDRLSRSVQDTLHLIRDVFKEHDIDFVCLQENIDTKSAMGNLFLTLLSAIAEFEREQITERMAMGRHGRAKSGKSMMWARPAYGYRYDRESQTVSVVQSEAMIVKRIYKEYLEGKSVSQIKNDLNSEGHITKEKPWVYKRITYILQSRVYTGVNEYKGEIYDGKHEAIIDTETFELTQMEFAKRQQQTKDKKNNPRPFQAKYMLSGLARCGYCKAPLKLRLGAVRKDGTRAMVYDCHNRWNRKVTYLTIYNDNKQCTESGRYQKADLEAYVLDKIKELQLNPDTIREKMDLNEKPTANTEEIKKQIAKINQRIDKLNDLYLNDLITVEKLKERANKLKKERELLEAELSKNSDHLFKAKKKQLNDLLMNKDIDSMTYEEQRNLVKMLIYKVDVTKEDINIIFDF

SEQ ID NO: 17071 - protein, 452 aa, synthetic construct
MKAAIYIRVSTQEQVENYSIQAQTEKLTALCRSKDWDVYDTFIDGGYSGSNMNRPALNEMLSKLHEIDAVVVYRLDRLSRSQKDTITLIEEYFLKNNVEFVSLSETLDTSSPFGRAMIGILSVFAQLERETIRDRMVMGKIKRIEAGLPLTTAKGRTFGYDVIDTKLYINEEEAKQLRLIYDIFEEEQSITFLQKRLKKLGFKVKSYSSYNNWLTNDLYCGYVSYADKVHTKGVHEPIISEEQFYRVQEIFSRMGKNPNMNRDSASLLNNLVVCSKCGLGFVHRRKDTVSRGKKYHYRYYSCKTYKHTHELEKCGNKIWRADKLEELIIDSVNNYSFASRNVDKEDGLDNLNEKLKTEHTKKKRLFDLYISGSYEVSELDAMMADIDAQINYYEAQIEANEELKKNKKIQENLADLATVDFDSLEFREKQLYLKSLINKIYIDGEQVTIEWL

SEQ ID NO: 17072 - protein, 452 aa, synthetic construct
MKAAIYIRVSTQEQIENYSIQAQTEKLTALCRSKDWDVYDIFIDGGYSGSNMNRPALNEMLSKLHEIDAVVVYRLDRLSRSQRDTITLIEEYFLKNNVEFVSLSETLDTSSPFGRAMIGILSVFAQLERETIRDRMVMGKIKRIEAGLPLTTAKGRTFGYDVIDTKLYINEEEAKQLQMIYDIFEEEKSITTLQKRLKKLGFKVKSYSSYNNWLTNDLYCGYVSYADKVHTKGVHEPIISEEQFYRVQEIFSRMGKNPNMNRDSASLLNNLVVCGKCGLGYVHRRKDTVSRWKKYHYRYYSCKTYKHTHELEKCGNKIWRADKLEELIIDRVNNYSFASRNVDKEDELDSLNEKLKTEHTKKKRLFDLYISGSYEVSELDAMMSDIDAQINYYEAQIEANEELKKNKKIQENLADLATVDFDSLEFREKQLYLKSLINKIYIDGEQVTIEWL

SEQ ID NO: 17073 - protein, 515 aa, synthetic construct
MKTAIYLRKSRADLEAEARGEGETLAKHRSTLLKIAKEMNLNVLSVREEIVSGESLVKRPEMLALLEEIEDNKYDVVLCMDMDRLGRGGMKEQGIILETFKRSNTKIMTPRKTYDLNDEWDEEYSEFEAFMARKELKIITRRMQRGRVASVEAGNYLGTHAPFGYDIHRLNKRERTLTINPEEASIVRMIFDWYANEDMGANAIRSKLNDLGYKSKLGNEWNPYSILDILKNNVYIGKVTWQKRKEVKRPDAVKRSCARQDKSDWIIADGKHEPIIPESLFEQVQEKLNSRYHIPYNTNGIKNPLAGIIKCAKCGYSMVQRYPKNRKETMDCKHRGCENKSSYTELIEKRLLEALKEWYINYKADFEKHKQDDKLKETQVIQMNEAALRKLEKELVDVQKQKNNLHDLLERGVYTVDMFLERSNVVSDRITEITSTMENLKKEIKTEIKKEKVKKDTIPQVEHVLDLYFKTDDPKKKNSLLKSVLEKAVYKKEKWQRLDDFELVLYPKLPQDGDI

SEQ ID NO: 17074 - protein, 452 aa, synthetic construct
MKAAIYIRVSTQEQIENYSIQAQTEKLTALCRSKDWDVYDIFIDGGYSGSNMNRPALNEMLSKLHEIDAVVVYRLDRLSRSQRDTITLIEEYFLKNNVEFVSLSETLDTSSPFGRAMIGILSVFAQLERETIRDRMVMGKIKRIEAGLPLTTAKGRTFGYDVIDTKLYINEEEAKQLQMIYDIFEEEKSITSLQKRLKKLGFKVKSYSSYNNWLTNDLYCGYVSYADKVHTKGVHEPIISEEQFYRVQEIFSRMGKNPNMNRDSASLLNNLVVCSKCGLGFVHRRKDTVSRGKKYHYRYYSCKTYKHTHELEKCGNKIWRADKLEELIIDRVNNYSFASRNVDKEDELDNLNEKLKTEHTKKKRLFDLYISGSYEVSELDAMMADIDAQINYYEAQIEANEELKKNKKIQENLADLATVDFDSLEFREKQLYLKSLINKIYIDVEQVTIEWL

SEQ ID NO: 17075 - protein, 494 aa, synthetic construct
MGSRVSHLDDDKATTRKVSHKAQTEEGERWAKSQGYEVVGAFEDLGVSAGKTTPFERPDLGKWLAPERLHEWDVLVFSKIDRAFRSTSDCVDFARWTKENRKILAFSGDGVVLDYLHPKGESLDQMMSEFFIYVGSFFAAIELNRFRTRATDRISYLRMTDRVSHGVPPLGFRTVPHPSGQGKALERDPEGYALLHEIKDKLLQENYSLTGVVQWLNETGRQTAVAKARKGDAKWSVTSLKRTLTNERTQGLRMSGGKAVLDSQGIPIRMAEPTFTDDEWEQIQQAVNQRSTSGRARYMTDNPFAGIVYCVCGYAVAQHRRKSSSGKEHTYVRCGQGCRGAWKLADVHEQLDISFLAGYGEQEMSKLMFVPGEDRSDELAGIERSITRLRWESDNDLVDDEDLYQSRMASLLSRKREIGQIVVPARWERQGTGKTYQELWADPETDRRQAMRDARIRLVLHFIPKGSDAPFVTQANFVDMWNPSEEGKAALTKV

SEQ ID NO: 17076 - protein, 593 aa, synthetic construct
MNEASAQMSDNVAGDYGKVAVSYIRVSTKEQAERDGDPEGYSIPAQREANRRKAAAKEAMIVEEFVERGESAKHADSRPELQRLLRYLKDHRVDYVIVHKVDRLARNRLDDTQIHWAIKQAGAELVSATENIDETPSGMLLHGIMSSIAEFYSRNLASEVHKGMEQKAKTGGTPGRAPLGYLNVRKVNSEGVEVRTVEVDPARADHITWAFSAYATGAWTLKTMAAELEHRGLTTRPPPKLPGRPIKYNSLYRILTTPYYKGEVVYRGVSYPGRHRPLIDEVTWSRVQDVLTSHATGEKQREFPHYLKSSVFCGKCSSRLIITNAKNPSGKIYPYFVCLGRHQKTNNCQQKAVLIRVVEELVEDHYRTVQLDRRLADQIEAMVHDDLQSFRQAADTERRALSTQKERLESERMRLLQAHYAGAVPVDLLKQEQDRIARSLAGIEQRLDASAMQFDAFDASLRRAIDYAVNCSVGYRHAGSLPGGSQVRRLFNQAFFVKILVDEDTVRVELAEPFRTLLGAEAAIAARRHAQVAAADSEVDVVDAAPESAPSATDESENEKPTTRVVGLKLATLVPPAGFEPATKRLEGSCSIP

SEQ ID NO: 17077 - protein, 506 aa, synthetic construct
MKPQRAVLLLRISYRKPEEGEEEQAEGAERRRAEFSKGIGRQEEDGRALADRLGWKIVKVIPEDDTSAFKRRKIKLPDGSTALRTVRPGFRAALDGLASGEYDGLIADDLDRVARDPRDLEDLIDVVESRRPRIPVESVTGSLRLDNDANITMARVMVAVANKSSRDTSRRVTRKHEELAAEGKPPGGGYRGYGFSAVGHKPIEAEAQILREIAARILGDWDGWTADQRAAIDPEVGESLNSIAADLNRRKVPTVTGSPWRDRSVRSVVTKPSVAGLREYRGEIVGKAVWDAIVPQDRWEQVRARLAGRNRAVDLTLKRWLTGVLRCSNCGHQLIGWQGNNGPRYWCAKPHGGCGKIAVKAAFAEDEVSRQVLELLGQEDVLRRLRTVADTEVTDEARAELAADEEQLKVMAGMFARREITFNEYREGRAIIQQRIRESRALLTSRAPRVLRRLLAAADVADGWEALEPAGKREVVLALIPGYEVLPHDRSQGNRFDPGRLVPIEG

SEQ ID NO: 17078 - protein, 558 aa, synthetic construct
MTKLYSYIRFSSMRQSDGSSYERQIRMAKEIADRYNLELVNDYQDLGVSAFKGANSKTGALSRFLDEIGRSIPVGSWLFIENLDRLSRQDIISAQELFLSIIRRGITIVTGMDNKIYSIETVTANPMDLMFSILLFIRGNEESQTKRNRTNSSALLKIKAHQQNPQSPAVAIEEIGKNMWWTDTTSGRVLPHPVYFPVLQKIVQLRQEGHSAGAILDYLNEHHEPPAPTSNKKHGKWSRAMVSRLFHTKALIGVKTVNVDGVEYELRDYYPRVLSDSEFYFLRKNIVKKAWDYSHDKEKVIPLLSGIGVLRCVHCGATMVKQTAANGKREQYRYCCDGRKSGRTDCPYPNWGFRAVTLEGAVLQLLADKIWIAEDKTNPIPEIQVKIDEISRKIDNLINLSAMMGATKELANQITDLNSQREALHEEIRLFEREMYSVDSQGWDKLAQFDLSDVQNEERLKVRMKIKGALHEIECSRIDSKKNLFVLVYLDGLRQRLVIENNRGLKKGQIFVDLKTINDRQILESAGMVLHPCIEMIIDADWKAPEEIPGLLSEEFGI

SEQ ID NO: 17079 - protein, 558 aa, synthetic construct
MNKKIALYSRVSTSEQSERGYSIHEQEQVLIKEVLKHFPGYEYQTYTDSGISGKNIQDRPAMKRLLDDVKANKIEIVLSWKLNRISRSMRDVFNIIHDFKEHGVGYKSISENIDTSEYSGEILVTMFGLIGSIERQTLISNVKMSMNAKARQGEAITGRVLGYKLSLNPLTQKNDLVIDEHEANIVKEIFDLYLNHNKGLKAITTILNQRGYRTINHKPFSVFGVKYILNNPVYKGFVRFNNYQNWSTKRRSGKSGENDVILVKGKHEAIISEEMFDQVHEKLVSKSFKPGRPIGGDFYLRGLIKCPECGNNMVCRRTYYNTKKSKERTIKRYYICSLFNRSGSAACHSNSIKAEVVEAVIHKHLNIILSQPEVVGKICEDVIENIKHKQTAPIEAVDDIDTLKRQKHKIKTQQERLLELFLDDQMDSTLLSEKQKELNVQLATIEEKIKTAHNQQVNQPVTMNYKVLKVRLIMLMNRFSASLKKADPEAKNQLMKMLIDSIEITKDKQVKLIRYKIDETLIPQSLKKDWGTFFMPQFHFVIDDKNKCYVSKFTTFTT

SEQ ID NO: 17080 - protein, 558 aa, synthetic construct
MAYRKITDIRDTIGMRAVFYARVSTAEEEQLNAIELQIEENRGCIKDHGWKLVGEYIDRSKSGTMVKGRDDYQRLYEDLYEDLFDIVVIKDQERLQRNTLDWYLFINRVVQTGKLLFMYMDGKFYSPDDALITGVRAIIAEEFSRNLSKKLHNYHDHRIEKARQGQEIALQGSGNVYGWDKKDGKYYINPEQAKVRRLMCEGIMARKGSTLIAKELNDAGYRNTVGKPWKPMDIPKFVYDCKNVGTMIINKERHDFESKQTIKLPKEEWVYVENALPPIVTQEEWDLICKIHEERVIATGSDRRGKKTSGYSFSGKLVCGICGAPYWRKQRVSKDEYWVCSTKQTKGRRTRKRDSTMGKAGEINPLGCDNENISYNSLMEIMGVVSERLQANTDTIKQDMINWLTKLRKQLLEANGGHTEADLQRELSRKSKLLDAYLDGILNKQEYQKKAEELDERIIQLKTETEKNKANSGDIAEIDKVLANIDEEVARYVDGNEKLKVEYLLEHLEQVQIFPDKVIVIVPILSEGIVVEKTQYVSREKWCRKDYNYKNYYGCISC

SEQ ID NO: 17081 - protein, 527 aa, synthetic construct
MAYCLYLRKSRADIEAEAHGEGETLARHEKLLLEVAKRGHYNITQIYREIVSGETIAARPVVQKLLQEVEDGKWEGVLVVEVERLARGDTIDQGVMAQAFKYSGTKIITPLKVYDPANEFDEEYFEFGLFMSRREYKTIKRRLVRGRNASAKEGKWVSGLAPYGYERVRIKGDKGWTLRPVEEQADIVRFIFKLYTSGEEGDNGEVRRLGTYTISKRLDSLGVAPPSSAQYWNDRTVQCILQNPAYIGKVRWGVNKSKKRIVNNSIEVERYKAPADEVIYVDGLHSAIVDEAIFQKAQDLLKRSGPPPVPKRNSVVNPLAGILVCGKCGRSIVLRRGRIDILICHNRICDNVGSKYEYVEERLLQALSSWLDGYRLEWSDKLPADEQAILDLKQKALRKTVAELETLHKQLDRTHDLLEQGVYDTDTFLVRSRSLTERIAAAEEDISTLTAEVQADKERAASRLNVIPKVEKLLEVYPVLPSAQAKNEMLKEVLEKVEYTKNERSGRNGPFDNFELVLYPKLPPKIE

SEQ ID NO: 17082 - protein, 540 aa, synthetic construct
MKQPYNTTIYNTALYMRLSRDDELQGESGSIQTQRMMLRQYAAEHGLNVIDEYIDDGWSGTNFDRPDFQRMIDDIEDGKINCVVTKDLSRLGRNYILTGQYTEIYFPSKGVRYIAVNDNVDTINGENELAPFLNILNEMHARQTSKKVKAAMRTRFANGAHYGAYAPLGYVKDPDKKGHLLIDPETRWIIEKIFDLAVHGRGAASITRILVEEKVPTPGWLNFQRYGTFANIYAGAPEEKAYAWTIAQVKSILKEETYIGHSVHNKQTNISFKNKKKVRKPKEEWYRVENTHEAIISEDVFRQVQEQICNRRRRQKNGTTQIFSGLVKCADCGWSLAYGMNSQNKNHYAHYHCSKYGQGLHQCSMHYIRYDVLYAYVLSRLQYWSVLVQQDGDKLLKRLLNASDKERNTARKRQTAELKKAEKRKAEVDTLFAKMYEDWSAGRITEYNFNMLSEKYQGEQRELDAKIERLHEAMEVAAQTAVDAEKWIGLMKQYVNPTELTAELLNTLIEKILVHEAVKSEDGSREQEVEIFYRFIGKIE

SEQ ID NO: 17083 - protein, 602 aa, synthetic construct
MPTSKNTARKYAAGGSSDNSCGVEPLRAVIYARYSSSGQREESIEGQLRDCYEFAKKHGIIVIGEYIDKAMTGRVDRRPDFQRMMKDSEKGRFNCVLLWKMDRFARNRYDSAMYKYKLKKNGIRIFYAKETIPDGPEGIILESVMEGYAEYYSENLAQNVKRGNYDSALELKTLGKTCLGLKTGPDGRYMIDQAEAAIVRRIFEEYAEGERAKDIYERLNSEGYRTSRGGKFNKNSLRRILSNKKYIGVYEYEDIYVENGIPAIITDRDLFERVQKMLKINHDAPARGKAQNFLLTTKLFCGLCGSPMIGDGGTSHTGKAYAYYSCTKRKRGRSCTKESVPKDWIEDLVVGELVKIVHNDELIEQIADRVMEYQKREKDQSGLHALEIRQKENEKAISNMLAAIEAGIITPSTKTRLMELEADRADIEKGIAHELLAEPEFERDQIIYFLERFRSGDIKDEAYRIMLVDTFLNSVYLYDDDHLVIVMNYSGENCKVDLKLVEGAVSGDGCKGSAFAPSSALNNKTGTKQSVWSLSCCSKPKRALNPWFKVSPPARSARGMRSPGPHSVSAPLRSLQNRRPPDVLQPIFRKASVVAEQAPYID

SEQ ID NO: 17084 - protein, 618 aa, synthetic construct
MAGIKEEKKIYLVGIYCRLSKDDGTDNESASIATQKSILTDYVKKQGWHIAKTYVDDGYSGTNFQRPSFQNMIKDIESGLINCVITKDLSRLGRNYLDCGLYLEVFFPEHNVRYIAVNDGVDTLNKSAMDITPFRNILNEMYAADISVKIKSAYRARFQQGKFMGTTAPYGYIKDPADHNHLLIDDKVAHVVKEIFDLALKGNGVAKICRHLNKQHILRPAAYAAERGETGFERHFEGNEDKRYIWSGNSVRSILRSPIYAGNLVGYKRIAANMKSKKRPSKLPEEWEVIPNTHEGIVTQEEFDIVQQLITSRRLPQNKGGFVNIFAGVIKCVDCGCALRAMNVHRRKRPEIIDCVQYSCNNYARNGRSECSAHNIEARDLFNAVLADINCFADMAVNDEKAVRAIEKRLTETDQSRAKALEKERKKLNKRLAELDRLFSSLYEDKVMERITERNFEMMSGKYQKEQLEIEARLKEVTETLNESYEKSRGIRDFLALIRNYQGLKELDATVINALIDKILVSEREKMADGTVKQEIKIYYKFIGFVDELHIIPTKRWAAMPAKNCTVCGVKYVPGSGASRYCPACAKKIRREKSNESKRRSREQKRIACMNCPQKMTD

SEQ ID NO: 17085 - protein, 637 aa, synthetic construct
MNDVQVIKANRNENRIRGRKVEILRVAAYCRVSTDSEDQLNSYKSQVMYYTDLIKKKPEWSLADIYADEAITGTQVTKREDFQRMINDCMNGDIDMVITKSISRFARNTLDTLKYVRMLKEKGIAVFFEDENINTLTMDGELLLVVLSSVAQQEVENISSNVKKGLKMKMQRGELVGFQGCLGYDYHKDTKSISVNEKEAEIVRYIFNRYIEGAGCTVIANELENLGYKTKYGSSRWVQSTVIGIIKNEKYKGDLLLGKTFTVDPISKRRLENFGEEDKFYIRDHHEAIISEEIFEEAQKILAKRNVNRGVHQEGQKRNKFSRKYAFSCMIKCGFCGGTLSRRNWHSSSAYTKTIWHCVTATKHGKKNCPHCKGIPEEVIENAFVKSYQLLCSDQHEVVSEFLQKVEDILKDDASLKRLPKIEKEMTDLQRRKEKLLDLRLDNNIDRDIYDKKNQELSEQLKKLQAEQLQLVELSKNQESTKTRIREFRKNLNSGELLENFDRVVFESVVERIIIGGYNDEGVEDPLKITFVYKTGIHSNLNAKDFKPKRKNAAAVHTDAELCSYASVEDNKLCLHSSSDTCRVRGCTTSGRYVRILDFRHFERHMMFSQSDRKTYKKAISDGVNVSVVLDVGCGNT

SEQ ID NO: 17086 - protein, 560 aa, synthetic construct
MKKQQKCYIYTRVSTSMQVDGYSLDAQKDKLRKYAEYQEMSIVGEYSDEGKSGKSVEGRPQFKQMLSDIENGKDDVDYVLVFKLSRFGRNAADVLSSLQKMQDYGVNLICVEDGIDSSKDVGKLMISVLSAVAEIERENILVQTMEGRRQKAREGRWNGGFAPYGYQLVNGELIIAEDEAEIIRIIYDKFVNTTMGMAAIAAFLNNSGYKKKLRQNNTIEGFSTSFVKGVLDNPIYCGKLAFGRRKNEKIPGTRNEYHIVKQKDYLLSDGIHEAIISEEMWNQAHRKRQETGVLQVKTHSLEHEHILSGIIKCPVCGSGMYGNVNRKKHPDGGYYKDYFYYACKHRKLVDGHRCTYKRQWNEDRINAAVEEIIRKFVKNPKFEQEIRKQIGSSIDTSELDREYDGLKDRLSQTTGAKNRLADQMDHLSVSDKNYDKKYNDMQERLDKLYDEITDIENAMEEVETRLYNIRQDKISEDNVYQFLLFFDKLYDKFTDLEKKTFLKSFLSDVFIYEEEQKDGRILKGLRFKFPIYMNGRNVLGVDWDNESTDETVCLLSRKAQ

SEQ ID NO: 17087 - protein, 506 aa, synthetic construct
MKRAIAYLRFSSLQQVQGDSVRRQKKLIDEWLKHNADYYLDPVTFEDLGLSAYRGQHAISGAFSEFMEAVQKELIEAGSVLLVESLDRLSREKIGDASDRLRTILKAGIDVVTLTDGTHYTRDSLDDPYSIIKAILIAQRANEESEIKSKRQRAVWAEKRKQAAEKGKIMTRHCPSWLKVNAAGNGFEVIEDKADIIRTIFEMRLDGRSFEKISQALNVQGKKNLRGKVSQWNSASIERLVKSKAVIGVLSPSYRITVPDVEDISNYYPAIISIEDFERVRRISYEPESRRNTNFNPHLINIFKGLMHCKECGHAIILTGISTKGYGYYVCSMRRQHRCKTEAVRRDLTDRYLITGVLKGASGMDLHLSNETALTSMTARQLELTGKLQNVIKAIELAPDVRELTVRAAEISAEIIKLKSDMAEIQDERDMKAASALNVLNVADRKEFQLIARRIILDIKIDGKSKTCDIYLHNGMKVLNYPLTKSTGWSSILDAMAYLEQTEIIL

SEQ ID NO: 17088 - protein, 542 aa, synthetic construct
MNEMKKKRIGAYIRVSTERQVEGYSIDGQITQIEQFCQFNGYDLVDIYADRGISGKSMNRPALQRMLQDAKNGKLDCVIVYKINRLARNTSDLLTIVEELHRQNVEFFSLSERMEVKNSTGKLLLNILASFSEFERNTILENIYTGQHQRALEGYYQGNLPLGYNNIPDNKKDLMINQHEANIVKYIFESYAKGHGYRKIANALNHKGYVTKKGNPFSISAVTYILSNPFYIGKIQFAKYKDWNDKRRKGLNDKPVIAEGKHTPIISQSLWDKVQARKKQVSEKPQVHGKGTNILTGLISCPQCSASMSASTTVNTLKDGTKKRIRYYSCSNFRNKGSKVCSANSVRADVIEKYVMDQILEIVKSDKVIKQVVERVNQEHQIDTSALNHDIAYKQQQYDEVQIKLDNLIKTLEDNPDLTSVLKNTIHQYEKQLNDITNQINQLKQQQSAPKTIYDANEIATILRHIFKNIETMDKAQLKALYLTVIDHIDIRKDEHHKKQFYVTLKLNHEIIKQLFHNTPLDEVQLSTSSLLLSQTLYLPIS

SEQ ID NO: 17089 - protein, 449 aa, synthetic construct
MKQAMGYLRQSTTKQQSLPAQKQAIKTLAEKHNIRHITFYSDKQSGRTDKRNGYQQITELIQQGQCDVLCCYRLNRLHRNLKNALKLMKLCQKYHVHILSVHDGYFDMDKAFDRLKLNIFISLAELESDNIGEQVKNGIKEKAKQGKMITTHAPFGYHYHNGTFTIDTVKAPTVKAVFNYYLQGYGYKKIAQYLEADDNFINRKPYQVRNIILNPNYCGRVINQYGQYENMFPAIVSTTIYEEAQVIRTQKQVKRKPSENQLKQKIKCPYCHSTLTNMTVRKPNHSLRYYVCPQNMNNARFVCEFKGINAQELETSVLATCQDFFQNQQLYSKINHTIQQRLKRQRDIETKTTLNHEQLIEKLAQGKIDAETFREQTQSLHQQSKPISSISAYQIRKAFQNIIQQRFTLNMLYPYIDEINISKNKSLAGIYFKNEPLNIVNQTTQSSIA

SEQ ID NO: 17090 - protein, 558 aa, synthetic construct
MKGKIALYSRVSTSEQSEHGYSIHEQEQVLIKEVVKNFPGYDYETYTDSGISGKNIEGRPAMKRLLQDVKDNKIEMVLSWKLNRISRSMRDVFNIIHEFKEHDVGYKSISENIDTSNASGEVLVTMFGLIGSIERQTLISNVKLSMNAKARSGEAITGRVLGYKLSLNPLTQKNDLVIDENEANIVREIFDLYLNHNKGLKAITTVLNQKGYRTINQKPFSVYGVKYILNNPVYKGYVRFNNHQNWAVQRRSGKSDKNDVILVKGKHEAIISEEVFDKVHEKLASKSFKPGRPIGGDFYLRGLIKCPECGNNMVCRRTYYKTKKSKERTIKRYYICSLFNRSGSSACHSNSINAEVVERVINVHLNRILSQPDIIKQIASNVIEELKQKHSNQTEIKYDIDSLEKQKAKLKTQQERLLELFLDDQMDSEMLKAKQSQMNQQLEVLDQQIKEAQQANQSQDEIPNFDKLKGRLILMITRFSVYLRKATPEAKNQLMKILIDSIEITTDKQVKLVRYKIDESLIPQSLKKDWGSFFMPKFQFEIYGQNDYFIDQITTFTT

SEQ ID NO: 17091 - protein, 555 aa, synthetic construct
MQNFDFTWVYAYIRFSSDAQADGFSFERQREAVYAWTRSYGIADERVEFIEDAGYSAFTGAHMSRGALGKLLKRLQDSPREGNELVLFEAVDRSSREGPFLFSYMVGSFLAAGVFIHFLDERHPFSKNYPADPTLQLKLTIYASVAQQESSRKSIFSTNNWKNKRRAAQQDGTIITKECPRWLSVEEGKFVVDEERVEAIHAVFHLAKTGWGIGKIVRYANEWRWPVPGNGEVWHNSLLNRLFANRALLGEFQPHIKRDGKKVPEGEPISDYYPTVVDSDLFYAVRAVRSTIAQFPNRRDEHNYNYLQGLGRCECGGTWRRVNKQSGKQRGYAQYSCSNRQNGLSKCENLPARYFDHHFIVALCKNIPDFLAKIRSSTVDQGAAISDELGDIESRLVKLLDSLELNGDPAGLVTNRISSLVERKGELLQERERLLIEPISDSATFSMTEALSLYIPAFLDNYDGDSEESLKAFQARALFRSRLLSVVEQVTVSLSRTNINVLLKNREKLPLTIAHPKDVDDAGYGISPDDVGENDFDIEGDRRILDELEKTKIIY

SEQ ID NO: 17092 - protein, 525 aa, synthetic construct
MEGDILKTNLSEEYAVYLRKSRGDSTLESLGVDVLERHEHMLLDLAKKMNITIGHIYREVVSGDSISARPEMQALLHDVEDFRWKGVLVVEVERLARGDTIDQGIVQRTFQYSDTLIVTPLKIYNPADESDQEYFEFGLFMSRREYKTIKRRLQNGKYAAASEGRWPFNASPYGFNRVRLAKGFTLDIDPAEAPAVKLAFSLFTGPDRIGVTMIRKYFSDHGILTRSGKQWTDGMIRDMLSNPVYDQKVAIGRRRTVTKLVDGRPVKTRPRSNDYKVYDGLHPRMIDHKIFLEAQSYLGLGVPKPPESYGVKNPLAGLIVCAECGHKLVRRPATRATTKNGAKYDTMLCRTPQCPTVGCSLEILEKELLNSLSDWVKDYELKTILPESHVKEKEDLVTAATSELSTLESQRERLYDLLEQGVYTKDIFLERSHSLQERINDARVRLSALELELANERQIDAHILNFIPSCKELLSTYWSLSAADRNQALRMLIESVEYRKYEKNKKGKKDDASFELIIKPRIPRG

SEQ ID NO: 17093 - protein, 474 aa, synthetic construct
MTPPRPTALYLRVSTAAQVGDERFGLAVQTRIAQQYAMAHNLRITETFQDVITGTRATRQALDELLDRAGEYEVALVSAVDRLARRTAVSYAVLDELLETGIEVHSADMGRVDPDDEMSSLNFGVRSVFAQAEHQRLAKRLRGGMIAKVLSGKPVVPLTCYGWTRGEVCEEEKQWLIQVHRWAQEGWAAATIKQELNRLGVPGKNGGKWSDSTVKYLLRNPIYKGLYSFGKARPSRGDGRDLVTCEVPALLDPEFWNATQRALDSRMKGGRPRTARTPEEFPMIGRLRCGVCGSTMSAVRNDPHPARPKQISPYRYYHCYRLYKRSGLEGDLCTHRRNYGAKKLYPFILEQLRALLTDEQALTATLNVEPVKPLNTAAAVAAIDKRLGNLKMLALDGVIPPQEYKETRAELEAQRRALTTIPLAPVRTPQSVAQARAALAQALESDNLTEIARRLDLRVTLHPDGRVDLKLNAL

SEQ ID NO: 17094 - protein, 696 aa, synthetic construct
MLNDHHQKVQASHLKRNAYLYVRQSTLRQVFENTESTKRQYGLRQRAVALGWADERVIVIDTDLGQSGAATDREGFQRLVAEVGMGHAGIVLGLEVSRLARNSMDWHRLLEICALTSTLICDEDGVYDPAHFNDRLLLGLKGTMSEAELHVLRARLQGGILNKARRGELEMRPPVGLIYTSEGTLVLDPDQQVQHCLRWLFAAFARTGSACATVKAARDEKLAFPRRCAKGPHKGELLWGSLTHDQVLRVLHSPRYAGAFVYGRCHTIKTIDGRTRLRRRPRDEWVTLIPGSHAGYISWDEFELNQHRLHANAQARGTDRRRGPPREGPALLQGMVLCGRCGQRMTVRYHDRHGQLCPDYICQRERIKHGQAVCQHAPGTGIDQAVAAMLIEAVNPVALEVSLVVQQELQSRFEEADRMRHAHVERAQYECELAQRRFMRVDPDNRLVADSLEADWNEKLRALGEAREEYTRRRDEDARLLTDEQRKAIVQLATDFPRLWNDPGTLDRDRKRMVRLLVEDVTLNRDDKITIHIRFKGGARKSLHLPLPKCSWQQRVTPTSVVQEIDRLLDEHTTAQIADVLNARGFAPGAGSAFNTRMVARLARDYHLKPRYDRLRERGMLTLQEMADALQVTAHTVKIWLRRGLLRGHAYSDKNESLYEPPGDLALRKKPGAKLSQRRLEATVPPERTEGVQYAT

SEQ ID NO: 17095 - protein, 640 aa, synthetic construct
MSLPDTDLAPFAFDGMPPALAPVEEEDDARTDEGMVSSLPTGAVDAPPGSRAVIYLRVSSKGQVNTDYDPEGISIPAQRISCQRKAEALGLTIVHEYIEPGRSATEMTKRVAFQEMLERIRRDRDVDYVIVYKLSRFARNRTDDAIVMADLQKRGVTLISATEQIDATPVGQLMHGILAAFNEYRSREDGADIAYKMSQKAKNGGTLGRAPIGYLNVTENIDGRKINTVKVDPERAPFVKLAFELYATRDKTFQDIADELTDRGLRTRPTQRRPAGPISDSKIQQMLRDRYYLGEVRYKGESYPGRHEPLISEDLFNQVQQLTDERGYARERRKRHDHYLKGTIWCGQCRLEQHVNRRMILMRTTGRHGNADYGYFFCRGVQDHVCDAPYSSIDRVEDAVAEHYKTIRLSPAFVTAVRNHIESALNDQVAAQQLLRKNLEDQLAQLTVKEDNLLDLAADNSLPQERIRQRLRDIARDRQRVTEQLSQVHGDLSSGRAFLDAHLNLLENPYELYLHASEVTRRKLNQAIFAHVYVAHDEVIGDDIRSPLRELLAAERGWEALTAGATPEAARAATQAATARHSGPETPKTAPKGGLAELTNLWLDLPGGVYEDANCSKPLMVELRRIELLTFSLRTKRSTN

SEQ ID NO: 17096 - protein, 524 aa, synthetic construct
MTQKTAIIYLRVSSVQQARKELPVESQLQHAQGKAKALGAVVVAIFTDAGLSGRSDKRADFQEAIAYCEKHRPDYFIAWDTARFARNRIDAALYKRELRKHGTDVVYASMSIDSKTDEGWFVEALLEVMDESTSRRISKDTKRSMIQNAEQGYFNGGRVPFGYQTQAEGQRKRIVVLEVEAAVVREMFAMCATGMGALAIAVTLNNSGQSHRGQRWVKSSVISMLKNEIYAGYTIFGRRKRNERSLEPESNWIKTKSHPPIIEEDIFMRIQQQISSRAPVLGAGSPKSSHLFTGLLKCGECGAAMHIESATGRSKQYFYYRCGEAKRGSSCAGRRLSAPEVDGFLAETILNKILTPTRVSAIISEIEKATGDWWKDREAKREAIVAQIRDAEKRRRNLFSILELHGQDAPNLADITVRLREIKAQVEALEQSIVALEAQTDPELDINQADIAQATEAIRGMVLDADDPVTVRTFFGTFVEKITIEAERVTIEYDPAKIMNHGISVVHNKSVWLPDLDSNQGPAD

SEQ ID NO: 17097 - protein, 686 aa, synthetic construct
MKHEKIGPQHLERKAILYVRQSSAHQVLHNRESSTLQYAMRERLSDLGWSRIETVDDDLGRSAAGGVERAGFDRMIADVCLGKVGAVAAREVSRFARNSRDWQHLVEMCRVVDTVLIDQETVYAPRDGNDRLLLGLKGSLNEYELDLLRQRSLAARYEKARRGELVVAAPVGFVKAGDRLEKDPDRRVQDAISLVFDKVAELGSARQALMWFIEHGLELPCLRKQGEVVWRRPTYATIHRMIVNPAYGGAYAYGKTRTSIGFGASATRRKDRDEWLALKPGAHEGYVSWEKAEAIRRMVSDNVPQSRHHGAAKHGSALLAGLLRCRRCGRKLTVRYTGKKHDIPRYSCWRGILDNGEARCIAFGGLRVDDAIEHALLQVVSPGAIAAAEAAARQAVCQRDQVRDALSRDLEAAQYATDRAFRQYDASDPENRLVTAELEARWNRMLQRVQEIEQKLAHHDTTTSHATTLPVEDLAALGSNLERVWFAPGTDAKLKKRIVRTVIREVVANLDDNASEIVLLVHWAGGAHTEIRLPKRPRGQRNATPPDIVEAVRQLARIASDCVIAGVLNRNGLATGNGNRWTKERITALRSYRKIPVFKVEPNGLDPWLNLSNAAKLLGVAPKTLRLAAEAGEIKAEHPLADGPWIFERTELSKPAAQRLNNRARKNPKHPAVSHPDQQNLFPSTA

SEQ ID NO: 17098 - protein, 611 aa, synthetic construct
MRTVKAYIYSRVSSLQQVDAFGLDRQISTVLDFLENAKLPAELGYQLDPSNHEVLDSDKGLSGYAGHNFTKGSLGRFKERVRSGEITEGCLLIESVDRFSRKQGYDAIDEFTFLIKRNIDIVEVETGQIYSYKLDHKLSALSTSIERAHQESKRKARISMKSWKHRKEASLANGVALNNNTPDWLSLSTDKLSYEIDYHKVETIKRIFQMYRDGYGVTHIVKVLNDEGNRYNGKGWNTVTVYNKLRDRRLNGFLVGKYKTIPKKINESTNEAEKRILENLKIKKEANDNAKRIYPVVVDDDLFLKVQSLMDRNVSNKKQRSTTTKQRNLFNGLTKCYECGSPMIVQSMSNGGQYLRCYRQRTKDEKCNSKMLRYSVTEKVLLEHIKGLELDDIYGDKTQNNSVDTLKNLLQQTNNKLLELNEKIKSANDEEELFAIMEFKRKRNIEKEDLIAKINSIENASEVVRLSYNYDIGEISNQDNTVLRRKTNENISKVVASIKCLRTDSSYIGAYYSYDITYHKDILKHLLLTDNNGALLSEISIYQKNNERTYIVKEDKEMVFRVESNGDVWVLYASRKKSINDLLHYINVMMVGREPDTFSFVLNEDMIEWID

SEQ ID NO: 17099 - protein, 529 aa, synthetic construct
MKIAIYSRKSKFTGKGDSVENQITTCKEYIEKHFGESSIMVYEDEGFSGGDTDRPQFQKLIKDAESKKFDVLICYRLDRISRNISDFAGTIEMLEENNIAFVSVKEQFDTSTPMGRAMLYIASVFAQLERETIAERIKDNMYQLARTGRWLGGNLPTGFGSEPVVFIDENYKERKLYSLSPIDEELEIVKEVFEKYMELGSMSKVEAYSYQQDFKTKNGKFFGKNAVKSILTNPVYAKADKYSYEYFSSLGAQIANPANEWNGTHGIMAYNKQQIKKGKYPRLKDTSEWIIAIGRHEGIIPGKEWIQVQSQIGKNRDKAPRRGTSYAAMLSGILRCNFCDSYMQIKYDRVVKSTGKRRFYYMCNTKEVSKGSKCQCPNLPGEKTDQDVIDTLKYMIDNGLLEMLDKQQKKLGNKKNQSKDIYKQIEKNQKAIENLVKQLSENESSTVTKYIIAEMEKLEKDNTELQRKLEIDTTPSEILNIEILKAALIIFRDTIDHVPYEKKRDLVKSVVNKVVWDGKELIIDVLKTQ

SEQ ID NO: 17100 - protein, 528 aa, synthetic construct
MNIAIYSRKSKFTGQGESVENQITICREYIEKHFEKAEINVYEDEGFSGGDTDRPQFQRLIKEARAKRFDVLICYRLDRISRNISNFARTIEMLENNNISFVSVKEQFDTATPMGRAMLYIASVFAQLERETIAERIRDNMLQLARTGRWLGGNTPTGFESESIIYMDTAMKEKKMFKLSPIDEELTLVTLLFDKYLEFKSLSKLETYLIQNDLTTKTGKCFQKHSLRTILTNPVYAQTDGALYAYFSSNGAQIANEKSEWTGQHGAMVYNKNLVKKGKSVKRKDMSEWIVAIGKHKGIIDGREWIQVQHMMHINKDKAPRQGTSHTALLSGLIRCAGCGSFMGIKYGQVSKETGKRIYYYVCNNKNISRGVKCKCPNLQGMKVDKGIMEELKVLLANDVLKSLDQYNVNINTKKLEVKELQNKIHNKHKAIDNLVKQLSKSDDEFVSDYILNEIKRLIQANKVLSQELENDHKEIQLLNIDLLKMPSVGFSEIVDGTLYESKRNFINGIIEKIVWDGESLDIHLLNI

SEQ ID NO: 17101 - protein, 566 aa, synthetic construct
MEKAALYIRVSTHHQIDKDSLPFQKKELINYSKYVLGVDEYEIFEDAGYSGKNTDRPKFQEMMSRIRAGEFTHVLVWKIDRVSRNLRDFTEMYDEIKKYNVTFISKNEQFDTSTAMGEAMLKIILVFAELERKLTAERVYSIMLSRAEKGLWNGAPVPLGYDFDEELKFAVVNEEEAKIVKFIFDTYEEVKSTGEVKHRLEANGIRTKRNGHWTTKTISDVIRNPFYVGTYRYNYRYSPHGKIRPEEEWVVVEDNHPAIVSKEQYEKLNKIMDSNAHGRGTDRTKENHIHVFKGLISCSKCNKNYIASTDRPRSDGYRPSVYRCYNYVHNKKQYRTCSGGIGEVKLGPFVINYIANLIKSNEFISTYGSKGTEKEVEKILLKGSSFKGVAGIIAQDLKHTYEVLLKNTGDILFDSIEEPKDIEQDMELESLKSEKKKIERALQRLEDLYLFSEDSMSEKNYLVKKQELEKRINSINDKIKKRSQEYSRNLPGHDLSFIKKATQYLLAHNLYNDRAINYNKIVKMIDKKLLQDFMQCVVKKITVDEDKTISSIEFVNGLSHRFIYRK

SEQ ID NO: 17102 - protein, 520 aa, synthetic construct
MAGKNITVIPARKRVGSTAAKEKIKKLRVAAYCRVSTETEEQNLSYEVQVAHYTEYIKKNTEWEFAGIFADDGISGTNTKKREEFNRMIEECMEGNIDLVITKSISRFARNTLDCLKYIRQLKEKNIAVYFEKENINTMDAKGEVLLTIMASLAQQESQSLSQNVKLGLQYRYQQGKVQVNHNRFMGYTKDEEGNLIIVPEEAEIIKRIYREYLEGKSLVGIGRDLEKDGILTAAGKPRWRPETIKKILLNEKYIGDALLQKTFTVDFLTKKRVKNEGHVPQYYVENSHEAIIPKELFLQAQEELHRRSNIYTGADKNKRIYSSKYALSTITFCGDCGDIYRRVYWNIHGRKEFVWRCVTRIEQGPEVCKNRTVKETELYDAVMTAINRLLAGGDNMIRILEENIYAVIGDTTEYKISEINTLLEEKQKEVINLANKGKDYDFLADEIDKLREKRQTLLVEDASLSGENERINELIDFIRNNKYRTLLYDDTLVRKIIQNVTVYDDHFVICFKSGIEIEV

SEQ ID NO: 17103 - protein, 521 aa, synthetic construct
MKKITKIDELPKSQPSKSKLRVAAYARVSTDSDDQLVSLKAQRVHYENYIKSNPEWEFAGLYYDEGISGTKKEKRLELLRMIRDCESNRIDFIITKSISRFARNTTDCLELVRHLMDIGVYIYFEKENLNTGDMESELMLSILSGFAAEESASISQNTTWSISKKFQNGSYIIGTPPYGYANVNGEMVIVPEEAEIIKRIFAECLSGKGGSVIAKGLNRDKIPARRGNHWSSGTVIDMLRNEKYKGDVLFQKTYTDSNFNRHINNGEKNQFYCKDHHEPIISREVFSKAQKLITQRAKSMSKTANKKAYQNRYVLSGRILCGECGSKFKRRTNYSVGRSYIAWSCKGHIEDKDSCSMLFLRDGEIKATFSTMMNKLAFSKKLILEPLYDSINKIDEECDLARIDAIDKRMEQLTEERNTLIGLMTKGFLEPALFNKERNVLDKEIKNITAEKSNLVMSFTSGSSQADEVKALLDYVSADKFDGNYTDEAFEKFVENIIVNSRDELTFKMKCGLSLIEKVVR

SEQ ID NO: 17104 - protein, 545 aa, synthetic construct
MSSLITGECKISARVYSYLRFSDPRQATGSSADRQLQYAQRWAGERGLVLDESLSLRDEGLSAYHQNHVKQGALGAFLRAVDEGRIPDGSVLIVEGLDRLSRAEPLQAQAQLGQIINAGITVVTASDGREYNRAGLKAQPMDLVYSLLVMIRAHEESDTKSKRVKASIRRLCEGWVAGTYRGLIRNGQDPQWLRWDGQAWHLIPERVEAVRYAIELYKQGEGATRAARKLAERGYVLSDWGIAGQQIYRLVKLPALRGAKRISVDGEDYLLEGYYPPVLTDEEYEALQAATETRHGRRGAPEIVGLVTGLGIAYCGYCGTAVVAQNLLSRAREDGTVADGHRRLHCTSYSKSTGCKAASCSVVPVEKALLSYCSDQINLARLLEPVDDGQQLRQRLQACRRKQADVERQLQRITEALLADDQGAAPLAFVRKARELEAELGQLQAEAEHLEREQGKVGQTQTPAGAELWRKLAIEAQDIKSPAREQLRQLVLDTFSRITVYMRGLVPDPKSKVIHLVLVSRAGQRVALDVDRRSGAWKAGRDRRG

SEQ ID NO: 17105 - protein, 561 aa, synthetic construct
MSTSEQLRGFSLERQRKLIAEFAAKNGLSVEEENTLEDIGRSSFSDDAQQKELAKFFENLNAGKYEPGDVFALENIDRLTRRGPVDAILKVNQIISKGLKLAIISGNEQRIIEDVNDVFTIINLSIDASRANKESKNKSDKGLSNWQEKRNLAATHKIAMTAQAPAWLDTEIFYIFDEEKKKNIKRRKYVLNEEKAEAVRLIFNLYSSGNGALKIKNILNERNIPTFKGAEYWEPSIITKILKNPATFGLYQPKKQGTGKRDLIAAGEPINDYFPPVITRDLFEQCERIREGNGTRKGRKGKLFTNLFTGLLKCVDCGGPVHLLNPGIDKRNKVQKSIYYLVCKRAKFTKECTTKRVRYDDFETALLKAIQEINLADILNENNPLETLIKKQRSKETEINKKKKLIENFQRQFLENDGDLPSFMISQAKDAEISIKELEEDQRAIASEIAQLNIYNSNVDNAIEELKENADYGTRSKINLLFHEIIKNISLDTENQFYTVRFKNGVMRVITAAGFIATTEEQTPADINQILQSIEGPSIPREIATDAEKLIEYLKAREVIE

SEQ ID NO: 17106 - protein, 532 aa, synthetic construct
MVFGIYARKSLHSDQSDSVENQVLLAEEYIEKHYPAIEKQVIYYIDEDRSGGDMFRPDWERLISDMRNHALDIIVCYKLDRVGRDVADLALFYREIVQYDLVVIPVRDNLEIKEDMTPVEKGMMYMNAVFSQIERENTIVRVSDNMIKLAEKGYWCGGRPPIGFQLQRVMSDNMRMHTVLVENPSTVPFLHKLVHDFLNEGLSLGGMETKYRKEKFVTPLGATLTGSQIWVLLTNPNYVAADGIMYDYYASMGCKMAKPRESFDGQHGIIAYCRGRGAGKGMHKRKRILNPPEKWIISVGHHKPILDSQTFLSIQERFGQNIIDKTRKHKIGILKGVLRCSCGRLMRTKYKYDKKYNIEYQHYYCPGKDRLGSEYCSAKMIRLDDIDAEVIQQLTDISLDYTLIDQYISPVIPIPSLRSRSVVEKELKSVQNKISNLTQALANTDESPAAKYIISSIETLDAQITKLKKELYDISLAENKARKREVDKMERYQMVCHIIERLDVADYDEINGLIRELFAECVWDGEKLRIKM

SEQ ID NO: 17107 - protein, 540 aa, synthetic construct
MAERVYCLYRVSTAKQVDHDDQNQADIPMQRKACREFAERMRWTIVREEQETGVSGFKVSAADRDRLQLVKDHAEKGKFDILLVFMFDRLGRKSDETPFVVEWFVKKGIKVWSVNEGEQRFESHTDRLTNYIRFWQADGESQKTSIRTKTALGQMVQEGRFRGGVAPYGYRLEKSGVMNKRKHEVNKLVIDDKEAEVIRMMYSLCVSSGYGRWRIAMFLNDKGIKTRNGSNWHESSVGAILKNVTYKGVLRSGATFSEPFEELQIIDPYTFDLAQELKEERVNEKKEERTAPLNTSGQSLLSGNVFCGHCGGRLVLTTNGKVVKLANGETKGVKRIRYICYNKTRRRLDCDGQTGYTMHLLDDAVTQVLHQIFDRMSVVSDSMIVGNAQDRHMAELRTEIKRMKAENTKANTEYESLKAEVVKAVQGKSKMPVDVLSELVNESRDKVLATSERLTALMAELERGNEKAVEMKNELSRIRTWSEIFDESNMEVKKMITSYIIKRVNVYKDYKLDIDLNMDIQQFLNGIDSITEEKATTVAS

SEQ ID NO: 17108 - protein, 512 aa, synthetic construct
MEIFKQIQKEKDQVTPYVDYPYLVYGRVSTDKDEQVSSIENQIDICRDWLEKNSYEWNPDSVFLDNGISGTTILARKAMTLILEKARKREIKMVVFKSISRLARDLKDSLEIKELLLSANVRVVTIEEQYDSLYEGKNDYKFEMFSMFAAQYPKSLSVSISAAHASKVRRGEFRGGRPPYGYRIKDKHLIIQEDEAEVVRMIFDLYNNKGLGFKKVTYELNNALAKGEIVGPERKDKWQVTTIQTIIQNPMYAGVVVLNKYTHVKVDGRKKQIRNPMEKWNIFYDQHPRIISEEEWEKANTKSIIATKRRITPWNELRGLVKCDVCGSNMVVNASWKAKKDGTKTHWDYLKCSSYRRGGEYGCVNHAPIKYEEIRQLVISKLQQHGHDMPLNLKNNMMQKKEKLEKDLKARIESLKGKNKRLIELYLEDQLISKAEFQVKRSEIEAETKKAEDELFLLSSEKEEQLDIQNIKHAFTALNNTSEDLHEVFKTLIKEIRIGQTGELEIEYTFQL

SEQ ID NO: 17109 - protein, 534 aa, synthetic construct
MKPRALIVVRLSRVTDATTSPERQVTACRELCATRGYEVVGVAEDLDVSAGKTTPFDRPQLGRWLADPSKFDVIVFFRVDRIVRRLFDLADLIRWSREHGVTLVSATETHFDLSTDFGDIIALLVAKVAEMELEAISERNASAFRHNIKAGKYRGGMPPWGYVPTRDEDSGDWRLVQDPMQVSVIHDVVARVLKGEPLRAIAHDLTAQGVPTPKDRFAQTQGREVSGYEWHSFPLKRALTSPTLLGRVVTREPLLDAQGRVQRDTKGRKVFGPETVVVGDDGSPVIRAEPILSREVFDRVGVELSGRENRKEPTKRSSGLLLRVIYCGECGRPAYRLKGGTGRKARYRCASAQYKDSCSNRTIALEWAESELERRILTNMGPMERKRRVWFPGNDHSDELSEVNEMLSDLTDQLGTGAFKRGTPQRVRLDERIKSLTQRQEALASLPQEPAGWKYEPTGELFSDWWESQDTEARNVWLRQMNFRVVWKSHTEGTSTVVDEFKLDGDLTMDLDADQLFGPVVDMVAEFVESEVIK

SEQ ID NO: 17110 - protein, 510 aa, synthetic construct
MALHENSKIAVYSRKSREDRDSEDTLAKHRNELEYLIKRENFKNVQWFEEVVSGETIDERPMFSMLLPRIENGEFDAVCAVAMDRLSRGSQIDSGRILEAFKQSGTLFITPKKTYDLSIEGDEMLSEFESIIARSEYRAIKRRTINGKKNATREGRLHSGSVPYGYKWDKNLKAAVVVEEKKKIYRMMIKWFLEEEHSCTVIAEMLNELKVPSPSGRSIWYGEVVSEILSNDFHRGYVWFGKYKKSKSNNSIVQNKNLDEVLIAKGHHETMKTDEEHALILNRIEKLRTYKVAGRRLSMNTHRLSGIVRCPYCHKAQAIEQPKGRKKHVRKCLRKSAERTKECEQTKGIHEEVLFQSIMKEIKKYNEALFSPTEQDVNDDSYTTQLIGLREKAVKKAKGRIERIKEMYLDGDISKTEYKEKLKISQETLQKAENDLAELIASTEFQNALSAETKKEKWSHHKVQEMIESTDGMSNSEINLILKMLISHVTYTVEDLGDGTKNVNIKVYYN

SEQ ID NO: 17111 - protein, 611 aa, synthetic construct
MRTVKAYIYSRVSSLQQVDAFGLDRQISTVLDFLENAKLPAELGYQLDPSNHEVLDSDKGLSGYAGHNFTKGSLGRFKERVRSGEITEGCLLIESVDRFSRKQGYDAIDEFTFLIKRNIDIVEVETGQIYSYKLDHKLSTLSTSIERAYQESKRKARISKKSWQKRKKDSVDTGIALNNNTPDWLSLSQDKKSYELDVQKVQTITKIFELYRDGYGVTQIVNLLNKEGERYNGKGWNTVTVYNKLRDRRLNGYLVGKYTTIPKKDNESTNDAEKRILENIKIKKEANDNAKRIYPVVIEDDLFSRVQSMMDRNVSSKKQKSTTTKQRNLFNGLTKCNECGSPMIVQSMSNGGQYLRCYRQRTKDEKCNSKMLRYFETEKVLLQHIKNLNLDEIYGDEKSNQSLDTLKRLLSDVNEKIALLNEKVQSVNDESELFAIMEFKRKRILEKDELIAKINSLENQCEAVTLNYTYDIEQLTNQDNTVLRRKANEQITKVISSVKCHRVDSSLLGAYYLYDITYHREVLKHILITDNSGKLISEIAISEKNKERTYQVREDGKTVFKVESNGNAWVLYASRTKTIDDLLYYITTMMVGREPDEFAYQLNEDQIEWID

SEQ ID NO: 17112 - protein, 515 aa, synthetic construct
MKTAIYLRKSRADLEAEARGEGETLAKHRTTLLKIAKEMNLNVLSVREEIVSGESLVKRPEMLALLEEIEDNKYDVVLCMDMDRLGRGGMKEQGIILETFKRSNTKIMTPRKTYDLNDEWDEEYSEFEAFMARKELKIITRRMQRGRVASVEAGNYLGTHAPFGYDIHRLNKRERTLTINPEEASVVRMIFDWYANEDMGANAIRSKLNDLGYKSKLGNEWNPYSILDILKNNVYIGKVTWQKRKEVKRPDAVKRSCSRQDKSEWIIADGKHEPIIPESLFEQVQEKLNSRYHIPYNTNGIKNPLAGIIKCAKCGYSMVQRYPKNRKETMDCKHRGCENKSSYTELIEKRLLEALKEWYINYKADFEKHKQDDKLKETQVIQMNEAALRKLEKELVDVQKQKNNLHDLLERGVYTVDMFLERSNVVSDRITEITSTMKNLKKEIKTEIKKEKVKKDTIPQVEHVLDLYFKTDDPKKKNSLLKSVLEKAVYKKEKWQRLDDFELVLYPKLPQDGDI

SEQ ID NO: 17113 - protein, 450 aa, synthetic construct
MTKAAIYIRVSTQDQVENYSIEVQRERIRAYCKAKGWDIYDEYIDGGYSGSNLDRPDIKRLLNDLKKIDVVVVYKLDRLSRSQRDTLELIEEHFLKNNVDFVSITETLDTSTPFGKAMIGILSVFAQLERETIAERMRMGHIKRAENGLRGNGGDYDPSGYTRVDGHLILNPNEAKHIKRAFDLYEQYHSITRVQEVLKEEGYTIWRFRRYRDVLSNTLYIGQITFAGKTYKGQHEPIVSLEQFKRVQALLKRHKGHNAHKAKQSLLSGLITCSCCGEKFVAYSTGKSKDIESKRYYYYICRAKRFPSEYDEKCLNKTWSRKKLEEVIFDELKNLTVKKSTSQKKEKKINYEKLIKDIDKKMERLLDLFTNTTNISRQLLETKMDKLNLEKEHLILKQQSYEQEFSISKDMITTINESLETMDFKAKQIMINTFIQEIHIDHDVVDIIWR

SEQ ID NO: 17114 - protein, 532 aa, synthetic construct
MKRAALYGRYSTDLQNDRSVEDQFRLCHEYSARLDAAVVKQFSDRAKSGASMFGRQGLADLMTAAERGEFDILVTEHADRVSRDISDLGHIHKVLKFRGIEMHCVNGGLMDTVQIGMYGLVGQMQREEGARKVKRGMIGVVRSGRNAGGKAYGYRPVVGKPGELEIVEDEASTVRRIFEMYAAGISPRTIAGILNREAVPAPRGRQWNASTINGSNQRNNGILRNSIYAGKIMWNRTHMVKDPTSGKRLSRANDHEQIETIDAPHLRIIDEDIFEAVQGRKVAAAKVGPKAPRSKRLLSGLLRCGACGGGMVMIGPDRNGHRIQCSDHRESGVCHNTRRYYLGRIEALVMNRLRSIFSDTKYIESYIQAYQEEQKKLRSSALRDRASATRLLEEAKAEITKIISMMAKELIGEEEGVALLTPLREQRDAQKAILESIEEPTNVIELQPKAVTRFRENIESLAQIVAKEGAEPSPELIGPFREIVAAVVVHQTDPGQPYDIGLKGRLASLVSPELSVIKVVAEEGFEPPTQGL

SEQ ID NO: 17115 - protein, 583 aa, synthetic construct
MLGIYTRISGNKAIGKDTSIEIQTAEGMKVALRLGMKYKIYSDVGISGTKDEVEDRPSFAKMMKDIEKDKITAVYVFDQSRLERNSNIWNIFQFQVNKKDVKFYPKGVETDLTDPAIKFVTGIQSLANQLFAEQTREKVNLTFDKRASEGKTHGALPYGYEKGADGMYQIIQTEADVVRRIFDLSLARNGTYTIANILNADNIPTKFQNVSKKDSFVRYDAYTGEEIVFKKSSIQWRGNVIYDMLKNTVYKGIRVWNKKPKGNKQRIEASVPSIISEDLFDKVNRNLVNNKQKVGKRSEFKYLLNGLIVCGHCGKEYRGKKRIVNKDSAYKCIHQGKCPESRGISIVRFENFIIQHLFVNKNLKELLLNLPINNDNGVVLKNKLVKYEEELKKKTKLKEKHLSWLDDDELEDDESIREQYKRNLKVIDNLKNNIEILKLEILESDSNFAKIRVESTVNEYKLTAGFDDTKRLIHTLVESITVNHSKLEKGGYFFILIKYKGFEEYSAFTTDWFSTKWHWMYYARGKATNEAQQLQDIEDQKALLDFKGIEYTEEDFIDFEAGESVTGMVDAIVLDNNNLVTFN

SEQ ID NO: 17116 - protein, 543 aa, synthetic construct
MSTSEQLKGFSLERQRKLIADFAAKNGLSLDESHSIEDIGRSSFSDDAEQKQLARFFEDLDAGKFSPGDVFALENIDRLTRRGAIDALLKVNTILSKGLKLAIISDREQRILEEIDVFSIITLSIDAARSHSESKNKSDKGLLNWEEKRNLAATHKIAMTAQAPAWLDTETFYIMDESKGKQIKRRRYVLNPEKSETVRLIFELFQNGNGSLKIKNILNDRKIPTFKGAEYWEPSVISKILRNPATHGFYQPQKQRTGKRDLVPAGDPIEDYFPAIVSRETFEQCQRITAANSTRKGRKGKVFTNLFTGLLRCVDCGGPVHLLNPGIDKRAKVPKSVNYIVCKKGKFTRECILKRLRYDDFEAAMLKAIQEINLADVLNENNPIEQLIKQIRTIETRIEKNNTMLENFRLAFRESGTLPSFMIEEANNAENHNKALEIERTELQAQMAQLNVYNTNIDNAIEELKTNGTYETRAKINLVLHEIIKTINIDFELVDFAIIFKNGVKRFVNDGIVQNVFTTKTGSDQYYSEIDEILNHPTSQSTK

SEQ ID NO: 17117 - protein, 688 aa, synthetic construct
MTSADLPVTVLQRKAVVYVRQSSQSQVMTNLESQRRQYDLVDIARSYGFVDIEVIDDDLGRSASGTVARPGFDRLVAWLCAGKVGAVLCFDASRLARNGRDWHHLLELCGLVEARVIDHDGVYNACHPNDRLLLGMKGSISEFELGVLRARMLDAARSKAHRGELRLSVPFGYVWHREAGLGLDPDIRLQEVIRLIYARFRELGSARQVLLSMQAEQIHFPRPADEGRMTNCIWQPIRYRNVISVLKNPFYAGVYVYGKSEKRTSIVEGRARRTYGHYKPAGTWEVMIKDHHEGYIGWDEFERNQKQLALNAYGRQDGAKSGRGGKALLSSLLTCARCGQRLSVCYRGGPISQPVYRCDRGNLAGQPRCMTFGAPKIDTAVARELLRAVEPLAIEAAIEAERMHQERQEDRRQILDLELQQARYEAGLAERRYAACDPDNRLIAAQLEKNWEAALRRVRDLEMRKPAHDPTTIVVDPNAFSNLAENLSAAWNAPDVTMRARQQLLRTLIADIIVDVDDAVRDVVLTIHWKGGQHSELRVRKPQSGEHGSATAEDALEVIRGMAGRWSDEHIAATLNRMGFPTGQGKTWTAHRVRSVRYVRGIDAYRSADKNGEWLTQAEVAKALGVSSYLVRRLVSTGVLPAVQVVPRAPYQIRAADLTSEPVKAAIARKGRPLRDVDADTLPMFTYT

SEQ ID NO: 17118 - protein, 481 aa, synthetic construct
MITTNKVAIYVRVSTTNQVEEGYSIDEQKDKLSSYCDIKDWNVYKVYTDGGFSGSNTDRPALESLIKDAKKRKFDTVLVYKLDRLSRSQKDTLHLIEDVFIKNGIEFLSLQENFDTSTPFGKAMIGLLSVFAQLEREQIKERMQLGKLGRAKSGKSMMWAKTSYGYDYHKETGTITINPAQALTIKFIFESYLRGRSITKLRDDLNEKYPKHVPWSYRAVRTILDNPVYCGFNQYKGEIYPGNHEPIISKEEYDKTQSELKIRQRTAAENVNPRPFQAKYILSGIAQCGYCGAPLKIMLGVKRKDGSRLKKYECHQRHPRTLRGVTTYNDNKKCDSGFYYKDKLEASVLKEISKLQDDADYLDKIFSGDNAETIDRESYKKQIEELSKKLSRLNDLYIDDRITLEELQSKSAEFISMRGTLETELENDPALRKNKRKADMRKLLNAEKVFSMDYESQKVLVRRLINKVKVTAEDIVINWKI

SEQ ID NO: 17119 - protein, 481 aa, synthetic construct
MITTNKVAIYVRVSTTSQVEEGYSIDEQKAKLSSYCDIKDWSVYKIYTDGGFSGSNTDRPALESLIKDAKKRKFDTVLVYKLDRLSRSQKDTLHLIEDVFIKNGIEFLSLQENFDTSTPFGKAMIGLLSVFAQLEREQIKERMQLGKIGRAKAGKSMMWAKTSYGYDYHRETGTITINPAQALAIKFIFESYLRGRSITKLRDDLNEKYPKHVPWSYRAVRTILDNPVYCGFNQYKGEIYPGNHESIISKEEYDKTQSELKIRQRTAAENVNPRPFQAKYILSGIAQCGYCGAPLKIMLGVKRKDGSRLKKYECHQRHPRTLRGVTTYNDNKKCDSGFYYKDKLEAYVLTEISKLQDNAGYLDKIFSGDNAETIDRESYKKQIEELSKKLSRLNDLYIDDRITLEELQSKSAEFISMRGTLETELENDPALRKNKRKADMRKLLNAEKIFSMDYEGQKVLVRGLINKVQVTAEDIVINWKI

SEQ ID NO: 17120 - protein, 594 aa, synthetic construct
MKKEVKVIKGDTTLKRTASGCVERSIKRVAAYCRVSTDTEDQINSYNSQVEHYTEFIQKNNEWTLAGIYADEAITGTQVDRRIDFQRLINDCMNGDIDMIITKSISRFARNTLDTLKYVRKLKEFNVAVFFEEENINTLTMDGELLLTILSSVAQQEVENISANVKKGLRMKMERGEMVGFQGCLGYDYDPETKSISINEKEAEIVRYIFRRYIEGVGGMVISRELEEQGYLSPRGNKRWTETTVLGIIKNEKYKGDLMMGKTYTVDPISKRRLDNFGEQDKFYIENHHEPIISEEDFEKAQGIRLRRSKNRNTVANNGGKREKYSRKYAFSSMLECGFCGHNLSRRNWHSSSEYTKVIWQCVNATKNGKKYCPHSKGIEEEAIEKAFMESYRQVCHNNVEITNEFLKTVEEELKDNSLAKDLKKITNQLDKILKKEKDLVELRLNESISMDIYQDKYNEIAISKEKLLAEKRTLEVTLTDEKALKKRLEGFKKLLESNKYLEEFDRAVFESIVDKIIIGGTNDEGEIDPAMITIIYKTGKKDSQDGRLFKSRRKNAKEVNEKADSKLYPQSSDEVNNLCSYPMDNTRGVCKFT

SEQ ID NO: 17121 - protein, 548 aa, synthetic construct
MIQTNSNHFSFKAAIYCRLSKDDEQKGESASIQNQKELLENYVKSRGWSIYDVYIDDGYTGLNTNRPSFQRLIRDIENKKVDIVITKDLSRLGRNYLQTGYYTENFFPKNNVRYIALNDGVDTFQENNEIVPFKNVLNEFYSRDVSKKMKSAYMTRARQGKFIGCLAPIGYRKDNEDPHKLVIDDETSWIVEKIFDLAFNGYGVQAIRRRLFEEKIPTPTWWNRKKGLRNKKTKLEMTVDGGEYWWDCTTLKEIIENPVYIGHIASQKVNYKFKVGWLSDKPKEEWIIVENTHEPIISEDIYNIANEKLKSRRRPFKNGEESIFAGIVKCPDCGKSLNLGRNKSKKREKLLTCNTYRRYGKSLCSQHRIYYDTLYEIVLKDIRKNAEIALKDEKEIIKALEKSREVDNEEEQKFIMDKIYEDQIRVEDLTKKIERLYDDWLDNKISESNFQKILEKSQKEQDYLNQRIEDNQKLIVKEDLEDINVKKWIELIKKHRDIKKLDKETLNELISKIYVHEKEVVNGEITQTIDIYYNFIGNTDTLQVFYNL

SEQ ID NO: 17122 - protein, 481 aa, synthetic construct
MKTMNKVAIYVRVLTTNQVEEGYSIDEQKDKLSSYCDIKDWNVYKVYTDGGFSGSNTDRPALESLIKDAKKRKFDTVLVYKLDRLSRSQKDTLHLIEDVFIKNGIEFLSLQENFDTSTPFGKAMIGLLSVFAQLEREQIKERMQLGKLGRAKSGKSMMWAKTSYGYDYHKETGTVTINPAQALTIKFIFESYLRGRSITKLRDDLNEKYPKHVPWSYRAVRTILDNPVYCGFNQYKGEIYPGNHEPIISKEEYDKTQSELKIRQRTAAENVNPRPFQAKYILSGIAQCGYCGAPLKIMLGVKRKDGSRLKKYECHQRHPRTLRGVTTYNDNKKCDSGFYYKDKLEASVLKEISKLQDDADYLDKIFSGDNAETIDRESYKKQIEELSKKLSRLNDLYIDDRITLEELQSKSAEFISMRGTLETELENDPALRKNKRKADMRKLLNAEKVFSMDYESQKVLVRRLINKVKVTAEDIVINWKI

SEQ ID NO: 17123 - protein, 924 aa, synthetic construct
MAGIRTENKIYEVGIYCRLSKDDGTDNESASIATQKSILTDYVKRQGWHLAKTYVDDGYSGTNFQRPSFQNMIKDIENGLINCVITKDLSRLGRNYLDCGLYLEVFFPEHNVRYIAVNDGVDTLNKSAMDITPFRNILNEMYSADVSVKIKSAYRARFQQGKFMGTTAPYGYVKDPADHNHLLIDDKVAHVVREIFDLALAGNGIAKIRKHINKQHILRPAAYAVEQGATGYERYFEDNEENRYIWSENSVRGILRSPIYAGNLAGYKRIAANMKSKKRPSKLPEEWEVIPDTHEGIVTQEEFDTVQQLMTSRRREQNAGGFENIFSGVIKCADCGYAMRAASANRRKRPDIIDCVQYTCNNYGRYGNVMCTAHSIEARDLFNAVLADINRFADMAVNDEKAVRAIERRLTETDQSRAKSLEKEKKKLNKRLAELDRLFSSLYEDKVMERITERNFEMMSGKYQKEQLEIEARLKEVTETLNDSYEKSQGVRDFLSLIRNYQGLKELDATIINALIDKILVSEREKLADGTVRQEIKIYYKFIGFVGELHITPTKRWTALKPKNCTVCGVEYVPSSGISKYCPACAKRIQREKSNESKRRSRERNRRACIELSAKNDRLMLVALVNYLLQILTELIKLAMLVTSLNVSYISAKRVQEIFDLKEEDLLEALPEETAREQEAISAEKVSFTYPTASSPALENISFDLDHGQMLGIIGGTGSGKSTLVQLLSHLYAVSQGQLALYHQGHSPKTLKEWREWVAVVPQKAELFRGTIRSNLLLGMDESVTEDDLWWALETAQAADFVREKEGQLDEPVEAFGRNFSGGQRQRLTIARALLKKAPFLILDDSTSALDYLTEARLLKSIKEELSDTSFILVSQRTNSLKSADQILVLNKGHQVGLGNHDFLLSTNEIYQEIHESQHGREEA

SEQ ID NO: 17124 - protein, 559 aa, synthetic construct
MSKEKIKVYLYTRVSTSIQIEGYSLEAQKSRMKAFAIYNDYEIVGEYEDAGKSGKSIEGRIQFNRMMEDIKSGKDGVSFVLVFKLSRFARNAADVLSTLQIMQDYGVNLICVEDGIDSSKDAGKLMISVLSAVAEIERENIRIQTMEGRIQKAREGKWNGGFAPYGYKLEDGKLFINEEEAVAIRTIFDQYVNTTIGANGISKYLENHGIRKIPRQNGKNPLFDAGLIRKILKNPVYNGKIAFGRRTLEKVHGTRNEYKQVEQDEYLISEGIHEAIVSDEVWQAAQVKLKSQAKKYEHVNKGKDTRTHLLSGIVKCPICGVGMFGNKCIKKKKDGTKYKDFYYYGYKHRQMIRGHKCTFSKQIREELLDDAVAEVIVKIVSNPKFASMMQEKINMKVDTSEIEKEIDNYQKELRKSHSTKFKLIEEIDNLDVEDKHYKRRKQDLDDRLYRMYDKIDELESSLIDAKAKKQTIEAEKLTGDNIYKVLIYFDKLYKVMNDVERRQLISALISEIQVYEEKQSNGQWLKSITFKLPIIEENLNIDLDNDEQVECVSLLEKRS

SEQ ID NO: 17125 - protein, 452 aa, synthetic construct
MKAAIYIRVSTQEQIENYSIQAQTEKLTALCRSKDWETYDIFIDGGYSGSNMNRPALNEMLSKLHEIDAVVVYRLDRLSRSQRDTITLIEEYFLKNNVEFVSLSETLDTSSPFGRAMIGILSVFAQLERETIRDRMVMGKIKRIEAGLPLTTAKGRTFGYDVIDTKLYINEEEAKQLQMIYDIFEEEKSITTLQKRLKKLGFKVKSYSSYNNWLTNDLYCGYVSYADKVHTKGVHEPIISEEQFYRVQEIFSRMGKNPNMNRDSASLLNNLVVCGKCGLGYVHRRKDTVSRGKKYHYRYYSCKTYKHTHELEKCGNKIWRADKLEELIIDRVNNYSFASRNVDKEDELDSLNEKLKTEHAKKKRLFDLYISGSYEVSELDAMMSDIDAQINYYEAQIDANEELKKNKKIQENLADLATVDFDSLEFREKQLYLKSLINKIYIDGEQVTIEWL

SEQ ID NO: 17126 - protein, 428 aa, synthetic construct
MSTDQDEQLSSYENQVNYYRDFISKHEDYELVDIYADEGISATNTKKRDAFNRLIQDCRDGKVDRILVKSISRFARNTLDCIKYVRELKDLGIGVTFEKENIDSLDSKGEVLLTILSSLAQDESRSISENATWGIRKRFERGEVRVNTTKFMGYDKDKDGNLIINREQAEVVRYIYERFLKGYTPESIARDLNDRDVPGWSGKANWYPSSILKMLQNEKYKGDALLQKTYTVDFLTKKRTENDGQVNQFYVANNHEGIIDHEMWETVQLEIARRKAFREEHGIPFYHLQNEDNPFMTKVFCAECGDAFGRKNWTTSRGKRKVWQCNNRYRVTGVMGCSNNHIDEEMLEKAFMEAVSILKDYKADVLDKLEKLSKGDNLLNKHYAKFMKQLLDLDHYDCTIMCQVLDNITISESGQITVTFLEGTEVDL

SEQ ID NO: 17127 - protein, 502 aa, synthetic construct
MDIIREDCIYARQSVDRKDSISIESQIDFCKYELKGGSCRVFKDKGYSGKNTDRPEFQKLLGEIRKGKVRRVIVYKLDRISRSILDFANMMELFQEYDVEFVSSTEKFDTSTPMGRAMLNICIVFAQLERETIQKRVTDAYYSRCLKGFHMSGQAPYGYQLEPTVVDGIRTKKMVADPAAADHVRLMFEMYAEPGTSFGDITRYFEEQGIKIYGKSMFRTFLSQLLRNPVYAQADLELYEFFKSQGAAIVNDASDFAGTNGCYLYQGRDVKEDKDRCLKDQILVIAPHEALISSDIWLKCRKKLMTNTTFQQGRKPKNTWLAGKIKCGHCGYALKATRVPSGVGYFRCTKRTENKGCPGCGKIHKDEFEQFVFMAMQEKFKDFQILHGKEEKVNPKLTAYQVELAQVEAEIEKLLDTLTGANATLLAYANKKIEELDTRRQTISKAIADLSVETISPQQIKKLSYYLDNWNSIDFDDKRKAADGLISTIKATSDRVQIEWKI

SEQ ID NO: 17128 - protein, 456 aa, synthetic construct
MDNIKRVALYIRVSTEEQALHGDSIRTQTEALEQYAKEKNYIIIDKYIDEGYSATNLNRPSLQRLLADIKENKIDLILLTKLDRFSRGVKNFYKILDTLEKHKCDWKTILEDYDSSTASGRLHINIMLSFAENEASQTSERIKFVFNNKIQKKEVVSGKVPFGYRIESKHLVIKEDEAEIVRESFDTYIKFSALTKTIQHINSKFNMRHMYKWMQKLLKNKIYIGIYERENILIEDYCEPIVSKEQFYFVQSLLKKNKRISKNKFDINYIFAGMIICSCGRKMSGSYHLNPSGTLYLHYRCSASYGAKLCSNTSRLGEKKVETFLLENVKTELYKTILEHESNNKKSSNKNDTEKLKNKLKKQIDKLQDLYFDDLISKDNYRFKYKKLNDDLIELEKKENEEKVVINDLQKMKNFLKINFEDDYVNMSNIEKRTFWTSIIDRIEVQKDGNLVIKFL

SEQ ID NO: 17129 - protein, 558 aa, synthetic construct
MTKLYSYIRFSSMRQSDGSSYERQIRMAKEIADRYNLELVNDYQDLGVSAFKGANSKTGALSRFLDEIGRSIPVGSWLFIENLDRLSRQDIISAQELFLSIIRRGITIVTGMDNKIYSIETVTANPMDLMFSILLFIRGNEESQTKRNRTNSSALLKIKAHQQNPQSPAVAIEEIGKNMWWTDTTSGRVLPHPVYFPVLQKIVQLRQEGHSAGVILDYLNEHHEPPAPTSNKKHGKWSRAMVSRLFNTKALIGVKTVNVDGVEYELRDYYPRVLSDSEFYFLRKNIVKKAWDYSHVKEKVIPLLSGIGVLRCVHCGATMVKQTAANGKREQYRYCCDGRKSGRTDCPYPNWGFRAVTLEGAVLQLLADKIWIAEDKTNPIPEIQVKIDEISRKIDNLINLSAMTGATKELANQITDLNSQREALHEEIRLFEREMYSVDSQGWDKLAQFDLSDVQNEERLKVRMKIKGALHEIECSRIDSKKNLFVLVYLDGLRQRLVIENNRGLKKGQIFVDLKTINDRQILESAGMVLHPCIEMIIDADWKAPEEIPGLLSEEFGI

SEQ ID NO: 17130 - protein, 558 aa, synthetic construct
MTKLYSYIRFSSMRQSDGSSYERQIRMAKEIADRYNLELVNDYQDLGVSAFKGANSKTGALSRFLDEIGRSIPVGSWLFIENLDRLSRQDIISAQELFLSIIRRGITIVTGMDNKIYSIETVTANPMDLMFSILLFIRGNEESQTKRNRTNSSALLKIKAHQQNPQNPAVAIEEIGKNMWWTDTTSGRVLPHPVYFPVLQKIVQLRQEGHSAGVILDYLNEHHEPPAPTSNKKHGKWSRAMVSRLFATKALIGVKTVNVDGVEYELRDYYPRVLSDSEFYFLRKNIVKKAWDYSHDKEKVIPLLSGIGVLRCVHCGATMVKQTAANGKREQYRYCCDGRKSGRTDCPYPNWGFRAVTLEGAVLQLLADKIWIAEDKTNPIPEIQVKIDEISRKIDNLINLSAMTGATKELANQITDLNSQREALHEEIRLFEREMYSVDSQGWDKLAQFDLSDVQNEERLKVRLKIKGALHEIECSRIDSKKNLFVLVYLDGLRQRLVIENNRGLKKGQIFVDLKTINDRQILESAGMVLHPCIEMIIDADWKAPEEIPGLLSEEFGI

SEQ ID NO: 17131 - protein, 558 aa, synthetic construct
MTKLYSYIRFSSMRQSDGSSYERQIRMAKEIADRYNLELVNDYQDLGVSAFKGANSKTGALSRFLDEIGRSIPVGSWLFIENLDRLSRQDIISAQELFLSIIRRGITIVTGMDNKIYSIETVTANPMDLMFSILLFIRGNEESQTKRNRTNSSALLKIKAHQQNPQNPAVAIEEIGKNMWWTDTTSGRVLPHPVYFPVLQKIVQLRQEGHSAGAILDYLNEHHEPPAPTSNKKHGKWSRAMVSRLFTTKALIGVKTVNVDGVEYELRDYYPRVLSDSEFYFLRKNIIKKAWDYSHDKEKVIPLLSGIGVLRCVHCGATMVKQTAANGKREQYRYCCDGRKSGRTDCPYPNWGFRAVTLEGAVLQLLADKIWIAEDKTNPIPEIQVKIDEISRKIDNLINLSAMTGATKELANQITDLNSQREALHEEIRLFEREMYSVDSQGWDKLAQFDLSDVQNEERLKVRMKIKGALHEIECSRIDSKKNLFVLVYLDGLRQRLVIENNRGLKKGQIFVDLKTINDRQILESVGMVLHPCIEMIIDSDWKAPEEIPGLLSEEFGI

SEQ ID NO: 17132 - protein, 459 aa, synthetic construct
MLGHTLPAAIYLRVSGKLQAGPDRFGLQSQEHECRAYAARLGLSVARVYVDQITGVSDDREQFQQLLRDAEAYSAVILGVQDRLARNVPLSYMMLEALQAVGLQVHSAGEGRLDLEDDTNALGFGIRAVIADQERRRITKRMYGGKLAKVRAGQPVAPIRAYGWKDGRPDPETAPRLRWIFEQMETQGANQVIYTLEAEGVPSPAGRPRWTKTTLLKIIGNPVYKGEYGFARKGERLTIPVEPLVTPEQWERVNAAVHARHRNQGRAGTQAHIYQLQGVARCGRCGSVITSTGVQQLKSGEKLRYYYCRGTLRIEGAHCEHRTYYRIEDVHAVIEDALTALAQDDRAVMQAVQAPAPTPRTQDGALARLDAEWDRWKGALRAGAITPEELATERRRIDATRARLLEVPAAAPALDVKAWQAALLEQRANLPLGQALRAAGITVLLDVGGAVTFKIRGSG

SEQ ID NO: 17133 - protein, 519 aa, synthetic construct
MRAVIYARFSSDKQSETSLDDQVNNCQSRAQREGWHVVAIHTDTAMSGSTKVSSRPGGKALLADMLAGRFEVLLLESLDRLARDQVEQETIVRRLEHRGVRIMCLADGYDSHFQGRKVMRGVRGLINELYLDDLRHKTQRGLHGQIDRGYIAGGKSYGYDIVRDDSGSRYVINELEAHWVRWIFQQVAKGRAYRHIVYDLNEKGVPSPRGSSWAVSAIYGSPVKGSGIINNTLYIGRYTWNRSQWIKDPDTGKRRRVDRPRNEWREVDIPELRIVDPMTWQRVRTRLDQGRKHDGLKPSRRPLTALLSGTIRCPHCDGPLTLRGSKRYGCGNAHDRGPTVCPGFNISRPRIERRLLSVIRDDLLNDDAVALFDSLVQERLQRLGGHGEVLALEQRRQELQEELQRLVDAIAQLGLSTAIGQRIRAVERELQTIKDEIQVVRASSGPSLDTGKAFKELLVNLESALQASPTEARHAVSEILGPVKMLMRGPQIWAQIATGPALQIAIGARGCMTGCGGRI

SEQ ID NO: 17134 - protein, 524 aa, synthetic construct
MIDPTSTAPSLLVDLYVRLSIDKEGKDSLERQEADLRAWADREGLVVRRVWRDRGKSGYKASVKRPDFDAAVAAVTSGEVAALAVWKLDRLSRRGAGQVGTVLDDVTAVGGRLHFLKDGLDSSVSNSRMLIVMLSELARAESTNTSLRVRAKKEASRREGKYLGGARPFGWLVTDGQKLRRHPDEAPIVREAVERLLAGETMNAICRDWNARGIPTRRRGSHWRASTLSAAMRSPVLSGLVPERRVEADSGYWGTDIRPWKHPDTGESVSLLAEGESPIATEGERMALLRELDSRLRRYGRGMRAVKQPESLLGGLVECASCGRTANSFGGSYRCRRWHEIGEPCTAPLNVSLGTLELAVKHAWARGLAALEPDDPVLWAVADRWLAKNDPAPMQERDELTKQLATLRARVKDVDNDRYVRGSLSADRHAALARTLEAHIAEVTHQLAALPKPDADLAALLDPELSIPAIESASALEARVLLRLAIDRVIVEPAPYPGARFHAHKRMRIVWANESSMDDSSAAK

SEQ ID NO: 17135 - protein, 534 aa, synthetic construct
MKVAVYVRVSSEHQAEKELSIPAQMKAIQQYCQERGHIIVNEFIEKGKSAKTDDRPEFQRMIAIAKRSSRPFEAILVHKFDRFSRNRDDHVIYKSLLAKCGVKVLSVTEQTEADTPQDKLLEGMLEIMSEFFNTNLATEVRKGMTQNAKQGYNNGGTPPYGYRTEHVALGNQKTKAVWVHGPREELDIIRWIFNQYAYENVGYKKISDILNEKNVPTQKGGQWSASTIRAIIYNEAYIGRRCWNKQEYQTKGVKWRDRSEWIIAENAHPAIITKELFELCQSKAKERHNGGGQTHNPFRTKPHSPFWLRGMLFCDKCGSRLVGNSTSTTKVHGGQKYYLCGGYMRKGKAFCQYVGWRKETLETLVANKLRTFLIGLTINQQLQEELIRYQADQTQLVNVNELESEIQFLEKRIKQMELEVADGRGKAYYSDAINEMKAELQAKQTELHAANTLSNHSRDVSEHILVTLKEDIRRLLTVLDEESPNPQSLHELVPKFISNVIVHRETKIVQITLEIAHDKEVLYRKVIVADWPNK

SEQ ID NO: 17136 - protein, 487 aa, synthetic construct
MTTKAAIYVRQSTTSEGTISPALQRRNCEAFVQRQGWQLVSKSYEDIDISGKKTANRPGYLSLRADYENGDFDVVVADDWSRFARNEVEGLAMLGSMQLASASQGVYDEDTNHLPTAIQFIIDADFSRKMGKRWRNALVYRLERGLPPSGKPQFGYDKQGKDAYIPNADAAIVREAYARYTAGEGSRAICEDFTARGLASAGPAGWYPNGLFDLLDKTFYAGFITYEGQDFPGAHEPLLTPAQWAAYRKARETRKTHARPRNTKWMLQGLVVCGLCGSKMLSHMARGVPSLACSTYNAQGKAGCPGTFRKREIVMKKFRFWLHKHQQEWADAMPSDDEAKTAAETAVADAQTAHDSTVEDYSRYQQWAYENRIVPAVSAKTLAEKAEAITAAQAVLDEAQAALGEFVPASTVRERINAGIKVLGLDVPENDPSLEEEPTEAEAAIMREIYAKMIDRIVVLPPSHPSPRHPDRDLMAEIEVHPKEFLK

SEQ ID NO: 17137 - protein, 460 aa, synthetic construct
MAKNITVIPASQIQKSKATEKKKIRVAAYCRVSTEHEEQVGSFKNQVEYYTELINRNPDWEMAGIFADEGISGTGTRKRAGFNAMIKACRDGKVDRVITKSISRFARNTADCLRFSRELRDRGIPIFFEKENIDTMAASGELLFTILSSLAQEESRNISENTAWGIRSRFKQGIPQINTNHFMGYDKDKDGNLIINEEQAAVVKRIYREFLEGWNLAEIARHLNDEEIPGVTGKACWTSITIKRMLQNEKYKGDLLMQKYYTKDFLTKMRVENDGALDQYYIKQAHKAIVTEEEWEAAQYELERRYNFRKSYGLKEISSLTKTGFFAKVFCGDCGGRFARKDYKGIKEPFWKCVSAEKQSGKTCSMGNVKESDLRHAFTIAWNDIVQHREKNMSRWDKLEASDNALDRIRGHQMKELTEQGELEFEIPELTRMVLKEVIVKDPKTFTIKFLDGELKNICL

SEQ ID NO: 17138 - protein, 505 aa, synthetic construct
MTTLRSSDQADVIVIPKFQKPEGTKIKAAVYCRVSTKSEGQEDSLENQIDHYKDVVGKDPRYELTKIYYDFGISGFKENRPGFQKMMADSRKRKFELLITKSITRFARNTGTVLKATRELKDHGIGVYFELQRINTLGEGGELLMTLYAAFGQAESEANRVSTQMTIRRKKEKRIPTAQLSRVFGYCRNDAGEIVPDANAKWVMEIFEMAADGFTVGQITNYLNKEGVKTQNGAIFYRRTVQRILSNEEYKGDFVQQKHYVDEHRKERLNTGQLDKIYYKENHLPIVTNELWADAQKALNVRKRKKPDKEKQTDLNNENYPYRHKLFCAKCGYPLQRVYMGGKYKWACQGKLRFTNKFCPSISVPDEEVRTWGEIDENTYVAAKIDRGRVVGFDHESENEWKKHHTKKRHHSNAPALTIENYPYKDRIFCKYCGSRLRRIIANNGRVWWICDNFSRNGKTACKGIRVPDDKLQSLRHDPQIVYIGKEIINGKEYYGYSSKPDTKK

SEQ ID NO: 17139 - protein, 507 aa, synthetic construct
MKRVISYIRFSSEKQAKGDSLRRQSKMVTDWLKAHPEYYLDESLTFRDLGVSGFTGKHLKGGLGDFLTAIEKGLVKAGDTLLIESLDRLSRQAVDRASELLRNILRSGVDVVTLSDGEHYTKESLRDPLSLIKSILIMQRSHEESLRKSERIQAAWDAKKEAAKAGIKVSKRCPAWLKLNDDRKSFSVIPEKVETVKRCFQLRLEGKSIWEIVRTLNAEGHQTLNQYKAGKFGQTSVQDLLKNRSVIGYFTPKGCEEISGYYPAIIDETTFYKAQQLSYARYGRKPASDKPMAVNLFKGVIRCSECGHALIITGFSDTRNGIYRCPLRNENRCSAKGLSRKQTDGTLLTLLSRLDRFDSNTTNTIDMLRLHREHISNNIEKLVQLSLEIEDLSAITIKLKQLKGELSQVDADIEKETQRLKSIDAGCLSDCDLTTKAGRIEAQLIIKSAVKEVVLNTAKRRCKVTFHNGKIIDLPITENPSEDVTEAIQSLSEVTERGLIDVDVVEI

SEQ ID NO: 17140 - protein, 545 aa, synthetic construct
MNKENRRKAITYQRFSSVRQIGNSSLARQLDSTKEWLSRNPDVEVIDNYVDQAMSGWSGKHLKDGSLGQLMNAIEDGIVKSGTLILVEHFSRLTRQNLRDAEKLMHRIWDAGITVVTVRDGTEYSPSAANDMSLRIRLIVEMEQAFKESEWRSAKVKASYVSREKAAREGKVPKIRKPFWLNDDGTLNHLHQSVKDMFEWYRNGWGQQRIVVALREKYADEAIQQINPSTVMRWIKSDIVLGYWRKNRVYEAAVDETLYYEVQAIHKNRLYKNVNPDRQWPLSGLMKCGVCGRGMSIQKSGKSAPVIRCSSKQRDKSCNRKTTFPYYLAHIYMMDVVLPFAQRKYTNLNSNKSLQKELLKVEDSLAKENSAMSDLKETIKILKEQNKKTNFLLMEMQDVFERIEELETKQQDIRSSLEELSSGGISLEAKEIAYDKDNFNIEMHKLNFRIVIGEWDISLEGLTDDAVTLKYNGYNRGTFCYEYKYSDQEEMQSVKSSRAKTSTLMLSNLAIKENENWARFFDEEKRKEDTAKTFENIAKKNNWIY

SEQ ID NO: 17141 - protein, 547 aa, synthetic construct
MRTAYSYVRLSSKKQIQGYGQERQWQAIQAAALAHGWELSEKTFSDLGVSGWKGANIETGALSQFLQCVEDGYIEKGSVLIVENVDRLSRAGVQRAVSLLMQLLASGISIYTFTDSKLYEPDSHNPLMDLMAWALSAQRAFEESERKSQMILNAKAKAREKARLTGEIITRRCPSWLRVNQDKTAFELIPERVETVRKIFDLYVNGYGTPRIGRLLTEEGRKPLTGRAWYPRSISRILQYRAVLGEYQPTLNGKPEGDAIKNYYPAIIDEDQFNEVQAVLKEGGAGKGRRGKEMRNYFAGLLRCSCGEGMHIVSSCVKGKRYYQLRCLQYRISCFGSSWNFYKLSSFVLFALRRLPILEVMGSQDNNNIKELNAKERELTFLLEDTRRQLDNTINAIAALGLNDQLQSKFRELKTSVTNIEKQLSNVKTELETSQGKLVIQKQDSEMLTGRFLELIDSTKDIDGRIKLNQVLRRYLSKIEMHADKKEEYRYIKIYRKDGDELVSIQCDHSLKGALFESKDDLETFELLPANDAKRNEISNTLLCTPK

SEQ ID NO: 17142 - protein, 506 aa, synthetic construct
MRHVITYLRYSSATQGAEGADSTRRQNELFKQWLRKNSDAQVVASFNDEGLSGYKGKHLSGQFGDMLSRIESGEFSKGTILLVEAIDRIGRLEHLETEALMNRIIAHGIEIHTLQDGLIYTRDALSDDLGISIIQRVKSYLAHQESKQKSFRVSEKWKQRAKLALAGEQHLTRNVPGWIDPDTFKCNEHAETVRLIFKLLLDGESLHNIARHLQSNDIKSFSRRKDANGFSVHSVRTVLRSESVIGTLPASQRNDRPAIPNYYEAAIDAATFNKAQEILDKNRKGRTPASDNPLTINIFKGLFRCQCGASVHPTGTKNKYAGVYRCNNHLDGRCDVQPLKRKPFDRWMIDNFLGMIDVVSDGETERRLAELQHEVEIVTARIKKATALLLEMDDIDELKIQLKELNQKRTELQTTIDNMRRKASLTDKELPQLKDIDLTTKAGRVECQLILSKHLKGLTLGKDSVIVTLQNDTEITIPTNPLPLNDGTSIFEIADKELLDIDAFRL

SEQ ID NO: 17143 - protein, 653 aa, synthetic construct
MFDYDKSIFDGICIPYARFSTTEQDKVGRKSLERQLEEAKRYASQNNLYISDDLIFTDKGVSGFAKQGQLSKTFEKGQMALLLDVLEDVPFKERENIYLCFHAFDRFSRQHPEVAYEQFSRILKRGFNIVTTIDDCLYSSKEADLESMLISIIKMSSAHYESEVKSVYVSDAHRRRRETLEYLYNHPTQKGKHKHIGLKQSTTPRWIIESEIIYDFVDDNGVERKDSFSKFSLDEAKAEIINQIFDWKIQGLGHTKICQLLNQKQIPTFEDGNCRKAEKWHTFAISNLFKNKSTIGTFTLKTVEDDEYFCESERIFKTRSNKVDATSEMENYFPAVVTVEKYEAALKIIAMNNKGEKISEPEDKTHVFSKVLRCTCGGRLVFKGTRKTGKSEKADWFEYLRCEKAILKDGCDAENIIYKDFEMAFLRFATSSNYTVFSTTQSKLKTKLKRLSIKQSHLNSEKEQLLLEAKGLKKTFESIVTQNLDATLLLDSISKNKSSLNTVQNELVKIDNQVKGVEREYEKSGKPIDKLTIKKGLRSEDYSKRLLMRKAVNQQLRKNVVHMEVCSTKLLKFVIVCFDDYVIRTYAYQDEFSSDLMFNFIKINVENLDESEAYDLIIHLFKEVRISLSGDNAVITNFDLKVHLSGIKEKYLK

SEQ ID NO: 17144 - protein, 545 aa, synthetic construct
MNKYHLYQRVSKQIQAEEGHGIQRQEQACEHWISDYNKRLLSEGKSAYSKGLIYEDRGKSAYTAANFKRGELGALINDIENGKIEKGDLIVIELIDRFSRANVDFVRSQFQRILDAGVKIAITKWNLVFEENMESVSSVTGRILLEIGMYLAYQESSQKSSRIKASRKLLEDSGRKSIAKPPFWLARNLDLKSYTIIEENAEIIRKIFDLKLNFNYGPQKIIKSLGDLDIYRYSFDENGKLIKTTKNSPLSESSINAYIRNTNVIGKLDGRDYYPRIIDDRTFYAVQKRTRENTGGVGEIFRNVFVGVGKCGCLIRKENENGCDSLAKCGYIMAFSSRKVKNPTKGMYLKCNRKRKSTKCDSENINYYLAQNKIYNVLKSLKFDIDQSVDISHLEEKINTIDKSMSKIREYMTQYSDDEEWENQYKIKRMEREKIENEIKASKSRITGKLSNLDIDFSKEKDRVLFNQFLKDNRITVYFTKERMEIIIGSLNNFSIKCGYDDSNRDIDHIIESYSKNGLVGIEEKSGKSEGKGLLRFNLPTVPGS

SEQ ID NO: 17145 - protein, 541 aa, synthetic construct
MPKAISYIRFSTKIQSVGDSTKRQSKYINDWLKRNPDYYLDESLRFQDLGISGFSGANAKSGAFGEFLAAVESGYIEAGSVLLVESLDRVSRQDIDTAGEQLRKILRSGVEVVTLVDNEWYTKESLKDSLSMIKAMLVMERAHEESAMKSTRLRSVWAAKRERAAKGEIMSKRCAAWLKVSEDRSRFEFIPENVKAVQRVFQLRLEGLSHVKIAKQMNDEGFSTLNQFKSVTGGWSQSSVTELLSNRSVIGFKVPSKSMAVKGVSEIPNYYPSIITDEQFYSVQQLKQGSGRKPSSDLPLLTNLFKGVLRCSECGFIVVVAGVSAKRSGIYKCSMKSEGRCNSVGFSRLQTDRALVQGLLYNTNRLSLNRDNGSAIGTLQSELEQLQKQRERLIKLAMLADDTESMAKDLKALNSQIKDAEKAVSEVHQREQSSQLETISHLDLTLKKDRIEAQIIIKRIIKEIRLNTAGKKCDVFLHNGLRLLNFPLDRVVDGAQWLEILPLIDGDEFDFEGFSTKPRHLAFEEAPEWVKEMEAQPNQPL

SEQ ID NO: 17146 - protein, 515 aa, synthetic construct
MRKAYSYIRFSTKGQIEGRSLQRQLETARKYAEENGLELQSLSFQDLGVSGFKGRNSEQGALSQFIEAVKEGTIPEGSWLLLESFDRMSRQPVEKSMRLLMELVELGIIVVTLMDKQIYRRGQLDMTKLIISLVIMSRAHEESAAKSKRLADVWHAKQAVAHLKPLGIHLPAWLEYNEDKTKIQINYEKAVVVRYIFELSANGYGRSALIRKLNSKGIAPIGSRAKRWHLSYVTKLLNNTAVLGEYIPHVTDKLGQRVPTGEVIENYYPPIIEKDLWLRAKAAAQSRKIRGTGAIRKGHTRNILSGMVSCECGSSMQLVNKGSSDKGGYYLVCSTARHGAGCQYIGHRYYSVQWVVLIALQKLLHTFANKADNHGKEMQLEGELVELDRKLNHLINDLEENGSSKYISAAIRKTEQRMDIVKNELLMLQSSKAVENDEVDLQEITLRLNEDFERLRLHQYLKRHIANIVVYKNKERLEISLKTGEDIILTFTPSENLWQSNTGISFSVNFDTRWG

SEQ ID NO: 17147 - protein, 517 aa, synthetic construct
MRQVITYLRFSSKPQERGDSIRRQKGLFERWLKDNPDAKVVDEFSDEGASAYHGHHLKGDFGRMLQNIQDGKYLSGQTVLLVESETRLNRQKARNTENLVDLITGKGVDVICLESGKIYTSTNIDDLDTSIQLKIAAHIAHQQSKEKSIKVSSAWEHRAQLALEGKQQLTKNVPGWIDPDTRKLNEHSSTVVTIFDLLLSGESLHNIARYLQANNIKSFSRREKANGFSVHSVRTILRSESTVGTLAASKRNDRPAIPNYYEPAIDVATFNKAQEILSKNRVGRAPASDNPITINLFKGIIRCQCGASVHPTGVKATYQGVYRCNNVPDGRCNVPTIKRKPFDKWMLDNIVGFLERDDGNNTDKRKAEIEYQISLVTSKLKKATTLLLELDDVTELKEQVKELNIQRSNLQSELDELNQRETLSDKPLHHLSEIDLTTKAGRVEAQLILSKFVQSIELQREMIIITLRNGTVIGKSRDLSPVLSRDLMKQVVSSPSPTDIDMFSVITSDEEFRKSGK

SEQ ID NO: 17148 - protein, 561 aa, synthetic construct
MKVAAYVRVSSYNQKQTGDSISGQKEYIKNWANLTGNEIIKWYIDESASAFRDLRRYNFNLMLQDIKNPNSEIEAIVVYNLSRFSRNLVNQLTAQNLLETYNVRLISASEGIPDDHNTARLHTSFLGILNEHYSRQNSAVVTDRLQDTARKGYFCGGPIPLGYISVEIEGDTSKKRKVLAVNDDEAPIVKEIFSLAEKGIDGKPMGVKAISIYMNNKGALNRGKQWNRNSIDRVLTRRDYFGEHIHGKNRDPRKGLEPIIVNVPAIISKEQFFNVQDGLEYRGLKNNKNKCYRSDSLLVGILKCSICNSNMLVVTGKGGKYKYYECSRKIRQDVKSCSSKMLPKPLIDNAVRRLLSDRVITEENINYIYKDLKSRIRTLVEKSARNVASINRRINNNNFKVNTIIEKIASRQLEPNTQINQYITDKRNELESLDRELVTALKGTKLPIKQFGQTQVAQLVKNLKEIVLTGDEARVKQILLILLKEVEITPQKKISILGFNMALVFLASHAKTGTDFSVPVIDTIWRRDRDLNPRYAINVCRFSRPVLSTTQPSLHKLSSSD

SEQ ID NO: 17149 - protein, 561 aa, synthetic construct
MKVAAYVRVSSYNQKQTGDSISGQKEYIKNWAYLTGNEIIKWYIDESASAFRDLRRYNFNLMLQDIENPNSEIEAIVVYNLSRFSRNLKNQLTAQNLLETYNVRLISASEGIPDDHNTARLHTSFLGILNEHYSRQNSAVVTDRLQDTARKGYFCGGPIPLGYISVEIEGDTSKKRKVLAVNDDEAPIVKEIFSLAEKGIDGKPMGVKAISIYMNNKGVLNRGKRWNRNSIDRVLTRRDYFGEHIHGKNRDPRKGLEPIIVNVPAIINKDQFFNVQDGLKSRGLKNNENKCYRSDSLLVGMLKCSICHSNMVVVSGKGGKYKYYECSKKIKQDVKSCSSKMLPKPLIDNAVRRLLSERVITEDNINYIYKDLKSRIRNLVEKSARNVASINRRINNNNFKVNNIIEQIASRQLEPNAQINKYITDKRNELESLNRELVTALKGTKLPIKQFGQRQVAQLVKNLKEIVLTGDEARVKQILLILLKEVEITPQKKISILGFNMALVFLASHAKTGTDFSVPVIDTIWRRDRDLNPRYAINVCRFSRPVLSTAQPSLHKLSSSD

SEQ ID NO: 17150 - protein, 505 aa, synthetic construct
MKIEKIAIYARRSEEKETGESIKNQINICRNYIERIYKNPLIDEYFDDDYSGRNMIRPDFNKMMILVKKGYYKAIVFWKLDRVARNALDFLKLHKELDKLGVNLISVTEGFDPSTPAGKLMMTMLAAVAEMERKNISQRVISNMNEMAKKGKWTGGITPYGYKTITIKKEKYLKEDNDTIKTVKEIFDKYLETESLFQVSKWLKQSYNIKKSPTSIKRILTNLVYVKSDNEISKYLTNRGINLYGQLNGNGLVSYGKANKTNDEGVEFRNISEWIVAIGKHKGIISGLEYIKVQHILKSKNNSGRRGTGDVTFLNGLCRCSYCGSYMRTKQKKKTNGGYYKYFACAKKDTGLEHCKNKMIKISDVEETVLNALYNYKINNIHTNNTPIDTSKLRNDLNKKQKQIKNLVLKLSLDDELEDIFLEQIRELKKEVNELQKNIEEKEKENLLNNVSNYNKDSFIKQLSNFKNIFINCKDIDSKRKLIKNLVKEIRIDGINKKTELETYF

SEQ ID NO: 17151 - protein, 545 aa, synthetic construct
MLGNFMLWLLNRMDKPKYLIEYTRVSSGKQLKGSGLETQKLSNEQVNELCENYGLTPYSEIFSDKAVSGFKVDASLRPSFSKLLTLIESGTISNDSVLVLSNIDRLSRQDINTALATLLRVMQHVHVFIVQENKLIKRDSPDLMVDLIMVLISMQRAYDESLSKATRSRSAIRHWFNNHKEGVRTKSGKPIPNPSGGVPFWYLTSKDELRLDTKLAEAAKKAVELFADGWGVVAVHSYLNEHYTPPKAHRGGKQWCVDALRRLHRDKALIGEYHVTVDGEKHVLTDYYEPIVSEQDYYRMVNQRNKSTRTAPSGAIHLFTGYGKSFCRGCGGSLTTTTSGGRTRIRCSNDLSKRNKCPNPVHVEGDKLLDVVNGLKLLHKFIPTEGCGNSEEVPKLEAKLTELNQQLDKMKADYMETQASILISLMVQKEAEIEAIKGKLDSQRASNMQSIAEWYYPSIKTEEKRRAYFERVLDCIKVHRLAKGKTIVSLYAKSGYCTNIYFLYGKVKKVGMITQELSTERELKNDNVFNQIAKSGVLTKWIKDQ

SEQ ID NO: 17152 - protein, 547 aa, synthetic construct
MRTAYSYVRLSSKKQIQGYGQERQWQAIQAAALAHGWELSEKTFSDLGVSGWKGANIETGALSQFLQCVEDGYIEKGSVLIVENVDRLSRAGVQRAVSLLMQLLASGISIYTFTDSKLYEPDSHNPLMDLMAWALSAQRAFEESERKSQMILNAKAKAREKARLTGEIITRRCPSWLRVNQDKTAFELIPERVETVRKIFDLYVNGYGTPRIGRLLTEEGRKPLTGRAWYPRSISRILQYRAVLGEYQPTLNGKPEGDAIKNYYPAIIDEDRFNEVQAVLKEGGAGKGRRGKEMRNYFAGLLRCSCGEGMHIVSSCVKGKRYYQLRCLQYRISCFGSSWNFYKLSSFVLFALRRLPILEVMGSQDNNNIKELNAKERELTFLLEDTRRQLDNTINAIAALGLNDLLQSKFRELKTSVTNIEKQLSNVKTELETSQGKLVIQKQDSEMLTGRFLELIDSTKDIDGRIKLNQVLRRYLSKIEMHADKKEEYRYIKIYRKDGDELVSIQCDHSLKGALFESKDGLETFELLPATDAKRNEISNTLLCTPK

SEQ ID NO: 17153 - protein, 411 aa, synthetic construct
MRTVRRIQPIKSPCSPKLKVAAYARVSDSRLHHSLSTQISYYNRLIQAHPDWELVGIYYDEGISGKEQSNRQGFQNIIKDCDNGKIDRIITKSIARFGRNTVELLTTVRQLRLKNIGVTFEKENIDSLSSEGELMLTLLASVAQEESQNMSENIRWRVQKKFENGMPHTPQDMYGYRWDGEQYQIEPNEAKVIRNVFKWYLDGDSVQQIVDKLNQEHVLTRLGNPFTVASIREFFKQEAYFGRLVLQKTYREAFSRNPKRNKGQRTKYIIENAHEPIVTKEYFELVLHEKERRYQLMHQESHLNKGIFRDKIFCSDCGCLMIVKVDSKHVKKTVRYYCRTRNRFGASSCPCRTLGEKRLLASFKSKLGSVPDKEWVENNIKRIEYDFGHRIIKVTPVKGRKYPIEIRGGRY

SEQ ID NO: 17154 - protein, 520 aa, synthetic construct
MKKVITIEATPSIIRSSSDDFSLKKRRVAGYARVSTDHEDQATSYESQMRYYSEYINGRDDWEFVKMYSDEGISGTNTKLRTGFKSMVEDALNGKIDLIITKSVSRFARNTVDSLTTVRQLKEVGVEIYFEKENIWTLDSKGELLITIMSSLAQEESRSISENVTWGLRKQFAEGKVHFPYTNVLGFKAGEDGAIVVDQDEAKTVRYIFQQALIGKSPYHIARDLTEQGIPSPSGKSQWNATTIKRMLRNEKYKGDALLQKTYTIDFLTKKKNINRGELPQYYVENNHEAIVDRETFDAVQQVLDNKGRKSSTTIFSSKLVCGDCGHFFGSKVWHSTSKYRRVIYRCNEKYNGSSKCSTPHVTEEEVKQWFVSAVNQVIDNRLEVIDNLSVLLSIGSFEVIDEQIKNLETDAEVVSQLVANLVSENAIISQDQDKYLKKYNQLTSKYEGIVREIESLELQRMEKSKRNKELQVFMEFLNNQEGLLTDFDELLWETMVESITINLEKKIFFKFKNGAVATI

SEQ ID NO: 17155 - protein, 549 aa, synthetic construct
MKNKLKSSLNIESPKIAIYMRVSTSKQTDNQSLDTQEKTINSYIASRHDWINPICYKYIESHSASIKPKVSNTLKESSFDSLKRPKLRELFLDATIGKFDYVLCASHDRLTRNTNEGIILKHLFSRLNITLIYCRPGETISSENEALNKFFENLLVNIAALESNITGGRVTLANKHKIQNNFWAGGPPPFGYNLVSQPSNKRNSFLEINFEEARIVKKIFELYNLGCSYNEILTRLNRDFTLPPKRLWTHNTLKEILRNPVYTGFLVWNKRGGARKPNRHSPNDFVKSNLVEKNIIIPENEFLETQKLRNILSRDSKFLSTDFLLRDFLYCNKCNKKLLAKNYGNNKRFYYCSSHNNMEINKKCRSIKASKIESTILSNINDLINSSLQSEVQIEKFYDKYIENFNAELLDNKKSLEITINQLKSSTDLLELCVNEINISKDNLTVDYEDLSSSSTEFSFINALLEFQVVTQTEIKSLKARKEYLTYKINSSPKSFDDFKSNLNKSFKLFKYDEEKQKLISSPRSFRLFLFKVVKKIILSDHEITIIFK

SEQ ID NO: 17156 - protein, 537 aa, synthetic construct
MKKAAIYTRKSKFTEKGDSIESQIKLCSKYLDNINIKDYCIYTDEGFSGKNTDRPEFQKMLSDAKAKKFDVIICYKFDRISRNVSDFSNLINKLNELNISFISVVEQFDTNSAIGRAMMYLCTVFSQLERETISQRITDNMYSLATKGYWLGGETPTGFRSEKKFFNSNNKQKMYSSLVPIKEELDLVKLIFNKYLEFNSISKIEKYLLSNNIKTKRNKDWSKASISLILRNPAYVKADEETFKYIESTGSKVYGNPDGKHGLLIYKKNKGRKGAKHDISEWIYAVSEHEGIIDSDIWVAIQKQIKKNAILAPALGTSNIALLTGLIRCAKCNSPMRVAYGKRNPKTNKKNYYYVCTLKTKSGKTRCDSKNLPGLDLDNLILDKLKEMSLDKNTLLKELNKYKDTIESNFHNDVLKNIQNNISKNNSMIDNLLNNVALSTDSEVTAILLEKISKLKDENKLLTQKIDDLKSELEAQEILLNDCNSLITKLKYFSKFIDNSSIEEQKQLVSSVIEKVIADGDTGSIEIKFRPLLDFKI

SEQ ID NO: 17157 - protein, 490 aa, synthetic construct
MKKIAIYIRKSVKGDENSISLEAQTEVIKHYFNDKNEFVVYKDDGFSGGNTNRPAFQRLMADAMENKFDTVACYKLDRIARNTLDFLTTFNTLKEYGIDLICVEDKYDPSTPSGRLMMTLLASLAEMERENIKQRVSDSMLNLAKQGRWTGGTPPFGYKVVTIDGGKYLELEDEKNIKYIFNEFIDGKGIIRLGNEFNCDKKKISRILHNITYLQSSKDANIYLKQVLGYEVIGQPNNCGYLPYGKYKVVNSKKIKNTDGLKVATVSKHNAVIDLDTFIKTQNRLKTFEGKKAPRISNKSFLAQMVKCGGCGSNMLIALGNKRKDGTRKLYFYCPNRCGNSFADVDKVEYTTLATLKDVDFFNKINKNKSVVNKDNSKIKKSMLKELEEKKKILDGLMDKLALVDSNLANVIIEKMNSVNIDINDLQNKIDLLEKEEIASSYNKEDFKLKEKNRKHFIEDFENMDMEEKQNSIRGVINKVVWDSENIIIS

SEQ ID NO: 17158 - protein, 545 aa, synthetic construct
MDAILAGSFRAAIYCRLSKDDDLDGESASIANQRDMLESYCEKQGWEVVAVYQDDGYTGLNMERPDLKRMLKAIERRQINLVITKDLSRLGRNYLQTGTLIEDFFPRHGVRYIAMNDGIDTMRDNNDIAPFKNILNEMYSKDISKKVHSSYLLKAQQGQFTGCVAPFGYRKDPEDKNHLLVDEETAPIVRQIFLWALEGHGPNFIRRRLEEQKVPCPTWWNRERGFRNVRTKWEKKDPENGRYMWDFSVIKDILMNPVYTGAIASQKKDYRFKIGTIGEKKPQDWIVVEERHEPLIDSKSFAIVQDKLKSRQRPRQDGETSLFAGLIKCGECGKSLTIRTTHAKHPQQIYACKTYGAFGKNHCSQHRVEYDTLYHLVLNKIRECAKAALTDGEAIAGKLTNTCEAEQKGQREALERSLTKDEERIEVLEKMVLRLYEDMVAGRISEANFNLMLDKTQKEQAELKERVAQGRKKLADEMRLAMDAKQWVDAIQEYADITELDAATLNRLIKEIVVHEHIDSDKTRHISIEIHFNLKPIPEVEQVKG

SEQ ID NO: 17159 - protein, 509 aa, synthetic construct
MKTCIYLRKSRSDEEAENQCEFETLSRHRSTLLKVAKEQNLNIVEIKEELVSGESIAYRPKMLELLEEVKNGLYNSVLVMDIDRLGRGNMQDQGLILETFKKSNTKIITPRKTYDLNNEWDEEYSEFEAFMARKELKLITRRMQRGRVKSVEEGKFIASKPPYGYKFVFDESGNKSMVIDEDKAEVVRMIFDLYVNKHYGGVKIATHLNSLGLKTTTGRTWYDKGVRDILKNKTYAGYVVWNKVERGKNSSKTRPIDERIEAKGIHEPIIDESIFLEAQSLFKSNFIPSTKQHTTITNPLAGLIVCSECGHKMIAQQSTYKNKEIVKFVKCLNCGKNRGVRLDILEKDIIHELADWVDAYNVSIKDLDSNENKNPNLESYYSIIKSLESEYQTLMKQKENLHNLLEQGIYDVDTYLDRSKILTDKIDLNRSNLSQAKKDLESEKESVFSIADIIPQIKKVLELYYQSSDMQERNELLKEVIDYIDYSREPKKRTSRFNIKIYPRLIKNK

SEQ ID NO: 17160 - protein, 516 aa, synthetic construct
MAGKKVTVIPMKPRQWAAENTEEKPKLKVAAYCRVSTEMEEQASSYEAQVQHYTDYIQRNPDWELAGIFADEGISGTGTKKRDGFNRMIEACQKGDVEYIITKSISRFARNTVDCLQYIRQLKDLHIAVFFEKENINTMDAKGEVLLTIMASLAQQESQSLSQNTKMGVQYRFQQGQLRINHNHFLGYTKDEDGNLVIEPKEAEVIKRIFREYLEGSSLQEIANGLMSDGILTGGKRKLWRGEGVRLILRNEKYMGDALLQKTYTTDFLTKKRVKNDGSYAQQYYVENSHPAIIPRDIFMQVQQELDRRKSMKNKHSKCFSGKYALSGITVCGDCGNAYRRVHWKNRGTVWRCKSRVDKREHNCSGRTIYEKDLHEAIIKAINETVVDREDFLQQLSENINSVLTDGLTGRLEELDSKLKELESEIISMAIGGQGYDELASQIFSLRDERDAVAKQIAANTNLQQRVDEMVVFVKEHDVINEYSEVLVRRLIEKVTIFEKNIVVDFKSGVRVTVEI

SEQ ID NO: 17161 - protein, 546 aa, synthetic construct
MKAVIYARVSTQDQALGFSLATQKELCEKKARALGALEVEVVEDAYTGTELTRPSLDYVRQLVATGKVDLVVVYDPDRLSRNLTDLLILCREFDKAGVRLEFVNFDWQKTPQGMLFLQMRGAFAEFEHALIKERTQRGKNKKAASGKIRCYAKPFGYDWDAEGDTLVINPQEAEIVKQMFEWLTDPLEPLTPWQITQKLGQVYPQGPRGKGWVHSSVVRMLKNPVYTGRLRRKDEQPDWKPVLVPAIIDQVTFMRAQEMLARSKHFNPKTTRRRFLLQRLLVCGECGRRLTVVTHNNPQKAKYSYYTCPGRYPTKFDDRGRVGRCGLPPWRTEEIDKTVWDTIASIIKNPELFYQYITSEKLETASIPRRRLEEARKRLEQVQRVIERIDRAYFILEALPEEDYKRYRAEQEGELVRIEEDIKRLEAVINAQEQVQKGVEFLRQYAEKLARSVDELNFFQKQNITRELVQRVKIYADGSLEIEGYFNLPFTGPGKNVPDHCEELTTLTTQKNLKEPLSSSVLTCTHRKKGHPKVAEGIIHLTILAV

SEQ ID NO: 17162 - protein, 546 aa, synthetic construct
MKAVIYARVSTQDQALGFSLATQKELCEKKARALGALEVEVVEDAYTGTELTRPSLDYVRQLVAAGKVDLVVVYDPDRLSRNLTDLLILCREFDKAGVKLEFVNFEWQKTPQGMLFLQMRGAFAEFEHALIKERTQRGKAKKAASGKIRCYAKPFGYDWDAEGDTLVINPQEAEIVKQMFEWLTDPLEPLTPWQITQKLGQVYPQGPRGKGWVHSSVVRMLKNPVYTGRLRRKDEQPDWKPVLVPAIIDQETFMRAQEMLARSKRFNPKTTRRRFLLQRLLVCGECGRRLTVVTHNNPQKAKYSYYTCPGRYPTKFDGRGRVGRCGLPPWRTEEIDTTVWDTIASIIKNPELFYQYITSEKLETASIPRRRLEEARKRLEQVQRVIERIDRAYFILEALPEEDYKRYRAEQEGELVRIEEDIKRLEAVINAQEQVQKGVEFLRQYAEKLARSVDELNFFQKQNITRELVQRVKIYADGSLEIEGYFNLPFTGPGKNVPDHCEELTLLTPQKNLKEPLSSSVLTCTHRKKGHPKVAEGIIHLTILAV

SEQ ID NO: 17163 - protein, 554 aa, synthetic construct
MKAVAYARFSSDNQREESITAQLRAIHDYAEKNGVIIVREYVDEARSATTDDRPEFLRMIEEVTSGCLQVDYVYVHKLDRFARNRYDSAIYRRKLASKGIKLIAVTQPLDDSPESVILEAMLEAMAEYYSKNLGREVMKGMRETAFQCRHTGGKPPLGYDIDPGSNKYIINEREAEAVRIIFSMYLQGCSYKEIADYLNSHGYRTKLGSQFVKTSLYEILRNEKYTGVFVFNRAASKTGGKRNNHKSKDDEEIIRIPGGLPAIIDPSTFREVQKMMDRRKHAPGAAKAKEVYLLTGLVWCGACGGPMIGNRRRAGRNKDIYAAYECNNRKRLKACHAKSINKEYLEQYVLNELIRVIFSDEGISILVKKLNEANKQRLERNSKELDYTRQQLVEVEKKISNIVNAIADGLYSPTMKETLAKLEEEKARLQVAINEIQRANVVELTEDMIKAYLEKDKQVILSGDLQACKAIISTYVDKVIVYEDHIDVILKIVDFTGGGGGSRTPVRRYIHSSFYQDSFRFQSRRRVSRKPDTLGPARLRFPSGPRAGALPVAC

SEQ ID NO: 17164 - protein, 540 aa, synthetic construct
MKTIAIYARKSLFTGKGDSIGAQVDTCKRFIDYKFANEDYEIRTFKDEGWSGKTTDRPDFTNMVNLIKSKKIDYVITYKLDRIGRTARDLHNFLYELDNLGIVYLSATEPYDTTTSAGRFMISILAAMAQMERERLAERVKSGMIQIAKKGRWLGGQCPLGFDSKREIYIDDMGKERQMMKLTPNKEEIKIVKLIYDKYLEMGSMSQVRKYCLENSLRGKNGGDFSTNTLKQLLTSPIYVKSSDNIFKYLESQNINVFGIPNGNGMLTFNKTKEIRIERDKSEWIAAVGKHKGIIDDNKWLQIQQQLQQQSEKQIKSSGRQGTTSTGLLSGIIKCAKCGSNLLIKTGHKSKKNPGTTYSYYVCGKKDNSYGHKCDNKNVRTDEADSAVITQLKLYNKELLIKNLKEALIKNEKADTDNIEILESKLKEKEKAVSNLVKKLSLVDDENVSNIILSEVTNINKEINDIKLQLSNETLKINEVTKATLDTEIYIKILENFNKKIDDITDPIEKRNLLKSALESVEWNGDSGEFKINLIGSKKK

SEQ ID NO: 17165 - protein, 550 aa, synthetic construct
MSRKKQVYEKITALYCRISLDDGGDNESMSISNQKLMLRDFAEKHGMFQYEYYVDDGYTGRNFNRPSFQRMIADIEAGKIGCVITKDLSRLGRNYIEAGSYIEIFFPKHNVRYIAVTDGVDSLTRQEMDITPFKNILNDMYSRDISKKVLAGRMTRSRQGKFCGGQPPLGLMRDPEDKGHLILDPETAPVIRKIYDMALDGWGCMRIAKQLMDDKIPITRVKSNTECDVNYYSWGSARISHILRNPFYKGAHLVCRTHQKGIRSNTYDIIPREDWEVIEGCHEAIVTPEEWEQVQDIIDRRPTIIKGNACPFYNLFHGLVYCATCGKSMQVRYEKVGRTGKNRFTGEMREPIDRAYYICQTYNRLGKNACTSHKIEARDLYNLVLKDIQELAAQAMKDADAFYQRLSSRMERRYLVDASQTEKERKRLEDRNQEIDGMFLSLYTDKAKGVLTEQRFMKLTAALEQEQEANQKRLHDLAVMQSRADAQESEVRTFIKEIRRYAAIAELDESVLNRLISKILIGEVKKVDGQKVQEVRIVYNFVGEIPEIAA

SEQ ID NO: 17166 - protein, 512 aa, synthetic construct
MKRIAIYSRKSRETDTGESIKNQIDMCKTYFDRTNEDCSFEVFQDEGFSGGNTNRPSFQRMLELAKHKQFDVIAVYKVDRIARNIVDFVNTFNELEEHDVKLVSITEGFDPSTPIGKMMMMLLASFAEMERMNTAERVKDNMKGLAKIGRWSGGTPPTGYKSKTITVNGKKETYLELIPEKKQLIISIFEKASDGYTTYQIGEMFSMSPKTISNIIINPTYVKSDELSANYLKSIGYDVFCELNGNGYLAYNRRPKKKGKKLFNAKGMFVSVSLHEAPIDSKTWIKANNNLKDRATEAKPRISNNSFLAHLVKCSCGSGMYIHTGHKKKDGTKNTYFVCSKKKSKNKCASKWLRIDVVEAEVLNTLKKVSSNPKILDVYLKKKNNSVNYVESIKNIKKQINKNTEAINALTDKLVLLEGASIDIVSKKINSIANENTKLNTQLLEIERKKMFLEVDGENLKLLISNMSKFLARFDRIDINEKQNFIKTIIKEVIWDSISNDGEDEITIEFLE

SEQ ID NO: 17167 - protein, 531 aa, synthetic construct
MKEIIKIDSTMRKTGFEKKTRVAAYARVSSDSDEQLLSLEVQKEHYENYIKSNPCWEYAGLYFDEGISGTKIDKRESLKQLLKDCESGQIDRIVTKSISRLARNTVDCLEIVRKLTGLGIYLYFEKENIDTEHMSSELMLSILSSIAQSESKSISENNTWSIQKRFENGSFVISCPAYGYKNENKKMIIVPEQAKVVKEIFNMALSGMGGKAIARVLTDKKIPTKKGGNWTSTTVNAVLTNKTYTGDVIFQKTFTDDSFNRHKNCGEKKQYVIENHHEAIISHETFNLVHDLRQKRKLKLNITSGSNKYLARYTFSEKLYCGNCHSRLKKHDRHKKDGTYVVWCCTKHIREIKCCPMKAVKEEYVKLAFLQILNKLKATSAQILTPFIKSLRNVNNKDGLNKVIELEEKIAKLQEQEQVLSKLLAGGYIEMDSYYLESNQLKTEMDTCLKEKLQLSNSLNGNLTHLNEVQKLQRFVSVTEVFSEFKDEDFLDFVDDVVVKSRTEFIFHLKCGLELEEEVKETWHASHMVTE

SEQ ID NO: 17168 - protein, 525 aa, synthetic construct
MNANVTIIPPRKIAGNTVDKHEDKPRLRVVAYCRVSTDSEEQATSYDTQVQHYTDYISRNPLWEFAGIYADDGISGTSTKKRVGFNDMIHDCMSGKVDMVITKSISRFARNTIDCLKFVRQLKDKNIPIIFEKENINTMEASGELLLTIMASLAQQESASLSQNVKLGLKFRYQEGKVQINHNWFLGYTKDDEGNLVILEQEAKVVRRIYREYLEGASLRDIAEGLEKDGIKNGAGHLKWNLSNIKGILQNEKYIGDALLQKTITTDFINHVRIKNDGTEPQYYVKDSHTPIIPRDIFFKVQEEMLRRANMFSGEENKKRRVYSSKYALSSLCVCAKCGDVYRRIAWNNRGVHSVVWRCCTRVENGPSACDAPTVQENELQSAIVKAINKVFSISDEVLDTLKNNIREIIAGNNLSEIETVDKRIADKQAILLTLLKAKKDYTKTANEIDELKVKKQQLLIEKAGQEDAKRRIREMEDFLKSECHDISEYDEKLVRKYIKKIKVYEDRFSVTFKSEISVDVQRAS

SEQ ID NO: 17169 - protein, 454 aa, synthetic construct
MKSKKAVVYARFSLDNQRDESIDAQLRAINEYEDKNNIKIVNQFIDRAKSATSDKRPEFQNMIKFCEADTTGISMVIVHKLDRFSRDKYDSAMYKQKLKVKGIRVVSVLENLDNSPESLILESVIEGMAQYYSANLAREVAKGQKENALKALHNGGDAPLGYDVAHNKTYTVNEEEAQAVKIIFDRYIKGYSYSKIIDELNDLGYKTKRGNKFGKNSLHGILNNEKYTGVYVFNKTQRKGVDGKRNGHEQKSEDEIIKVEGGIPVIIDKEVFEQAQEMIQKRKKTPGSHKATTTYLLTGLIKCGECGHAFQGNKRKDSYGNEYVSYRCGCRKQKRDYLEEFILQELEKNILNDEAIPALSKALNEKLNYKNESNAELLKNLDQKLEKVNKEISNILNAIMNGIVSSMLKDKLDELEQVKLNLDLKMNELKIENKVVDGVGVTEEQIRSMFSRFK

SEQ ID NO: 17170 - protein, 452 aa, synthetic construct
MKAAIYIRVSTQEQIENYSIQAQTEKLTALCRSKDWDVYDIFIDGGYSGSNMNRPALNEMLSKLHEIDAVVVYRLDRLSRSQRDTITLIEEYFLKNNVEFVSLSETLDTSSPFGRAMIGILSVFAQLERETIRDRMVMGKIKRIEAGLPLTTAKGRTFGYDVIDTKLYINEEEAKQLQMIYDIFEEEKSITSLQKRLKKLGFKVKSYSSYNNWLTNDLYCGYVSYADKVHTKGVHEPIISEEQFYRVQEIFSRMGKNPNMNRDSASLLNNLVVCSKCGLGFVHRRKDTVSRGKKYHYRYYSCKTYKHTHELEKCGNKIWRADKLEELIIDRVNNYSFASRNVDKEDELDSLNEKLKTEHAKKKRLFDLYISGSYEVSELDGMMADIDAQINYYEAQIEANEELKKNKKIQENLADLATVDFDSLEFREKQLYLKSLINKIYIDGEQVTIEWL

SEQ ID NO: 17171 - protein, 477 aa, synthetic construct
MKKVAIYARVSTLNQAKEGYSIDGQINALTKYCEAMDWKIVDTYTDAGYSGSSIDRPAMKRMLLDIENKRLDAVIVYKLDRLSRNVQDTLDLIKNVFNENSIDFISLSENIDTSSAMGGLFLTLLSAIAEFEREQITERMHMGKVGRARSGKPMGWTRPPFGYTYADGNYIVDDFKALIIKKIYKEYLSGTSITKLRDKLNEEGHIGKDIKWSYRAVRLILDNPVYAGYINFKEEVYKGNHKPIVSKETFDKVQLELDIRQKQAYANNNNPRPFQGKYMLSGLARCGYCGAPLESTLGNIRKDGTRLKKYQCMNRTVKLRTTNYNNNKKCVSGFYHMNVLEEYVVDEISKLQMNPKTAFEQTETKSEDHTEIYEQRIISIDKKINKLSDLYMNDLISLEDMQLKAKSLKDERSNLIDKIYRSENNLKNIKKEKAQTYLDNLEKNINEETYENKKKIINILIEKVYVKADEIKVNWKF

SEQ ID NO: 17172 - protein, 475 aa, synthetic construct
MEINKLKAALYVRVSTTEQANEGYSIQAQTERLKNYAKAKDYFIIKTYTDPGFSGAKLDRPALQEMITDIENNQLDIVLVYKLDRLSRSQKNTLFLIEDVFLKNNVDFVSMQESFDTTSAFGRAMIGILSVFAQLERDTITERMGMGRTERAKEGYFHGGGSARIPVGYDYVDGLLQVNEYEAEIVRSIFELYNSGKGVNSISNAIRDKFPSKRKFGVSLTRSILTNNLYVGLIKFNDGVYEGKHEPIISKDIFDKAQYEFKRRTTGKLKLFTSKYLLTGTTYCGHCGARVKGTGSSKLKDGTRLSYYSCYSRAGSPAHMVKDLNCPSKINRTEILDEYVISQMKEITKTDISIEIDSEFTDDSDIDNTVIQNEIKSIEERINKLLELYQFGNVPLDVLNSKINSLNSEKAKLNEILNESTTEIIDDTIDKVEIFNNLKKVDWNTITHKEIKAIISQSIEKITIFNEKIEIEWKF

SEQ ID NO: 17173 - protein, 546 aa, synthetic construct
MNRVALYARYSSDQQSAASIEDQLRICRERAAREGWHVVGLYDDAAISGASMILRPGIQALVQDAQAGKFDIVLAEALDRVSRDQADVATLFKHLQFARVPLVTLAEGEISELHVGLKGTMNALFLKDLAKKTHRGQRGRVEKGFSAGPVGYGYRTVRRLSSEGDLVRGECRIEPSEVPIVERVFREFAAGKSPRAIARDLNTDGIPGPSGRPWSDTTIRGKRSLGIGILNNEMYVGVRVWNHKQSVKDPHTGRNVRRPNPESEWVRAEAPQLRIISDDIWQAVKHRQDVLGEQYKPMIDGVHAAQASRMHQARRPVTLLSGLVECGLCGGKVGLAVNGRFGCMNYHRRHTCANSRTIRRDALEERALAGLRERLVSPEKVQAAVAAYAEYINRHNREQRMQIEVDRRSLDKIERAIAGIMTAIEDGLYQPTMKARMAELERQKSEIAARMALAPQAVPDVHPGVAEIYKREMERFSQALEDPETRLDASDAIRSLIHRIVLHPGEKRGEIHATLHGALMGILDFAKEDARSEPVVTTKVAQGSLA

SEQ ID NO: 17174 - protein, 540 aa, synthetic construct
MKQPYNTTIYNTALYMRLSRDDENYGDSVSIETQRTILQQYAKEQGLHVVGEYVDDGWSGTNFERPDFQRMMDDMEAGKVNCIVTKDLSRFGREHVMMDYYLEFLFPEKRVRYIAVAENEDTEKGLSDFVPFKNLFNEWFAKDTSRKVKAAFKAKFATGQRIGAYAPIGYRKHPEIKNKLIIDEETRWIVEKIFDLAIHGRGAASITRILIAEKVPTPGFINFQRDGTFANIYAGAPEEKSYAWTIAQVKSIMKDETYIGHTIHYRETNISFKNKRRVRKPQSEWVRVENTQEPIISEQVFRQVQEQIANRRRKCKDGTTQIFSGLVKCADCGWSLSYGENRQNSKPYGHYHCSKYGQGTRQCSMHYIRYDVLYAYVLSRLQYWSGLVQHDEERLLKRLLNATDKGQAAARKKQAAELKKAEKRKAEVDTLFARMYEDWAAGRITEYNFSMLSGKYQSEQAELDEKIERLQSAITTESQNAADAEKWIALMKECVNPTELTAELLNTLIEKIVVHEAVKGEDGSREQEVEIFYRFIGKID

SEQ ID NO: 17175 - protein, 594 aa, synthetic construct
MNAETPVIAQRAALYLRVSTVRQAEHDVSIPDQKRQGEAYCTSRGYRLVDTFIEAGASATNDRRPEFQRMIEAGTSKPAPFDVVVVHSFSRFFRDHFELEFYVRKLAKNGVRLVSITQEMGDDPMHVMMRQIMALFDEYQSKENAKHVLRALKENARQGFWNGSLPPIGYRTVAAEQRGAKTKKKLEIDPLHADTIRLIYRLALGAEADHSQMGVKAIVKHLNARGIFTRDGGRWGIGQVHRILTRRTYIGEHEFNRRSKTKEKKPDAEVVTVAVPPLIEHATFDAVQALMKARNQKTALPHRVVIGPTLLTGICFCGNCGGAMTIRTGKGGRYRYYACSIKARQGETGCKGRAIPMDRLDGLVARHIEDRLLDPDRLEELLETILGRREEQSERRRVHIAELNRRAAESELRLKRLYDAIEAGVADLDDPALKERIAGLKVIRDQSRVDADRAQAMLESTGERAITPEMVGRLSQAARERMRLDGGGYRRDHLRALAQRVEVGDDEVRIMGSKSDLLRTLVAAEGGKSAAIGVPSRGPKWRRGWDSNPRYACTYGGFQDRCLKPLGHLSVEALLSQGWAVAKGGNDAELHHVG

SEQ ID NO: 17176 - protein, 567 aa, synthetic construct
MATRSQQKRAAIYARYSSDMQKVTSIDGQLLLCRKVAARNSLDVVGEFVDAAKSGLTEDKRDGYQRLLEGVRKQDFDVIIVEHFDRLSRDPATIQRLKQVFEFNRVELMDQKGVYATATDISIASLYNTIYKPQLADKVRRGHDNAVSNGRIPGSYAYGYRPRPGAPGERMIDESEAKIVRRIFIEYTSGRSTRDIAADLTREGVPTPGATRHKNKAGRTTWNHQCITGGRHGRGIVGNELYIGEIHWNVRSTILNPETQKKQKRRNPEERHIIVKNAELRIVPQALWERAQKVRSERAIHLFGPTGKPRRRPVVPRNNEHPLAGVLRCGVCYGHMRIAQSSRNGGPRAACANAHQRSTCEHTRSFDMDVLLKDVAEKMEVRLLSPKAIEEAMRAWKEEQKRNPQKTSERSNLERRCHVLNTEIERLSYAIANSRRKPDELVKRIDECDAERETLEERLRLLGNGGENVIPFDHPRFGDRYCSEAKRLVTALKTNPKAIETRVAFRNLLNCIIVHPARKRMPYEYTPYLNAAALFSPQLFPENCPKTGNISTLSCYDNVQSEKSVSS

SEQ ID NO: 17177 - protein, 538 aa, synthetic construct
MTTPDTQAPTITGEGRVTAVTYQRVSTKEQATAGGRDEGFSIPAQREANRRKADALGADVVAEFVDAGESARSAKRPELQRMLDYIATHQVTYCIVHKVDRLARNRLDDVDIHRHLIDAGVQLVSATENIDDTPSGMLLHGIMSSIAEFYSRNLAAEVTKGMTQKVANGGTPSRAPIGYRNIRCKDEQGREYRTVEIDPDRAPLIRWVFDTYAKGEHTVPDLLAEATTRGLTTVATPKRSSGPVGRSTFFKLLRNPYYIGQVRYQGALHPGAHEPIVDAETWQQVQTLLDTRATAGERRRKHDHYLKGTLYCGTCMSRLQLDYARNKQGIRYAYYICTGRATKRTACTRKAVPVGVAEQLVTDCYQQIAITEQTYQQLAQRVEAAFDERLAERSQAIDDLTTTKRRLEAEADKLLEAHFADAIDLDTLKRHQDRIRVALNDVTRRLEAERRDHEGPRKHLATALRLLADCGHMYALTDNHGKRLANQAFYHRIEITEDEKAAIQLNEPFAALAPNDVRCSSTSDLVGPEGLEPPTLSV

SEQ ID NO: 17178 - protein, 511 aa, synthetic construct
MKVAAYARYSSENQREESIEAQLAAIEEFCQKEGHVIVATYIDRAMSATTDNRPEFLRMINDAKNGIFEAVIVHKLDRFARNRYDSAIYKRELKKAGVILLSVTERLDDSPESIILESVLEGMAEYYSKNLAREVMKGLLENAKEAKYNGGIPPLGYDVDPATQKYVINEEEAKAVRLIFDMYLSGQSYKEIIAELNKRGYRTKLGRPFGKNSLHDLLRNPIYAGYYVYGRGKKAKDRNNLREDRIVIPDAIPAIITKDEHERVMEKMKENRRRSGQYKAKREYIFSGLVECAHCGGSLIGNCAKGHLYYVCNRKKRVGDCPGVSISQSELEKKVFGHIMNTLFSEDNMQKLAHEIYSILQEKLDGYNEKITEIEKQIRKLEKERENLIEAIAAGIPLAGLKKKAEEIEEKIQYWQNEMNRMPSRQELNMSEEQILQFLRERNEKVLNSEDKKAIAKEYVQKIKVYDDKVEISFNLPVIDPTTPNKVGFYMVELRGFEPLASTLPVLRSPN

SEQ ID NO: 17179 - protein, 528 aa, synthetic construct
MLDNSNVAPGKNKTLRCAIYTRKSHEEGLEQEFNSLDAQRESAEHYIEAQRMRGWTALPDRYDDGGFSGGNMERPGLRRLLADIDAGKIDVIVVYKVDRLSRSLLDFMKMIDLFNEKGVSFVSVTQHFSTTDPTGRMFLGILITFAQYEREVIAERIRDKVAAAKRRGKYCGGVPILGYDVDRENKKLLVNPDEARTVQYIFRRFIQIGSAKKLGQELNEQGYRTKAWTTKKGKVREGSEWNTAHIYRLLNNRIYIGEIAHKDRSYPGEHEGIIDRATWDKVQAILEDNKPVKVSMARTKMVAPLKGVIRCGHCGCSMGPTYARKNGRHYTYYICQKDSKRTVSRCPLKRIPAGDIEQAVVEQLSAVFRTPTLVAKTYFAARDIEQVERERLFKQKAQLEMELSQAREQALELMKPGNDQPGKAEMLTTVNRQAVELSKQLTHVSERCRAYQGNSITEQDVSEAFQNVEGFWEDLFPVERNRLIRLLVDKVEIRETGIDMELRTNGLTTLIAELAGLACEVTERRTNR

SEQ ID NO: 17180 - protein, 467 aa, synthetic construct
MGSAAIYARISSDAEGTGLGVARQVEDCRKLAADRGWPVGAEYVDNDVSAFSGKPRRQYARMLADLASGERDAVIVYNLDRLHRRPVELEEFVTLCESVGVRDVATVTADIDLGNDDGLFMARIFAAFAAKESGRKSARIRRKMLQNAQAGLPHGSVRPFGYEADKITVRDSEAAVIRQMVDRYLAGQSLRSLTIWLNESQVAPSVATSWQTTAVRQVLSSGRIAGLREHRGEVIGPAVWPAIITPADRDRVLARMAARSVTKSRTARTYLLSGMLRCGRCGNRLYSQARHSNPQNRVRRYVCLKGPDHGGCGRLTVVAAPVEELLTEAVWTRLDSPQLADVLAGKATADADVTALATQVDADQERLDELAGLYADGAITAREWIAARDPITDRITAARRDIATATDTTAVYELAGTGSALRTEWDGLDLGRQQAIVKAVLDHAVIAPGTPGSRSLDIDRVRPVWRV

SEQ ID NO: 17181 - protein, 539 aa, synthetic construct
MGFFYGVFMSIAYSYRRFSSKGQEQGDSIRRQTELAEKYCIEHRLELSNQTYEDLGVSAWTGSNSHEDAGLGQFLKACELKKIPEDSVLLVESLDRLSREKIMKAMTQLMSITRHIDVVTLVDNRRYTSDMDFSDIIIAGATMVRANEESEIKSKRISAVWEAKRRDPKRSKKTRKCPFWLDVTDDNMDFVVNEKVEIVREAYRLSAEGLGNMKVAKYLNSKGFRTARDKDWSPANVSVLLKARTVLGEYQPCKVINRKAVSQGDPVVDYYPQVIDTELFNKVQICISDRARNIRMGSTSSHRNLIRSNGRCMCGGELFITSKRQGVAYFQCQNKTNSECSHSLFRYDVFLQFIREQVIRPMYFRAWAIDDSSNEHESKRDALVVQRNIEQSKLDALLELDLSNPSITLKIGVLANQVEKFDSEILEVEQQIAKSKLGNFKFESLDTMLKLTDVAGEGDSTEKQISARVQLNRMLSNFKIELGSNERKSLVYIEYFDQHKQDYSKQLFQTKTTAPSRAIKKKKMIWELIDLTLNKQTFD

SEQ ID NO: 17182 - protein, 627 aa, synthetic construct
MTTTNAPASLHRSATQTRTAGCTELDQAPEPSSGSAFGLDQIGETTTLAVSYLRVSTKEQASKGGRDEGFSIPAQREANLRKAQGLNAIIIEEFVDAGESARKADRPALMELIEYVKTHPVAYCIVHKVDRLARNRADDVAIHLALKEAGVLLVSATENIDETPSGMLLHGIMSTIAEFYSRNLANEVSKGMTQKAITGGTNGKAPMGYLNVTRRDELGRELRTIEVDPHRGPLIRWAFEAYATGNYSTATLREELIDRGLTTVATPKRPARPPALSSIQRMLSSPYYKGNVLFKGATYDGLHEPLVAPEIWYRVQTVLAAHQVSGEKTQAHDHYLKGSVFCGICGSRLILTNAKSRRGVIYPYFICSGRHKKRTNCNRKAMFVPDVEAAVEDYYRTVQIPAHIIGPLRELIHAEFDRLHATAKTERKAQIAERDRLYDERHKLLQAHYAGAVPLDLLKSEQDRIGRQVAFLDSRIEASEVEYDQARAHLDDCLALAGDAHTIYMSLDDSLRRIANQAFFNRLVVTDGDVVEGEPGVPFNIFFDPGVQATALARQGEGGNEAGKTGNVGGLNNDALVARGGVEPPTFRFSVGRSYQLSYLAEPVRTGPASDPDGTRTRDLRRDRAAR

SEQ ID NO: 17183 - protein, 558 aa, synthetic construct
MSVRRAALYARFSTELQSDRSVDDQIALCRNFAERGGFEVVRTYDDRAKSGASMIERDGLLRLLADAKNNQFDVVIVEALDRVSRDQEDMAAIYKRLKFLGIDIIAVHDGKADTIQIGIRGLIGAIYLEDLKHKVRRGMSGRVRDGLSAGGKAFGYKPVLGKPGELVIDEDEAAVVRRIFREYALGRTPRQIAIDLNRDGIVPPRGAVWNASTLNGSKARQNGMLRNPIYYGELIWNRVTMVRDPETGKRVSRNNPESEWQRKSVPALRIVDEETAAKVQARIEERTFNMSPERAPKRPRMLSGLLKCGKCGGGMTLDGYNRGRMRVRCVRTRETGACDHKRKYHLEDIEAGTVEMLRQQFSKPELLQAYLDAFLQDRRQKAAEINNTRSILEKRLARLESELERAIDLCIKGVLSEDKLMERKKEIDPEIVRIKADLSMQPPPPKIDVHPATIAALRGDMEELGRILTKGPVEITEAVVQTLRSVVDSVVVYPTEPRTAPVVQVRGKLARLLGEDIENGFLPKAANKMVAEARSVRTPHSLPHQKQRISHKIGRFYA

SEQ ID NO: 17184 - protein, 532 aa, synthetic construct
MIERNEAQVYLYIRFSRKTQEDGDSERRQLECAHRAAEKYNLTINEDFIMTDRGFSAFKAAHIRRGALGGFLEAVKSGDVAKGSILIVESLDRLSREAPFFAQMQFSSLISDGISIITANDGNIYNTREMNRRPEVFYGIYAVMQRAHEESKRKQALSAGSIKGKILKHERGEHTTNFTSVPSWITNKKDGYELNEKAKAVELIVNMYLNHEGLNTISRELAEREIKSPTGRKRWGITTIRKVLDNPALYGLNKFKLRYDSDGVTVEEKFEFENFYPALISKEEFLIIQERKKKKANSREAYGSVTYLLSSYGKDRCVCSKCGYTTGSQMQKQVNRKGEYTQSVMRLHCRKHKETLDCCSSFKCERLEHAFINAIHKELNPDFLKSHKTTKGNEESIRAQISDIDNEFKMLMKKQEKMKSMDLKLEIMKRIDELDSKRYELTEILNKKLTQVNGEADYEKLKSLANKCLNIKNSNERKLFKQILIQSVKQIVIDFKTESLACYFNNGNHLSLNYRTETDSYQTTIFYKRKPR

SEQ ID NO: 17185 - protein, 526 aa, synthetic construct
MKRRVAIYARYSADLQKATSITDQVAMAQKYCDEQGYDVVEIFTDEEITGRHLRRPGFQELKKAVEERRIDLVVVEMLDRLSRRTADALHSWELLKFSGVDLFSIKEGQQDFLTVLLRGYGAQAFSESVGFHTRRGMQGALGRGRLHTSAFGYRVLSEKTEGLSREVDAEQAVVVLRIYEEAAAGKSALQIAHGLNADGIKAPRGGTWDASTIRGNRKRGEGILHNRLYIGEAQVCRTTQSYHPETGARRVDLSPNEMVSATFPELQIVPDKLWAAVQAKLKEDQVGRTENPVRSRRRKHLFSGLMVCGCCGAHYVKMSSTSFACNEGRKKACKNRTNISQKRLERRVFGRLRDAFRSPELFAAFEAALREERQKLASFDPATEIARLESLIRKEEAKQESIFRAIEEGAPFAAFRARSKAIDGELTALRARLEEASSRGRVAAHDLPDTATLFARAVDAMETLLGDPDLVHQAHTYLRNLITRIVLVPDPAAEHGVSIKLETDFAALLGGADTGHAHGLASCLMC

SEQ ID NO: 17186 - protein, 562 aa, synthetic construct
MGKVFSYIRFSSAKQSAGDSYARQVRAAKAFCDENDLELADPREYLFFDAGRSAFKGKHLDDTGELARFLSYVEEGTIPPGSYLVVESLDRLSRERVRDALPRFLDLLAKGINVYTSVDKRLYTKDYNELDLIISIISMSRAHEESATKGGRVSSAWRAKQKDARTTGKPLGKLRPLWLDVTPDRYVLNPDKAAIVRRIFVLSTKGHGSRIIAATLNQEGIPAFSSGRKNFSGLWGFSTVRHILDSRTTLGEYQPHIFIDGKRTPDGEPIKGYFPAVVTEDEFYLAHAARSSRKTHTVTKTTTNFNVLTGILNCYKCGAAMHLQGQRGRKYYKCSKATRGLCDAGIISAPRAEEVFKEMLPKVDSLSLVQDSSGRLQKSLQVVEGRIASLKARQNDAEASHAEFPSRITAKLLHELEAEIGALESERAAISEQLASDKVMNKDDFFKKLDLVSFEGRVAANNLIKRLGLYIFVNKNGRTDETYWVSKNNAIPLPFSAETPNLLFYLMHRGKEIRFEAMYDEYVDLQVAQDELSEVEAIFAKTESWDELPPELLALWKARHGV

SEQ ID NO: 17187 - protein, 515 aa, synthetic construct
MQYLIYLRKSRADQEAELRGEGETLARHEKALLELARRQHLPIADIYREVVSGETIASRPMMQQLLSEVEQGVWDGVLVMEVERLARGDTIDQGIVAQAFKLSDTKIITPIKTYDPNNEFDEEYFEFGLFMSRREYKTIKRRLNNGRQASVKEGKYVGNRPPYGYERIKIENDKGFTLKPLEKEAQVVRMMFRWYAYGAHGISTIADQLNEMAIPSKTGKQWVYPTVRDILQNPVYVGKIRWGWRGQRKRVKNGSVSVSRPRSDDYLLADGIHPPIIDQQLFDQVQKKFSMHKPLPTSAREMKNPLAGLVICAKCGAKMQRRPYQRENIRTGLICPNNKCRNVSAPFDDVEQKLIEVLAEYIKEEKLRISNGHTQIDDSILQILQNQLADLREETVDLNKQNDNIHDFLEKGIYDVDTFLQRSQKISSRITEIEEKQKTLQQEIIEENKRIESATSIIPMTEQLLLQYENMSALEKNSMLKEVLRCVKYERECSIRDGGTADNFTLYLYPKISHK

SEQ ID NO: 17188 - protein, 562 aa, synthetic construct
MKRQKAALYVRVSTRYQVDKDSLPFQRKKLKEYCKLLEIDKFEIFEDDGYSGKNTDRPRFQEMMEHIRAGGFSHLIVWKVDRISRNLLDFSTMYKELKDHHVTFISMNEQFDTSTAIGEAMLKIILIFAELERNMTSERVTGIMLDRAESGLWNGGLPPLGYKKDPEKKNLIPEPEEKDKVKMIFDLYEKYHSCHKVARFLQQNGIKPKYNTEWLPEYIRRTLRNEAYIGTYIYNRCEFHGPEKPKSEWIVKENNHQAIIEKDQFIRCNEIMDKNASSRDVSEIRQTRHIHVFGGKVSCNLCGGNMNAAKDKQRENGLRPSVYRCGRRARQMDCDNKRMISDLSLGPFIFNYAANLARIQKDCKNIDSLEKLESALLAGPEFDNVRVSPESLEITFSMLRDKNISKGAYVPDIGESGAQEGTSEDQLVILKRERDKQKNAISRLTELYIYDPDAITKEEYSERKRELTAKIRDIEKRISALNDGGGSGSADLSFIKKASAFLVAQHINSKNHIDYVQIAVDLDAGILKDFVDQIVNEIFIQDGRIVRIRFASGLEHKFLYDE

SEQ ID NO: 17189 - protein, 528 aa, synthetic construct
MVAMYLRKSRADKEAEARGEGETLSRHQDILAALAARMGLAVGAVYKELVSGETIAARPKMQQLLLEVMQGKWDSVLVMEIERLARGDTKDQGTVAEAFKFSGTKIITPAKTYDPSNEFDEEYFEFNLFMSRREYKTINRRIQTGRTAAFQDGWYIAGTAPYGYEKVKHKGDKGYVLEIVEDEASVVRMIFRLYTCGELQPDGSYQRFGSYQIRDRLNALHIPSRSGSSWSASSIMDIIRNPVYTGYQRWSWRKVHKTITNAGTIVESRPKDDGCPKIRGRFEPIITEEVYQMAQDVRKNKKTTHTGGSNALRNPLSGLVYCSGCHSLMTRQVSNTKAKYAILRCPNSKCKTVSSPIYLIEKKVIDGLREWAARYELEWEEEPQEDTSSALSLLSNSAKTLKAKRQQVRQQLSSTYDLLEQGVYTLSVFQERRKLLEEKQSGLDTELSRLLQQIEDIQLQEQAKREFLPAARRIIDSYWDTDDMETRNSMLKEVLDHIDYSRTERTKKGLRDTATFELHFYPRLPENR

SEQ ID NO: 17190 - protein, 545 aa, synthetic construct
MSGATNKITALYCRLSQEDERAGESLSIENQKAILLSYCKDHHFSNPKFFIDDGYSGVNYDRPGFQAMLAEIEAGRVAIAITKDLSRLGRNSALTGLYTNFTFPQNGVRFIAINDNFDTADQNSINNDFAGIKNWFNEFYCRDTSRKIRAVQKAKGERGVPLTVNVPYGYVKDPENPHHWLIDPEAAQVVRRIFQMCMEGRGPQQIANQLRADKVLTPTAYKKQHGRSTPNPTPENPYGWQDSSVVKILERREYTGCTVNFKTYTNSIWDKKQRENPVEKQAVFPDTHERIIEDDVFEKVQVIRQQRHRMTRTGRSSIFSGLVYCADCGSKMQYGSSNNGDFAQDFFDCSLHKKNREKCGGHFIRVKVLEQLVLKHMQMVMGYILRHEDYFRTVMEHQMKLESAEKLQIIRKQLNRDEKRITELKRLFIKIYEDNASGRLSDERFDMLSQSYEAEQKQLEAEVITLRQDIEVQERQNENIEKFIQKAHKYVGIETLDPYALRELVQAIYVETPDKSSGKRRQSIHIKYDGMGFIPLDELMKRETA

SEQ ID NO: 17191 - protein, 557 aa, synthetic construct
MVRVAIYARYSSDRQTERSIEDQIRICRQRADREGWSVSGTFADHALSGASRQRPELLQMIARAGHGEFDIILAEALDRLSRDQEDTAWIHKGLNFRNIKIVTLSEGEITELHVGISSTMNAVFLKQLAAKTHRGQLGVVIDGRVAGGNAYGYDVVQRDGKIGRAGLPQRGHRAINVAEAAVIRQIFKDYIDGQSPRQIAHRLNAAGLPGPRGGAWTASLLLGNAERGIGLLRNALYVGRLIWNRQRFIKNPSTGKRQARLNPACEWIVHEVPQLRIIEDDMWDRAQARLLAQRKVFKQPEGATNRLNPLHRPRHLLSGLVRCGLCNGTMAIGASGRRLVCTSHRERGTCTNGRTVKQDVLQSRVLDGIKTHLAQPALIEHFVGEYVRLQNERRRSAVANRAGIENRLRRLEAKEQQLTRALLEQDDIAPLLAASKALAVELSAVRQELAAEPEPPPAIHPNIAGLYARKVAELESCLSDPATLDAARGLLTTMISHIVIHPGQARGAYDLELVGDLAALLELGSPRPQKSRSTGGMPDVAVSLVAGARFELTTFRL

SEQ ID NO: 17192 - protein, 533 aa, synthetic construct
MAEALFGSFGQSAGGPSLMDPPAEQPKKLRVAAYVRVSSLLDEQEGSFDNQKTHYTQLIRSTPGWKMVDIYTDQGRSGTSMAKRPGFNRMIRHAYEKKIDIILCKSVSRFARNVLDAINTIRELTELGVRIIFDKENIDTGDMASEFILTMLSATAQEESRSISENINWALEKRYERGEPVFVRKLGYQKNEQKEWIIIEEEAHIVREAFEEAFNGKTPAQIAKQFIKKRYKKINGRTDWTSTTVRLMLLNRDYTGDVICQKYYTESYLSHKRVANNGERNQYFIENHHEPIVSRETFEAVQRELERRKKPNKNKKVNRYPLSSRIQCGKCGGNLHRFICKGVVRWRCENNVRSKELCTMGSIKEEVIREAMQDAFLEQYRLARFMYDMERMKKDLTRAVAARDFSYNRLRLDLEQILLEENIALINANRSEADSTDEKLEELASKRASVEKELKIREDWWELLDQDFAFREEANTKLKELDAVRDPSKQLQKELQNISFLRAWVVRVKAITPMSFCMHWIDDKETIVDLRKE

SEQ ID NO: 17193 - protein, 554 aa, synthetic construct
MSSHQSSSRVRIIPAKARTGRTEANPGGQKKRIAVYARVSTDSEMQASSYELQVAHYKDYVSKNPAWTLVDVYADEGISGTSTKNRTEFNRMIQDCEEGRIDYILTKSISRFARNTLDCISRIRMLKNLRPAVGVFFEKENIDTLDSKSELFLTILSSMAQEESRSVSENTKWGVQKRFQQGIVHMPTTFFLGYDTTEDGEIVINEEQATVVRRIFREFLEGKGCPRIAKGLTRDGLKTGKGNKTWTSDAVYKILKQEKYQGHCLAQKTVTIDFLTHKRVRNHDIQPQYYVKNTHPAIISEETFEAVQQEMKRRSLMMRDPDKKYRQHFSGHSPFSNQYFCGECGRPVIRRRMTSSRKGEKYYISAWQCRVTAGRDPDYKDCKTSYVHETDLENAFMKIMREMKENPDEVIEEANQAIEKVSLSPPEQQRLEELNKQIETITDRISDLAAKESATRDAIYDATLRHLIYEQEILQQERDSLEENMQEQLYLEKQFRFLLDLLETTEELEDFDVTLFKNTIERGIIYKERIVEFQFKCGVKRTLCVRERKTPKKK

SEQ ID NO: 17194 - protein, 605 aa, synthetic construct
MSKITADHLSLSAFVYVRQSTAYQVANNLESQRRQYGLVERARQLGWETVEIVDDDLGRSGGGIARPGFEKLLAAICEGRVGAVVSLEASRLARNGRDWHTLLEFCGLVGTLIVDEEAIYDPRSPNDRLLLGMKGTMSEMELSVFRQRSVEAMRQKARRGELHLTVAVGYVKTDDARVEKDPDRRVQESILLVFRKFAELQTVRQVLLWFRQENVLVPSVNQGRGKPPIEWKAPVYHTLHHILTNPVYAGSYAYGRRGTRVMIKDGRKRVIRYTLRRNSKDWEVLIHDHHEGYISWAEFERNQHLIAENANGKSYIGRGSIRRGEALLPGLFRCGRCGRRLHIQYSGKGGNTQRYVCRGTFGDMAAANCIGFGGMRVDRAVAQEVLERLQPLGIEAALQAMEAHTQRHSDKRQQLENSIKQAQYEAARARRQYDAVDPDNRLVAGELERRWNEKLIQLRDLEIELETLSTDRDMPALSADDRARLMKLGRDLGQAWDSPSVSIETRKKIIRLLITEIVVDIVDDTLAIIIHWQGGDHTRMTVKKNKTSACRLSGICSECLETAISARRASVGQLPSSRYAGALAWTTPVRPLGQAYFGRIVTITS

SEQ ID NO: 17195 - protein, 532 aa, synthetic construct
MNTYGTSAEQRNRHILTFMSEAVEETTPDDLVDIYARKSVKLAGRRGELSPNAQIQRGRDWASWNKLRVRHVWQDTLSASKDVKRPDYEKALLALANGEIKTLWCYKLDRFSRKGALAVLNVLEHLGETGARIIFGEDGLDSSDPNHRRMIMWKAEDARDESLRISQRVTDTKAWQRDHGEWVTGKTPYGLVADEARHLVPDTRPAIPGAPEGPTRARVAQSIFVLAALGLSLRAITRALHRYGIPSPTGKPAWAANTVYRIITNPAYSGWQVHCVGKQRGVIYVTAKGKRVRVGEPLVSDDRRKRAVRALKGHSKPKAPYAGKAAHLLTGLTQCTCGRSAPMSSTSYTCTTALDSGATCENPASVFRPPLEKYVVECWLARLTNADAEDPLLAAVASRWAALTKPNETAELAEAIAVLKSAEAIIERLLRDRRAGLYEGPAARFFEPAYEEVMADYNAASLAVRKHGGSGVDISFLLDEESAREAWEDADTSLRRDLLRLAIDRVIITRAGSGNDQRKFNGDTRVTIKWAG

SEQ ID NO: 17196 - protein, 579 aa, synthetic construct
MGRDMDKKAIAVLRWSTLEQGNSDRSSEVRQDANISRMAALHGWPIVERHVDAGRSAFTGENLTKGKLGELTRRFHTGALDPASHVIVVEELDRLSRQSPGVMTAWLTPLLNLGLTIAIANTGQILTRSVMETDFGGFVTMMSSAFSNYEFSRKQRERGNASWNKRREAAASGKNLSRHRARGWLQWDAEKKDYIPIPDRVWLVKDMFRLRLARQGKAMIAKDFNEKAKTNPIYRPWSTSKTPPKAWTASAIARIVQDRAVTGYVQYHRNPRGAEKKVPIGDPIKVYPPVIDEETWARANDMRLTNQLKTQGRGRAVSNLLGPLAKCRSCGGTMQPLGSARTRINKDGSKSQHYFLYCNTAKMTKGVGCTNQRGWTYSKVEQPILDRLLSLAIDDQHFRADDDTTARLEGDVVRLQRMVTDKQASKKRLLVLIADGEDEEAHDAYAAADAALKRVKADLTKAQEALAEAKGAVTPGEHVVRVAEVREKMESDDVDERFEARSLVKAAFQDVIDRIVFDPKNGMVIVSLVQGLGAMHILADGSVGYLDLVRGGKDYGQDETVEGFLRRRDGRNLTTGVGG

SEQ ID NO: 17197 - protein, 523 aa, synthetic construct
MRTVIYARFSSDNQNPRSTADQIAVCRERAEREGWSVVATFEDAAISGAAGVGELQRPGLNAMMQLVEAGGIDQVLAESTDRLARHVADAHTLRERIEFAGARLFTLFDGTVTPIVGLVKGFMDAQFRTDLAARVKRGQRSSVQQGRATAGIAYGYRRVLRFDDNGNPIRGLREIVDDKAEIVRRIFREYAAGRSGRQIAGDLNQEGLPAPRGAFWMPGVITGEHKSGHGILRNRLYIGEIVYGRTKAVVNPTTRARRMRPAGEQLTVASAPELRIVDQDLWEAVQQELASRTAARPEYHRRPKHLLSGLGVCGVCGNGWVKSSGENWGCRAHRNGKACTNNRVISSRQYQERVLAELRANLLAPDVVAAYVREYHRDYARKASQLTRDRARLADRLAQATRKMDRLLAALADGGSAFGEIRDMLGAAREEKERLARELASLDALPEVLTLHPRLEEEYRRQVEALQQALEAPETKLEAVPRLRAMIARIILRPAEATRGVQIEVVRQMDEVLSLATQSQARA

SEQ ID NO: 17198 - protein, 543 aa, synthetic construct
MTDHGRTKISARVYSYLRFSDPRQATGSSADRQLQYAQRWAAERGLVLDESLSLRDEGLSAYHQNHVKQGALGTFLRAVDEGRIPDGSVLIVEGLDRLSRAEPIQAQAQMAQIINAGITVVTASDGREYNRAGLKAQPMDLVYSLLVMIRAHEESDTKSKRVKASIRRLCEGWVAGTYRGLIRNGKDPQWLQWDGQAWQLIPDRVEAVRYAIELYKQGEGATRAARKMAERGYVLSDWGIAGQQIYRLVKLPALRGAKRISVDGEDYLLEGYYPPVLTDDEFEALQAATETRHGRRGVPEIVGLVTGLGIAYCGYCGTAVVAQNLLSRAREDGSVADGHRRLHCVAYSKRTGCQAGSCSVVPVEKAVLSYCSDQMNLARLLEPADDGRQLRQRLQACRRKQGDVERQLQRVTDAVLADDSGVAPLAFVRKARELEAELQQLQAEADQLEREQAMVGQVQTPAGADLWRRLAIEAQDIKSPAREQLRQLVLDTFSRITVYMRGLVPDPASKVIHLVLVSRAGQRVALDVDRRSGAWKAGLDRRE

SEQ ID NO: 17199 - protein, 550 aa, synthetic construct
MPQAFSYVRFSNAQQAQGDSLRRQTDKARRYAEAHGLTLATAAEHQFFDQGKSAYKAKHLDDEGQLRRFLSLVESGAIPAGSFLLIESLDRLSRERVRDALPRFLDLLNRGIRIVTLSDNRLYDQDYDDLDLIVSIISMSRAHEESAMKSQRLKAAWNTKKSDALNERKPIGGNCPAWLEYDGRQYQIIEEKAEIVRRIYSLCIQGYGYTNIIKLLNSEGIPLLDSSNRNKAGSWAVSSIWRILSNKATIGTFLFKGDEIPNYFPTVIDEQTFYEARAAIEQRKRTASSNPGKNMNIWQKVAYCALCKAPMHYVKKRENNEYLRCSAYAKGNCTQQPISTKSTEVVFKELLPKLDSLSLVQTNTNALTKELTINRGKQGEIKARIEAIQAQMLDISTTLPPTVLKMLTALDTELQTYIQREGEIVNSLSMEKLIDKDEFFKRLDLVSFAGRSKANSLLKSLNIKVFMSKNKMFVQYDVERDASPILSVFEHKGELIWWGKEEITKGVAEAQGDGATESLVRTMVKMTGLDEEKIVEMTQQFIDQKLTNNR

SEQ ID NO: 17200 - protein, 463 aa, synthetic construct
MKTAMYLRISDIKVAGDTLGVERQREDLIKLCESKGWDWVEYVDNDKSASKGVRPAYQRMLRDIKADKIGGVVVWDLDRLYRQPRELEDLIDLADEKRLNLASVDKEVDLATDNGRLYARIKGAVARSEVERKSARQVRAFEQLAGSGKGWGPRAFGYTEDHDNPGIVPAEADAVQHAYADVLAGVSLYSIARRWNDAKLFTTKKNRPWTSGNVARVLKSPRYAGYRTYRGEIVGRGDWPILVPEETWQAVKAILETPGRQFKGPRVRTRLLGGILHCGVCGEGLATGVRQPNVPIYRCKTPACHKISRKAEPIEEFVEYVMVEKLKTVLWEGDKGNKEKAEALTQESVALRSRLDALAVDFADGTLTASQIKTATLRIQERLHEVEDALRGMASSYVMEDIACADDIDAAWAALSIDRKRAVIQTLCRCITVNPLGKATPKALHGEGVVFDWREADEYADAV

SEQ ID NO: 17201 - protein, 529 aa, synthetic construct
MRKVYSYMRFSRPEQAKGTSIERQSSFAEQYALAHGLELDKSLTMMDKGLSAFHGMHRTKGAFGQFLAAVAAGKVPSGSVLVVESLDRLSREDPLIAQAALTDLILSGITVVTAADNQVYSREEIQQNPFKLIMSLVVMIRANEESETKQRRSNAFLKSALNQYQANGNIRRLGADPSWLDFNKDDNTYSFNARVDVIRRILSLYNQGIGSLKIARQLTEESIPTLSGKRNAWGQTTVANIVKSHALYGMKRINVQGVDYDLEDFYPELITKSKWLALQQHRSKRSKTMHGRGEVVHLITGHGKGFTTCGYCGGGLGAQTQKQYKRSGEYSRTVTRLHCLTHKETSSCCSSVFLQPIESAVLFAVCIGVEPQSLVPTVNNVNYSALIDEVENKVKHIVEQVTAGAPWDLFKDAHDRLKLEKQKLIKERDSQKPDVNQSDVQKWVNKLVELADKVRANDKEARLKCRTLINSICKSIVIKLRGHDLKSEPVVTITFVTDEQFEFKVGKNGAVQFVDNGMAVNRRLKTLLA

SEQ ID NO: 17202 - protein, 508 aa, synthetic construct
MKKAIAYMRFSSPGQMSGDSLNRQRRLIAEWLKVNSDYYLDTITYEDLGLSAFKGKHAQSGAFSEFLDAIEHGYILPGTTLLVESLDRLSREKVGEAIERLKLILNHGIDVITLCDNTVYNIDSLNDPYSLIKAILIAQRANEESEIKSSRVKLSWKKKRQDALESGTIMTASCPRWLSLDDKRTAFVPDPDRVKTIELIFKLRMERRSLNAIAKYLNDHAVKNFSGKESAWGPSVIEKLLANKALIGICVPSYRARGKGISEIAGYYPRVISDDLFYAVQEIRLAPFGISNSSKNPMLINLLRTVMKCEACGNTMIVHAVSGSLHGYYVCPMRRLHRCDRPSIKRDLVDYNIINELLFNCSKIQPVENKKDANETLELKIIELQMKINNLIVALSVAPEVTAIAEKIRLLDKELRRASVSLKTLKSKGVSSLGDFHAIDLTSKNGRELCRTLAYKTFEKIIINTDNKTCDIYFMNGIVFKHYPLMKTISAQQAISTLKYMVDGEIYF

SEQ ID NO: 17203 - protein, 604 aa, synthetic construct
MKKVFVYHRVSSDQQLDGSGIARQAELLEGYLERTGICAEMDDPAPVVLSDQGVSAFKGLNISEGELGAWMEQVRNGMWDSSILVVESIDRFSRQNPFDVMGYINALMAHNVAIHDVMANIVISRSNSKDLPFVMMNAQRAYDESKYKSDRIRKGWAKKREQAFNKGTIVTNKRPQWIEVENDKYVVNEKAAVVKEIFALYQTGMGCPTIAKQLQRKEGEQYKFNRPWTGELVHKILTNRRVTGKIFISEIIRNHDDIENPVTQKKYDMDVYPVVINEEEFELVQELLKSRRPNAGRVTVKKDGQEEVLIKSNLFSGIARCTECGGPMYHNVVRAKRTPKKGDPKIEEYRYIRCLNERDGLCENKAMTYETVERFVVEHLLGMDLSTVMKEQEFNPEIEVLRIQIDQVKDQITNYENGIERRKSAGKPISFDMREELDDAKSELERLLARQASLATVQVDVPVLQDVNVTELYDVNNVDIRTRYESELNKIVSNIRLKRNGTSYTIDINYKQNELKRHVLFVENKKKEQTLISEVIIEDVDGAKFYYTPSFMIMLKDGEIRFQQTNEDLSIIDYSLLLNYIDAVDRNDAVGVWMRNQFNFLTSN

SEQ ID NO: 17204 - protein, 509 aa, synthetic construct
MRRAISYIRFSSERQLKGDSVRRQSKLVTDWLDKNPEFYLDSSLSFKDLGKSAFSGKHLKGGLGDFLTAIEKGLVKAGDTLLIESLDRLSRQDIDIASELLRRILRAGVDVVTLSDGEHYTRESLKDPLSLIKSILIMQRAHEESLRKSERVQAAWNRKKELISEGIKVSRRCPAWLRLNDDRRTFTIIPDKVEVVKRAFDLRLQGLSFWAITRTLNDEGHLSLNQYTPKQKGWSDTAVKKLLRNRAVIGCFTPAGREEVQGYYPAIISESLFYRVQQLNTGQYGRASVSSNPLSVNLFRGIIKCSECGATIVLGGYALKRFGMYRCPNRSANRCSAKAISRKQTDATILYMLALCDRFETENTDTIDSLRLQREDLQRKISKMAELAIELDDMTIITEKLRDMKNALSKLNHDIEEETQRIKAITTGSLKDIDRTTKEGMIETQLLIKGVLKEIVIDAAKRRCKVTFHNGRAITLPITENPSEDVTEAIQSLSEVTERGLIDVDEVII

SEQ ID NO: 17205 - protein, 506 aa, synthetic construct
MRTVITYLRFSSATQGAEGADSTRRQNELFKQWLRKNSDAQVVASFSDEGLSGYKGKHLTGQFGDMLARIEAGEFPAGAILLVESIDRIGRLEHLETEALMNRIIAHGIEIHTLQDGLIYTRDALSDDLGISIIQRVKSYLAHQESKQKSFRVSEKWKQRAKLALAGEQHLTRNVPGWIDPDTFKCNEHAETVRLIFKLLLDGESLHNIARHLQSNDIKSFSRRKDANGFSVHSVRTVLRSESVIGTLPASQRNDRPAIPNYYEAAIDASTFNKAQEILDKNRKGRTPASDNPLTINIFKGLFRCQCGASVHPTGTKNKYQGVYRCNSHLDGRCDVPPLKRKPFDRWMIDNFLGMIDVGNDGEAEKEIASLQHEVETVTARIKKATALLLEMDDITELKTQVKELNQKRTELQTTINTMKRKTSLSDKGLPQLKDIDLMTKAGRVECQLILSKHLKGLTLGKDSVTVTLQNDTEITIPTDPLPLNDGTSIFEIAEKNLLNIDTFQL

SEQ ID NO: 17206 - protein, 506 aa, synthetic construct
MRSVITYLRYSSAIQGAEGADSTRRQNDLFKQWLKKNSDAQVVASFSDEGLSGYKGKHLTGQFGDMLARIESEEFPEGTILLVESIDRIGRLEHLETEALMNRILGNGIEIHTLQDGLIYTKDALADDLGISIIQRVKAYIAHQESKQKSFRVSQKWGQRAKLALAGEQRLTKMVPGWIDPETFKLNEHAETVRLIFKLLLDGESLHNIARHLQSNGIKSFSRRKDANGFSVHSVRTVLRSESVIGTLPASQRNDRPAIPNYYEAAIDASTFNKAQEILDKNRKGRTPASDNPLTINIFKGLFRCQCGASVHPTGTKNKYAGVYRCNNHLDGRCDVQPLKRKPFDKWVLENFLGMIDVGNDGESERKIAALQHEVEIVTARIKKATALLLEMDDITELKTQVKGLNQKRTEIQTTIDTLKRKTSLSDKGLPQLKDIDLMTKAGRVECQLILSKHLKGLTLGKDSVTVTLQNDTEITIPTNPLPLNDGSPIFEIADKELLDIDAYQL

SEQ ID NO: 17207 - protein, 506 aa, synthetic construct
MRSVITYLRFSSAIQGAEGADSTRRQNELFKQWLRKNSDAQVVASFSDEGLSGYKGKHLTGQFGDMLARIESGEFPEGTILLVESIDRIGRLEHLETEALMNRILGNGLEIHTLQDGLIYTKDALADDLGISIIQRVKAYIAHQESKQKSFRVSEKWKQRAKLALAGKQRLTKMVPGWIDPDTLKLNEHAETVRLIFKLLLSGESLHNIARHLQSNDIKSFSRRKDANGFSVHSVRTILRSETTIGTLPASQRNDRPAIPNYYEAAIDAATFNKAQEILDKNRKGRTPASDNPLTINIFKGLFRCQCGASVHPTGTKNKYAGVYRCNNHLDGRCDVPPLKRKPFDKWMLENFLGMIDVGNDGEAEGKIASLQYEVEIVTTRIKKATALLLEMDDIDELKIQLKELNQRRTELQTTIDNMRRKASLTDKELPQLKDIDLTTKAGRVECQLILSKHLKGLTLGKDSVIVTLQNDTEITIPTNPLPLNDGTSIFEIAEKELLEIDAYQL

SEQ ID NO: 17208 - protein, 605 aa, synthetic construct
MKKCFIYHRVSSEFQLARTGIQRQEDSLQAYVERTNLLADMEDPEPTIISDRGISAFKTNENNFSIGELGRWMDQVRDGMWDGSALVLESIDRFSRQNPFTVVAYLSELVSHNITIHDVSLSMLINRTNSAMLPIVTMSAQRAYEESKLKSDRIRDGWRRRRENAFNNGTIVTNKRPRWIDVKNDKYVLNDKVAIVREIFRLYKKGIGTSTIAKILNARGEKWLFKSGRLWRSESVHKILKNKRVTGAIFISETIRDYNSTDKSIERNTYEMDLYPIAISKEEYALVQQLLKMRRTNNGRITNIKDTGELKKSNIFNRVFRCAKCGEAMYHNVVLANRDSKKRGKFKEEYRYIRCIGERDGLCDNKALRYEVVEQFVIEHIKGMDFTKILKPNEINPEIELVRVLIEEEKAHIQEYELGIERLKKQDKKIPFDVLTELQDSRDKLRTLEERQFSFADIKVDTDYIKSVDSSVIFDQTNIAIRSMVEHELIKIIDTIKLYRMGKHYVITLKYRSVGILKHVLIVEAKKIPTLISNIVIERTGKTVEYSTPSFSLVIADGDSPRLKTSDGVPISMIDYSLLLNYVDDVDRDDIVGVWMREKFNTLTS

SEQ ID NO: 17209 - protein, 506 aa, synthetic construct
MRSVITYLRYSSTIQGAEGADSTRRQNDLFRQWLKKNIDAQVVASFSDEGLSGYKGKHLSGQFGDMLSRIESGEFPEGTILLVESIDRIGRLEHLETEALMNRIIAHGIEIHTLQDGLIYTRDALSDDLGISIIQRVKSYVAHQESKQKSFRVSQKWKQRAKLALAGEQRLTRNVPGWIDPDTFKCNEHAETVRLIFKLLLDGESLHNIARHLQSNDIKSFSRRKDANGFSVHSVRTVLRSESVIGTLPASQRNDRPAIPNYYEAAIDAATFNKAQEILDKNRKGRTPASDNPLTINIFKGLFRCQCGASVHPTGTKNKYAGVYRCNNHLDGRCDVPPLKRKPFDRWMIDNFLGMIDVGNDGESERKIAALQHEVEIVTARIKKATALLLEMDDITELKAQVKGLNQKRTEIQTTIDTLKRKTSLTDKELPQLKDIDLTTKAGRVECQLILSKHLKGLTLGKDSVTVTLQNDTEITIPTNPLPLNDGSPIFEIADKELLDIDAYQL

SEQ ID NO: 17210 - protein, 506 aa, synthetic construct
MRTVITYLRFSSATQGAEGADSTRRQNELFKQWLRKNSDAQVVASFSDEGLSGYKGKHLTGQFGDMLARIESGEFSEGTVLLVEAIDRIGRLEHLETEALMNRIIAHGIEIHTLQDGLIYTRDALSDDLGISIIQRVKSYVAHQESKQKSFRVSQKWKQRAKLALAGEQRLTRNVPGWIDPDTFKCNEHAETVRLIFKLLLDGESLHNIARHLQSNDIKSFSRRKDANGFSVHSVRTVLRSESVIGTLPASQRNDRPAIPNYYEAAIDAATFNKAQEILDKNRKGRTPASDNPLTINIFKGLFRCQCGASVHPTGTKNKYAGVYRCNNHLDGRCDVPPLKRKPFDRWMIDNFLGMIDVGNDGESERKIAALQHEVKIVTARIKKATALLLEMDDITELKAQVKGLNQKRTEIQTTIDTLKRKTSLTDKELPQLKDIDLTTKAGRVECQLILSKHLKGLTLGKDSVTVTLQNDTEITIPTNPLPLNDGSPIFEIADKELLDIDAYQL

SEQ ID NO: 17211 - protein, 509 aa, synthetic construct
MRRAISYIRFSSERQLKGDSVRRQSKLVTDWLDKNPEFYLDSSLSFKDLGKSAFSGKHLKGGLGDFLTAIEKGLVKAGDTLLIESLDRLSRQDIDIASELLRRILRAGVDIVTLSDGEHYTGESLKDPLSLIKSILIMQRAHEESLRKSERVQAAWNRKKELISEGIKVSRRCPAWLRLNDDRRTFTIIPDKVEVVKRAFDLRLQGLSFWAITRTLNDEGHLSLNQYTPKQKGWSDTAVKKLLRNRAVIGCFTPAGREEVQGYYPAIISESLFYRVQQLNTGQYGRASVSSNPLSVNLFRGIIKCSECGATIVLGGYALKRFGMYRCPNRSANRCSAKAISRKQTDTTILYMLALCDRFETENTDTIDSLKLQREDLQRKISKMAELAIELDDMTIITEKLRDMKNALSKLNHDIEEETKRIKAITTGSLKDIDRTTKEGMIETQLLIKGVLKEIVIDAAKRRCKVTFHNGKAITLPITENPSDNVTEAIQSLSEVTERGLIDVDEVII

SEQ ID NO: 17212 - protein, 606 aa, synthetic construct
MKKVFVYHRVSSDQQLDGSGIARQAELLEAYLKRTNILAEMDDPEPVIITESGGVSAFKGHNMLITSGLGAWMQEVRAAMWDGSHLVYENGDRFSRQNPFTVIGYINDLINHNITIHDATMNIIISRQNSAMLPMVLMNAQRAYDESKYKSDRIRKGWAKKREQAFNKGTIVTNKRPQWIEVEKDKYVLNEKATVVKEIFALYQTGMGCPTIAKKLQGKEGEQYKFNRPWTGELVHKILTNRRVTGKIFISETIRNHADIENPVTQKKYNMDVYPVVINEEEFELVQELLKSRRPNAGRVNVKKDGQEEVLIKSNLFSGIARCTECGGPMYHNVVRAKRTPKKGDPKIEEYRYIRCLNERDGLCENKAMTYETVERFVVEHLLGMDLSTVMKEQEFNPEIEVLRIQIDQVKEQITNYENGIERRKSAGKIITFDMREDLDDAKSELERLLARQASLATVQVDVAVLQDVNVTELYNVNHVDIRTRYENELNKIVSTIRLKRNGTSYTIDISYKQNELKRHVLFVENKKKEQTLISEVIIEDVDGGKFYYTPSFMIRLEDGEIRFQHTNEDLSIVDYSLLLNYVDAVDRNDTVGVWMRNQFNFLTSN

SEQ ID NO: 17213 - protein, 507 aa, synthetic construct
MKRVISYIRFSSEKQAKGDSLRRQSKMVTDWLKAHPEYYLDQDLSFRDLGVSGFTGKHLKGGLGDFLTAIEKGLVKAGDTLLIESLDRLSRQAVDRASELLRNILRSGVDVVTLSDGEHYTSESLKDPLALIKSILIMQRAHEESLRKSERIQAAWDAKKEAAKAGIKVSKRCPAWLKLNDDRKSFSVIPEKVETVKRCFQLRLEGKSIWEIVRTLNDEGHQTLNQYKAGKFGQTSVQDLLKNRSVIGYFTPKGCEEISGYYPAIIDETTFYKVQQLSHYRYGRKPVSDKPLSVNLFKGVIRCSECGHALIITGFSDTRNGIYRCPLRNENRCSAKGLSRKQTDGTLLTLLSRLDRFDSDMTNTIDTLKLHREHISSNIEKLVQLSLEIEDLSAITIKLKQLKNELSQVDADIEKETQRLKSIDVGCLSDCDLTTKAGRIEAQLIIKSAVKEVVLNTAKRRCKVTFHNGKAITLPITETPSDNVTEAIQSLSEVTERGLIDVDEVII

SEQ ID NO: 17214 - protein, 449 aa, synthetic construct
MKQVIGYLRQSTMKQQSLAAQKQAIEAIAEKHHIQHINFYSDKQSGRKDNRSGYRQITQLIQQGQCDILCCYRLNRLHRNLKNALKLIKLCQTYHVHILSVHDGYFDMDQAFDRLKLNIFISLAELESDNIGEQVRNGLQEKAKQGRLITTHAPFGYDYHHGTFIINQNESPTVKAVFNYYIKGHGYKKIAQLLEEDNTYINRQPYQVRNIIINPNYCGRVNNQYGQFDNMFPSIVSTSIYEQAQRLRLQKQTKQTPSDNQLKQKIKCPCCNATLTNMTIRKKNHTLRYYVCPKNMNASRFVCDFKGINAQTLEDKVLEVCRDFYQNQRIYTKIKSAIDKRIKRQRNIEKHHTLTQEQLIEKLAQGIIDAETFREQTQSLRQQPQRTTSINGHQIQHIIQNIIQKRFTLNILYPYIETIHITKDKNLIGIYFKNEPLNIVNQTMQSSIA

SEQ ID NO: 17215 - protein, 460 aa, synthetic construct
MGHVMNTAYAYIRFSSEKQSTGDSVRRQQSLIDSWGKNNPDYILSQKIYKDEGLSAFTGKHAAGDLGRLMNDISNGSITAGDVILIESLDRLSRENISTATDRLKAILIHGVNVVTLTDQKQYTPESLNSPMDLIMSILTAQRAHEESESKSKRMREVWAKKRTEAEEGGKIITKSCPRWLTVNSDRTGFGPIPDRVQTINQIFSLRVKGESLSAISKILNEEGRLTFTGKAGKWNQSTIQQLVSNRALIGYKVQSRNSVVNHPDIPDYYPVVVDLQTFQAVQQLKSDQFGKKQTSDIPALVNLFKSVLRCKECGNIMILNSVTVNRDGYYVCSMRRQGRCEAKPINRKATDEALVNGLFYNLDRLMLSKPEQNPVTALEAQKQDLTERLNKLVVALEIAPDITEIISRMNAIKGDIQAIESQIAQHKQRLQSHISASVQGLNLLVKANRVEFQLVNRHG

SEQ ID NO: 17216 - protein, 520 aa, synthetic construct
MARKKNIAAGLDAVIYARYSSHNQREVSIEQQIAECTKHAAALGLRIVGTYEDRAISGKTDNRPRFQQMMRDAEKGKFQAVVAWKSNRIGRNMLQAMVNEAKLDDYGVKVFYAEEDFDDTAAGRFALRNMMNVNQFYSENMAEDIIRGLYDNANKCMANGRQPLGYKRGADGKVMLDEPAAAVVREIFTRVAAGDLFVDIARDLNAKGIKTSKGAAWNKGSFQSICQNERYKGIYIYGNVRIVDGIPRIVSDELWYRVQEAMRMKKNPVGTRHRVGAEDYLLTGKLRCGHCGSYMTGVSGTSRNGELHYYYTCQKRRTEHACNKKNVRRDVIEPAIAQAIKMYCLTDDVIEWMADQTVQYWEKHDNDLQIEALEQQLAENKKATSNMLLAIEMGIITEATRSRMVELETENSKLTAQLSAAKRDVVKINREDLIDELHILRSKDIQDREVQAELFKDFLVAAYIYDDNRLKMVFSFMGKDNSVEIPLETGEDPPDGEDSPDAKMFVLTPDCSTKKALYFV

SEQ ID NO: 17217 - protein, 493 aa, synthetic construct
MTAVIYARYSSDNQREESIEGQIRECTAYAEKNGITVIKHYIDRAFSAKTDNRPEFQQMIKDSGKKLFDVVLVWKFDRFARNRFDSANYKMILKKNGVHLISVMEPIAEGSQGILVETLLEGMAEYYSAELSEKVIRGQTENALKGKCTGGTGTIGYKIDEDKFYHLDPLTAPLVLEAFQRYDNGDKMVEIVNFLNDKGVRNMLGGKMTHSSVNTMLKNRRYIGELSFRDIVVPDAIPTIVPKDLFDRVQKRLDKNKRAPACGKADEEYLLTTKLFCGKCGTLMFGESGTSATGRTYYYYKCANVKRRKGCNKKTVQKEWLEDLVVQKTMKLIQDDAVIDKIVQLVMDVQNQENTTIPLLEKQLREVNKKLDNLMKAIEDGLYTRTTKERLEALEIQKDELTAKIADKKLKKPSFNEDFIRFWLMKFRKFDISQKKQRKALIEIFVNAIFLYDDRMLITFNYKDGTQTVRFEDALTADGVEGKSSDLSSSAGP

SEQ ID NO: 17218 - protein, 492 aa, synthetic construct
MTAVIYARYSSDNQREESIEGQIRECTAYAEKNGITIVKHYIDRAISAKTDNRPEFQQMIKDSDKKLFDIVLVWKLDRFARNRYDSARYKTQLKKNGVKLMSATEIISEGPEGIILESVLEGYAEYYSADLSEKVIRGMTENALKGKFTGGAIPFGYIINADHRFEIDPLTAPFVAETFQRYNDGQTMREIRDWLNEKGVKNQRGGLMTFNTIQHMLNNRRYIGELKYRDVLIPDAIPSIVSAELFNDVQEKIAKNKKAPARRKAEDDYLLTTKLFCGYCGALMFGESGTSRTGEVHRYYKCATAKKHKGCKKKTVRKQWLEDLVVNQTMQLVKDDAAMESIIAKVMELQNKENTNIPLYKKQLRDAESGIQNMLNAIQAGILTSSTKERLEQLEETKRELEARIAEEKLAKPKVTEEFIRFWLLRFRKLDMSLKDQRQALVDTFINAIYLYDDKVLITFNYKEGTQTVTFGEAAEAASKGNGSDLDCFTAP

SEQ ID NO: 17219 - protein, 498 aa, synthetic construct
MTAVIYARYSSDNQREESIEGQIRECTAYAEKNGITVVKHYIDRALSAKTDNRPDFQQMIKDSEKRLFDIVLVWKLDRFARNRYDSAHYEYQLERNHVKLVSATEPISDSPAGIMVKSMLTGMAEYYSAELSEKVVRGMTENVLKGKYNGGTIPIGFKVDEEKFFQIDPLKAPFVVEAFQRYNDGATMKELMNWLNDSGVTTNRNQKFTYNSVQKLLTNKRYIGENHFKDIVMPDSIPAIVDKDLFEEVQLKIKKNSRAPARHKAEDDYLLTTKLFCGMCGAMMFGECGTGRNKVVHHYYKCATAKRFKTCKKKTVRKEWLEDLVIAETMKLIQDDAVIDAIVAEVIELQDQENTTLPLLEKQMREVENGIENMLNAIQAGVLTNSTKSRLEKLEAQQKELEVRIAEEKIARPRLSENQVRFWLTRFRKLNPNVKSHRETLINTFVNAVYLYDEKVLITFNYKDGTKTITFDEIAAKDAPEGNGSDLGCFAPPRTPVL

SEQ ID NO: 17220 - protein, 975 aa, synthetic construct
MDKRKMKKLLILNLPYFLVGLFATNLGEAWRLAEGADSSAKILSFFHALPIALNNPFPSFHPLDLLIGILCGAGLRLAVYLKGKNAKKYRHNVEYGSARWGTAKDIEPFIAPKFEDNVILTKTERLMMSNRPKNPANARNKNVLIIGGSGSGKTRFWLKPNLLQMHSSYVVTDPKGSIVIECGNALLKHGYTIKIFNTINFQKSMHYNPFAYIHSEKDILKLVTTLIANTKGDGKAGDEFWTKAETLLYCALIGYIHYEAPVEEQNFSTLIEFLNAMEVREDDEEFQNPVDLMFEALEKKKPNHFAVRQYKKYKLAAGVVCSKRLLNQAVGKSLRTHNLKPKKGAQVMRKNEKITALYERLSRDDFGKDDDQQRESNSISNQKAMLEEFAARQGFTNIVHFTDDGISGTCFDRPGFLAMMKEVEAGNVEYLCIKDMSRMGRDYLKVGQIMEILRQRGVRLIAINDGVDSARGDDDFTPFRNIMNEYYARDTSRKIRSTFQSKGKSGKHLTGTVIYGYLWNEARDQWLVDPEAAEVVKRIFAMTIEGYGPYQIASKLKSEKVLIPSAYLAQHGEGVNKNKTFKDVYGWGSSTICNILEKREYLGHTINFKTRKHFKDKKSHYVPEDEWTIFENTHEAIIDQQTFDLVQKIRGNVRRYPDGWGEAAPLTGLLYCADCGGKMYVHRTNNGKRISQYTCSQYTKVPCGTLCKTQHRINEDVVLSLVSEMLKSIAEYAKHDRAEFVRVVQEAQSSQQTTEVRKQRTRLATAKQRVSELEVLLCKIYEDNILGKLSDSRYATLDAQYEKEQTELTAEISVLEKAVKSYEKHEKDADRFIALIDKYENFDKLTIAMLNEFIEKILVHERDRKGSIQTTQEVEIYFNFVGRFVPPAFGEVELTPEELEEIRKREERKDRLHQNYLKRKASGAQKRYEDKIKGRKKAEIEAKKAAIRAEDIAKGVFVPVSSLPQREPMKGVQTA

SEQ ID NO: 17221 - protein, 493 aa, synthetic construct
MTAVIYARYSSDSQREASIEGQLRDCKDYAEKNGITVVGTYIDRAYSAKTDDRPDFQRMIKDSAKKIFDVVLVWKLDRFARNRFDAVNYKYQLEKNGVHLVSAMEPISQGPEGIMVESMLIGMAEYYSAELALKVARGERENALQCKYNGGVVPLGFTIGKEDRLYHIDPETAPIVQEIFSRYADGEPAEKIAASLNERGLRTRTGKPFVKNSFFQIFRNRRYIGEYRYKDIVTPGGIPAIVDKDLFDRVQQRFEQNKIAHGRPAKEDVSYLLTTKLFCGKCGTLMGGESGTSHMGNTYYYYKCGNAKRHGKAHCDLKAIRKEPLERFVVDTAIKVIFNDEIIEQLIDLVMEAQQKENTRLPVLKDQLRDTEKRLANLLEAIEQGILTSTTKQRLDELEARKEALNTSILEEELKKPVLTREWIRFWLEKFRKGDVGSTEHQRQIIDTFVNSVYVFDDRVVLNFNFTDDAKTVTREEVLGSSAVDNAPPNESL

SEQ ID NO: 17222 - protein, 615 aa, synthetic construct
MTDYSKITALYSRLSVGDEDRDGGESNSIQNQKIFLENYARGQHLTNIRHYIDDDESGRFFDRSAYSRMMDDVENGKIGVCIMKDLTRWGRDYLQVGNAMEIFRRNDVRFIAVNNGIDSEKPDTLEFAPFINIMSEWYAKDISKKVKTGIKTKGMSGKPIVTEAPYGYVKDPDNKDFWIIDEEAAEVVRLIFRLFIGGKNRNQIAVYLTQEQIPTPTFYMKDRGRGTCKNKTLNEDNRCKWNKATLTNILTRQEYCGDVVNFKTTKHFRDKHNHYVDRSQWHITENVHEPIISRSDFETVQRILENAPVRRPNGDGEIHPLSGLLFCKDCGAKMHIRIDYRNGGKRHVAYCSEYHKGKAKNPKCSSPHIMDADLLMQTVAEVLKKIEDYSISNRAEFEALVKKNLVIQQTDQTKKQQKRIPQITTRLEQIDKVLNKLYEDNALGTIPQDRYEQMSQKYSEEYYALKAELATLQEQLSAYENAGGRAQKFLKLTERHAAFTDLTPTILNEFISRIEVHERDQKRARYAIQHISIYFNYIGKFENEVTQLAEPTEQEIRQMREEIEEAKKEKSRAYHRNYSREYRARNLEKQREYDRMKAREYRARRKAQAAAQPAQ

SEQ ID NO: 17223 - protein, 479 aa, synthetic construct
MNKVAIYVRVSTKGQAEEGYSIDEQIALLTSYCSIHKWKIYDTYVDAGVSGATIERPELSRLSRDAKKKKFNTMIVYDLKRLGRSQRNNIAFIEDVLEKNGIGFISLTENFDTSSPLGKAMVGILSAFGQLDRDTIRERMMMGKIGRAKAGKPMMTSTIAFGYTYDKVTSSLNINPAEAIIVKTIYNEYILGRSLTKLRDYLNENDLLRNGKPWNYQGVSRILRNPVYKGMNRFRGEVYKGTHEPIISAELFDRTQKELKKRQIEAYKRNNNRRPFRSKYMLSGIIRCGVCGSPMELTLGTKRIDGTRNMRYQCINRFPRQTKGITVYNNAQKCDTGFYEKSDIEIHVLSQVRLLQLNKAKLESMFERTDVINVEDIQNQIETLNNKMRRLNDLYLNDMIDLDDLRLQTQNFLKKKELLENELENNPALNQEQDKEQFKELLGTKDITQLDYDKQKLIIKNLIDKVFVKPGNIKIKWRI

SEQ ID NO: 17224 - protein, 428 aa, synthetic construct
MSTDQDEQLSSYENQVNYYREYILKHEDYELVDIYADEGISATNTKKREAFNRLIQDCREGKIDRILVKSISRFARNTLDCIKYVRELKDLGIGVTFEKENIDSLDSKGEVLLTILSSLAQDESRSISENSTWGIRKKFERGVVQVNTTNFMGYDKDEKGNLIINHEQAKVVRYIFDRFLEGYSPEFISKELREQEIPGCTGKAKWCPSAIWKMLQNEKYKGDALLQKTYTVDFLTKKRIDNDGQVNQYYIENNHEPILDKEKWEIVQLEIARRKRFREQHKLQFYIMQKENNPFTTKVFCAECGSAFGRKNWTTSRGKRKVWQCNNRYRIKGQIGCLNNHIDEEMLEKAFMKAVELLQEHRSDVLDKWQNLKQGANLLHKHYAKQIYQILDLDKFDGVIMNQVLDHISISKVGQIVVTFLEGTEVDL

SEQ ID NO: 17225 - protein, 413 aa, synthetic construct
MNIRKIEAKNNKRKKRICAYVRVSTTNGSQLDSLENQKIYFEKLYAEREDVEFLGVFCDKGISGSKYERPDFQTMLDACRKGQIDVIHTKSISRFARNLINVLEISRELKTLGIDIFFEEQNIHTLSNEGEVVLTVLASLAEEELQSMSGNQRWSFRRKFQKGELLINTKRFLGYDLNEKGELVINQAEAQIVRTIFYSYLEGMGTHRIAKKLNEGKVPTVTGKKWYDSTIRNILKNEKYKGSLLLQKYFHDGVNGPKKLNQGQLEQYYIEDNHEGIVSKEIWEKVQVKMKSRSRIQGTNKTYKFSRMLKCQYCGSTLKRQVSYKKKIVWCCSKYIKEGKNSCKGMRVPERDIEDWKLSSPVIVLERIEDGEKHYGYTGQKATANNHISNSEKNQSSRLLSSVYRPRRTAIKL

SEQ ID NO: 17226 - protein, 483 aa, synthetic construct
MNKKVAIYVRVSTLEQAESGYSIGEQIDKLKKFADIKEWQVYDVYEDGGFSGSNTTRPALERMINDAKRKLFDTVLVYKLDRLSRSQKDTLFLIEDVFKVNNIDFVSLNENFDTSTAFGTAMIGILSVFAQLEREQIRERMKLGLVGRAKSGKAMGWHMTPFGYTYDKKSGNFIIDEVAAGVVKMIFDDYLSGISITKLRDKLNSDGHIGKDRNWSYRTLRQTLDNPTYTGLVKYDGKTFPGNHEPILNNETFQSVQYELDIRQKQAYLKNNNSRPFQSKYILSGMAKCGYCGAPLVSILGNKRKDGTRLLKYQCANRIIRKSNPVTTYNNNKQCDSGFYMMQNIEAYVINSISELQTNPQKIQEIIKLDNGQPAIDTIYLESELAKISSRLKKLSDLYMNDLMTLDDLKNRTEELKQTRKNIEAKIFSEENKHGHAKSDIFRSRIDGNDITELDYDQQSMLAKSLIRKVSVTSETIEISWDF

SEQ ID NO: 17227 - protein, 483 aa, synthetic construct
MNKKVAIYVRVSTLEQAESGYSIGEQIDKLKKFADIKEWQVYDVYEDGGFSGSNTTRPALERMINDAKRKLFDTVLVYKLDRLSRSQKDTLFLIEDVFKVNNIDFVSLNENFDTSTAFGTAMIGILSVFAQLEREQIRERMKLGLVGRAKSGKAMGWHMTPFGYTYDKKSGNFIIDEVAASVVKMIFDDYLSGISITKLRDKLNAEGHIGKDRNWSYRTLRQTLDNPTYTGVVKYDGKTFPGNHEPILKNETFQSVQYELDVRQKQAYLKNNNSRPFQSKYILSGIAKCGYCGAPLVSILGNKRKDGTRLLKYQCANRIIRKAHPVTTYNDNKQCDSGFYMMQNIEAYVINSISELQTSPQKIQEIIKLDNGQPAIDTIYLESELAKISSRLKKLSDLYMNDLMTLDDLKNRTEELKQTRKNIEAKIFSEENKHGHTKSDIFRSRIDGNNITELDYDQQSMLAKSLIRKVSVTSETIEVSWDF

SEQ ID NO: 17228 - protein, 430 aa, synthetic construct
MSTDQEEQLSSYENQVNYYREFISKHEDYELVDIYADEGISATNTKKRDAFNRLIQDCRAGKVDRILVKSISRFARNTLDCIKYVRELKELGVGVSFEKENIDSLDSKGEVLLTILSSLAQDESRSISENATWGIRKKFERGEVRVNTTKFMGYDKDDNGRLIINPQQAETVKFIYEKFLDGYSPESIAKYLNDNEIPGWTGKASWYPSAIQKMLQNEKYKGDALLQKTITVDFLTKKRVQNDGQVNQYYVENSHEAIIDKDTWELVQLELERRKAYREEHQLKSYIMQNDDNPFTTKVFCAECGSAFGRKNWATSRGKRKVWQCNNRYRVKGQIGCQNNHIDEETLEKAVVIAVELLSENVDLLHGKWNKILEENRPLEKHYCTKLAEMINKTSWEFDSYEMCQVLDSITISEDGQISVKFLEGTEVDL

SEQ ID NO: 17229 - protein, 557 aa, synthetic construct
MKRKKAYIYTRVSTNMQVEGFSLDAQETRIHQYANAFDIEIVKTYQDAGKSGKTMLGRTEFMAMISDIEAEKDKVDYVLVFKLSRFGRNAADTLKSLAIMESHGVNLICVDDGLDSSKDSGKLVITILSAVAEMERENIISQAMEGRRQKARAGQWNGGFAPVGYSLVNGQLQVNHEEAESVKMIFDLFANSDMGTIAIAKHLANLDIKKPIRHNSTLPYFSSSGIARILDNPVYNGKIAFGRRESTRDKISGETKVTQSENYILTDGIHEAIIDDETWKKVRKKREANAHKYKRENPNKGDSIYILSGLIKCPLCNAGLYGNKSIKRNKNKKDEYYKNYYYYACKHRKHVDGHKCTFNKQLKTGNLDHEVLSIISKLVSRPDFARKLQEKINIQVDTSRIDSEIEQYKSLFRQLSATKMNLIQQIDSLNFEDPHFQQKSIDLDMRLNTIYDKLADVEMLIETSESKREVILKDKMTADNIYKILVNFASFMDVMEDIDKKRLCQMLIEKVEIYDDKNKAGRWVKAIHFKLPIIEEDLEISLDNSTPVEAVVKLSKK

SEQ ID NO: 17230 - protein, 413 aa, synthetic construct
MSVKKIRVNNQKHKQRICAYIRVSTTNGSQLESLENQKQYFENLYSNRDDIDFVGVYHDKGISGSKDNRPNFQAMIEYCRKGMIDVIHTKSIARFARNTVTVLEISRELKAIGVDIFFEEQNIHTLSSEGEVMLSVLASIAEDELRSMSGNQRWAFQKKFQRGELVINTKRFLGYDVDENGELIINPEEALIVRQIFALYLEGYGTHRIAKLLNEKGVATVTGAKWHDTTIRQMLSNEKYNGSVLLQKYFHDGVNGPKKLNQGELEQYFIEDNHEAIISMKEWQAVQDKLNSRRWQQGRNKTYKFTGLLKCQHCGSTLKRQVSYKKKIVWCCSKYIKEGKAACKGMRVPEVDISNWTVTSPVTVIERDRDGEKYYSYSSQESADQYSSSGQEENQRSRILSSVHRPRRTAIKL

SEQ ID NO: 17231 - protein, 430 aa, synthetic construct
MSTDQEEQLSSYENQVNYYREFISKHEDYELVDIYADEGISATNTKKRDAFNRLIQDCRAGKVDRILVKSISRFARNTLDCIKYVRELKELGVGVTFEKENIDSLDSKGEVLLTILSSLAQDESRSISENATWGIRKKFERGEVRVNTTKFMGYDKDENGRLIINPQQAETVKYIYEKFLEGYSPESIAKYLNDNEIPGWTGKANWYPSAIQKMLQNEKYKGDALLQKTFTVDFLTKKRVQNDGQVNQYYVEGSHEGIIDEETWETVQLEIARRKTYREEHQLKSYIMQSQDNPFTTKVFCGACGSAFGRKNWATSRGKRKVWQCNNRYRIKGVEGCYSSHLDEATLEQIFLKALELLSENIDLLDGKWEKILVENRLLDKHYSMALSDLLRREQIDFNSSDMCRVLDHIRIGLDGEITVCFLEGTEVDL

SEQ ID NO: 17232 - protein, 643 aa, synthetic construct
MKTNNVEIIKADSLVRRRGVNVERHLKRVAAYCRVSSDSDDQKNSYESQVRHYKDYISQRSDWELVDIYADEGISGTQVGKRQDFQRLINDCVNGEIDYIVTKAIARFARNTLDTLKYVRMLKDMQIGVYFEEENIDTLTMDGELLLTILSSVAQQEVENTSAHVKKGLKMKMQRGELIGFQGCLGYNYDVETKQLSINKKEAKIVRYIFERYLEGIGGKVIARELDELGYKSPRGLDHWNDTTVLGIIKNEKYKGDILMGKTFTVDPISKRRLSNFGEEDKYYIKDNHEPIISKEDFEKAQEIRLRRAGNKKTAANVNGKRERYSKMYAFSSMLECGFCGSLLSRRSWHCRSDYRKVVWHCVTSIKKGKKYCKHSKGLEELAIEGAFMEAYRQLYHSNENIVSDLLETIESELNDNSLNKELKKITNKLRTLLKKEENLVNLKLEEKISDSIYNEKYNELSLEKEYLAEEKVNVETTLKSEIDVKKRLTEFKQLLSSQKMLTEFDRTVFESIVEKIIVGGVNSDGEIDPAMLTIIFKTGETQNKDGKQFKSKRKNAKLEPDKLCPQNCDEDKKLYSQGTDNTHRSCGIIRKTQLDCPVCSPVFWQAASKDPRTFELSNTHHVDSCHTYTKIKCQQALSRVIA

SEQ ID NO: 17233 - protein, 496 aa, synthetic construct
MAMISDIEAEKDKVDYVLVFKLSRFGRNAADTLKSLAIMESHGVNLICVDDGLDSSKDSGKLVITILSAVAEMERENIISQAMEGRRQKARAGQWNGGFAPVGYSLVNGQLQVNHEEAESVKMIFDLFANSDMGTIAIAKHLANLDIKKPIRHNSTLPYFSSSGIARILDNPVYNGKIAFGRRESTRDKISGETKVTQSENYILTDGIHEAIIDDETWKKVRKKREANAHKYKRENPNKGDSIYILSGLIKCPLCNAGLYGNKSIKRNKNKKDEYYKNYYYYACKHRKHVDGHKCTFNKQLKTGNLDHEVLSIISKLVSRPDFARKLQEKINIQVDTSRIDSEIEQYKSLFRQLSATKMNLIQQIDSLNFEDPHFQQKSIDLDMRLNTIYDKLADVEMLIETSESKREVILKDKMTADNIYKILVNFASFMDVMEDIDKKRLCQMLIEKVEIYDDKNKAGRWVKAIHFKLPIIEEDLEISLDNSTPVEAVVKLSKK

SEQ ID NO: 17234 - protein, 430 aa, synthetic construct
MSTDQEEQLSSYENQVNYYREFISKHEDYELVDIYADEGISATNTKKRDAFNRLIQDCKAGKVDRILVKSISRFARNTLDCIKYVRELKELGVGVTFEKENIDSLDSKGEVLLTILSSLAQDESRSISENATWGIRKKFERGEVRVNTTKFMGYDKDENGRLIINPQQAETVKFIYEKFLEGYSPESIAKYLNDNEIPGWTGKANWYPSAIQKMLQNEKYKGDALLQKTFTVDFLTKKRVQNDGQVNQYYVENSHEAIIDEETWETVQLEMARRKTYRDEHQLKSYIMQSEDNPFTTKVFCGACGSAFGRKNWATSRGKRKVWQCNNRYRIKGVEGCYSSHLDEATLEQIFLKALELLSENIDLLDGKWEKILAENRLLDKHYSMALSDLLRQEQIDFNPSDMCRVLDHIRIGLDGEITVCLLEGTEVDL

SEQ ID NO: 17235 - protein, 413 aa, synthetic construct
MSVKKIRVNRQKHRKRVCAYIRVSTTNGSQLDSLENQKQYFENLYSNRDDIDFIGVYHDRGISGSKDNRPNFQAMIEDCRRGKIDVIHTKSIARFARNTVTVLEISRELKAIGVDIFFEEQNIHTLSSEGEVMLSVLASIAEDELRSMSGNQRWAFQKKFQRGELVINTKRFLGYDIDENGELIINPEEALIVRKIFALYLEGYGTHRIAKLLNEKGVATVTGAKWHDTTIRQMLSNEKYNGSVLLQKYFHDGVNGPKKLNQGELEQYLIEDNHEAIISMEDWQAVQVKLNSRRWQQGRNKTYKFTGLLKCQHCGSTLKRQVSYKKKIVWCCSKYIKEGKAACRGMRVPEVDISNWEITSPITVLERDRNGEKYYSYSGQESADQRSSSGQEENQSSRILSSVHRPRRTAIKL

SEQ ID NO: 17236 - protein, 627 aa, synthetic construct
MAGIRTENKIYEVGIYCRLSKDDGTDNESASIATQKSILTDYVKRQGWHLAKTYVDDGYSGTNFQRPSFQNMIKDIENGLINCVITKDLSRLGRNYLDCGLYLEVFFPEHNVRYIAVNDGVDTLNKSAMDITPFRNILNEMYSADVSVKIKSAYRARFQQGKFMGTTAPYGYVKDPADHNHLLIDDKVAHVVREIFDLALAGNGIAKIRKHINKQHILRPAAYAVEQGATGYERYFEDNEENRYIWSENSVRGILRSPIYAGNLAGYKRIAANMKSKKRPSKLPEEWEVIPDTHEGIVTQEEFDTVQQLMTSRRREQNAGGFENIFSGVIKCADCGYAMRAASANRRKRPDIIDCVQYTCNNYGRYGNVMCTAHSIEARDLFNVVLADINRFADMAVNDEKAVRAIERRLTETDQSRAKSLEKEKKKLNKRLAELDRLFSSLYEDKVMERITERNFEMMSGKYQKEQLEIEARLKEVTETLNDSYEKSQGVRDFLSLIRNYQGLKELDATIINALIDKILVSEREKLADGTVRQEIKIYYKFIGFVGELHITPTKRWTALKPKNCTVCGVEYVPSSGISKYCPACAKRIQREKSNESKRRSRERNRRACIELSAKNDRLILSSEMVG

SEQ ID NO: 17237 - protein, 481 aa, synthetic construct
MITTNKVAIYVRVSTTSQVEEGYSIDEQKAKLSSYCDIKDWSVYKIYTDGGFSGSNTDRPALEGLIKDAKKRKFDTVLVYKLDRLSRSQKDTLYLIEDIFIKNNIAFLSLQENFDTSTPFGKAMIGLLSVFAQLEREQIKERMQLGKIGRAKAGKSMMWAKTSYGYDYHRETGTITINPAQALAIKFIFESYLRGRSITKLRDDLNEKYPKHVPWSYRAVRTILDNPVYCGFNQYKGEIYPGNHEPIISKEEYDKTQSELKIRQRTAAENVNPRPFQAKYILSGIAQCGYCGAPLKIMLGVKRKDGSRLKKYECHQRHPRTLRGVTTYNDNKKCDSGFYYKDKLEASVLKEISKLQDDADYLDKIFSGDNAETIDRESYKKQIEELSKKLSRLNDLYIDDRITLEELQSKSAEFISMRGTLETELENDPALRKNKRKADMRKLLNAEKVFSMDYENQKVLVRRLINKVKVTAEDIVINWKI

SEQ ID NO: 17238 - protein, 479 aa, synthetic construct
MNKVAIYVRVSTKGQAEEGYSIDEQIALLTSYCSIHKWKIFDTYVDAGISGATIERPELSRLSRDAQKKKFNTMIVYDLKRLGRSQRNNIAFIEDVLEKNGIGFISLTENFDTSTPLGKAMVGILSAFGQLDRDTIRERMMMGKIGRAKSGKPMMTSTIAFGYTYDKVTSSLNINPAEAIIVKTIFNEYLSGRSLTKLRDYLNENDLLRNGKPWNYQGVSRILRNPVYMGMVRFRGEVYQGNHDPIIDSEIFEAVQKELKKRQLETYEFNKNTRPFRAKYMLSGIIKCGYCGSPMGVTLGTKRKDGTRNIRYQCVNRFPRTTKGITVYNNGQKCNSGFYEKDDIEIYVLGQVRLLQLNKAKLNKMFETPEIINVDEIENQINSLNNKMKRLNDLYLNDMISLDELKTQTYTFLKQKDLLENELNNNPAIHQEENRKQFQKLLGTKDITQLSYEEQSFAIKNLIDKVFVKPGIIDINWRI

SEQ ID NO: 17239 - protein, 481 aa, synthetic construct
MITTNKVAIYVRVSTTNQVEEGYSIDEQKDKLSSYCDIKDWNVYKVYTDGGFSGSNTDRPALESLIKDAKKRKFDTVLVYKLDRLSRSQKDTLHLIEDVFIKNGIEFLSLHENFDTSTPFGKAMIGLLSVFAQLEREQIKERMQLGKLGRAKSGKSMMWAKTSYGYDYHKETGTVTINPAQALAIKFIFESYLRGRSITKLRDDLNEKYPKHVPWSYRAVRTILDNPVYCGFNQYKGEIYPGNHEPIISKEEYDKTQSELKIRQRTAAENVNPRPFQAKYILSGIAQCGYCGAPLKIMLGVKRKDGSRLKKYECHQRHPRTLRGVTTYNDNKKCDSGFYYKDKLEASVLKEISKLQDDADYLDKIFSGDNAETIDRESYKKQIEELSKKLSRLNDLYIDDRITLEELQSKSAEFISMRGTLETELENDPALRKNKRKADMRKLLNAEKVFSMDYENQKVLVRRLINKVKVTAEDIVINWKI

SEQ ID NO: 17240 - protein, 592 aa, synthetic construct
MTNNVEIIKANPLVTRRNDSNGSLLRRVAAYCRVSSDSDDQKNSYDSQVRHYREYISQHKDWNLVDIYADEGISGTQVGKRQDFQRLISDCLDGKIDYIITKAIARFARNTLDTLKYVRLLKDKQIGVFFEEENIDTLTMDGELLLTILSSVAQQEVENTSAHVKKGLKMKMQRGELIGFQGCLGYDYNQDTKSISINEKEAKIVRYIFERYIDGIGGRAIARELDELGYKTPRGLDHWQDTTVLGIIKNEKYKGDILMGKTFTVDPISKRRLINFGEEDKYYIKNNHDAIISPEIFTQAQEIRLRRSGNKKTIANTKGKRERYSRMYPFSSRLECGFCGTVLSRRSWHSSSEYKKIIWHCTTSIKRGKKYCTHSKGIEEKAIENAFLQSYQQLFYENNNLTEDFLEIIKEELTDDTLKVELTKIVSKLNSLYKKEEKLVSMNLDGKISDSVYEDKFNQIQIEKEKLLEEKVNLEVTLKSEVDIKSRLENFKEILTSQKTLTEFDKDIFESIVEKIIVGGINSDGEIDPAMLTIIFKTGDSSTKDAKSYKSKRKNAKIDNDKLCFNAVTDDEKKCTNKENNARGDGSTFVQT

SEQ ID NO: 17241 - protein, 481 aa, synthetic construct
MITTNKVAIYVRVSTTNQVEEGYSIDEQKDKLSSYCDIKDWNVYKVYTDGGFSGSNTDRPALESLIKDAKKRKFDTVLVYKLDRLSRSQKDTLHLIEDVFIKNGIEFLSLQENFDTSTPFGKAMIGLLSVFAQLEREQIKERMQLGKLGRAKSGKSMMWAKTSYGYDYHKETGTVTINPAQALTIKFIFESYLRGRSITKLRDDLNEKYPKHVPWSYRAVRTILDNPVYCGFNQYKGEIYPGNHEPIISKEEYDKTQSELKIRQRTAAENVNPRPFQAKYILSGIAQCGYCGAPLKIMLGVKRKDGSRLKKYECHQRHPRTLRGVTTYNDNKKCDSGFYYKDKLEAYVLKEISKLQDDADYLDKIFSGDNAETIDRESYKKQIEELSKKLSRLNDLYIDDRITLEELQSKSAEFISMRATLETELENDPALRKNKRKADMRKLLNAEKVFSMDYESQKVLVRGLINKVQVTADRIVIKWKV

SEQ ID NO: 17242 - protein, 559 aa, synthetic construct
MSKEKIKVYLYTRVSTSIKIEGYSLEAQKSRMKAFAIYNDYEIVGEYEDAGKSGKSIEGRIQFNRMMEDIKSGKDGVSFVLVFKLSRFARNAADVLSTLQIMQDYGVNLICVEDGIDSSKDAGKLMISVLSAVAEIERENISIQTMEGRIQKAREGKWNGGFAPYGYKLEDGKLFINEEEAVAIRTIFDQYVNTTIGANGISKYLENHGIRKIPRQNGKNPLFDAGLIRKILKNPVYNGKIAFGRRTLEKVHGTRNEYKQVEQDEYLISEGIHEAIVSDEVWQAAQVKLKSQAKKYEHVNKGKDTRTHLLSGIVKCPICGVGMFGNKCIKKKKDGTKYKDFYYYGCNHRQMIRGHKCTFSKQIREELLDDAVAEVIVKIVSNPKFASMMQEKINMKVDTSEIEKEIDNYQKELRKSHSTKFKLIEEIDNLDVEDKHYKRRKQDLDDRLYRMYDKIDELESSLIDAKAKKQTIEAEKLTGDNIYKVLIYFDKLYKVMNDVERRQLISALISEIQVYEEKQSNGQWLKSITFKLPIIEENLNIDLDNDEQVECVSLLEKRS

SEQ ID NO: 17243 - protein, 449 aa, synthetic construct
MITTNKVAIYVRVSTTNQVEEGYSIDEQKDKLSSYCDIKDWNVYKVYTDGGFSGSNTDRPALESLIKDAKKRKFDTVLVYKLDRLSRSQKDTLHLIEDVFIKNGIEFLSLQENFDTSTPFGKAMIGLLSVFAQLEREQIKERMQLGKLGRAKSGKSMMWAKTSYGYDYHKETGTVTINPAQALTIKFIFESYLRGRSITKLRDDLNEKYPKHVPIISKEEYDKTQSELKIRQRTAAENVNPRPFQAKYILSGIAQCGYCGAPLKIMLGVKRKDGSRLKKYECHQRHPRTLRGVTTYNDNKKCDSGFYYKDKLEAYVLKEISKLQDDADYLDKIFSGDNAETIDRESYKKQIEELSKKLSRLNDLYIDDRITLEELQSKSAEFISMRGTLETELENDPALRKNKRKADMRKLLNAEKVFSMDYESQKVLVRRLINKVKVTAEDIVINWKI

SEQ ID NO: 17244 - protein, 559 aa, synthetic construct
MSKEKIKVYLYTRVSTSIQIEGYSLEAQKSRMKAFAIYNDYEIVGEYEDAGKSGRSIEGRIQFNRMMEDIKSGKDGVSFVLVFKLARFARNAADVLSTLQIMQDYGVNLICVDDGIDSSKDAGKLMISVLSAVAEIERENIRIQTMEGRIQKAREGKWNGGFAPYGYKLEDGKLFINEEEAIAIRTIFDQYVNTTIGANGISKYLENHGIRKIPRQNGKNPLFDAGLIRKILKNPVYNGKIAFGRRTLEKVHGTRNEYKQVEQDEYLISEGIHEAIVSDEVWQAAQVKLKSQAKKYEHVNKGKDTRTHLLSGIVKCPICGVGMFGNKCIKKKKDGTKYKDFYYYGCKHRQMIRGHKCTFSKQIREELLDDAVAEVIVKIVSNPKFASMMQEKINMKVDTSEIETEIDHYQKELRKCHSTKFKLIEEIDNLDVEDKHYKRRKQDLDDRLYRMYDKIDELESSLIDAKAKKQTIEAEKLTGDNIYKVLIYFDKLYKVMNDVERRQLITALISEIQIYEEKQPNGQWLKSITFKLPIIDDDLNISLDNDEQVECVSLLEKRS

SEQ ID NO: 17245 - protein, 546 aa, synthetic construct
MNQQPEKITALYCRLSQDDALDGESNSITNQKALLSKYAADHGFRNTRFFVDDGFSGTSFQRPGFQEMMRYVEDYSVSAVIVKDLSRLGREYSYMGRLQDFIFPAYDVRFIAINDDVDSAKGENDFAVFKNVFNDYYAKDTSKKIRAVVKMRGEAGEHIASNPPYGYIKDPQDKKKWIVDEEAAKVVQRIFNLCIAGKGPMQIAKTLTADRVLTVTAYHARQKGWVMPENLYRWNTNAVLRILERREYTGCTVNFKTYTKSLKFKKRMENPVENQRVFEDTQPAIIDKGQWERVQELRKNKRRPTKTGRTSMFSGLLYCADCGAKLYFCTCNTYKDDSQNHFVCSNYKSNTGSCKIHYIREQVLYRIVLETIRQTLSYVRMFRKDFKLEMLAQDEESRKAELAEKQKALSGAKKRMEDLDRIIQHIYEDNVLGKLSDSRYLKLSRQYEKEQAEIEQLAAVLEREIETQAGQVSDVNEFLKLVDKYLDIPELDAAILNELVSRIVVHSPVRENGRKQVRIDLHFTYVGQIRIPLKIGRESLNESEPA

SEQ ID NO: 17246 - protein, 538 aa, synthetic construct
MLRQATQNLITALYPRLSHEDELQGESNSISNQKRILEAFAKQNGFTNLRWYTDDGYSGANFQRPGFQAMLADIEAGKVGTVIVKDMSRLGRNYLQVGFYTEMLFPQKGVRFIAVNDNVDSANGGMDNDFTPLRNLFNEWLVRDTSKKIKAVKRAKGMSGKPVTSKPVYGYLMDEDENYIVDEETAPVVRQIYQLCLAGNGPTKIARMLTEQQIPTPGTLEYRRTGSTRRYHPGYECKWATNTVVHLLENREYTGCLVNFKTEKPSYKTKHSVENPIEKQAIFPNHHEPIIDTETWERVQELRKQRKRPNRYDEVGLFSGMLFCADCGHVMYQQRYQNKNRKQDCYICGSYKKRTRDCTAHFIRTDLLTAGVLSNLRQVTEYAAKHESRFVKLLIQQNEIGGKRKTAAATKQLEQAQERISEVSRIIKRLYEDNVNGKISDERFMELSADYEQEQRELKDRAAALQEELDKSQAATINAEKFMGIVRKHLAFEELTPTLLREMIEKIVVHECSYDENGTRRQDIEIYYSFVGKIDLPE

SEQ ID NO: 17247 - protein, 443 aa, synthetic construct
MRIEEIPASPKKPKITRVAAYARVSSDKDAAFHSLEAQTEYYQNYIAAHPNWELVAIYSDNGISGTTIHRPEFQHMLQDCREGKIDLVITKSVTRFARNTVILLETIRELKKLGVDCYFEKEDMHSISPDGELLLTLLAMYAEEEARSASENQKWRIQKLYDQGKPAGGHTFGYRLMGEKFEVVPEEAEIVKEIFRLYLSGMGYSKIARTLIEQHIPAYFGSTWSVASVRNILLNEKYAGDLLLQKTFSEDFRTKRKRKNTGELRKVYVRNSHEAIIDRQTFETVQQEIARRSARQREIMAHRNPNHDNSQKLFSGLIVCGCCGAAYVRKYTNIKNSDRPIWICGQYTKYEKSVCHSQQIPETILIEKVKEVLGLPEINQTIVQEHISRITVPEHNHLIYELKNGSSVDVFWKHQSRRLSWTDEMREAARQKTLKRYRKEEKS

SEQ ID NO: 17248 - protein, 457 aa, synthetic construct
MRVACYDRTSVYEEAKISNDAQYDAVKEYVLEKYEQIPQRFSDKGESGGKADRPAFRQLRAWVCASEEEGVIYVWRYDRLARQAKIALEFIELCQQHQVQVYSISEPLPASFSHASTNKLFVQLLFTFAEQQRNVIIENVRAGLAYKKQQRQYLSSAVPYGYRLVNGKIQQEAHEAKVVRHIFQLYLTKKYGYKKLCQRLTQQKFFFRERPFQPYHIYSILKNPLYYGEIKGGSLGKYLGTFEPILSKTIFLQAQEIRQSRCTAKKDTYPYLLRQKIRCPFCGRHLSSKYQWNTKKTKTLHYYHCTDRSCQGIFLRAERVESEVLEKIQAFFQYEGVYQALIAQLTQQLAEKRKDEKHKVIQQKKQEAQWLKAFEEGNCSLEELKQQLQALQKPRSTSSFLSLQQCEAKVKEWLQLKDLSSRQLLCDHVCRIEVTKEKTVCGIYFRQLTQNILEGNE

SEQ ID NO: 17249 - protein, 545 aa, synthetic construct
METTPTKRVALYIRVSTQEQAIDGHSIQAQEQNGRQFAERMGYEVVEVYADEGISGKSTKNRFAYQRMMNDARNHRFDLLVIWKLTRLGRNMLDVLQTVEELLRYDVGLHSISEQFDVTTSTGKLMLQLLGSFGEFERNQIAENVQMSMQSLVKDKKRYAGGRRLGYVSGIDANGQKQLVIEPEEAKIVRLIYAKYLGGAGYRAIANFLNRQGYQTVKKNAFSTTAVKDILRNKIYAGYLEYARYINWETKRRKGKNPKPILVKGTHEPIISEEDYQKVQERLALEGKQPKWNHTGENVLTGLLRCPECGAPMAASNVTNTLKDGTKKRIRYYSCSVFRNKGASVCHANSIRAEQAETFVADRLKEIVQLPEVLPRLVAALNEEIVRKSQPLEQELVVLLERKEELKTKIEKWEAALEDSPELFPMLKDRLDELTEKRRQLHIRENEILGIFQQQGEPIQVKDVQRILTSLDRFLTQSEKKQVKALYRTFIEKITFDPKQKEILEITMKFTPAVVQQLNEQYQIAVSKTKDTAIFVLKTPFTLTI

SEQ ID NO: 17250 - protein, 452 aa, synthetic construct
MKAAIYIRVSTQEQIENYSIQAQTEKLTALCRSKDWDVYDIFIDGGYSGSNMNRPALNEMLSKLHEIDAVVVYRLDRLSRSQRDTITLIEEYFLKNNVEFVSLSETLDTSSPFGRAMIGILSVFAQLERETIRDRMVMGKIKRIEAGLPLTTAKGRTFGYDVIDTKLYINEEEAKQLQMIYDIFEEEKSITSLQKRLKKLGFKVKSYSSYNNWLTNDLYCGYVSYADKVHTKGVHEPIISEEQFYRVQEIFSRMGKNPNMNRDSASLLNNLVVCSKCGLGFVHRRKDTVSRGKKYHYRYYSCKTYKHTHELEKCGNKIWRADKLEELIIDRVNNYSFASRNVDKEDELDNLNEKLKTEHTKKKRLFDLYISGSYEVSELDAMMADIDAQINYYEAQIEANEELKKNKKIQENLADLATVDFNSLEFREKQLYLKSLINKIYIDGEQVTIEWL

SEQ ID NO: 17251 - protein, 452 aa, synthetic construct
MKAAIYIRVSTQEQIENYSIQAQTEKLTALCRSKDWDVYDIFIDGGYSGSNMNRPALNEMLSKLHEIDAVVVYRLDRLSRSQRDTITLIEEYFLKNNVEFVSLSETLDTSSPFGRAMIGILSVFAQLERETIRDRMVMGKIKRIEAGLPLTTAKGRTFGYDVIDTKLYINEEEAKQLQMIYDIFEEEKSITTLQKRLKKLGFKVKSYSSYNNWLTNDLYCGYVSYADKVHTKGVHEPIISEEQFYRVQEIFSRMGKNPNMNRDSASLLNNLVVCGKCGLGYVHRRKDTVSRGKKYHYRYYSCKTYKHTHELEKCGNKIWRADKLEELIIDRVNNYSFASRNVDKEDELDSLNEKLKTEHAKKKRLFDLYISGSYEVSELDVMMADIDAQINYYEAQIEANEELKKNKKIQKNLADLATVDFDSLEFREKQLYLKSLINKIYIDGEQVTIEWL

SEQ ID NO: 17252 - protein, 452 aa, synthetic construct
MKAAIYIRVSTQEQVENYSIQAQTEKLTALCRSKDWDVYDIFIDGGYSGSNMNRPALNEMLSKLHEIDAVVVYRLDRLSRSQRDTITLIEEYFLKNNVEFVSLSETLDTSSPFGRAMIGILSVFAQLERETIRDRMVMGKIKRIEAGLPLTTAKGRTFGYDVIDTKLYINEEEAKQLQLIYDIFEEEQSITFLQKRLKKLGFKVRTYNRYNNWLTNDLYCGYVSYKDKVHVKGIHEPIISEEQFYRVQEIFARMGKNPNMNRDSASLLNNLVVCGKCGLGFVHRRKDTVSRGKKYHYRYYSCKTYKHTHELEKCGNKIWRADKLEELIIDRVNNYSFASRNVDKEDELDSLSEKLKIEHVKKKRLFDLYISGSYEVSELDAMMADIDAQINYYEAQIEANEELKKNKQIQENLADLATVDFDSLEFREKQLYLKSLINKIYIDGEQVTIEWL

SEQ ID NO: 17253 - protein, 516 aa, synthetic construct
MKTIHKLERPKLPETPKLKVAAYARVSTASDEQLSSLKTQITHYENYIQKNDQWEYVGVYYDEGISGTKTDKRDGLHRLINDAEHGKIDLILTKSISRFSRNTVDCLNLVRKLTEIGVTMIFEKENINTSDMESELLLSILSSLAESESYSHSENMKWANRKRMAKGNYKGVPPYGYCRKGIDFHLVPDEAKVVEQIFQWTLNGLSMHQIASKMNVANITTKRGVKWQASGVSIILHNIVYTGTMIFQRYFNDEQFKKRKNNGELPMYRIDNNHPAIVSMEEYERVQEIIRIRATSKGNTKDGKNTNRYAFSKKVLCDKCGNTYKRIQTYWKGNTRKVQWGCKGHLKDKNSCDALPITDEKLKIAYLTMLNKLIFAHKVVLEPLLKQQSNAAELERALDEMSNKASEIDEKLEVLASLNASGIVSTKTSFEEQNKLQLELKNLQEEQQKIINSANGKSTQRIELEELYRFTKRSNMLTEWEELLFSRFADQVIVYNRQEVGFKLKCGLILKERLPE

SEQ ID NO: 17254 - protein, 516 aa, synthetic construct
MTGKQVTVIPMKPKKWVADNTEEKPKLKVAAYCRVSTEMEEQASSYEAQVQHYTDYIQKNPDWELAGIFADEGISGTDTKKRAEFNRMIDACKNGEIEYIITKSISRFARNTVDCLQYIRKLKELKIAVFFEKENINTMDAKGEVLLTIMASLAQQESQSLSQNTKMGVQYRFQQGQLRINHNHFLGYTKDEDGNLVVEPKEAEIIKRIFREYLEGSSLQDIAKGLMDDGILTGGKRKLWRAEGVRLILRNEKYMGDALLQKTFTVDFLTKKRVKNDGSYAQQYYVENSHPAIIPKDIFTQAQQELDRRKSMKNKNSQCFSGKYALTGITICGDCGNVYRRVHWKNRGTVWRCKSRVDKREHNCNGRTIYEKDLHQGILQAINETLIDRDVFLQQLTDNINSVLTDGLTEQLAGLDEQLKDLESEIISVAIGGQGYDELASQIFSLRDERDAVAKQIAANTNLQQRVDEMVVFVKEHDVINEYSEVLVRRLIEKVTIFEKNIVVDFKSGVRVTVEI

SEQ ID NO: 17255 - protein, 452 aa, synthetic construct
MKAAIYIRVSTQEQIENYSIQAQTEKLTALCRSKDWDVYDIFIDGGYSGSNMNRPALNEMLSKLHEIDAVVVYRLDRLSRSQRDTITLIEEYFLKNNVEFVSLSETLDTSSPFGRAMIGILSVFAQLERETIRDRMVMGKIKRIEAGLPLTTAKGRTFGYDVIDTKLYINEEEAKQLQMIYDIFEEEKSITSLQKRLKKLGFKVKSYSSYNNWLTNDLYCGYVSYADKVHTKGVHEPIISEEQFYRVQEIFSRMGKNPNMNRDSASLLNNLVVCGKCGLGFVHRRKDTVSRGKKYHYRYYSCKTYKHTHELEKCGNKIWRADKLEKLIIDRVNNYSFASRNVDKEDELDNLNEKLKTEHTKKKRLFDLYISGSYEVSELDAMMADIDAQINYYEAQIEANEELKKNKKIQENLADLATVDFDSLEFREKQLYLKSLINKIYIDGEQVTIEWL

SEQ ID NO: 17256 - protein, 452 aa, synthetic construct
MKAAIYIRVSTQEQIENYSIQAQTEKLTALCRSKDWDVYDIFIDGGYSGSNMNRPALNEMLSKLHEIDAVVVYRLDRLSRSQRDTITLIEEYFLKNNVEFVSLSETLDTSSPFGRAMIGILSVFAQLERETIRDRMVMGKIKRIEAGLPLTTAKGRTFGYDVIDTKLYINEEEAKQLQMIYDIFEEEKSITTLQKRLKKLGFKVKSYSSYNNWLTNDLYCGYVSYADKVHTKGVHEPIISEEQFYRVQEIFSRMGKNPNMNRDSASLLNNLVVCGKCGLGFVHRRKDTISRGKKYHYRYYSCKTYKHTHELEKCGNKIWRADKLEELIIDRVNNYSFASRNVDKEDELDNLNEKLKTEHKKKKRLFDLYISGSYEVSELDAMMADIDAQINYYEAQIEANEELKKNKKIQENLADLATVDFDSLEFREKQLYLKSLINKIYIDGEQVTIEWL

SEQ ID NO: 17257 - protein, 452 aa, synthetic construct
MKAAIYIRVSTQEQVENYSIQAQTEKLTALCRSKDWDVYDTFIDGGYSGSNMNRPALNEMLSKLHEIDAVVVYRLDRLSRSQRDTITLIEEYFLKNNVEFVSLSETLDTSSPFGRAMIGILSVFAQLERETIRDRMVMGKIKRIEAGLPLTTAKGRTFGYDVIDTKLYINEEEAKQLQMIYDIFEEEKSITTLQKRLKKIGFKVKSYSSYNNWLTNDLYCGYVSYADKVHTKGVHEPIISEEQFYRVQEIFSRMGKNPNMNRDSASLLNNLVVCGKCGLGFVHRRKDTVSRGKKYHYRYYSCKTYKHTHELEKCGNKIWRADKLEELIIDRVNNYSFASRNVDKEDELDNLNEKLKTEHTKKKRLFDLYISGSYEVSELDAMMADIDAQINYYEAQIEANEELKKNKKIQENLADLATVDFDSLEFREKQLYLKSLINKIYIDGEQVTIEWL

SEQ ID NO: 17258 - protein, 501 aa, synthetic construct
MVDTELRAAAYARYSSDNQREESIEAQLRAIKEYCEKNNIQLVKIYTDEAKSATTDDRPAFLQMIKDSSLGLFNAVIVHKLDRFARNRYDSAFYRRQLKKNGVKLISVLEQLDDSPESIILESVLEGMAEYYSKNLAREVMKGLKENAFQAKFNGGIPPLGYDIVDGKYVINEKEAEAVRLIFELYAHGYGYRQIIDELNLRGYRTKKGNPFSKNSIHEILKNEKYTGKYIFNKGTKKNHRIVKEDVIVIENAIPAIIDEDLFKKVQEKMEERKVTRGANSAKRVYLLSGLVYCGICGSKMVGCLSRGKYVTYRCSRKDRTKQCTNRDINKEKVEAFVIDELNKRVLDPKVAPVLARLLNEENQKLNKERAEEITFLKKRYKEVEEQMKNIVEAIAQGMFQPIMKEKMNELEAMRNELAYRIKELENKKETDFITPEMILKIFEKDREIINSSKDPHEIKEVLKNYIKKIIVTPDEIKCEFYFWIGDDFRSLLVAANRSQL

SEQ ID NO: 17259 - protein, 506 aa, synthetic construct
MVDTELRAAAYARYSSDNQREESIEAQLRAIKEYCEKNNIQLVKIYTDEAKSATTDDRPAFLQMIKDSSLGLFNAVIVHKLDRFARNRYDSAFYRRQLKKNGVKLISVLEQLDDSPESIILESVLEGMAEYYSKNLAREVMKGLKENAFQAKFNGGIPPLGYDIVDGKYVINEKEAEAVRLIFELYAHGYGYRQIIDELNLRGYRTKKGNPFSKNSIHEILKNEKYTGKYIFNKGTKKNHRIVKEDVIVIENAIPAIIDEDLFKKVQEKMEERKVTRGANSAKRVYLLSGLVYCGICGSKMVGCLSRGKYVTYRCSRKDRTKQCTNRDINKEKVEAFVIDELNKRVLDPKVAPVLARLLNEENQKLNKERAEEITFLKKRYKEVEEQMKNIVEAIAQGMFQPIMKEKMNELEAMRNELAYRIKELENKKETDFITPEMILKIFEKDREIINSSKDPHEIKEVLKNYIKKIIVTPDEIKCEFYFWIGDDFRSLLVAASGFEPPTLRV

SEQ ID NO: 17260 - protein, 452 aa, synthetic construct
MKAAIYIRVSTQEQIENYSIQAQTEKLTALCRSKDWDVYDIFIDGGYSGSNMNRPALNEMLSKLHEIDAVVVYRLDRLSRSQRDTITLIEEYFLKNNVEFVSLSETLDTSSPFGRAMIGILSVFAQLERETIRDRMVMGKIKRIEAGLPLTTAKGRTFGYDVIDTKLYINEEEAKQLRLIYDIFEEEQSITFLQKRLKKLGFKVRTYNRYNNWLTNDLYCGYVSYKDKVHVKGIHEPIISEEQFYRVQEIFARMGKNPNMNRDSASLLNNLVVCSKCGLGFVHRRKDTMSRGKKYHYRYYSCKTYKHTHELEKCGNKIWRADKLEELIIDRVNNYSFASRNVDKEDELDSLNEKLKTEHTKKKRLFDLYISGSYEVSELDAMMADIDAQINYYEAQIEANEELKKNKKIQENLADLATVDFDSLEFREKQLYLKSLINKIYIDGEQVTIEWL

SEQ ID NO: 17261 - protein, 558 aa, synthetic construct
MTKLYSYIRFSSMRQSDGSSYERQIRMAKEIADRYNLELVNDYQDLGVSAFKGANSKTGALSRFLDEIGRSIPVGSWLFIENLDRLSRQDIISAQELFLSIIRRGITIVTGMDNKIYSIETVTANPMDLMFSILLFIRGNEESQTKRNRTNSSALLKIKAHQQNPQSPAVAIEEIGKNMWWTDTTSGRVLPHPVYFPVLQKIVQLRQEGHSAGVILDYLNEHHEPPAPTSNKKHRKWSRAMVSRLFATKALIGVKTVNVDGVEYELRDYYPRVLSDSEFYFLRKNIVKKAWDYSHDKEKVIPLLSGIGVLRCVHCGATMVKQTAANGKREQYRYCCDGRKSGRTDCPYPNWGFRAVTLEGAVLQLLADKIWIAEDKTNPIPEIQVKIDEISRKIDNLINLSAMTGATKELANQITDLNSQREALHEEIRLFEREMYSVDSQGWDKLAQFDLSDVQNEERLKVRMKIKGALHEIECSRIDSKKNLFVLVYLDGLRQRLVIENNRGLKKGQIFVDLKTINDRQILESAGMVLHPCIEMIIDADWKAPEEIPGLLSEEFGI

SEQ ID NO: 17262 - protein, 624 aa, synthetic construct
MIKTFIYSRVSSQEQLSGGGLDRQETDVREYVTRNGLDQYEIVAMVDRGISGYDGSNMRDGELGKWYKDAITGMYWGSHLVLEAIDRFSRRDPMLAMEDFTVLVNKGGIKVHIVKFNTFINGDNLPMLSMMMNLAHSESKQKSDRISKGWQRRRRMALDNGTAITARTPYWIDVRDNEYRLNNSSIAVVEAFAMYKQGLSCGLIAKKLNELKHYFPYMWTKTAVQHIVDGLNTSGIIDAPRAIKTIKAFYKSGFSVEDIAKKMNAEFQFMKEWNAPAVHKLLQNKSVTGLVEIQKRKLIQEFDSDGKPLELRTKSEGEKYFESIYPQIISIDDFELIQKLLESNRKVDTKTGKGQTTGGTVTQNEDGELVKQFILSSLCRCYKCGGAMFNNIVRSKRKNGKVDTYSYLRCLNERDAHCDVKALNYPVIERAIIEHVKGLNFDTMFKGTNNSELELLKTREVELLRDIATYEDAIAARKAAGKNTSPVLVTSLVDAQDDLEALQKKIRAISGVTVNAGELTSLNESVFDVAEYELRNMVELELQKIIKRITFNCTEKNIYFITIQYNTGTVLQHGLKVDKKKGVIETYELHEGNKGYVSNGEVITPALIEAAESKNIGIFEGKVM

SEQ ID NO: 17263 - protein, 560 aa, synthetic construct
MTKLYSYIRFSSSRQADSSSYERQKRTAKEIADRYGLELVTSYQDLGVSAFKGANSKTGALSRFLDEIGKSVPVGSWLVVENLDRISRQSIIEAQELFLSIIRRGITIVTGMDGKVYSKESVNANPLDLLLSVMMFARANEESQTKRNRTNSSALLKIKAHQQNPQSPAVAIEEIGKNMWWTDTTSGYVLPHPVYFPILQKIVKMKQEGHSTGSVLDYLNEHHTPPAPTSNKQHRKWSIAMVSRLFKTKALIGVKEVTVDGVQYELKDYYPRVLSDSEYYFLKNNLIKKAWSFGHAQEKTIPLLSGIGLLKCAHCGSPMVKRKAANGKVEQYRYTCDGEGSGRTDCLYPNWGFRASSLEGAVLQLLADKVWIAEDKANPIPEIQVQIDEISRKIDNLINLSAMTGATKELANQITDLNTQREALHEEIRLFEREMYSVDSQGWEKLAQFDLSDVQNEERLQIRLKIKGALRSIECARIDRNKNLFVLVYLDGLRQRIVIENNRGIRKGQIFVDLKTINDRQILESAGMVLHDHIDILIDEKAFYDGLPKEEDGPLSKFGI

SEQ ID NO: 17264 - protein, 624 aa, synthetic construct
MIKTFIYSRVSSQEQLSGGGLDRQETDVREYVTRNGLDQYEIVAMVDRGISGYDGSNMRDGELGKWYKDAITGMYWGSHLVLEAIDRFSRRDPMLAMEDFTVLVNKGGIKVHIVKFNTFINGDNLPMLSMMMNLAHSESKQKSDRISKGWQRRRRMALDNGTAITARTPYWIDVRDNEYRLNNSSIAVVEAFAMYKQGLSCGLIAKKLNELKHYFPYMWTKTAVQHIVDGLNTSGIIDAPRAIKTIKAFYKSGFSVEDIAKKMNAEFQFMKEWNAPAVHKLLQNKSVTGLVEIQKRKLIQEFDSDGKPLELRTKSEGEKYFESIYPQIISIDDFELIQKLLESNRKVDTKTGKGQTTGGTVTQNEDGELVKQFILSSLCRCYKCGGAMFNNIVRSKRKNGKVDTYSYLRCLNERDAHCDVKALNYPVIERAIIEHVKGLNFDTMFKGTNNSELELLKTREVELLRDIATYENAIAARKAAGKNTSPVLVTSLVDAQDDLEALQKKIRAISGVTVNAEELTSLNESVFDVAEYELRNMVELELQKIIKRITFNCTEKNIYFITIQYNTGTVLQHGLKVDKKKGVIETYELHEGNKGYVSNGEVITPALIEAAESKNIGIFEGKVM

SEQ ID NO: 17265 - protein, 520 aa, synthetic construct
MRQVITYLRFSSKPQERGDSIRRQEELFDRWLKSNPDATIADKFMDEGQSAYHGKHLKGDFGRMLQSIQDGKYPSGQTVLLVESENRLNRQSARKTENLVDLITGKGVDVICLESGKVYNSTNIDDLDTSIQLKIAAHIAHQQSKEKSIKVSAAWENRAKLALSGEQQLTKMVPGWIDPDTRKLNEHAQTIKTIFSLLLAGESLHNIARYLQAHKIKSFSRRKDANGFSVHSVRTILTSESTVGTLAASKHNDRPAIPSYYEAAVDIATFNQAQEILSKNRKGRTPASDNPVTINLFKGLMRCKCGASVHPTGVKNTYQGVYRCNNTVDGRCKVPTMKRKPFDRWMIENIVGLLERSGDNDTAKHIAELKYQIEMLTKRIKKAANLLLELDDVPELKEQAKELSHQRQQKQSELDSLSHHESLSDKALPQLAEIDLTSKTGRVEVQLILSKYIQTIEVQHEMIVITLRNGNVIGCSRSLEPVMSKKLVKEVMKNTTVDIIDVVSSDKDFRHSGRSVTKRA

SEQ ID NO: 17266 - protein, 556 aa, synthetic construct
MCVAIGYMRYSSKLQGAGSTIHRQKSLINKWVEDQKTHHGKVYEVKFYTDKGLSGWTGENLLAGALGRLIEEVEAGGYPEGTPIILESIDRLSRQGHEEATAILRRLTSTGCVVHSILDRQVIQRSDLKTFIGAMQIIAVAERGREESDIKSERVSSSKERNYELAKLGKKLVTRNLPGWIYLDQKGKMQIDPAKQKLVKEIFEMRLAGHTYQGIAETMTNRGEPVLNERKGAQRWLPNSIRTLLHSRSVIGVLPASKVNDKYKEIEEYFPSAITKDLFYAVNDLNVPTVRSREKKQYPETVFLFKGLVKCRYCKGNVFLNGAKPGYWGRIRCIGHHDKVCDAPSLPRYDFEQSLITRMFPLLKSMDVSTEENPVAVLQAKIDHLTNILEGYYDDLEEIPRADKPRRKSINERISKRANEKEEYERQLVVVRRKMEVRTENTLSDLNYDDYSDRLKMQLVISRNIERIVLDSLFDRVHIKLVNGNALMNFPLYGDVDGSRLVITAKENTGITDVERILGLDDAMPTVYNLAPSSGEFMDDRDFPEIEPDYPNINEG

SEQ ID NO: 17267 - protein, 408 aa, synthetic construct
MLQPDKITALYCRLSQEDLQAGESGSIQNQKMILQKYAEEHHFLNTRFFIDDGVSGVSFEREGLQAMLHEVEAGHVGTVITKDLSRLGRNYLKTGELIEIIFPEYEVRYIAINDGVDTARDDNEFTPLRNWFNEFYARDTSKKIRAVKQAKAQKGEHVNGECPYGYLIDLDDKNHLIPDPETAHVVKQIFVLYVKGGRLCDIQKWLADNKVLTVGALRFQRTVQTRYHNASLIPYSWPDKTIYDMLARKEYLGHTITGKSYKVSYKSKKTKKNPEEKRYFFPNTYEALIDEETFELAQKRLATRHRPTKSEEIDLFSGLLFCGDCGYKMYLQQGVSIPERKHAYTCGNYRNRPRKMTQCSTHYIRKSVITELVLADMQRVLSFVKHHEKEFIKTATELGSQEALKTAA

SEQ ID NO: 17268 - protein, 586 aa, synthetic construct
MTLLGLPAGLDLDSLRKLATQAAKAKPQPAPGDGTPLAVSYLRVSTKDQATRNGLEEGLSIPAQREAAEKKAASLGAVIVKEFIEPGESAKTANRKALQEMLEYVAVNPVQFCIINKVDRMARNRLDDAVIHATLRGRSIQLVSVTENIDESPSGMLMHGILATIAEFYSLNLAQEVVKGLRQKAVMGGTPGRAPLGYLNVRTTENGAEIREVTTDPDRFDLVKFAFESYANGDWTLSMLTEEVNRRGLTTRPTPKHPEKPLTTTMLHKVLTNPYYKGLVTFQGAVYEGSHDVMVTPEVWSKVQQILDRNNQRGQRPQKHDHYLKGALYCSCGAKLMLERPQGNTGERYDYFSCSGRRRKTTSCTRSAILVERIELKVEQAYATKSLTEDQAAGVGKILHEVFDRLEGGASDERAALTEQKARLESERLKLVQAHYADAIPVDLLKSEQDRIQNALGAIQTRLDSLHSRYADAREGLEDMLAVLTDLQGLYLRCEPAERRFLNQALFTRIIVDENENVELQPQAGVDTVTSQRINTYSAGPVATTKMPRIQAGQVSTFELLVEARGLEPLTPCLQSRCATNCAMPP

SEQ ID NO: 17269 - protein, 685 aa, synthetic construct
MCARVISPGCGRLPPPTSAGPEALWCGVRKGLCGQCCSGVWLATEWIAATCSASPSSSGGNRPGRRLASSVLPVPGGPLSSSLCYITPNDCDYVIRMKPKAYSYIRFSSPEQSRGDSQRRQREAAAKYAEEHDLDLVQDKDYQFFDAGISAYTGKNVNDEGKLRRFYEYVKSGKIESGSYLLVESLDRLSREDVLIALPRFIDLLNEGINVVTLADNFIYTKGADVPQLIMSIVHMARAHHESKLKGERVSKAWRKKQDYAREHLTPLGSVCPYWLDFKGGEYIVNEDKAEIVRQIFSMTIAGYGQIAIVKHLNKNNVPVFGSIKRNKSGLWGASSIAKILCNRSVLGEYQPMVYEQKRRRENGSVIEGYYPPVITPEIFYTASYVRTQRHVSKDTKQSKDFNVWSKLLVCSKCRSPMHLVNKGQPPKGFKYLRCYTAAKGKCTAKLIRLNVADIAFKEVLVMFNSMSLVQKSEKESRSRIAELKGRIDSLRLRLVQFEEMLMEAPSIALSKAASAKEEELMLCERELQIENAEMETTAIFNKADFFEKLDLKTYEGRSSANLYLRNLDVQVRAGFNGHEYFFVAITDPKKPKANFAIWLGEDLIPKITPLSKEMMVNVINQGDLPNARMVVPMARHLQELIDETEGNGRGEITVALDSIPALEWSPGAEVLKNKLLKSVGLDPD

SEQ ID NO: 17270 - protein, 545 aa, synthetic construct
MKIAVYARYSSELQDERSIEDQISLCNDHAARRLGGAVTKVYADYAISGAHIANRPEVNQLLEDAAARKFDVVLAEDLDRISRDQEHIASIFKRLTFAGVRIHTVADGDINEMHIGLKGTMSALFLKNLALKVKRGLTGRVKEGRHPGGRTYGYDITNQIAPDGSVIRGKRRINPEQAEVIKRIFREYNAGRSTRQIARDLNKDKIPGPTGKEWTASTINGNRQRRHGFLYTELYAGFLIYNRVHMVKDPATGRRLSRPNPPEEWIVTEVPDLAIIDRAEWDAAQARKEANNQHCQLNRTHRPKHPLSGLVKCGICGGSYTIVSKDAMACSAARERGTCHNKHRIKMPDLQKRVFDGITGKLISPDALEAAMTAYHQERTRLRKIARSNLKALTKRRTEISHSINNIVNAIASGHAPESLTGKLIELEGELKSIEAELNVIDSEDNVVEIHPNAVREYKRMVKDLTSALRSAAEPHRSEAIEIIRGLIDHIEVFPTDKPRVTDVQVYGILDEIKNLAGLASGEVSVQRTVSLVAEEGLEPPTRGL

SEQ ID NO: 17271 - protein, 503 aa, synthetic construct
MVELQNRIQHVAIYLRKSRNKEGEETEETLKKHRKRLIDIANKNKWDYELFQEVGNSMNDNRPEYQKLLSKLSEGIFDAVLSVNLARVTRDDAETPKFMSLLRQEDILFITDSERIYDLEVQEDWQALKFTGFVNNWEYENIKAQLRKGKKDSAKMGRWSNGVPNYGLVYNRFDRSLEIDQQKADAVKLAFQLVIDGLGVDKVAKELNRLGYKTNRGRYFSGNAITRMIRAEIYKSVIISNRVKGRNLYEGKLRPKDQWIIAENAAPPIIDEETWNMANEALDQRKLLSPRGKQKKHPLSNLIKCGLCGRTHTVSRRRDRNDALAIQPCNKTDPLGKNKCNNRGIKHDTMISLVIEAIHEKHHEISSELIKFEEDTEANDIKQIKINKLQEQINKSKKALNILQIQLEEELINISSFKERRKIRQVELNKLEKELTELLEETKEDALRSKKSFANKLDFFLENWHTIDGADLNHELMSFINKIIWYAPRDSELPPQLKFEWRV

SEQ ID NO: 17272 - protein, 548 aa, synthetic construct
MRAAIYARFSSDNQHERSIDDQVRLCRDFVARHGGTVVTVYADYAMSGAHLRNRPQALRLLDDAKAGQFDTVVAEGLDRLSRDQEDTAAIHKRLGFAGIRLATVQEGDISELHVGLKGTMNALFLRDLAQKVRRGQTGRAMAGSVPAGLSYGYDVVREFDARGELVRGKRRINPEQADAIRRIYREFVAGISPRAIADALNRDGIPSPAGGHWNASTINGNPARKNGILYNEAYIGFVIYNRLHMVKDPETGKRLPRLNPPSDWVVTEVPELRIVEDELWERAQAIKAGFAHLRVDKTRRPKHLFSGLLRCGCCGGAYTVKSKDQLACSTYRESGPSVCSNNRTIRLPDLQERVLDGIRTQLLSPKLLALYVKTYGEERRRLRSEASAKREDVAARVAKLGRQIDNIVDAIAEGTAGPALRGKLMDLERQKAEADAELAAIMEAESDSVVELHPQAAERYRDQLDALDKALAGGDEARQNAANTLRALLARIEVHPGERRGETHLMVHGRIEELLSLTRSKPGEGNSTVARTAMMVAAEGFEPPTKGL

SEQ ID NO: 17273 - protein, 465 aa, synthetic construct
MKRVGCYVRVSTENQLENYSIEEQIERLKAYCTAKDWAVYKFYTDGGYSGGNTNRPALQQLLVDIESKNLDIVVVYKLDRLSRSQKDTLTLIEDVFLANGIDFVSMSENFDTSTPFGRAMVGILSVFAQLEKDQITERFTMGRIGRARNGNFHGGPTPPTGYDYIDSKLVINEYEALQVKEVFRLFLEGQSINSIRKYMSSKYTNKYGNWASHTLVLNVLRNSVYIGKVKFSGQEYAGNHTPIIDINTFEATQKFLQSPEREDSKTIFQKNPFRANNLLTSLIYCKRCGARFCGNHGNYVCHSRGKTDSKMIKDPNCKNKKWPIGELDEFVQNEILKLAYNEEYFNEKVKGKALPVKSDKAILLNRVTEIDKQISRMMDLYQVGGIPLSEITDRIAKLKDEKDSLAEDLADKEDKRLTITKAKALLSNAEEVFTTGDIAKKRLYISSLVDYIEVDGEFLDIHFSF

SEQ ID NO: 17274 - protein, 503 aa, synthetic construct
MRAVLYVRVSTEEQAIEGYSISAQTSILREFAKAYEYDVIKVYQDAGISGKNISGRPALKELLSDARSKKFDIVLIWKLSRLSRSLLDLLEMVDIFNQNGISFQSFSEKFDTSTPIGKMLLQLLGSIAEFERNTIAENVKMGLNERFKQGNSKGSIPFGYKYNENKQAIIVPEQAEIIKKIFQRYVESRDGNCILEITRELNATGYKTRKNKQWNRTTIKDMLCNPFYAGYVRTGYHSHGWVLNNDASIIKGNHEPIIDEKTFNKISQIIKNSKRMNFTKNENNVAVFSQLLICPLCGGKMYAYSYMGNNYTNKKGELKQYLVCSYRCSNTNSGNNLCKGFQVSYKKIDDIIIDNINSYVNKKLYMTAAKRLKIKKVNTDDVLTLEQEIKRLKSLKEKYFVAFEQSNTEDLSPYIAKINQLHVQIQNLEKELSNVKLNDKFTEVNKLESLFSQISDFKTMFYNISLKSQKEIVRKIVTNIYLTKDKKIKSIKLTNSDVINSYT

SEQ ID NO: 17275 - protein, 547 aa, synthetic construct
MSYASEISRKLNTGSGTVTAVIYARVSTENEGQKDSCANQVEMALNYIRQHPNITLKGTYVDDGISGKNDFTRPQYTAMRAKIETEHIDLIITKALSRLNRDQLNSLELRSFLVEHKTTVFTLEDLSIQDFEDFNSEFMHSFKYLIDAQFVQQQSLNGRKTQQLRCERKELSSKDVCFGYDWNPGTKTITINEEQAETVRWIFEEFVFHNGVPATIHNQLHEKGIELCEKTVSNIIRREKYIGKFYINQRSTTLGTGKKKSKRYRLPKEQWVLVERQDLVIVDPDIFAMAQRIHKARQTVFGKPEKPNGQPHYIGRHKYAGKIYCSECHKSYIHAFADRAHTKDIYRLCNHSSCSTPDRVYESDLDAIISHALKTILTEQTSVFANLEKVLVECVTASQNNKSKITDMQKQRKQLQKKIDALIETMAEGGLTEESKELIKIKMNTLSEKVTRLSEEIVNTQASQLDDSYVDTKLAEIRTAISKLKNFTVIDRDRILNYIDKIIVLPRGDLEILLKTGHVITATKQPINQDFSNTKDVVKIGRRDVRY

SEQ ID NO: 17276 - protein, 511 aa, synthetic construct
MELDASLSLRDEGLSAYHQRHVRQGALGVFLRAIEDGQVPTGSVLIVEGLDRLSRAEPLQAQAQLAQIVNAGITVVTASDGREYNRERLKAQPMDLVYSLLVMIRAHEESDTKSKRVKAAIRRQCQGWIAGTWRAPIRVGRDPHWVREIEGGGFELIPERALAVQLAIQMFKQGHGAVQVVRELAERGLKISETGRTHSSNIYKILANRMLIGEKTVEVEGETFRLECYYPALLTPTEFADLRYLAEQRGRRKGKGEIPGVVTGLGITYCGYCGAAIVAQNLMGRKRLADGRPYPGHRRLHCVTYSQGAGCKISGSCSVVPVERALMLYCSDQINLTRLLEGDGGTAAISAQLADARQRVAELEAQVQRVTDALLFDDGEAPVAVLKRLRELENRLAGERREVDSFEHHLAVSASAVAPAAAEAWRELVNGVEQLDYNARLMARQLVADTFSRIVIYQSGFQPETDHGTIGVVLVGKRGNTRMLNVDRRTGEWRSAEDIKLSGFTTVPLPA

SEQ ID NO: 17277 - protein, 557 aa, synthetic construct
MGKEKAVVYARVSTNQEQQKTSIEWQKEYYAQYAKDKGYELVKTYFDEGLSATSSNRKEFLEMLYDAGLNATRQENSGVYTFDTSNREPRFDWIIVKDISRFARNTDSTSIIRRLVEKDVYIIFETAGFTTKDDNWEFHFGLFVNFAQQESVDRSIKGKKAYQTRTDKGDYHMSNVLLGYKRNLETKEYEIDEDEAKTVRFIFDQYVNHGKGTTEIADMCNDRGYRTKKNKRFIGNSVLRIIKNEKFKGQVITKRYTHTTITGSHKRITLPKDQWKVNDNAIPKIISPTMFDKAQEIMHKRVQATKNHGRKGVKVPKSEFYKKIFCGKCHSDYVRISAIKKRVNSPNITEYFYSCRNRRNKMRIDNKCTNRGVAHNVLVRELTNIGEKLNIRFNENRIVEEEQALDRILKRLDDKLKNGESEKEKIKVQIAGLDKQIENITTSIAGGVSESVSKVMFNKIDQIESEKSKLEASMLEYNTIAIENEKQEYIDKFDEIVKFSRKKTFTYEDVIGLVDGIYILEHREALVELKTPTLLLDDEIYKGETDYALFPFTFQLN

SEQ ID NO: 17278 - protein, 608 aa, synthetic construct
MTKKNGEVGDSVRRQMLNQQKAVETYNLHVVDVFEDLGKSAFRGKHRLKGALSLFLASLDQGKIPSGAYLLIESFDRLSRERMTDGLTVVLTILRKGIKIITTDDLKLYDLSIKGKDLEQTIMITVLLERANNESTTKSDRQKAKWDGRRERIIKGEKKFLNKNVPWWIALDESTGAYSLIPERVAELKTIYELLMVKNLGLRATAAFINEKNPLKVGFGKNPENFGWTARGIKRMIETPSLYGSLELCEYIYENGKATPDRKTVKVMDSFYPAAFSKHEVEVLKAKISSRMTSKERPTKRDLQYYNIYHGLIKCAFCGGNVRFSQKQKYSYLVCRNSEIKLCKHPKTLSMQYERFHEVFFKYAEHYNFDLLIKSGVNDNDVVVKEITELEETIASEKYKAQKFTEKLFDMFDGDIPSEQEAALITRNKKIKLLEAKANALRSKIVYVDTDAETISDAIQLASKLVETKDGRLELSNYLSKVIDKMVVDFGKAHNRDGDYVKVLFKNKDFSHHMLIGKTTAYSYDSDGELFLDTLQGITREDGYYLEAQKAQDEWFEVPDFTDEEIQAAGEANRMNPEFNGNAEPDRDDYPTEAEMREVFAEVDKNLS

SEQ ID NO: 17279 - protein, 538 aa, synthetic construct
MAKNGARVYSYLRFSDPRQATGSSADRQLQYAQRWAAEKGLALDESLSLRDEGLSAYHQRHVKQGALGVFLQAVEDGRIADGSVLVVEGLDRLSRAEPIQAQAQLAQIINAGITVVTASDGREYNRAGLKAQPMDLVYSLLVMIRAHEESDTKSKRVKAAIRRQCEGWIAGTYRGIIRNGKDPQWLHWDGQVFQLLPERVEGVRLVIELFRQGYGSVRIIRELTERGLSVTTKGITALQVHRLVRLPALMGVKVLELDGETYRLEGYYPSILTADEFADLSLLVESRVRRKGKGEIPGLVTGLGITYCGYCGTAVVGQNVMHRAKADGSLSDGHRRLICVGYSHNKGCPVGGSCSVVPIEKALMSYCTDRMNLSSLLEGNDQSQLIQARLVAAKSEAANIEQQLERVSEALLAAEGGAAPLVFVRKARELEDLLSAKQKDIAQAERELVAVSNRDQPGLSEAWAELSSGVEMMDFDARMKVRHLVRDTFERIVVYHHGMQATARDGNVIDLLLVGKGGQPRLLRIDRKTGEWRAGMGA

SEQ ID NO: 17280 - protein, 536 aa, synthetic construct
MKRLPSKQAISYVRFSSERQRGGSSVERQQAMIRRWLDDHPDYTNTDLKFSDLGKSGFHGEHVKEGGGFGKLLLAVEAGAIKAGDVVLVEAIDRTGRLQALDMLTQVIAPILQAGVSIITLDDNTTYTKESVGGSQIFLLVAKIQAAHGYSRSLSERVSASYELRRKQAKEGGVTPKRITPVWLNSDGSIREDVAPWIKTAFELYVSGVGKATIAKRMRESGVARLAKSSGPGVEGWLRNKAVIGKWEVLVDTPDQHVIDDVYPAIIEPALFYKAQVHAEKMKTQRPTKTAKHFLVGLVKCGSCGKNYVMQNKDGKPHTMRCISRVAKSCDNSHIVPKPVMDAIYSYTSVTAALEAIKQQQMGVNDKEIVTREAELQELSRRVANLLQTAEAVGYMPELATKLKEANEAREAAENALVILRSTVVPPSGENWRIMGSLWEIEKEDSQRLAAMLRNVNYAITISPDGEITSTHTQTVYRYLGVDRALNKYKLMQNDKLTFVAKCSIADDLYFEPFRDLEGVSVWDETDYENLRQQHS

SEQ ID NO: 17281 - protein, 473 aa, synthetic construct
MAKKISAVQSAAVYARISADVEGKALGVQRQLEDCRKLAAERGWVVGREYVDNDVSAYSGKARPGYEAMCSDLAGGVRDAVIVYNLDRLHRRPVELEEFVALCEAAGVNQVATVTADIDLGNDDGLFMARIFAAFAAKESGRKSARMKRKYEQKAAQGLPHGPNRPFGYDDDKITIRESEAEVIRELVVRVIAGESLNSLTVWLNETGVAPVRGTRWSSTAVRNIVSSPRIAGLRAYKGEVVGEAAWKPIITTAQRDQVLAALSVRSWNRKRSPRKYVLSGLCRCGRCQGRMFSAARLEAGASKRRYVCSSSPDHGGCGRMTVVAEPLEKLITDAVLTRLDSKALADALAGKVRANPDTAALSAQVEQAQTRLDELTGLYSSGAITAREWIMARDPITDTITKLRREIAETAETGPLAELAGKGSALRAQWDDLGLDRCHAIIRAVLDHVVIKPGQPGARGLDMGRIDPVWRI

SEQ ID NO: 17282 - protein, 513 aa, synthetic construct
MQRGLPSDAPRGLLSVRLSVFTDETTSPVRQELDLWALATQKGVRVVGVASDLNQSATKIPPWKRKALGHWLHERAPEFDVLLFWKLDRFIRQIYDLHLMIEWCQEFGKNMISKIEELDIKSTFGQMMVTMIAGMARIEAENMGIRLTSLWQYARTTSRWVVGQPVFGYHTVKDPKTKETSLAVTPERAVMLRWARLMRVKRKRSYGFICRVLNRAGFRTAQGKLWRVTGLIRIMRNPALMGVRIISDGKPGRYNPPRIFYGADGNPVRVAEPIYTELEFAELVEFDMSKQQVHPPKQKKATSFLDVIKCGYCLGNMIYQANKKKDKKGNITKILEYIRCFSTVSKPCDHRPSGKPAEVYGSLVQAVLDEIGDYEVVERVYHKGEETAKRRKELEQSIQFYVAGLAPGGQFSVGGFLQKTAEDALQKHNAELSGLPEEASTDHWQYKQLEGTYRQRWLMGDTEQMEEDLLRGGIKFLVYDDHAKLVVPEDVKKRLVLRDNYFSEGRLRSKVTV

SEQ ID NO: 17283 - protein, 523 aa, synthetic construct
MRQVITYLRFSSKPQERGDSIRRQKGLFERWLKDNPDAKVVDEFSDEGASAYHGHHLKGDFGRMLQNIQDGKYLSGQTVLLVESETRLNRQKARNTENLVDLITGKGVDVICLESGKIYTSTNIDDLDTSIQLKIAAHIAHQQSKEKSIKVSAAWEHRAQLALEGKQQLTKNVPGWIDPDTRKLNEHSSTVVTIFDLLLSGESLHNIARYLQANNIKSFSRREKANGFSVHSVRTILRSESTVGTLAASKRNDRPAIPNYYEPAIDVATFNKAQEILSKNRVGRAPASDNPITINLFKGIIRCQCGASVHPTGVKATYQGVYRCNNVPDGRCNVPTIKRKPFDKWMLDNIIGFLERSDGNNTDKRKAEIEYQISLVTSKLKKAATLLLELDDVTELKEQVKELNIQRINMQSELDDLNQRETLSDKPLHHLSEIDLTTKAGRVEAQLILSKFVQSIELQREMIIITLRNGAVIGKSRDLSPALSQDLMKQVVSSSSPRDIDMFSVITSDEEFRKSGKPVTKRS

SEQ ID NO: 17284 - protein, 571 aa, synthetic construct
MPSIRRLVRFKAMCVAIGYMRYSSKLQGAGSTIHRQKSLINKWVEDQKTHHGKVYEVKFYTDKGLSGWTGENLLAGALGRLIEEVEAGGYPEGTQIVLESIDRLSRQGHEEATAILRRLTSTGCVVHSILDRQVIHRSDLKTFIGAMQIIAVAERGREESDIKSERVSSSKERNYELAKLGKKLVTRNLPGWIYLDHNGKMQIDPAKQKLVQEIFEMRLAGHTYQSIAETMTNKGVPVLNERKGAQRWLPNSIRTLLHSRSVIGVLPASKVNDKYKEIEDYFPSAITKDLFYAVNDLNVPTVRSRGKKDKPQYPETVFLFKGLVKCRYCKGNVFLNGAKPGYWGRIRCIGHHDKVCDAPSLPRYDFEQSLITRMFPLLKSMDVSTEENPVAVLQSKIDHLTNILEGYYDDLEEIPREDKPRRKSINERISKRANEKEEYERQLVVVRRKMEARTENTLSDLKYDDYGDRLKMQLIISRNIERIVLDSFFDKVHIKLVNGNALMNFPIYGDVDGSKLLITAKEKAGITDVERILGLDDAMSTVYNLAPSSGELMDDREFPEVEPDYPNVNEG

SEQ ID NO: 17285 - protein, 520 aa, synthetic construct
MKKITKIEANQREESILRVAAYARVSTDEDAQLVSLKTQKAHYEKMISENRSYTFAGLYFDEGITGTKKECRDGLLKMLKDCEDGKIDFILTKSISRLARNTTDCLEIVRRLLDLNIGIYFEKENIDTRTMESELMLSILSSLAESESRSISENNKWSIKKRFQNGTFIISSPPYGYENIDGKMVVNEEEGKIIKEIFKQYLSGKGTHKIAEDLNKRKIKGQKGASWHGSTINGILKNEKYIGDVIYQKTYTDDTYKRHKNKGEEDQYKIIDNHEAIVSREDFGKVQELIRLRAIAKGNGKDTKRYQNRYSLSGKIKCGECGSSFKRRHHYNGKEKYIAWTCSEHLKDINKCSMKFIKDKDIKLAFMTLVNKLVFGKDRILMPLLESLKRVDSKEEVEKIDKIEEGLEKIKQRKEVLSKLITSGVLDASIYAKESSEISSEESYLLKEKERSKKAILGNDEEIRELEKLIGILDKSKMIDHFEGDLFEEIIDHIQVVSRETLDFYLRCGLVLREEVKEDV

SEQ ID NO: 17286 - protein, 520 aa, synthetic construct
MNSKVIVIPAKKKKGNSIKESEKKKLRVAAYARVSTDSDEQATSYDTQVDHYTNYIKKNPDWEFAGVFSDEGISGTYTKKRAGFNKMIEEAMEGNIDYIITKSISRFARNTLDCLKYIRKLKENNIPVYFEKENINTMDAKGEVLLTIMASLAQQESQSLSQNVKLGFQYRFQQGQVQVNHNRFLGYTKDEDGKLVIVPEEAKIIKRIYREYLEGASLRDIKEGLEKDKILNGAGNKKWHVSNLNQILTNEKYMGDALLQKTYTVDFLNKKRVKNDGIAPQYYVENSHEAIIPKEIYMRVGEEMYRRANMVSGKGKRRIYSSKYALSSIVYCSKCGDIYRRIAWNNRGKKYIVWRCCTRVTHGPDVCRARTIKEEDLQEAVVEAINQLISESSKLKEIIKENIEKAITGDGSSGIEEIDQEMLKVQEELLKVANAKKDYTDLANKVEELRNEKEKILLNVAEEKNEQSRLMELEEFLEDQELEIESYDEDLVRKLIEKIIVYDESLKVIFKSGLEVEIEN

SEQ ID NO: 17287 - protein, 530 aa, synthetic construct
MANAYTYIRFSTLEQQHGDSLRRQNEAIEDFVASNKLRLTESQAFQDLGVSGYRGANLKSGLGKFIAEVEAGQVPKGSYLIVESLDRLSRQRVMDALTLLVTLIDKGIKVVTLNDAGPQVLDKDAGLPALVIALSTMQRANSESDMKSKRVKAAWANKRKNAANLPVSSRGPEWLKFNKLEKKFEPLNERVSVILKIYELADAGLGRGRIVKHLNTNGYLSFRSPSQGWQTSSVTKLLKNRALIGFYQPFQLAYDEETGKKSREPAGEEIPNYYPSVIDLDLFRRVSTKKYAPTVPLKGRQGESLTNLFTGMTFCKWCEAPMTLTNKGPGSKGGTYLVCSKARRGKDCIYRSWKYEDAEIYILTALRGLDIGSILAGIDLDGRLKEVRNLIAKTAEQLDLDEKKISRYEEELTKSDESPSRTVIKILKALEESVDNGRRRLVLLQSEEIGLDSPMEDAKTFGDKLVKLYDEMETASPQERYLIRVRLRNRISQIVHRIELLPVKRNDPEFIRGAPKTKKYSWSSEMERGS

SEQ ID NO: 17288 - protein, 645 aa, synthetic construct
MSLIPYARVSSGKQLDGLSMSLQGDSKLLDKLAKEHNTTVSNLVYNDEGKSAYKGKNVDDGELGRLINDIKRNVIKQGDIIVMRALDRLSRQNLTDSENLYNSIVGSNVCILTTIDNHLYKRDCVMSSVLKTLAFKTANEESAKKSHLTNTYASHRIHQFLSNEKPDNGTAYDIGIGRHPFWIEIDKRVIQKGKHFTLARIMFEKAMQGYGVARLQKFALEQGLELSYSAVGKMFRSHTVFGDLHITHQGKEHTLKSYYPALATENEYYKVRAIKDRLTKESNAQRKHVSILAGMQKLYCDCCNSSVGISRNTKQDINYYSCINKLEKCYQPLRQDIIDNIVLNAIDTHIFSNEASDTTVVDGLELEFSEKKKQHENAVERFMLLGDSAGDNAVQTIHTLKAELDNIQKKIEVEKNKTASYAIDYEAITSFHDAMADYQAQQDKITEYVHGDNELKQEIKDILKLVLKRITIDHRHMITIELLDGSIIYRYLLRRKDGKRLHDRYFVPIKVHDEETIKIVRNSTPELVNWVTESELNSLDLYFEDVTNPFLAIERKRHQRDLEQEFFDLLQGNVYEWKRADIMKAGATTTQWQDFKDADVSKYGFTKDVCTITTKHYTKQHKTIIYRELDEAELINHFGCKRIEF

SEQ ID NO: 17289 - protein, 543 aa, synthetic construct
MNHVVTDAEVTTSALIYCRVSDKKQKTQGHGLESQEHRCRQFAEERGYDVEMVFPDDITGGVDFMKRPGMRAMLAYLDAQKGKPYVVIFDDLKRFARHTEFHLKLRREFAQRGARVECPNFKFEDTPEGVFIETVIAAQGQLEREQNRRQVIQKMTARVEKGYYVFHPPVGYCYAKDRVHGKILVPDEPVASIVREALEGFASGRLGSQVEVKRFLEGKPDFPKSGARGYVHPTKVKDMLERSAYAGCVEAPNWGVSLRKGHHEPLISFAAYERIQARLKGTANAPARKDINQDFPLRGFVLCDDCGEPMTSCWSKGRSQLYPYYLCDTPNCGSKRKSVRRADIEDGAEAILRNLQPARQLFAVAKAIFTDIWEMRRAEAIAARGAIETQLKETGKQIDSLLDRIMNATSPSVIGAYETRIAELERQKIRLAEQADSAVPSHGRLTEFIEPALTFLSNPWNIYKNGSFALKRTVLKLAFAEPLRYSRNEGYRTAETTFPFKVLADFSSLKCGMVGDPGIEPGMGLPGGVTVRCNGVLVIPCKH

SEQ ID NO: 17290 - protein, 515 aa, synthetic construct
MSYLVYLRKSRKDLENPFMTTEEILNRHECILLDLAKKMNLSIGGIYREIVSGDSISARPVMQKLLREVESGMWEGVLVVEVERLARGDTVDQGIVQRTFQYSETLIITPQKTYNPSSESDQTFFEFGLFMSRQEYKTIKRRLKSGVMSAVREGKWPYNSAPYGYRRYKLANQKGWSLEFDDQERPIAELIYHLFCDEKRGLGYISDYLEARNIKSRTGGRFTESFLREFLRNPANDGKVFYGRRKVVTKIVNGSSVRTRPRADEYIEVAGLHDPLIPHDLFLKAQERFRVSTPRNPSSYAVKNPLSGILVCSECGHKLQRRPASTSKRGAPYDVLMCKTRGCPTVGSAVEVIEREVLYALEDIVRGYEADVPSVPSLVPQKEELLHNAILHRTDLNKQQERIYTLLEQGIYSTDVFLDRSKALEKQMQEVDHSIEVLKNELEEEKIKYNNWKSFVPTCKQLLEIYWTLTPDAKNSALKEVIDRIEYKKLTRNPKGMCDVATFELTLYPKIPMKS

SEQ ID NO: 17291 - protein, 587 aa, synthetic construct
MARRKRKQHSENLSSDGSSSKRLSVEARRQQIEAPSSWPSIESTTNPAVFIYCRVSDNKSVKSDLSIPDQERQAKARAAENGWTVLKTFIEAGVSAKTADRPQFQLMIAEALDSSKPVQRIIVHSISRFARNVEDYNRVTNQLYANGVEVVSLTQQFSNDTGGFIAETTTAVFDEYHSRRTSTDVTRTMTSMAKEGYAVGGVQPLGYTLRPDEVNPRRKRVVIDESERPLAAKIFQLSLYGNGDGPALGIKAIVNYLNGTGYRTRSGAPFSTNNIHSMLTNPIYMGRKIYNQNAKAKRWTPVAAEIVEIPVPPIITPDEFAELQKLLRSKNPRKGAAKTVSSPLLLSGLVHCECGAAMTLRTGTGRSGDIYRYYHCARVAKQGRYTCNGATVPEQQLDDSVVEAVIENVLVPDRLRGILDSMNEKIAVAGKHGEARAKEIRVDLEASERAYKNLLAAVASSESLGSEPILLSKLGELERDLTRHRNSLKVLMASEGNDVSITEQQINWFSNLIIRRLRKSNRASMKSYLASVVARVEVSSDDISIVGRLSDLKGEITREANIDVGLGSENTVRRYKRNWCTRQDSNL

SEQ ID NO: 17292 - protein, 544 aa, synthetic construct
MSARRCAIYARFSDDKCSPTSAEDQERECRRHAEREGWEVVRVYADHAISGADNRRPGMTSLLADVPRGLFEIVLAEDLDRIARDQEDSAGIFKRLRHHDVGLITLSQGDVDEFKIGFKGTMDALELRKMADKIRRGQRGALARGRIPGGLCYGYEVVREFDERGQVDAGRRRINLMQAAVVVRVYEEYAAGRSPKAIAKGLNADGIKSARGGEWRAPAIIGHRGRQIGILQNPIYVGRFVYNRVNMRRDPDSRNRVSRLNPVSERVTIDVPELRIVSDELWEQVQEVLRRRAGQPLVYRKRPRHLFSGLIQCGLCGGSMTIVADTRLACSRAREAGTCGHNRRLQLGELQARVLAGLEEQLLSPEAVSILVREFHLERERKLREGGRARAARERQLAKAVAAVERLVAAIADGGGEFAELRQALARKIEERDRARAELGEEDAVPVIVLHPQIVEAYRQHVRRITAAIAAGEPLSDQVKADIRGLVEAIHVTPAEAGGHAIEFTGSLESAVALATGRPAARRGAPLAVTVVAEEGLEPPTRGL

SEQ ID NO: 17293 - protein, 508 aa, synthetic construct
MKKAIAYMRFSSPGQMSGDSLNRQRRLIAEWLKVNSDYYLDTITYEDLGLSAFKGKHAQSGAFSEFLDAIEHGYILPGTTLLVESLDRLSREKVGEAIERLKLILNHGIDVITLCDNTVYNIDSLNDPYSLIKAILIAQRANEESEIKSSRVKLSWKKKRQDALESGTIMTASCPRWLSLDDKRTAFIPDPDRVKTIELIFKLRMERRSLNAIAKYLNDHAVKNFSGKESAWGPSVIEKLLANKALIGICVPSYRARGKGISEIAGYYPRVISDDLFYAVQEIRLAPFGISNSSKNPMLINLLRTVMKCEACGNTMIVHAVSGSLHGYYVCPMRRLHRCDRPSIKRDLVDYNIINELLFNCSKIQPVENKKDANKTLELKIIELQMKINNLIAALSVAPEVTAIAEKIRVLDKELRRASVSLKTLKSKTVSSLGDFHAIDLTSKNGRELCRTLAYKTFEKIIINTDNKTCDIYFMNGIVFKHYPLMKTISAQQAISTLKYMVDGEVYF

SEQ ID NO: 17294 - protein, 506 aa, synthetic construct
MRHVITYLRYSSAIQGAEGADSTRRQNDLFKQWLKKNSDAQVVASFNDEGLSGYKGKHLSGQFGDMLSRIESGEFSEGTILLVEAIDRIGRLEHLETEALMNRILGNGIEIHTLQDGLIYTKDALADDLGISIIQRVKAYIAHQESKQKSFRVSQKWGQRAKLALAGKQRLTKMVPGWIDPETFEVNEHAETVRLIFKLLLDGESLHNIARHLQANNISSFSRRKDANGFSVHSVRTVLRSESVIGTLPASQRNDRPAIPNYYEAAIDAATFNKAQEILDKNRKGRTPASDNPLTINIFKGLFRCQCGASVHPTGTKNKYAGVYRCNNHLDGRCDVPPLKRKPFDRWMIDNFLGMIDVGNDGESERKIAALQHEVEIVTSRIKKATALLLEMDDITELKTQVKELNQKRTALQTTIDNMRRKTSLTDKELPQLKDIDLTTKAGRVECQLILSKHLKGLTLGKDSVTVTLQNDTEITIPTNPLPLNDGTSIFEIADKELLGIDAYQL

SEQ ID NO: 17295 - protein, 508 aa, synthetic construct
MKKAIAYMRFSSPGQMSGDSLNRQRRLIAEWLKVNSDYYLDTITYEDLGLSAFKGKHAQSGAFSEFLDAIEHGYILPGTTLLVESLDRLSREKVGEAIERLKLILNHGIDVITLCDNTVYNIDSLNDPYSLIKAILIAQRANEESEIKSSRVKLSWKKKRQDALESGTIMTASCPRWLSLDDKRTAFVPDPDRVKTIELIFKLRMERRSLNAIAKYLNDHAVKNFSGKESAWGPSVIEKLLANKALIGICVPSYRARGKGISEIAGYYPRVISDDLFYAVQEIRLAPFGISNSSKNPMLINLLRTVMKCEACGNTMIVHAVSGSLHGYYVCPMRRLHRCDRPSIKRDLVDYNIINELLFNCSKIQPVENKKDANETLELKIIELQMKINNLIAALSVAPEVTAIAEKIRVLDKELRRASVSLKTLKSKAVSSLGDFHAIDLTSKNGRELCRTLSYKTFEKIIINTDNKTCDIYFMNGIVFKHYPLMKTISAQQAISTLKYMVDGEVYF

SEQ ID NO: 17296 - protein, 559 aa, synthetic construct
MKTKLYSYIRFSSMKQADGSSYERQKRTAAEIAAKYDLELVTSYQDFGVSAFKGANSRTGALSRFLDEIGRSVPVGSWLVVENLDRISRQSIIEAQELFLSIIRRGITIVTGMDGKVYSKESVNANPIDLLLSVMLFARANEESQTKRNRTNSSALIKIKAHQENPQNPAVAIEEIGKNMWWTDTTSGYVLPHPVFFPIVQEVVELRRNGRSTAEILDHLNATYTPPPAASHKRHSNWSRAMIERLFHTRALIGIKEISVDGVNYELKDYYPRVLDDAEFYHLKKSIGVRACNYGDKEEVKPIPLLSGVGLLKCEHCGSAMVKVKGTNRRPNQYRYSCDAMRSSRIECVHTNWSFRGDQLEKAVLQLLADKIWIAEDKANPVPALKVQIDEISRKIDNLITLSAMTGATKELADQITTLNSERETLYNQIKMAEEEMYSVDSQGWEKLAEFDLEDVYNEDRIKVRFKIKQALKRIGCSRIDKYKNLFVLEYIDGKTQRVVIENSRGPRKGRIFVDLKTINDRQILESNGLVLHPCLDMLTDKNWKPEEEIPGPLQEFGI

SEQ ID NO: 17297 - protein, 506 aa, synthetic construct
MRSVITYLRFSSAIQGAEGADSTRRQNDLFKQWLKKNSDAQVVASFSDEGLSGYKGKHLTGQFGDMLARIESGEFPEGTLLLVEAIDRIGRLEHLETEALMNRIIAHGIEIHTLQDGLIYTRDALSDDLGISIIQRVKSYVAHQESKQKSFRVSQKWKQRAKLALAGEQRLTKMVPGWIDPDTFKCNEHAETVRLIFKLLLDGESLHNIARHLQSNDIKSFSRRKDANGFSVHSVRTVLRSESVIGTLPASQRNDRPAIPNYYEAAIDASTFNKAQEILDKNRKGRTPASDNPLTINIFKGLFRCQCGASVHPTGTKNKYQGVYRCNNHLDGRCDVPPLKRKPFDKWMIDNFLGMIDVGNDGEAEGKIASLQHEVEIVTARIKKATALLLEMDDIDELKIQIKELNQRRTELQTTIDNMRRKASLTDKELPQLKDIDLTTKAGRVECQLILSKHLKGLTLGKDSVTVTLQNDTEIIVPTDPLPLNDGTSIFEIAEKELLEIDAYQL

SEQ ID NO: 17298 - protein, 506 aa, synthetic construct
MRHVITYLRYSSAIQGAEGADSTRRQNDLFKQWLKKNSDAQVVASFSDEGLSGYKGKHLTGQFGDMLARIESGEFPEGTILLVESIDRIGRLEHLETESLMNRIIAHGIEIHTLQDGLIYTRDALSDDLGISIIQRVKSYIAHQESKQKSFRVSQKWKQRAKLALAGEQRLTRNVPGWIDPDTFKLNEHAETVRLIFKLLLSGESLHNIARHLQSNGIKSFSRRKDANGFSVHSVRTILRSETTIGTLPASQRNDRPAIPNYYEAAIDASTFNKAQEILGKNRIGRTPASDNPLTINIFKGLFRCQCGASVHPTGTKNKYQGVYRCNNHLDGRCDVPPLKRKPFDKWMIDNFLGMIDVGNDGEAEGKIASLQHEVEIVTARIKKATALLLEMDDIDELKIQLKELNQKRTELQTMIDNMRRKASLTDKELPQLKDIDLMTKAGRVECQLILSKHLKGLTLGKDSVTVTLQNDTEIIVPTDPLPLNDGTSIFEIAEKELLEIDAYQL

SEQ ID NO: 17299 - protein, 507 aa, synthetic construct
MKRAISYIRFSSEKQSRGDSLRRQSKMVTDWLKAHPEYYLDQDLSFRDLGVSGFTGKHLKGGLGDFLTAIEKGLVKAGDTLLIESLDRLSRQNVDRASELLRNILRSGVDVVTLSDGEHYTRESLKDPLALIKSILIMQRAHEESLRKAERIQAAWDAKKEAAKAGIKISRRCPAWLKLNDDRKSFSVIPEKVETVKRCFQLRLEGKSIWEIVRTLNDEGHQTLNQYKAGKFGQTSVQDLLKNRSVIGYFTPKGCEEIAGYFPPIIPETDFYKVQQLSYSRYGRKPASDKPLSVNLFKGVIRCSECGHALIITGFSDTRSGIYRCPLRNENRCSAKGLSRKQTDGTLLTLLSRLDRFDSDMTNTIDTLKLHREHISSNIEKLVQLSLEIEDLSAITSKLKQLKGELSQVDADIEKETQRLKSIDVGCLSDCDLTTKAGRIEAQLIIKSAVKEVVLNTAKRRCKVTFHNGKVIDLPITEDPSEDVTEAIQSLSEVTERGLIDVDEVII

SEQ ID NO: 17300 - protein, 506 aa, synthetic construct
MRSVITYLRFSSAIQGAEGADSTRRQNDLFKQWLKKNSDAQIVASFSDEGLSGYKGKHLTGQFGDMLARIESGEFPEGTILLVEAIDRIGRLEHLETEALMNRILGNGIEIHTLQDGLIYTKDALADDLGISIIQRVKAYIAHQESKQKSFRVSQRWGQRAKLALAGKQRLTKMVPGWIDPETFKLNEHAETVRLIFKLLLDGESLHNIARHLQSNGIKSFSRRKDANGFSVHSVRTILRSETTIGTLPASQRNDRPAIPNYYEGVVDIPTFNKAQEILDKNRKGRTPASDNPLTINIFKGLFRCQCGASVHPTGTKNKYAGVYRCNNHLDGRCDVQPLKRKPFDRWMIDNFLGMIDVGNDGESERKIAALQHEVEIVTSRIKKATALLLEMDDITELKTQVKELNQRRTDIQTTIDTLKRKTSLSDKGLPQLKDIDLMTKAGRVECQLILSKHLKGLTLGKGLVTITLQNDTEITIPTNPLPLNDGSPIFEIADKELLDIDAYQL

SEQ ID NO: 17301 - protein, 581 aa, synthetic construct
MPQLYSYIRWSSDRQDKGTTKSRQVAAAKAYAEEAGLELVEIIDPGVSAFRGKNRAGKLGDFIDAVKNNAIPSDSWLYCENLDRLSRDQVDEALRLFLELIGLGLTIVTGMDRKVYNRESIRQNPTDLMISILMFIRGNEESETKSHRTIGNVVALVERHKNGLPVNIKTVGRHPFWIDDSGSQYEAVKKHPVYWSIAREALDMFISGHGVYSVKRALDKKYPNGLRGKEWDYQVLKKMRDNRALIGERTIKVDGQSYKLCNYYPALCKDETEFLILAEKKKQNKFISKKCTTDKIRLLSGFSILRCSKCGGTMHSFMNKNVHRYICTNGTHKQKNCSGWSVIGSLVEHCTMIALLIGYINQSRKNGCDTTSIDEDIINKQSVIEGLNSKITNLTLAISIAKDVNELATLLQSLNTQREKLLVEIEKLKERSVSLKAKGSFEIEITDFLILIQYATFKNLEDENRNKIRKVIHSIIEFIVIDKTDSCITIYIKCYGIDEVFIFGGVQRKPYWRFDIGIINDSKLQMISNYDKNIGRTKERKNKEYLDGLRESYQGLYESAVLMLNEMGYPDINGALFWPNR

SEQ ID NO: 17302 - protein, 547 aa, synthetic construct
MKLLVPYIRWSTKEQDSGDSLRRQTNLIDAFYSKHKEEYYLLPAHRYVDKGKSGFHQQHKAQGSDFRRMFENVMSGAIPEGSLIVVENFDRFSRADIDTAIDDVRQILRKGVSILTLGDGELYDKSALTDPVKLIKHIIIAERAHQESLVKQKRIAQVWNHKTQLARELKKPMGKQAPGWLELSEDGSHYIVDEDKASLVNIIYDKRLSGMSMFAICKWLNEQGYPTINQRKVRISKTKKPDGNWSALSVKHILTSRSVLGYLPAKISTEDRKTVLREEIESFYPQIVTDSKFYAVQQLLEETGKGKTSSGEHWLYVNILKGLIRCKCGLVMTPTGIRKPVYQGTYRCNGNKESRCNYGTVSRKLLDTQLCSRLFSKLSQLHDEATDTAKLDELQRRLNTVDSELEKLTETLIQLPNITQIQEALRVKQEEKDELIVQLSREKARVKSVSSLDLSGLDMESVEGRTEAQIIIKRLVKEIVVSGNEKLVDIYLHNGNMIRGFPLDGKDDHTLTLEEATDEMQSLDDMLIFGEPVTRIYPAGDMEEVDA

SEQ ID NO: 17303 - protein, 506 aa, synthetic construct
MRTVITYLRFSSAIQGAEGADSTRRQNDLFKQWLKKNSDAQVVASFSDEGLSGYKGKHLSGQFGDMLSRIESGEFSKGTILLVEAIDRIGRLEHLETEALMNRIIAHGIEIHTLQDGLIYTRDALSDDLGISIIQRVKSYLAHQESKQKSFRVSQKWEQRAKLALAGEQRLTKMVPGWIDPDTFKLNEHAETVRLIFKLLLDGESLHNIARHLQSNGIKSFSRRKDANGFSVHSVRTILRSETTTGTLPASQRNDRPAIPNYYEAAIDVSTFNKAQEILDKNRKGRTPASDNPLTINIFKGLFRCQCGASVHPTGTKNKYQGVYRCNNHLDGRCDVQPLKRKPFDRWMIDNFLGMIDVGNDGESERKIAALQHEVEIVTARIKKATALLLEMDDIDELKIQLKELNQKRTELQTTIDNMRRKASLTDKELPQLKDIDLTTKAGRVECQLILSKHLKGLTLGKDTVTVTLQNDTEITIPTDPLPLNDGTSIFEIAEKNLLNIDTFQL

SEQ ID NO: 17304 - protein, 507 aa, synthetic construct
MKRAISYIRFSSEKQSRGDSLRRQAKMVTDWLKAHPEYYLDESLTFRDLGVSGFTGKHLKGGLGDFLTAIEKGLVKAGDTLLIESLDRLSRQDVDQASELLRNILRSGVDVVTLSDGEHYTRESLKDPLALIKSILIMQRAHEESLRKAERIQAAWDAKKEAAKAGIKISRRCPAWLKLNDDRKSFSVIPEKVETVKRCFQLRLEGKSIWEIVRTLNAEGHQTLNQYKAGKFGQTSVQDLLKNRSVIGYFTPKGCEEISGYYPAIIDETTFYKVQQLSYARYGRKPASDKPMAVNLFKGVIRCSECGHALIITGFSDTRNGIYRCPLRNENRCSAKGLSRKQTDGTLLTLLSRLDRFDSDTTNTIDTLKLHREHISSNIEKLVQLSLEIEDLSAITSKLKQLKNELSQVDADIEKETQRLKSIDVGCLSDCDLTTKAGRIEAQLIIKSAVKEVVLNTAKRRCKVTFHNGKVIDLPITETPSEDVTEAIQSLSEVTERGLIDVDEVII

SEQ ID NO: 17305 - protein, 541 aa, synthetic construct
MPKAISYIRFSTKIQSVGDSTKRQSKYINDWLKRNPDYYLDESLRFQDLGISGFSGANAKSGAFGEFLAAVESGYIEAGSVLLVESLDRVSRQDIDTAGEQLRKILRSGVEVVTLVDNEWYTKESLKDSLSMIKAMLVMERAHEESAMKSTRLRSMWAAKRERAANGEIMSKRCAAWLKVSDDRSHFEFIPENVKAVQRVFQLRLEGLSHVKIAKQMNDEGFSTLNQFKSVTGGWSQSSVTELLSNRSVIGFKVPSKSMAVKGVSEIPDYYPAIISEQQFYAVQQLKQGSGRKPSSDLPLLTNLFKGVLRCSECGFIVVVAGVSAKRSGIYKCSMKSEGRCNSVGFSRLQTDRALVQGLFYNTNRLSLNRRNGSAIGSLQSELEQLQKQRERLIKLAMLADDTESMAKDLKALNSQIKDAEKAVSEVHQREQSSQLETISHLDLTVKKDRIEAQIIIKRIVKEIRLNTAGKKCDVFLHNGLKLLNFPLDRVVDGAQWLEILPLIDGDEFDFEGFTTKPRHLVLEEAPEWVKEIEAQPNQPQ

SEQ ID NO: 17306 - protein, 506 aa, synthetic construct
MRSVITYLRFSSATQGAEGADSTRRQNELFKQWLRKNSDAQVVASFNDEGLSGYKGKHLSGQFGDMLSRIESGEFSKGTILLVEAIDRIGRLEHLETEALMNRIIAHGIEIHTLQDGLIYTRDALSDDLGISIIQRVKSYLAHQESKQKSFRVSEKWKQRAKLALAGEQRLTKMVPGWIDPETFKLNEHAETVRLIFKLLLDGESLHNIARHLQANNISSFSRRKDANGFSVHSVRTILRSETTRGTLPASQRNDRPAIPNYYEAAIDAATFNKAQEILDKNRKGRTPASDNPLTINIFKGLFRCQCGASVHPTGTKNKYAGVYRCNNHLDGRCHVPPLKRKPFDKWMIDNFLGMIDVGNDGEAEGKIASLQHEVEIVTTRIKKATALLLEMDDIDELKIQLKELNQKRTELQTTIDNMRRKASLTDKELPQLKDIDLTTKAGRVECQLILSKHLKGLTLGKDSVTVTLQNDTEITIPTDPLPLNDGTSIFEIAEKNLLNIDTFQL

SEQ ID NO: 17307 - protein, 503 aa, synthetic construct
MIEAFSYVRFSTKSQATGTSLERQLNASRLFCTQHALRLSNQSYHDLGISGFKNVRRPELEQMFEAIQTGVIPAGSFILIEAIDRLSRKGISHTQDILKKILQHDIKVAFVGEDAKTLQGQVLNKDSLNDLSSVIMVALAADLAHKESLRKSKLVRESKAIAREKAQNGVILPGKSMFWLDYDKEQRHYVLNDRATIAKEIIELRLLGHGPRKIAKILNERQIPGPTGKEWYQPSIKRIITSPVLYGAYQSHQVIEGNYIPVALVENYYPALIDYNLFSQIQFDNKHASKGRPSRVNPFGGVFYCECGNAICFKKSYSKTAKEDKNEYHYHYCIAAREGRCKNTKAIPNFTPILINLLDKLEIKSTSTKNIRTESIISKRNKIEQLNEMLLKLDSPPVSVIKTISNLEKELQTLLEQPEITAPKQEDIVVLSTIKDPLKYNMHLKRLVKRITVYQINGPKNLRIKVDKTDGHHQNFLIQNEKTIFKSDTERLKKLLAGFKDGF

SEQ ID NO: 17308 - protein, 506 aa, synthetic construct
MRTVITYLRFSSATQGAEGADSTRRQNELFKQWLRKNSDAQVVASFNDEGLSGYKGKHLSGQFGDMLSRIESGEFPEGTILLVEAIDRIGRLEHLETEALMNRIIAHGIEIHTLQDGLIYTRDALSDDLGISIIQRVKSYLAHQESKQKSFRVSEKWKQRAKLALAGKQRLTKMVPGWIDPDTLKLNEHAETVRLIFKLLLDGESLHNIARHLQSNDIKSFSRRKDANGFSVHSVRTVLRSESVIGTLPASQRNDRPAIPNYYEAAIDAATFNKAQEILDKNRKGRTPASDNPLTINIFKGLFRCQCGASVHPTGTKNKYAGVYRCNNNPDGRCDVPPLKRKPFDKWMIDNFLGMIDVGNDGEAEGKLASLQHEVEIVTARIKKATALLLEMDDIDELKIQLKELNQKRTELQTTIDNMRRKASLTDKELPQLKDIDLTTKAGRVECQLILSKHLKGLTLGKDSVTVTLQNDTEITIPTNPLPLNDGSPIFEIADKELLDIDAYQL

SEQ ID NO: 17309 - protein, 559 aa, synthetic construct
MKTKLYSYIRFSSMRQNDGSSYERQIRMAREVATKYDLELVNDYQDLGVSAFKGANSKTGALSRFLDAIGRSVPVGSWLFIENLDRLSRADIVSAQELFLSIIRRGITIVTGMDNKIYSLDTVTANPMDLMFSILLFIRGNEESQTKRNRTNSSALIKIKAHQENPQNPAVAIEEVGKNMWWTDTTSGYVLPHPVYFPVVQEIVELRKNGRSTAEILDHLNETYTPPPAVSNKKHSKWSRAMVERLFHTRALIGIKEVSVDGVNYELKDYYPRVIDDATFYHLKKNIGARAWNFGDKEEVKPIPLLSGIGLLKCDHCGCAMVKVKGTNKRSDQYRYTCDATRSRRLDCEHPNWSFRGDQLEKAVLQLLADKIWIAEDKANPVPALKVQVDEISRKIDNLITLSAMTGATKELADQITTLNSERETLYNQIKMAEEEMYSVDSQGWEKLAEFDLEDVYNEERLKVRFKIKQALKRIGCSRIDRNKNLFVLEYIDGKTQRVVIENSRGTRKGRIFIDLKTINDRQILESNGLVLHPCLDMLTDKNWKPEEEIPGPLQEFGI

SEQ ID NO: 17310 - protein, 506 aa, synthetic construct
MRHVITYLRYSSATQGAEGADSTRRQNELFKQWLRKNSDAQVVASFNDEGLSGYKGKHLSGQFGDMLSRIESGEFSKGTILLVEAIDRIGRLEHLETEALMNRIIAHGIEIHTLQDGLIYTRDALSDDLGISIIQRVKSYLAHQESKQKSFRVSEKWKQRAKLALAGEQRLTKMVPGWIDPETFKLNEHAETVRLIFKLLLDGESLHNIARHLQDNNISSFSRRKDANGFSVHSVRTILRSETTIGTLPASQRNDRPAIPNYYEAAIDAATFNKAQEILGKNRIGRTPASDNPLTINIFKGLFRCQCGTSVHPTGTKNKYQGVYRCNNHLDGRCDVPPLKRKPFDKWMIDNFLGMIDVGNDGEAEGKIASLQHEVEIVTTRIKKATALLLEMDDIDELKIQLKELNQKRTELQTTIDNMKRKTSLTDKELPQLKDIDLTTKAGRVECQLILSKHLKGLTLGKDTVTVTLQNDTEITIPTDPLPLNDGTSIFEIAEKELLDIDAYQL

SEQ ID NO: 17311 - protein, 559 aa, synthetic construct
MKTKLYSYIRFSSMKQADGSSYERQKRTAAEIAAKYDLELVTSYQDFGVSAFKGANSRTGALSRFLDEIGRSVPVGSWLVVENLDRISRQSIIEAQELFLSIIRRGITIVTGMDGKVYSKESVNANPIDLLLSVMLFARANEESQTKRNRTNSSALIKIKAHQENPQNPAVAIEEIGKNMWWTDTTSGYVCPDPVFFPIVQEVVELRRNGRSTAEILDHLNATYTPPPAASHKRHSNWSRAMIERLFHTRALIGIKEISVDGVKYELKDYYPRVLDDAEFYHLKKSIGVRACNYGDKEEAKPIPLLSGVNLLKCEHCGSAMVKVKGTNKRPNQYRYSCDAMRSSRIACVHTNWSFRGDQLEKAVLQLLADKIWIAEDKANPVPALKVQIDEISRKIDNLITLSAMTGATKELADQITTLNSERETLYNQIKMAEEEMYSVDSQGWEKLAEFDLEDVYNEDRIKVRFKIKQALKRIGCSRIDKYKNLFVLEYIDGKTQGVVIENSRGPRKGRIFVDLKTINDRQILESNGLVLHPCLDMLTDKNWKPEEEIPGPLQEFGI

SEQ ID NO: 17312 - protein, 557 aa, synthetic construct
MSKEKIKVYLYTRVSTSIQIEGYSLEAQKSRMKAFAIYNDYEIVGEYEDAGKSGKSIEGRIQFNRMMEDIKSGKDGVSFVLVFKLSRFARNAADVLSTLQIMQDYGVNLICVEDGIDSSKDAGKLMISVLSAVAEIERENIRIQTMEGRIQKAREGKWNGGFAPYGYKLEDGKLFINEEEAIAIRTIFDQYVNTTIGANGISKYLENHGIRKIPRQNGKNPLFDAGLIRKILKNPVYNGKIAFGRRTLEKVHGTRNEYKQVEQDEYLISEGIHEAIVSDEVWQAAQVKLKSQAKKYEHVNKGKDTRTHLLSEIVKCPICGVGMFGNKCIKKKKDGTKYKDFYYYGCKHRQMIRGHKCTFRKQIREELLDDAVAEVIVKIVSNPKFASMMQEKINMKVDTSEIETEIDNYQKELRKCHSTKFKLIEEIDNLDVEDKHYKRRKQDLDDRLYRMYDKIDELESSLIDAKAKKQTIEAEKLTGDNIYKVLIYFDKLYKVMNDVERRQLITALISEIQVYEEKQPNGQWLKSITFKLPIIEENLNIGLDNDEHVEMLSLLKK

SEQ ID NO: 17313 - protein, 472 aa, synthetic construct
MNTKRKVAIYSRVSTLHQAEEGYSIGQQIEALTKYCQAMGWVIYDNYSDGGFSGGKLERPAMQKMIQDAKSGKFDTVVVYKLDRLSRNVRDTLYLVKDVFNANNVDFVSLQENIDTKSAMGNLFITLLSAIAEFEREQIKERMQLGVKGRAKSGKTTSWTTPPFGYEYDTNTQLMTINHYQAEIVRDIFDKIISGWSIMGITTHLRKTNNKKWTHVRVKRILENVAYIGKVKYRDEIFDGEHAPILTEEIFYKAQKALEERTSKKDNTRPFQGLYMLSNIAKCGYCGTPLKIDSYKPRKDGTRKRTYTCINRNPKRIKTATYNDGKQCKESGRYDVKDVERYVLNEISKLQLNPKSIESLYIDKPEENITAHQERLKKLETKLSKLNDLYINELISMEALKQKSAELLKEKSSLETFINNNKRKINNKPAFEKVAKMDDVFKMSYDDQKKIVKTLIKRVEVKRDEINVIFKL

SEQ ID NO: 17314 - protein, 568 aa, synthetic construct
MTAQNNLAYSYVRWSSAEQSKGDSHRRQLAKFEDYCTRKGLTPAADSFIDKGRSGYKQEHLNDTGELRRFLNLVEDGTIAAGSTLIVEDLDRLGRQEVVAALGVFTMILTAGIRIVTLGDGEGEREYTADSGTIPLLISLLEMSRAHGESKRKSELVSAAFANKQHAARLYKAPMGNIAPLWLSLKHGWRSYEADGSAYEEIPARAAVVRLIFQWAIDGYGKDVIARKLNDEGHLPFKANTKWKEKGLKGWGSSSVDKVLKNRAVFGEYQPTTRKGTRDGKRMAAGDAISGYFPATVSVETFYEAQAAIDGRRTARATRQSPKFNVWGGIAKCEKCGNALHLVNKGIAPKGSTYLRCSNSRKGVCKARAVRLDQAEAVFRGMLLRLDTLALVKDSSANVEKSLRAAEGELVGAEKTLADLAERLMENASSKTFATAVRTAEGRVSALQSRVESLKAELASENSIGWTEFLSRLDLVSYEGRAKANALCKRLGVVVMIGASGYGVTKNGKPIFSMDFREGEAGYVMPAFGGALPAFLAVSDVPSDAEREDADQARYASLEDEGQATGEY

SEQ ID NO: 17315 - protein, 456 aa, synthetic construct
MIVAYVRQSTKKQQSIPTQKELIRKCAAKYDIDVGKINFYSDIGSGRNVNRTNYQRLIQEIKNNQVTTLLIYRISRIGRNLKNALDFVELLQKYQVKLVSVSDGYFDLSKAFDRMKLQLFLSFAENELENIRDNVSKAAREKARQGLLITTNAPFGYRYEDGNFFVHPEESKTVKRIFQLYCDGYGYKAISKLISEDTSYTSLTNVRVRNILLNKIYTGIVPSKYGEYQGHHQAIITQEIFEEAERIRLSKGIKRKPINTLLKRKIHCPYCNARLHSHKVKKNNKTYTMYVCRNHNVDYSGLNERCPFTSINADHIEDQVLYALKTFLKDKECAERIEQVVNKVIRIHKKDQKKISQANAKLITELAEGKISAQEFQSNYVSEEGSVQASKNFSRQKIKNIVSTHVSFIKLKDINHIIEKVIIDEKNNLTGLFITDYPLNIVPLKTKTNQLCQVNG

SEQ ID NO: 17316 - protein, 479 aa, synthetic construct
MSVRKSAGQRVGVGSAAIYARISSDVEGTGLGVARQLEDCRKLAADRGWPVGAEYVDNDVSAFSGKPRRQYARMLADLASGDRDAVIVYNLDRLHRRPVELEEFVTLCESVGVRDVATVTADIDLGNDDGLFMARIFAAFAAKESGRKSARIRRKMLQNAQAGLPHGSARPFGYEADKITVRESEAAVVREMVDRYLAGQSLRSLTIWLNESQVAPSVAASWQTTAVRQVLSSGRIAGLREHRGEVIGQAVWPAIITPVQRDRVLARMAARSVTKTRTARTYLLSGMLRCGRCGNRLYSQARHSNPQNRIRRYVCLKGPDHGGCGRLTVVAAPVEELLAEAVLARLDSPQLADVLAGKATADADVSALAAQVDADQERLDELAGLYADGAITAREWIAARDPITERITTARRDIAAATDTTAVFELAGTGGVLRTDWDGMDLGRQQAIVKAVLDHAVIAPGTPGARRLDIDRVAPVWRV

SEQ ID NO: 17317 - protein, 474 aa, synthetic construct
MIAALYIRVSTEEQAEHGFSIDAQKERLVAFSKSQGWENHKLYIDDGYTGTKMERPALKKMIRHIEEGKIHTVVVYKLDRLSRKQKDVLQLLEDVFEKNDVKFRSATEPFDTSTPFGKAMLGVLAVFAQLDRDMIIERTTTGRRTKVSQGDWYGGRVPFGYTWNKESKLLEIVPEEARIVKEIFNMYLQGHSRLSIAEWAASRTDERTIDHSTIRDMVARPIYAGNLINAGNINSGKHEAIIDQETWDRAQAETLKRKEGAATIGEYLLTGLLKCGICGGNIVHVKRVTKRKDKTYNYEFYACAQQHVRKKERKIDNCSLGYLHRANVEEFVINQIKEFEVFPNKIKQIIDSKNMIFDEQESDLDNLKEQLKKVNVSLENLYDAIQSGDIKASAVSDRIRKLEERRESLESDIDDLEYGSSKDIDESQTIELVSQISMAWDYFTEEEQKAAIRKLITSISLYPKDAEPNIDWAF

SEQ ID NO: 17318 - protein, 447 aa, synthetic construct
MNHPSSAAIYVRISLDREDEAGVTRQREDCQELATKLGWRVGQVYEDNSVSAYKRKVRPEWQSMLDDLRSGIRDGVIFYDLDRIARQPRDLEDLIDVIELKKIPNKVVTGDVNLSDDNGLFMARLLVNVGNKASKDTGRRVARAALQRAQQGKPQKAVTRPFGYTHDYKIIESEAKLIREAYERVIAGESLTSILKDWQQIPTVEGKRWHRQTVKKILQAPRNAAIRTYRGEEVAVGNWEPIVSREVWQAAQDVFNARTQPMPDTTSVYLLSRIARCGKCGSPMYGRAQNKTRKASYTCMSALGGCGGINRQMKPVDEYISGLIKRQMAKGKPVAPPVDDHAAEIAEIETRISDLRQAWTDKQIDLSDFIAMRDAETQKLKSFERAKAQASATQISDTFAENFDDANLSQQRALIKRYLTAVVIHPAVRGARKVDFDAIEPIWKKII

SEQ ID NO: 17319 - protein, 571 aa, synthetic construct
MTTIADDPAASLIDPPRTAAVAVSYLRVSTREQAEKGGTDEGFSIPAQREATRRKAEQLGAGIVEEFVDAGASAKSSDRPELMRMIQYVKANKVAYCIVHKVDRLARNRADDVSIHLALQQCGVMLVSASENIDETPSGMLLHGIMSTIAEFYSRNLATEVTKGMTQKAIGGGTNGRAPIGYLNVRKRDEMGRELRTIELDPERAPMIEWAFKAYASGNWSVSQLHDELTSRGLRSLPTPKRPAKPLAVSTIHRLLTNPYYKGDVIYRGTRYKGNHPALVPAEVWYQVQSVLTAHQCAVEATQVHGHYLKGTIHCGQCGSRLIVSNAKNRHGNVYCYFVCSGRHSKRTDCTRQAMLIEDVEKLVEDYYTRVQITPAQQDALAGMLHHEFDRLMAAETEELERLTTNRNRLESEQDRLMQAHYADAIPLSVLKREQDRIVAELDQVTRRIDTHFGDYADARAHLDDALGLLANCADIYARCDDTNRRLCNQAFFTKVFIDEDNELRVEHNRPFEMLLDPQVNANALTWAADMNKARTSANVSIGKGSSLVRAVEPRGIEPLTFSLRTKRSTN

SEQ ID NO: 17320 - protein, 540 aa, synthetic construct
MKQPYNTTIYNTALYLRLSRDDELQGESGSIQTQRMMLRQYAAEHGLTVVDEYIDDGWSGTNFERPSFQRMIDDIEDGKINCVVTKDLSRLGRNYILTGQYTEIYFPSKGVRYIAINDNVDTINGESELAPFLNILNEMHARQTSKKVKAAMRTRFANGAHYGAYAPLGYVKDPDKKGHLLIDPETRWIVEKIFDLAVHGRGAASITRILVEEKVPTPGWLNYERYGTFANIYAGVPAEKAYAWTIAQVKSILKEETYIGHSVHNKQSNISFKNKKKVRKPQEEWYRVENTHEAIISEEVFQKVQELIASRRRKRRNGTTQIFAGLIKCADCGWSLAYGENKQNKNPYGYYHCSKNGQGLRQCSMHYIRYDVLYAYVLARLQYWSMLAQKDEDKLLKRLLNASDRERNSAKKKQAAELKKAEKRKAEVDGLFAKMYEDWSAGRITEYNFNMLSEKYQNEQKELETKIRQLHETMEAAVQTAADAEKWIALMKQYVNPVELTAELLNTLIEKITVHEAVKGEDGSREQEVEIYYRFIGKID

SEQ ID NO: 17321 - protein, 502 aa, synthetic construct
MELQNRIQRVAIYLRKSRNKEGEETEETLRKHRKRLIDIANKNKWDYELFQEVGNSMNENRPEYQKLLSKLSEGIFDAVLSVNLARVTRDDAETPKFMSLLRQEDILFITDSERIYDLEVQEDWQALKFTGFVNNWEYENIKAQLRKGKKDSAKMGRWSNGVPNYGLVYNRFDRSLEIDQQKADAVKLAFQLVIDGLGVDRVAKELNRLGYKTNRGRYFSGNAINRMIRAEIYKSVLISNRLKGRNLHEGKLRPKDQWIIAENAAPPIIDEETWKMANEALDQRKLLSPRGKQKKHPLSNLIKCGLCGRTQTVSRRRDRNDALAIQPCNKTDPLGKSKCNNRGIKHDTMISLVIEAINEKYQEISSELIKFEEDTEANDIKSIKINKLQEQINKSKKALNILQIQLEEELINISSFKERRKIRQVELNNLEKELTELLEETKEDALKSKKSFANKLDFFLENWHTIDGADLNHELMSFINKIIWYAPRDSELPPQLKFEWRV

SEQ ID NO: 17322 - protein, 556 aa, synthetic construct
MALAFSYARISSKKQLGGDGLRRQIEAAEKYALEHGLDIDTSLSDVASGFHQDHVKFGALGGFLELVKAGKITVGSVLIVESLDRLSRADVLTAQSQLIDIIRSGIDVVTLADKYRYSRNNDFSQLIFSLMSMARAYDESQVKSVRGKAYLAQLHEDVKAGRKARVHHLPSWLEQTQIGTSKEYEFTLRESASTVQKIFELYEKGYGIAKIAIWLNDNGVLTLQESRRPNPDHTKIWRRKAVGEILNSVAVRGDLVIGDTIVEGYYPAAVDPVTWWRVNDRYNNKSTKATNGRTGLGYTNLFSGISKCFHCGGPARVIGGGSGHRYITCEKIKETGELCTGKGKYGKTSLRYDILEKAILDNVATYCHLPETPTVSSDDLKRQVIEIQTGIADIDRRISNIIAMSEMADHPDDKTDLMTRLKALRSDKSRQTAEVERVTSEIRSLETVREDFTTLHQTIEDERAKWDTLSGDDLFQSRSLVNSKLREIVSVVSIDAVDQSAYVSVAGATRIWEINAKGEVTRSTDFSNLSEEALLKMASGVGLKTSHEAIQRVKRI

SEQ ID NO: 17323 - protein, 547 aa, synthetic construct
MPVAFSYVRYSSLRQAHGDSLRRQTAMVAEWLKHHPEYVLSADDAYQDLGRSGFSGAHLDNAFGRLRAAVSTGIIKPGDCILIEAIDRAGRLAPSIMLNLLTEIVNAGVSLISLDDGITYDSDPYKSNNLFLLVAKVQQAYQYSDALSRRVKSAYERKREAARAGGATGRRAPIWIKTEYPNGKKAQPVVSLREDLAPLVAQAFQDYADGLGERRIHHRLRDQHPELAKLSTTSLKRWMRNPTAIGHWNDIPDVYPAVVSKELWYRVQKRLNQKSKPKSAASNHLLVGLVKCAKCRANFHIHITPDNAAMKCGQRHRLGDQGCSNKKSLPMAVLDFIRSQTTFKALQRASLSRNLTASEKRALEIEGELAELNRQAATAAEGAVKYGMSAFGPALDRITAQIGVLEDEKLTLVSKAAPSTEGEMIELQEELLDVDEMRLNALLQEAEYVMWCDDRTITVDEPSIEFSADRQVITYLGKDRVKGVFRITWNGARIDLPDLLSAPQRAELEQHMVQEARYKSGELERTVMRFNSDTGDMDHVSGPPLKS

SEQ ID NO: 17324 - protein, 563 aa, synthetic construct
MSKVFSYIRFSSAKQSAGDSYARQVKAAKAFCDENGLEMADPREYLFFDKGRSAFKGKHLDDTGELARFLSYVEDGTIPPGSYLVVESLDRLSREKVRDALPRFLDLLAKGINVYTSVDKRLYTKDYNELDLIISIISMSRAHEESAVKGGRVSSAWREKQKAARTTGKPLGKLRPLWLDVTPDGYVLNPDKAAVVRRIFDLSTKGHGSRIIAATLNQEGIPAFSAGRKNFSGLWGFSTVRHILDSRTTLGEYQPHIFTDGKRTPDGDPIKDYFPSVVTEDEFYLAQAARTSRKTHSVTKATTNFNVLAGILNCYKCGSAMHLQGQRGRKYYKCSKTTRGLCDAGIISAPRTEQVFKEILTKVDSLSLVQDSSGSLQKSLQIVEGRIASLKARQDDAEASHAEFPSRITAKLLHELEADIGALESERTAIAEQLASDKVMSKHDFFEKLDLVSFEGRVAANNLIKRLGLFIFASKNGRTDETYWVSKNNAIPLPFSAETPNLLFYLMHRGKEIQFEAMYDEYVDLQLTQGDLNEVEAAFAKTESWDSLPPHMLAMWKARHIIK

SEQ ID NO: 17325 - protein, 547 aa, synthetic construct
MPRLISYVRMSTSEQLKGFSLERQRNLIADFARKNGLSLEDSHILEDIGRSSFSDDTEQKELTKFFEDLEKDKFQPGDVFALENIDRLTRRGPIDALMKVNQIISKGLKLAIISDKEQRILEEIDVFSIITLSIDASRANKESQVKSDKGLQNWAFKRELAATHKIAMTAQAPAWIDTETYYIMDETKNKQVKRRRYVLNEDKAKTVRLIFELFQNGNGSLKIKNILNEQNIPTFKGIEYWEPSTISKIIRNPATYGMYQPKKQNTGKRDLVAIGEPIENYFPAVISKEIFDQCQQITATNTTRKGRRGKLFTNLFTGLLKCADCDGPIHLLNPGIDKRAKNPKPVNYLICKKGKFTKECITKRLRYEDFENVMLKAIQEINLADVLHENNPLENLIKQQRNLQADIEKKKKLLENFERNFIENDGDLPSFMIAQAKQAEIDIKSLDSEIKSIRLEISQLNVYNSNIDNAIDELKVNGTYEARSKINLILHEIIKHIVIDFELDDYGVMFKNGAKRFINNGIIQNVFRTENTKQRDDEINEILNHKN

SEQ ID NO: 17326 - protein, 507 aa, synthetic construct
MKRVISYIRFSSEKQAKGDSLRRQSKMVTDWLKAHPEYYLDQDLSFRDLGVSGFTGKHLKGGLGDFLTAIEKGLVKAGDTLLIESLDRLSRQDIDIASELLRRILRAGVDVVTLSDGEHYTSESLKDPLALIKSILIMQRAHEESLRKAERIQAAWDAKKEAAKAGIKVSKRCPAWLKLNDDRKTFSVIPEKVETVRRCFQLRLEGKSIWAIVKALNDEGHQSMSQYKPGKFGQTSVQDLLKNRSVIGYFTPKGCEEISGYYPAIIDETTFYKVQQLSYARYGRKPASDKPLSVNLFKGVIRCSECGHALIITGFSDTRSGIYRCPLRNENRCSAKGLSRKQTDGTLLALLSRLDRFDSDMTNTVDTLKLHREHISSNIEKLVQLSLEIEDLSAITSKLRQLKNELSQVDADIEKETQRLKSIDVGCLSDCDLTTKAGRIEAQLIIKSAVKEVVLNTAKRRCKVTFHNGKVIDLPITENPSEDVTEAIQSLSEVTERGLIDVDEVII

SEQ ID NO: 17327 - protein, 583 aa, synthetic construct
MRTAYAYLRFSTPEQILGDSVRRQTSLTTDWCERNGVHLDKSLSFEDLGVSAFKGKHVEEGALGVFFKLVGEGKIKRGSYLVIEALDRFSRENPFAAAGRLFDLIKLGITVVTADDGREYSEETLGGGDIGPMVLLMIKLSQSHAESVRKSQRIGPAWKNKKDLARSEGIPLTSRCPEWLELRDGRFHPRKERVDIVKRIFQETIDGFGRRAIVARLNGEPIEPFKAGQKWKNPDRVGGWQTSSVARILNNRAVLGEYQPHTGKAGNRVAYGEPIANYYPKVIDEAIFWRAQSAMRERRQQSSGRRGDKGAHLLRGLARCSNCRSPMHIINKGPPPKGGIYLSCSANRRNTGCENDKSWRVDQLEEALLLCLTSFKTRSFLTEKDETSRDAEGIDAMKGELGELESRADNLLGMVERGDKRAETRYLELSAEIEKRKAAIEGAEKELGMRQSDPGDEARLAEILKLSTDIFTLTGPERLEARTRLSSLIRRMVHLIECDPDRGPYAVLAIDTKLWHITRPTEGAFAYQIDLPAWGVEEPPPRLLFLLAKNPSADARDAFFRKRGGYLLSPEGSKSFFPERAKS

SEQ ID NO: 17328 - protein, 689 aa, synthetic construct
MTSNNLLPATVLKRKAVVYVRQSTPGQVQNNLESQRRQYELVDVARRWGFRDVDVIDDDLGRTASGAVDRPGFERLVSGLCTGKIGAVLCLDASRLSRNGRDWHHLLELCGLVEARVIDLDGVYDPCRPNDRLLLGMKGSISEFELGILRTRMLDAARAKARRGELRLSVPIGYIWHRDYGLGYDPDLRVQEAIRLIFARFRELGSARQVLISLTADNFHFPRPSDGRKTVSFDWVPIRYRSVISILKNPFYAGVYVYGKSEKRTEIVDGRARKSYGHSKPFATWDVLLQDHHEGYIDWDEFERNQRLIAVNAFGQKGGIKSGRGGRALLAGLLTCGRCGRRLGVVYSGRPPGHPYYRCERINQMLAKPRCMTFGASRIDPAIGKEILRAVTPIAIEAAMEADRMHRDNLEERHRMAELDLQQARYEASLAERRYAACDPDNRLIAAQLEKSWEAALRRVEKCEAVLIQGRQAEQATPIPDFAGISTDLETAWRAPNVDMRCRQQLLRTLVSDIIADVDEEKREVLLTIHWKGGQHSQLRIRKPNAGEHGQSTPEAALAVMRSMATRWSDADIAATLNRMGMQTGQGKTWTARRVGALRTVHKIHGYRSAEKNGEWLTLTEAAKKLGVSAHRVRRLIKEGVLPTEQVVPDAPHQIRASDLEKDEVTQFPRHRGPCRIKMENQKSLFPGI

SEQ ID NO: 17329 - protein, 658 aa, synthetic construct
MDPTNEATSMDNSQPNPTRKVLYKYIRFSSIQQSKGSSFARQNARLEKYAQENGFEIDDSLDLRDFAKSGFHGINKEIDQGLGRFILAIEKGLIPTDGSAYLAVEQFDRISREDIDKAQDLFKSILRKNVNIITLMDGRIYTKKSLSNFMEVLYSLFLMEQAHQESLKKSDRIKGAYTNKIKKLKELNKEQKAILAEWEKNKEGKKPEFEPLINQVQYSSQIPYWIDQKTEVISGRKFIKFIINEEKASVIRYALSLLNDDNGYMNVAARLNKEGIPRIDYAANKKRSTRKDIWTNRAVNEFVNSDAIYGDLAIYENFYADKEFEYEGTKVSKKVGKRIHIENIPNYYPAVVDKKLIMGLRARANAKKKGRIAGRTTNNNLFQNLLFCGKCGDSMHLIQSKRETKKGTYQRFYLTCYSARHKACDAKMISYTELEREIVKYLVMPFNESKMSGTSKVISDSRNEKLLELEGEIKAIEDQIEAYKAEMKNNKNIKPSIALTFLSELETDKDYKTHQLKELQLQKDQTIESIESENVSNFDIEKEEGRIAFKVAVKQRYAGFFVFTEDQVVMVVKKTGSAGFFKIEVRNRRNKLINPERTADTFKLFQEKLNHIRNLSKTYKEGKLYNIIKAYKINDIEIFEEEYINRGLPQPISYNRFE

SEQ ID NO: 17330 - protein, 552 aa, synthetic construct
MARLISYLRMSTSEQLKGFSLERQRKLIADFAAKNGLSLDESHSIEDIGRSSFSDDAEQKQLARFFEDLDAGKFSPGDVFALENIDRLTRRGAIDALLKVNTILSKGLKLAIISDREQRILEEIDVFSIITLSIDAARSHSESKNKSDKGLLNWEEKRNLAATQKIAMTAQAPAWLDTETFYVMDESKGKQIKRRRYVLNPEKAGTVKLIFELFQNGNGSLKIKNILNDRKIPTFKGAEYWEPSVISKILRNPATHGFYQPQKQRTGKRDLVPAGDPIEDYFPAIVSRETFEQCQRITAANSTRKGRKGKVFTNLFTGLLRCVDCGGPVHLLNPGIDKRAKVPKSVNYIVCKKGKFTRECILKRLRYDDFEAAMLKAIQEINLADVLNENNPLEQLIKQIRAIETRIEKNNTMLENFRLAFRESGTLPSFMIEEANNAENDNKALEIERTELQAQMAQLNVYNTNIENAIEELKTSGTYETRAKINLVLHEIIKTINIDFELVDFAIIFKNGVKRFVNDGIVQNVFTTKTGSDQYYSEIEEILNHTNTPPEK

SEQ ID NO: 17331 - protein, 521 aa, synthetic construct
MKKVITIEPAKQVTHKVELPRFTKRRVAGYARVSTDHEDQTTSYEAQMTYYTDYINSRSDWEFVKMYSDEGISGTNTKKRLGFQEMVEDALDGKIDLILTKSVSRFARNTVDSLSTVRKLKEAGVEIYFEKENIWTFDSKGELLITIMSSLAQEESRSISENVTWGRRRQLAKGQVTFSYSQVLGFKKSDTGGFEIDHEEAKIVRYIFHQVLLGNNPNKIARELTAQGIPTPQGKRQWSYGTVKRMLRNEKYKGDALLQKSFTTDFLTKSTKLNEGELPQYYVENNHEAIIKREVFDLVQVELDKLERKRQTSNIFTGRLFCGDCGSAFGSKVWHSTSKYKRTIYQCNAKYKGEHKCQTPHVTEEEIKGWFLSAINQLLSNRDEIIANTELLIDMAKDTSSLEARLDDLEHHLETIRQDIEDLVDRNARKAQNQDLYQEQYNTLVTAYQEKQKELQETRSVLEEQKSKQLSLDGFIQNFKEQDDLITDFNQELWQTSVERLDIKEDKKIFLTFKNGLRIDL

SEQ ID NO: 17332 - protein, 453 aa, synthetic construct
MEEAIAYVRQSTLKQQSLATQKSLIMDTAKQYGWSNVTFYDDKKTGRHTKRSGYQRMVEAIRSGRCKVLCCYRLNRLHRNLKNAIQLFEICKTHHITIISVNDGYFNLAKEFDCFRLNILMSLAEMESNNISEQTRNGIREKAKQGKLITTHAPFGYRYRQSHFIVHEEEAHTVKAVYRWYLQGLGYKKISQHLDNNPNLIPRKPYQVRNILLNPNYCGRVINKYGTFNDIVPPIIDVDTFEEAQERRIHKQHNRSNSRNKLKRRIKCPYCQSTLTNLTIKKEKHSLRYYVCPKNMNEAYHTCPFKGINAQEFESKVLNTCKAYCDNQSFHDKLNETVLNVLKHQQMKHRQSHLTQEQLIEKLAQNQIDVATFKRLSADSESEEHSSNYSSSQIAQVIRHITKDKLTLETIVPLIDNIIITQTKQLQGIYFKNSPLNIVEQSYLITPERNEVI

SEQ ID NO: 17333 - protein, 562 aa, synthetic construct
MKQLKKKRIGLYARVSTEIQTNGYSIQSQLNQLKEYCQFQGYEVVDEYTDCGISGKTTQRPELQRMLKDANDGKLDCIMVYKTNRLARNTSDLLTIVEELYKINVEFFSLTEKIEIASSTGKLMLQILASFAEFERNTIIENVYNGQRQRAIEGYYQGNLPLGYDKVPDSKKELMINQHEANIVKYIFESYAKGHGYRKIANALNHKGYVTKKAKPFSISSITYIISNPFYIGKIQFAKYRHWSDKKRKGLNEEPIIADGKHAPIIDKALRDKVQFKRQESRKKPQVHGKGTNLLTGIVKCPKCGAAMAASNTTNTLKDGTKKRIRYYSCSNFRNKGSKVCSANSVRADVLEKYVMDQILEIIKSKKVLKQLVEKVNERSQIDVSSLNHDIAYKQSQCEEIKAKMHTLTKTIEDSPDLDSVLKPTILSYQDELNQINNQIHQLEQDKQAESPHYDADMIANVLQAIFKDIDKLEKSQLKSLYLTIIDRIDIRKDEHHKKQFYVTLKLNNEIIKQLFNNHPLGSGTEIIFSQNLFRCPTPARMTRFEKSLIQAHFQISQLLTK

SEQ ID NO: 17334 - protein, 481 aa, synthetic construct
MITTNKVAIYVRVSTTNQVEEGYSIDEQKAKLSSYCDIKDWSVYKIYTDGGFSGSNTDRPALEGLIKDAKKRKFDTVLVYKLDRLSRSQKDTLYLIEDIFIKNNIAFLSLQENFDTSTPFGKAMIGLLSVFAQLEREQIKERMQLGKIGRAKAGKSMMWAKTSYGYDYHRETGTITINPAQALAVKFIFESYLRGRSITKLRDDLNEKYPKHVPWSYRAVRTILDNPVYCGFNQYKGEIYPGNHESIISKEEYDKTQSELKIRQRTAAENVNPRPFQAKYILSGIAQCGYCGAPLKIMLGVKRKDGSRLKKYECHQRHPRTLRGVTTYNDNKKCDSGFYYKDKLEAYVLTEISKLQDNAGYLDKIFSGDNAETIDRESYKKQIEELSKKLSRLNDLYIDDRITLEELQSKSAEFISMRGTLETELENDPALRKNKRKADMRKLLNAEKIFSMDYEGQKVLVRGLINKVQVTAEDIVINWKI

SEQ ID NO: 17335 - protein, 559 aa, synthetic construct
MSKEKIKVYLYTRVSTSIQIEGYSLEAQKSRMKAFAIYNDYEIVGEYEDAGKSGKSIEGRIQFNRMMEDIKSGKDGVSFVLVFKLSRFARNAADVLSTLQIMQDYGVNLICVEDGIDSSKDAGKLMISVLSAVAEIERENIRIQTMEGRIQKAREGKWNGGFAPYGYKLEDGKLFINEEEAVAIRTIFDQYVNTTIGANGISKYLENHGIRKIPRQNGKNPLFDAGLIRKILKNPVYNGKIAFGRRTLEKVHGTRNEYKQVEQDEYLISEGIHEAIVSDEVWQAAQVKLKSQAKKYEHVNKGKDTRTHLLSGIVKCPICGVGMFGNKCIKKKKDGTKYKDFYYYGCNHRQMIRGHKCTFSKQIREELLDDAVAEVIVKIVSNPKFASMMQEKINMKVDTSEIEKEIDNYQKELRKSHSTKFKLIEEIDNLDVEDKHYKRRKQDLDDRLYRMYDKVDELESSLIDAKAKKQTIEAEKLTGDNIYKVLIYFDKLYKVMNDVERRQLISALISEIQVYEEKQSNGQWLKSITFKLPIIEENLNIGLDNDEQVECVSLLEKRS

SEQ ID NO: 17336 - protein, 557 aa, synthetic construct
MKRKKAYIYTRVSTNMQVEGFSLDAQETRIHQYANAFDIEIVKTYQDAGKSGKTMLGRTEFMAMISDIEAEKDKVDYVLVFKLSRFGRNAADTLKSLAIMESHGVNLICVDDGLDSSKDSGKLVITILSAVAEMERENIISQAMEGRRQKARAGQWNGGFAPVGYSLVNGQLQVNQEEAESVKMIFDLFANSDMGTIAIAKHLANLDIKKPIRHNSTLPYFSSSGIARILDNPVYNGKIAFGRRESTRDKISGETKVTQSENYILTDGIHEAIIDDEIWNKVRKKREANAHKYKRENPSKGDSIYILSGLIKCPLCHAGLYGNKSIKRNKNKKDEYYKNYYYYACKHRKHVDGHKCTFNKQLKTGNLDHEVLSIISKLVSRPDFARKLQEKINIQVDTSRIDSEIEQYKSLFRQLNATKLNLIQQIDSLNFEDPHFQQKSIDLDMRLNTIYDKIADVEILIETSESKREVILKDKMTADNIYKILVNFASFMDVMEDIDKKRLCQMLIEKVEIYDDKNKAGRWVKAIHFKLPIIEEDLEISLDNSTPVEAVVKLSKK

SEQ ID NO: 17337 - protein, 413 aa, synthetic construct
MSVKKIRVNRQKHRKRVCAYIRVSTTNGSQLDSLENQKQYFEKLYSNRDDIDFIGVYHDRGISGSKDNRPNFQAMIEDCRRGKIDVIHTKSIARFARNTVTVLEISRELKAIGVDIFFEEQNIHTLSSEGEVMLSVLASIAEDELRSMSGNQRWAFQKKFQRGELVINTKRFLGYDVDENGELIINPEEALIVREIFALYLAGNGTHRIAKQLNEKGVATVTGAKWHDTTIRQMLRNEKYKGSVILQKYFHDGVNGPKKLNQGELEQYLIEDNHEAIISKEDWQSVHDKLTSRRWQQGRNKTYKFTGLLKCQHCGSTLKRQVSYKKKIVWCCSKYIKEGKVACQGMRVPEVDISNWEITSPVTVIERDGNGEKYYSYSGQESADQCSSSGQEENQGSRILSSVHRPRRTAIKL

SEQ ID NO: 17338 - protein, 430 aa, synthetic construct
MSTDQDEQLSSYENQVNYYREYISKHEDYELVDIYADEGISATNTKKRDAFNRLIQDCRAGKVDRILVKSISRFARNTLDCIKYVRELKELGVGVTFEKENIDSLDSKGEVLLTILSSLAQDESRSISENATWGIRKKFERGEVRVNTTKFMGYDKGDNGRLIINPQQAETVKFIYEKFLDGYSPESIAKYLNGNEIPGWTGKANWYPSAIQKMLQNEKYKGDALLQKTFTVDFLTKKRVQNDGQVDQYYVENSHEAIIDKDIWELVQLELARRKAYREEHQLKSYIMQNDDNPFTTKVFCKECGSAFGRKNWTTSRGKRKVWQCNNRYRVKGQIGCQNNHIDEETLGKAVVMAVELLSENVDLLHGKWNKILEEKRPLEKHYCTKLAEMINKPSWEFDSYEMCQVLDSITISEDGQISVKFLEETEVDL

SEQ ID NO: 17339 - protein, 430 aa, synthetic construct
MSTDQDEQLSSYENQVNYYRDYISKHEDYELVDIYADEGISATNTKKRDAFNRLIQDCRAGKVDRILVKSISRFARNTLDCIKYVRELKELGVGVTFEKENIDSLDSKGEVLLTILSSLAQDESRSISENATWGIRKKFERGEVRVNTTKFMGYDKDENGRLIINPQQAETVKFIYEKFLGGYSPESIAKYLNGNEIPGWTGKANWYPSAIQKMLQNEKYKGDALLQKTFTVDFLTKKRVQNDGQVDQYYVENSHEAIIEKDTWELVQLELARRRAYREEHQLKSYIMQNDDNPFTTKVFCKECGSAFGRKNWTTSRGKRKVWQCNNRYRVKGQIGCLNNHIDEETLEKAVVMAVELLSENVDLLHGKWNKILEENRPLEKHYSTMLADIINKPSWEFNSYEMCQVVDSITIAEDGEITVRLLEGTEVDL

SEQ ID NO: 17340 - protein, 413 aa, synthetic construct
MSVKKIRVNKQKNKQRICAYIRVSTTNGSQLESLENQKQYFINLYSNRDDIDFVGVYHDRGISGSKDNRPNFQAMIENCRKGMIDVIHTKSIARFARNTVTVLEISRELKAIGVDIFFEEQNIHTLSSEGEVMLSVLASIAEDELRSMSGNQRWAFQKKFQRGELVINTKRFLGYDLDENGELIINPEEALIVRQIFALYLEGYGTHRIAKQLNEKGVATVTGAKWHDTTIRQMLSNEKYKGSVLLQKYFHDGVNGPKKLNQGELEQYLIEDNHEAIISMEDWQAVQVKLNSRRWQQGRNKTYKFTGLLKCQHCGSTLKRQVSYKKKIVWCCSKYIKEGKAACQGMRVPEVDISNWTVTSPVKVIERDRDGEKYYSYSGQESADQRSTSGQKESQCSRILPSVHRPRRTAIKL

SEQ ID NO: 17341 - protein, 430 aa, synthetic construct
MSTDQEEQLSSYENQVNYYREFISKHEDYELVDIYADEGISATNTKKRDAFNRLIQDCRAGKVDRILVKSISRFARNTLDCIKYVRELKELGVGVTFEKENIDSLDSKGEVLLTILSSLAQDESRSISENATWGIRKKFERGEVRVNTTKFMGYDKDENGRLIINPGQAETVKFIYEKFLEGYSPESIAKYLNDNEIPGWTGKANWYPSAVQKMLQNEKYKGDALLQKTYTVDFLTKKRIANDGQVNQYYVEDNHEGIIDEETWETVQLEMARRKTYREEHQLKSYIMQSEDNPFITKVFCGACGSAFGRKNWATSQGKRKVWQCNNRYRIKGVEGCYSSHLDEATLEQIFIKSLELLSENVDLLDGKLEKILAEKRLLDKHYSMALSDLLRQEQTAFTPSDMCRVLDHIRIGLDGEISVRFLEGTEVDL

SEQ ID NO: 17342 - protein, 413 aa, synthetic construct
MSVKKIRVNRQKHRKRVCAYIRVSTTNGSQLDSLENQKQYFENLYSNRDDIDFIGVYHDRGISGSKDNRPNFQAMIEDCRRGKIDVIHTKSIARFARNTVTVLEISRELKAIGVDIFFEEQNIHTLSSEGEVMLSVLASIAEDELRSMSGNQRWAFQKKFQRGELVINTKRFLGYDVDENGELIINPEEAVIVKEIFSLYLEGNGTHRIAKQLNEKGVATVTGAKWHDTTIRQMLRNEKYKGSVILQKYFHDGVNGPKKLNQGELEQYLIEDNHEAIISKEDWQRVQDKLNSRRWQQGRNKTYKFTGLLKCQHCSSTLKRQVSYKNKIVWCCSKYIKEGKVACRGMRVPEVDISNWEITSPVTVIERDRDGEKYYSYSGQESSDQCSSSGQEENQGSRLLSSVHRPRRTAIKL

SEQ ID NO: 17343 - protein, 627 aa, synthetic construct
MAGIRTENKIYEVGIYCRLSKDDGTDNESASIATQKSILTDYVKRQGWHLAKTYVDDGYSGTNFQRPSFQNMIKDIENGLINCVITKDLSRLGRNYLDCGLYLEVFFPEHNVRYIAVNDGVDTLNKSAMDITPFRNILNEMYSADVSVKIKSAYRARFQQGKFMGTTAPYGYVKDPADHNHLLIDDKVAHVVREIFDLALAGNGIAKIRKHINKQHILRPAAYAVEQGATGYERYFEDNEENRYIWSENSVRGILRSPIYAGNLAGYKRIAANMKSKKRPSKLPEEWEVIPDTHEGIVTQEEFDTVQQLMTSRRREQNAGGFENIFSGVIKCADCGYAMRAASANRRKRPDIIDCVQYTCNNYGRYGNVMCTAHSIEVRDLFNAVLADINRFADMAVNDEKAVRAIERRLTETDQSRAKSLEKEKKKLNKRLAELDRLFSSLYEDKVMERITERNFEMMSGKYQKEQLEIEARLKEVTETLNDSYEKSQGVRDFLSLIRNYQGLKELDATIINALIDKILVSEREKLADGTVRQEIKIYYKFIGFVGELHITPTKRWTALKPKNCTVCGVEYVPSSGISKYCPACAKRIQREKSNESKRRSRERNRRACIELSAKNDRLTLSSEMDD

SEQ ID NO: 17344 - protein, 480 aa, synthetic construct
MQTINKVAIYVRVSTTNQAEEGYSIDEQKDKLKSYCQIKDWNVYKVYTDGGFSGSNTERPALEKLIKDAKNKKFDTVLVYKLDRLSRSQKDTLYLIEEIFIKNGIEFLSLQENFDTSTPFGKAMIGLLAVFAQLEREQIKERMQLGKLGRAKSGKSMMWARTSYGYDYHRDTGAMTINELEAIAIRDIFESYLNGMSVTKIRDMLNDKYPKTPNWHYRIVRGILANPVYCGYNQYKGHVFPGNHEPIITEEDFNKTQEELKIRQQTALEKFNPRPFRAKYMLSGIAQCGYCGAPLSITLGTIRKDGTRNIRYQCKNRFPRATKGVTVYNGNKKCDSGFYEKSDIEQYVIEQICKLQHDKKYVEELFADNGPSVDRVACQKQIDLLTNKISRLNDLYIDDRITLEELQTKSSEFSSQRAILEEELENDPALKRKKREAEMKKILKTDDILGMGYERQKTIVRSLINKVRVTVDKIVIKWKI

SEQ ID NO: 17345 - protein, 457 aa, synthetic construct
MRVACYDRTSVYEEAKISNDAQYDAVKEYVLEKYEQIPQRFSDKGESGGKADRPAFRQLRAWVCASEEEGVIYVWRYDRLARQAKIALEFIELCQQHQVQVYSISEPLPASFSHTSTNKLFVQLLFTFAEQQRNVIIENVRAGLAYKKQQRQYLSSAVPYGYRLVNGKIQQEAHEAKVVRYIFQLYLTKKYGYKKLCQRLTQQKFFFRERPFQPYHIYSILKNPLYYGEIKGGSLGKYLGTFEPILSKTIFLQAQEIRQSRRTAKKDTYPYLLRQKIKCPFCGRHLSSKYQWNTKKTKTLHYYHCTDRSCQGIFLRAERVESEVLEKIQAFFQHEGVYQALIAQLTQQLAEKRKDEKHKVIQQKKQEAQWIKAFEEGNCSLEELKQQLQALQKPRSTSSFLSLQQCEAKVKEWLQLKDLSSRQLLCDHVCRIEVTKKKTVCGIYFRQLTQNILEGNE

SEQ ID NO: 17346 - protein, 545 aa, synthetic construct
METTPAKRVALYIRVSTQEQALEGHSIQAQEQNGRQFAERMGYEVVEVYADEGISGKSTKNRFAYQRMMNDARNHRFDLLVIWKLTRLGRNMLDVLQTVEELLRYDVGLHSISEQFDVTTSTGKLMLQLLGSFGEFERNQIAENVQMSMQSLVKDKKRYAGGRRLGYVSGIDANGQKQLVIEPEEAKIVRLIYAKYLGGAGYRAIANFLNRQGYQTVKKNAFSTTAVKDILRNKIYAGYLEYARYINWETKRRKGKNPKPILVKGTHEPIISEADYQKVQERLALEGKQPKWNHIGENVLTGLLRCPECGSPMAASNVTNTLKDGTKKRIRYYSCSVFRNKGASVCHANSIRAEQAETFVADRLKEIVQLPEVLPRLVVALNEEIVRQSQPLEQELVVLLERKEELKTKIEKWEAALEDSPELFPMLKDRLDELTEKRRQLHIRENEILGIFQQQGEPIQVKDVQRILTSLDHFLVQSEKKQVKALYRTFIEKITFDPNHKEILEITMKFTPAVVQQLNEQYQIAVSKTKDTAIFVLKTPFMLTI

SEQ ID NO: 17347 - protein, 457 aa, synthetic construct
MRVACYDRTSVYEEAKISNDAQYDAVKEYVLEKYEQIPQRFSDKGESGGQADRPAFRQLRAWVCASEEEGVIYVWRYDRLARQAKIALEFIELCQQHQVQVYSISEPLPASFSHASTNKLFVQLLFTFAEQQRNVIIENVRAGLAYKKQQGQYLSSAVPYGYRLVNGKIQQEAHEAKVVCRIFQLYLTKKYGYKKLCQRLTQQKIFFRERPFQPYHIYSILKNPLYYGEIKGGSLGKYLGTFEPILSKATFLQVQEIRQSRCTAKKDTYPYLLRQKIKCPFCGRHLSSKYQWNKKKTKTLHYYHCTDRSCQGIFLRAERVESEVLEKIQAFFQHEGVYQALIAQLTQQLAEKRKDEKHKVIQQKKQEAQWLKAFEEGNCSLEELKQQLQALQKPRSTSSFLSLQQCEAKVKEWLQLKDLSSRQLLCDHVCRIEVTKEKTVCGIYFRQLTQNILEGNE

SEQ ID NO: 17348 - protein, 548 aa, synthetic construct
MIQTNSNHFSFKAAIYCRLSKDDEQKGESASIQNQKELLENYVKSKGWSIYDVYIDDGYTGLNTNRPSFQRLINDIENKKVDIVITKDLSRLGRNYLQTGYYTENFFPKNNVRYIALNDGVDTFQENNEIVPFKNVLNEFYSRDVSKKMKSAYMTRARQGKFIGCLAPIGYRKDNDNPHKLVIDDETSWIVEKIFDLAFSGYGVQAIRRRLFEEKIPTPTWWNRKKGLRNKKTKLEMTVDGGEYWWDCTTLKEIIENPVYIGHIASQKVNYKFKVGWLSDKPKEEWIIVENTHEPIISEDIYNIANEKLKSRRRPFKNGEESIFAGIVKCPDCGKSLNLGRNKSKKREKLLTCNTYRRYGKSLCSQHRIYYDTLYEIVLKDIRKNAEIALKDEKEIIKALEKSREIDNEEEQKFIMDKIYEDQIRVEDLTKKIERLYDDWLDNKISESNFQKILEKSQKEQDYLNQRIEDNQKLIVKEDLEDINVKKWIELIKKHKDIKKLDKETLNELISKIYVHEKEIVNGEITQTIDIYYNFIGNTDTLQVFYNL

SEQ ID NO: 17349 - protein, 546 aa, synthetic construct
MSKEKIKVYLYTRVSTSIQIEGDSLEAQKSRMKAFAIYNDYEIVGEYEDAGKSGKSIEGRIQFNRMMEDIKSGKDGVSFVLVFKLSRFARNAADVLSTLQIMQDYGVNLICVEDDGIDSSKDAGKLMISVLSAVAEIERENIRIQTMEGRIQKAREGKWNGGFAPYGYKLEDGKLFINEEEAVAIRTIFDQYVNTTIGANGISKYLENHGIRKIPRQNGKNPVYNGKIAFGRRTLEKVHGTRNEYKQVEQDEYLISEGIHEAIVSDEVWQAAQVKLKSQAKKYEHVNKGKDTRTHLLSGIVKCPICGVGMFGNKCIKKKKDGTKYKDFYYYGCKHRQMIRGHKCTFSKQIREELLDDAVAEVIVKIVSNPKFASMMQEKINMKVDTSEIEKEIDNYQKELRKSHSTKFKLIEEIDNLDVEDKHYKRRKQDLDDRLYRMYDKIDELESSLIDAKAKKQTIEAEKLTGDNIYKILIYFDKLYKVMNDVERRQLISALISEIQVYEEKQSNGQWLKSITFKLPIIEENLNIGLDNDEQVECVSLLEKRS

SEQ ID NO: 17350 - protein, 519 aa, synthetic construct
MKRITKIEANEKLQTAPKKLRVAAYARVSTDSREQLVSLEAQKSHYETSIKSNPDWEYVGLYYDEGVSGTSMAKRDGLLKMLDDCEAGKIDFIIIKSISRFARNTTECLEAVRKLIRLKVFIYFEKENINTGDMESELLLTIFSSLAESESVSLSENEKWSIEKRFQNGTYIVAFPPHGYKNEAGLMVIDEEEATVVKFIFAECLAGKGAHVIARQLNEKGIPTRRNSEWSSGTVSAILRNEKYKGDVLFQKTFTDSSFVRRTNNGEKAQYYVTEHHEAIISPEDFEAAQAMIDQRAKDMKIQQGDAKYQNRYPFSGKIICGECGATWKRRTHSDKQGKYYAYACNTHIKKKDQCSMQFIRERNFEIAFLNMINKLAFTKKVLLQPLLASLKDINQEAPLARIHKLEAALEDNFDKRQQLMDLFVKEYLEPSVYTAQHAGLLAEAKNLSDEKEALYASVNHEHEHVEALNKLIRYINSSGTLTKFDAVAFEEHVDHVIVFKRYEIGLALKCGITLRERL

SEQ ID NO: 17351 - protein, 524 aa, synthetic construct
MISLASNVTVIPAKKTIGTQKETDKKQKTRVAAYCRVSTDSDEQETSYDAQIQHYTSYIESHPDWVLAGIYADDGISGMNAKKRDEFQRMINDCHDGMIDMVITKSISRFARNTVDCLNYTRALKNKNIGVYFEKENINTLDAKGEVLMTIMASLAQQESESLSANVRLGLQFRYQQGKVQVNHNWFLGYTKDEDGHLIIDQEQAEVVKRIYREYLSGNSFLKIKRSLEADGILNGAGHKKWHETNIKQILTNEKYIGDALLQKTYTVDILEKKREANKGQVPKYYVENSHEGIIPKDIFLKVQEEITRRANLTKGTTQHKRVYSGRYALSGMVFCVHCGDVFRRIKWNNRGCKSTVWRCTSRVEKDGPDCSARTVREELLHEVVVKAVNEAFHEKGNILPLLIENIESSLEENISDRIAAVDEQIKSLQHELLTTADMKNSGDDLGMEIRKLRNEKQALQAEEASHQDRRTRIDELITFLEDLTCELTEYDEQYVRTLLEKITVYDDYFIVEFKSGIEIQIDE

SEQ ID NO: 17352 - protein, 452 aa, synthetic construct
MKAAIYIRVSTQEQIENYSIQAQTEKLTALCRSKDWDVYDIFIDGGYSGSNMNRPALNEMLSKLHEIDAVVVYRLDRLSRSQRDTITLIEEYFLKNNVEFVSLSETLDTSSPFGRAMIGILSVFAQLERETIRDRMVMGKIKRIEAGLPLTTAKGRTFGYDVIDTKLYINEEEAKQLQMIYDIFEEEKSITSLQKRLKKLGFKVKSYSSYNNWLTNDLYCGYVSYADKVHTKGVHEPIISEEQFYRVQEIFSRMGKNPNMNRDSASLLNNLVVCSKCGLGFVHRRKDTVSRGKKYHYRYYSCKTYKHTHELEKCGNKIWRADKLEELIIDRVNNYSFASRNVDKEDELDNLNEKLKTEHTKKKRLFDLYISGSYEISELDVMMADIDAQINYYEAQIEANEELKKNKKIQENLADLATVDFDSLEFREKQLYLKSLINKIYIDGEQVTIEWL

SEQ ID NO: 17353 - protein, 558 aa, synthetic construct
MTKLYSYIRFSSMRQSDGSSYERQIRMAKEIADRYNLELVNDYQDLGVSAFKGANSKTGALSRFLDEIGRSIPVGSWLFIENLDRLSRQDIISAQELFLSIIRRGITIVTGMDNKIYSIETVTANPMDLMFSILLFIRGNEESQTKRNRTNSSALLKIKAHQQNPQNPAVAIEEIGKNMWWTDTTSGRVLPHPVYFPVLQKIVQLRQEGHSAGAILDYLNEHHEPPAPTSNKKHGKWSRAMVSRLFHTKALIGVKTVNVDGVEYELRDYYPRVLSDSEFYFLRKNIIKKAWDYSHDKEKVIPLLSGIGVLRCVHCGATMVKQTAANGKREQYRYCCDGRKSGRTDCPYPNWGFRAVTLEGAVLQLLADKIWIAEDKTNPIPEIQVKIDEISRKIDNLINLSAMMGATKELANQITDLNSQREALHEEIRLFEREMYSVDSQGWDKLAQFDLSDVQNEERLKVRMKIKGALHEIECSRIDSKKNLFVLVYLDGLRQRLVIENNRGLKKGQIFVDLKTINDRQILESAGMVLHPCIEMIIDADWKAPEEIPGLLSEEFGI

SEQ ID NO: 17354 - protein, 449 aa, synthetic construct
MKQVIGYLGQSTMKQQSLAAQKQAIEAIAEKHHIQHINFYSDKQSGRKDNRSGYRQITQLIQQGQCDILCCYRLNRLHRNLKNALKLIKLCQTYHVHILSVHDGYFDMDQAFDRLKLNIFISLAELESDNIGEQVRNGLQEKAKQGRLITTHAPFGYDYHNGTFIINQNESPTVKAVFNYYIKGHGYKKIAQLLEEDNTYINRQPYQVRNIIINPNYCGRVNNQYGQFDNMFPSIVSTSIYEQAQRLRSQKQTKQTSSDNQLKQKIKCPCCNATLTNMTVRKKNHILRYYVCPKNMNASRFVCDFKGINAQTLEDKVLEVCRDFYQNQRIYTKIKSAIDKRIKRQRNIEKHHTLTQEQLIEKLAQGIIDAETFREQTQSLRQQPQRTTSINGHQIQHTIQNIIQKRFTLNILYPYIETIHITKDKNLIGIYFKNEPLNIVNQAMQSSIA

SEQ ID NO: 17355 - protein, 504 aa, synthetic construct
MLQPRDLKGRLAISYARWSSGKQASGDSLARQTKNAEDFCISFGLTLDRQLLDDGVSAFKGRNLEQGLGRFINGVKSGTIPFDTVLLLEAMDRFSRQNPMDARDSFEGILKLGVTVVTLIDNRVHTWDGYRNDIMQSISSLLMMKAANDYALRLSHNVKGAWERKATKAKAAVASGGRIKVAKLPFWIDRETNGLNERANDARLIFELAQEGHGQQAIAQILNTRGIPSPGGNTWSQVVVGDVLRSPAAYGCLVLKGDEVPGYFPALISETEWLATRQRTKARRHSRQIGRTANLFSRMVYCAHCRSPMVLTSSKKGGVSWGYFICTGKTFKRTGCTAPNWRYDQFERELIDRIGFLAVPISQDHTAPNLSEKLEEDIRALEFKQSNILAGIADAETADVRKVLLGQADALARQIEAKRKEIVAIRENDARYRESEAAVVDFTMDQEEVRRLTKEDRKEAQRLISSLVQRIDLESDSKTLRRAVVTMRSGYTHSIVFDGTGEPG

SEQ ID NO: 17356 - protein, 510 aa, synthetic construct
MPQDSNGIAYSYVRFSSKKQASGDSLRRQTEMAEEYASRHMLRLSSKNFQDLGISAFREGKRPSLADMLTAIDEGQITAGSTIIIEALDRLSRRGIDVTLETVKEILSKDVQIVSLSDGLVLTKSSLNELQSVIRIALAADLAYKESERKAQRLRETKGQQRQDALNGIPINKILPFWLKRTETGYAFSDKVETARQIVTLKQEGKGSNMIAKFLNKQGIAGIRTAQWNHASITKMLKNPALYGAYQTGETNKEREMIQLEIVEGYYPALISKDEWLLLQSDQSKSTRGRRSTDNPYSGLLRCGCGGALIKRKSTVRGKLYVYHGCLNAKDGRCSQNLSIKGLDDALATMLGRLEFKKAVTSDRSAYLEKKQLEKRIANLNITLQEVDEVPSSVIKTISTMEARVKEITEQQAKIEREQRGIDAVNNAKLSSITDSLELNLMLKRVLKSITVTRSGSSWAVRIFHLSGHTQSFMLDNGKLKFVSDSIAMQRLLAEFTEDNQTSSYEPIYD

SEQ ID NO: 17357 - protein, 548 aa, synthetic construct
MEATAATLERRVRVIPATRKPEELHRDHDGKMRVAAYCRVSTDSEEQLNSYEAQKTYYTQKIQDSPDWEMAGIYADEGISGTSLKKRTQFNKMITACKRGHIDLIITKSLSRFARNTVDCLDTVRLLKANGIGVYFEKENINTLTESSEFLITLFSGFAQAESESLSKNVAWGKQKSAEAGKVTFQYKKMLGYRKGADGQPEIVPEEAEIIRRIYHRYLDGCTLGKIKWELEEDGVPTAQGVERWSPSIIHNILTNEKYIGDALLQKTYVTDCITKKVKKNRGERTMYYVENSHPAIVSRDLFNQVQQEMTRRSSNRKVLQKSGKTELGKYSGKYALTELLVCGECGSPYKRVTWARNGKKRIVWRCVSRLEFGTKYCQHSPTLDEGRLHSAILAAMNEYAAIRQEVCPDVLAMAEEAKQALSQAGARLLQLKKRMDAVSQEQSDVLDRLLVNMADTELNTRMKALTDEKESLKAQIADAQQAEVDLEEQAARRRQMWDSIMECAAGYTEFDNELVRQVIQKITVEDAETIRIQFRDSKTVIEQEIYE

SEQ ID NO: 17358 - protein, 537 aa, synthetic construct
MKAAIYSRKSKFTGKGESVENQIELCKSYAKTNGYDDIYIYEDEGFSGGNINRPEFKSMMKDAAAKKFDAIICYRLDRISRNVSDFSTLIDELKVLGIDFISIREQFDTSSPMGTAMMFISSVFAQLERETIAERIKDNMYELAKTGRWLGGTPPFGFSSEPIYYLDNNSKQKKMMKLSPINEEISLVKLLFEKYLTLGSLGKLQKYLIQNDIKTKRNSAWDIKALQLLLRNPVYVKSSELVISYLSIKGATVFGDPNGNGILSYNKKDSKDKYKDISEWILSVSKHEGVIDDNLWIKVQRQLDKNKDLAPRLVNGSEYGVFNSVLHCAKCGGKMIQKQGHVSRKTGEILRYYICINKINPSDNTCDSKNIRLDILEKSVMKELFKATDNKGSLIKAIEEYKKSLESEAVDKSSIKSYEKQITQKELQVKNLIDKLSLNPNIYDLLSSRIEELNKEIKELKFKKFELENTNSNLKAAIKEINASTSMLLNFKKLWENADYSMRKLLINSFVDYISYNSDTQEVVIKPFCTNKKKGAL

SEQ ID NO: 17359 - protein, 491 aa, synthetic construct
MGLAAIYLRLSRNEEQLNIDEILLNHRNALTKLAKQQKLTYDIYQEISSGVNTERPELNLLLSRLDDYDALLVMDIDRISRDNAHAEEIKKMLIIHDIKILTPQGAIDLSQESNEMLFSFQAMMANFEYKQIRKRLGRGRLAAAEQGKWTMSNRVPLGYKKNEEKRLEVVEDEAKIIRFIFQKTLERVSANEIAKQLDILGWRSRQGKVLTSTHISNMRRNVVYYGVVKAGRKVNGRVVDEVFVEDAHEPIVSKQMFLEVQKILEENTTGNFFNKLKATRKLQNLIYCNCCKRKRYIQCDGNGIDYIKSCIYKVDNNKCRDRGYKYEPIEQFVLQKVKEKKPAFEQELQMLKSLDTTEVEKKLLIQRESLEKQINRFNKRQRNLKEMRMDGEISKAEFYEMRDENEEQIKQVKQQMELIDIKLENLSNTDEEQSRLQDALKTLDKLEELKAESCNTFLKKFIKKIWFSSNTEANHDTTRPKEDATIEIEWL

SEQ ID NO: 17360 - protein, 515 aa, synthetic construct
MYRLENLDVFIYLRKSRKDIEEEQKAIQEGRPFDTLERHRNRLLDIAKRENHNILNIYEEVVSGEFISERPMIQKLLRELETGIADAVLVVDIDRLGRGDMLDSGILDRAFRYSGTKIITPSEIYDPESEEWELVFGVKSLMARQELKGITRRLQNGRIDSAKEGKSITKKPPYGYKRDENLKLYPDPDTSWVVKKIFEMIANGKGRQAAAQELDRLGVKPPESDLWSPYTVSAIVKNEVYLGHIVWGKTKYTKRNGKYVKKRMPKEKWQICENAHEPIVSEEIFHAANQALKDRHRAPVKSSHTLSNPLAGIVRCEICGRSLIYTPMKDRSDRLRCPNHACKGKQKGVIFELVEEKVMDGLHEIVDSFEIKEKMMEHKVQHENVISLKQKALDKKRKELDQLNKQKNNLHDLLEQGIYDIETFMDRQNIITARLKKIKKEMDLLKSEIIEEEERHKKRDHIIPRIRKVLEIYHHIESAERKNSLLKSVIERVDFIRKPEWKKKDQFEIRIYPKI

SEQ ID NO: 17361 - protein, 515 aa, synthetic construct
MYRPQELDVFIYLRKSRKDLEEEKKAMEHGQHYDTLERHRTQLLELAHKEHHNIIDILEEVVSGEYISERPMMQKLLREVESGIANAVLVMDLDRLGRGDMVDQGTIYRVFRYSETFIITPTEIIDPNDENQELTFSIKSLIAREELKTIVKRMQRGRRVSAKEGKSISRVPAYGYLRDNNLKLYPDSEKSWVIPKIFELMANGMGRQAIAQELDRLGISPPEGEYWNPSTISSIIKNEVYLGHIIWGKIRYTKQNGKYTRKKVPKERWQRHDHAHTPLVSEELFQKANIAHSKRWRPPTIKTKKLSNPLAGILLCKLCGHSMLYQPRKDRPNPQVRCVQPSCKGVQKGASLALVEQRILDGLKQIIESFEIQENMVQKKKSKNNIQLHQKALEKKVKQINDLQKQKNKLHDLLEKGVYDIETFLERQSSIVIRLKSTQEEIKQLEHEIKSTLKREKHINGFVPKIKNVLEAYHSTEDIEKKNRILKSVLEKVTYLRRKSWQRKDEFVVELYTRI

SEQ ID NO: 17362 - protein, 522 aa, synthetic construct
MKLSHILQPNMKAAFYGRHSTDKQDMDMQLNSVMEVIRKYNCIHTHSFLDKAVSARKNKITSRKELENMFEAAKRKEFDFVIVYKSDRLARDPLEHQTIRIVMKTLDIPIIISSTEIVYNTDTDLIVQLMEDGFTKYEVDTIIARTRSGLENKAKQGKWLGGKPPFGYTYDKNSGQFIEHPEELCYVKEIFNLYLNGHGFQHIANTLPNGSRRGKDWGKENVKAIVLNPFYCGLLSWRRQTGGKQNVRDIWVEAPNYYVKPIISRTTWESCWRIYSEKRNGNMVPKHYKTSFLLQGLLSCEKCQELMKTKNQQTISSTNKKYGGKIYFCSNCKLRIDADLLHDKVVNQTLTDVKISGFHNVYHAIEQKIRYEIQELNNNIQKHQHLFENYTIKLHNITEELKQRMKNNDDKRFLKSLAIYRSDVQRKLDGIIQQMNDFKQQIILKEKIEKSKETWLHTLNEVFQDDVKLQEISDMDKRRFLLPLIQSVFIKENKKRNEYDISLQLRTDFSKRDVQNQISLIL

SEQ ID NO: 17363 - protein, 501 aa, synthetic construct
MKTIIKDVAIYLRKSRDDSDGQEDVLAKHESLLLEYAKSHNFKYKIYKEIGGSEYIDWRPEMVRLLTDVEQELYDAVLVVDLDRLSRGDLEEMGRISRVFRNSKTLVLTPSKTYDFNNEDQALINNFEMVFANHEFRMINKRMIRGKKQGAKSGRWTNGTPPFPYVYNRLTKELDVDPDKVKVYELMKKMFLEDMKATYEIAWKLNELGFKTNRNSYWYENTVRRILKNEVHLGKVVYGKTSGSGSKKKPSANGVQIKDRSEWIIAEGSHQQLKTEEEHQRILAILESRRFTPKGTRKNVQVLSKLIYCGKCKRVMSFTGKASGKRYVKTCLTTDCFGNRCHNRSLNVEVIYAQLFLDLEQYEKQLLNHESKEEQGDSSTLELALHNKQEELERLGNGINRIKDLFIDEVIDKLEMKKRIEKHQQLMQTKKEEIRSIEQSLAVIENVRTDGDRLYAIREFKKAWHTEGIGKRELNTLAKQLIDRIEYVREGNNVNMKIQFL

SEQ ID NO: 17364 - protein, 487 aa, synthetic construct
MAYAVYVRVSSDKDEQVSSVENQIDICRYWLENNGFEWDENAVYFDDGISGTAWLERHAIQLVLEKARKKEIDTVVFKSIHRLARDLKDALEIKEILLGHGVRLITIEEGYDSHYEGKNDMKFEMYAMFASQLPKTLSVSITAALAAKVRRGGYTGGFVPYGYEIIDGKYAINEEEAALVREIFELYAQGFGYIKIANTINDKGARTRKGAPWTFSTLCKMVKNPAYKGTYIMQKYGTVKVNGRKKKVINPKEKWVIFEDHHPAIISHELWDKVNDKDPNKFKKKRRVSTTNELRGITVCAHCGTAMSKRNSINVSKNGTATEYLYMICNWSRTTARRECVRHVPIHYKDLRVLVLSKLKEKERELDKEFCSDDNQLHVKLRKLKRDINDLKFKRERLLDLYLEDERIDKDTFTIRNAKIEKEIGLKEMEIRKASNIEIQMKEKQEVRDAFALLEESKDLHSVFQKLIKRIEVAQDGAIDIYYRFEE

SEQ ID NO: 17365 - protein, 630 aa, synthetic construct
MPQLYSYIRWSTDRQDKGTTRNRQLAAAKVYAAEAGLEMVEIEDPGVSAFRGKNTNTGKLGDFIDAVKQGAIASDSWLYVENLDRITRQNVTTAQKLFIELLELGLTLVTGMDKRVYTLDSVNKNPTELMISLLLFSRANEESETKSNRTIGNVVALVERHQAGLPVNIKSVGRHPFWIDDSGSQYEAVKEHPVYWSIAREAIDMFLDGNGIYTVKRYLDEKYPNGLKDKEWDYQVLKKMRDNRALIGERTINVGGATYKLDNYYPWLCNDEAEFLTLAERKQQNNYKAKKDKTEEIKLLSGLQVLRCSKCGGTMHSFMNHGSARYICTNGVHLQKNCSGWSISAQLVEHCTMISLLIGYMDKSRKDGIDTTAIEEEISRKEILITDLESRIANMAQAIAIAPDVSALAVQLNTFDLERKKTVLEVDKLKERLHSLKGKGSLEVDITDFLMLIQWSVFTNMEDADRNKIRKIISSIIESIIVEKADGCITIKIKCHHKDEWLVFGGVNRKPFWAFTIEYSTNDAKEIEGGDSSNFVSNPLFQKAVEQLDSIKQSYLKLFETANTMLGVVGYSDIRGASFWPNTGQYERANVEYDGITYSIAMNGRVSKAITAALEATGLSRKDFIERYKV

SEQ ID NO: 17366 - protein, 529 aa, synthetic construct
MTDLQQFQIFAKKNNQKIVTNNKAVIYTRVSDVKQKDNTSLESQKEICTEFALKNGYEICAYFGGTHESAKTDERKAYKEMLTFVKRKRITNIIVHSLDRYSRTGGLAIATVENLKKKGIKVLSISQNVDSDTPTGTFMQNFHLLYSRYDNDIRREKTITGMRHRLLNGYYMGVAPLGYKNARNKQNIPIIVPNENANYIEKIFSWKVNQNLSNVEIIDKLKLQGLTIYKQRLTDIFRNPTYCGLLSHSLLDGKVVKGNHQPIISKEMFLRANGIQSKNYQNYSHKKENDNLPLKTFAYCSSCKSPLTGYIVKKKKLYYYKCKTVGCSCNRSSRALHEQFKRLLSCFEIEKKYIAPLKKQLGYTFDHYFKVQKDNTPNLKYSLATIKNKIDKTQERFVLGEIDITLYDKFNSKFEEEKRAIEKELKNNTLKSSNLTKYVDNCIKLFSNLNKIWELSDYVGKQELQKLLFPEGITYNREKDSVRTNLVNPILEITSSLSKLYSKNKSGQVVDFTNLSACVTSAGFKPATS

SEQ ID NO: 17367 - protein, 515 aa, synthetic construct
MDVVGAGQGLTRTARTDGATFPPRRRAVLYSRLSVSDDTSTSIARQLRDLRALAEREDLEIVAELVDDGVSGRTSRANATEALQFLRERRADVLVVWKFDRWSRQGMRSLADLIDTLDEIPSAEFVALQDGLRSAQPAWRIVASVLAEVARMESENTATRVRSSIQWRVDAGLWRGGQIPFGYQAAEGKEPNTRTLIPNAAEVAVIEEVADALITKLWTPNRVADVLNQRQVPTGRSPYRTARNRGRNPDGLDRGTWRPGTVMQLWTASHLIGRQVHRGELVRDDAGIPKTVWPPLIDRDTYEALRAAVRDPRLAAGTTTQANRRRSQLLSGLLFCGECGSIVYSNRASRGQRTSVYTCSRRSDPKCPKPTMSLELVDEMVTERFLSDFGACRITTLREPDAARADRARLADIEQAIARTTDELGLTGADLEVLLPRLAGLKARRADTLTSRQTGVLEVVLTEETYAERWFAEPSFESRRDLLAKAYARIGLASLAHGVPRKGKHPERLVYETLI

SEQ ID NO: 17368 - protein, 569 aa, synthetic construct
MAEQNEKIVALYVRVSTGYQVDKDSLPFQKKELKAYCEHVLHIDKNRIEIFEDAGKSGKNTKRPAFERMMGKVKSGQVSHVIVYKIDRISRNLVDFSLMYDDFKYNNVTFISLNEQFDTSSAIGEAILKIILVFAELERKLTSERVTDVMIGRAQNRQWNGARVPYGWDWDEEKQCPVHSKKEAQYAIDMYEMYLNGGSTVSIRDYNNAHNIPTKRGGEWTSKTVADFLRNPINKGAYRYNYRESARGRKKSNEEVVFIENAFPPLVEPRIWELVNKRMDENTLKLNTSSMHTIRKNCNVFAGLIVCGKCGVNYQVTAKDRRKGSGFRPSSYACTGKYQKNHCDNLNVSDVKIGPFMINYIAAMVDASKNRKFIKDTESLEQVLLSHISFSNIAGISTDSLQETLELISGYSMSKSALWSAETLSKEQQTSADSKQSELNEKLQKVNRALERLKKVYLFSDDGMDEKEFLEMKSSLEADRVKIENEIKGLSAPIATNVDQVAFIKSASEFLLMHKINSGEFVDYKELATLDEESLKQFMNSVIDHIVVRERKIVEIVFVNGLSHTLLYK

SEQ ID NO: 17369 - protein, 476 aa, synthetic construct
MNRNKVAIYVRVSTQGQVDEGYSLDEQVDLLTNYCKLKAWTLYDVYVDPGISGKNMHRPEIERLTRDAKHKLFDIVLIYDLKRLGRSQKENIVLVEDVFNKNGIRLVSFTENFDASTPVGKMVFGMLSAYAELDRANIAERMMMGKIGRAKAGKAMSWGMPPFAYDYNKETGNLELDEAKAPIVEMIFSDYLKGASVNQIVQKLNSMDYNGKDHEWKHHAVTVILENPSYCGMTRYIDQIYEANHKPIIDKVTFDLVQIERKKRLSKYHDNDLVGPFQRKYIGSKFCYCGLCGANLKSEKDKRNKHTGIRPISFYCPNTRSRGTNDCTNKRFRQDILEGYILKEVAKLQQQPEKLRVIKPKKDAENESKLDNYKNKIRQNTSKLSKLNELYINDLMPIDELKKRSKTLYDENEFLEKQIEQLSSTTREDELRNKIDTFLAFPDILTADYETQKQAIEIVVSRVEVTKNGIDIFFNF

SEQ ID NO: 17370 - protein, 628 aa, synthetic construct
MRKNEKITALYERLSRDDFGKDDDQQRESNSISNQKAMLEEFAARQGFTNIVHFTDDGISGTCFDRPGFLAMMKEVEAGNVEYLCIKDMSRMGRDYLKVGQIMEILRQRGVRLIAINDGVDSARGDDDFTPFRNIMNEYYARDTSRKIRSTFQSKGKSGKHLTGTVIYGYLWNEARDQWLVDPEATEVVKRIFAMTIDGYGPYQIASRLKEEKVLIPSAYLAQHGEGVNKNKTFKDVYGWGSSTICNILEKREYLGHTINFKTRKHFKDKKSHYVPEDEWTIFENTHEPIIDQQTFDLVQKIRGNVRRYPDGWGEAAPLTGLLYCADCGGKMYVHRTNNGKRISQYTCSQYTKVPCGTLCKTQHRINEDVVLSLVSEILKAIAEYAKHDRAEFVRVVQEAQSSQQTAEVRKQRTRLATAKQRVSELEVLLCKIYEDNILGKLSDSRYATLDAQYEKEQSELTAEISVLEKAVKSYEKHEKDADRFIALIDKYENFDKLTIAMLNEFIEKILVHERDRKGSIQTTQEVEIYFNFVGRFVPPAFGEVELTPEELEEIRKREERKDRLHQNYLKRKASGAQKRYEDKIKERKKEEIEAKKAAIRAEDIAKGVFVPVSSLPQREPMKGVQSA

SEQ ID NO: 17371 - protein, 478 aa, synthetic construct
MNKVAIYVRVSTTNQVEEGYSIDEQKDKLSSYCDIKDWNVYKVYTDGGFSGSNTDRPALESLIKDAKKRKFDTVLVYKLDRLSRSQKDTLHLIEDVFIKNGIEFLSLQENFDTSTPFGKAMIGLLSVFAQLEREQIKERMQLGKIGRAKAGKSMMWAKTSYGYDYHRDTGTITINPAQALAIKFIFESYLRGRSITKLRDDLNEKYPKHVPWSYRAVRTILDNPVYCGFNQYKGEIYPGNHEPIISKEEYDKTQSELKIRQRTAAENVNPRPFQAKYILSGIAQCGYCGAPLKIMLGVKRKDGSRLKKYECHQRHPRTLRGVTTYNDNKKCDSGFYYKDKLEAYVLKEISKLQDDADYLDKIFSGDNAETIDRESYKKQIEELSKKLSRLNDLYIDDRITLEELQSKSAEFISMRGTLETELENDPALRKNKRKADMRKLLNAEKVFSMDYENQKVLVRRLINKVKVTAEDIVINWKI

SEQ ID NO: 17372 - protein, 481 aa, synthetic construct
MITTNKVAIYVRVSTTNQVEEGYSIDEQKDKLSSYCDIKDWNVYKVYTDGGFSGSNTDRPALESLIKDAKKRKFDTVLVYKLDRLSRSQKDTLHLIEDVFIKNGIEFLSLQENFDTSTPFGKAMIGLLSVFAQLEREQIKERMQLGKLGRAKSGKSMMWAKTSYGYDYHKETGTVTINPAQALTIKFIFESYLRGRSITKLRDDLNEKYPKHVPWSYRAVRTILDNPVYCGFNQYKGEIYPGNHEPIISKEEYDKTQSELKIRQRTAAENVNPRPFQAKYILSGIAQCGYCGAPLKIMLGVKRKDGSRLKKYECHQRHPRTLRGVTTYNDNKKCDSGFYYKDKLEASVLKEISKLQDDADYLDKIFSGDNAETIDRESYKKQIEELSKKLSRLNDLYIDDRITLEELQSKSAEFISMRGTLETELENAPALRKNKRKADMRKLLNAEKVFSMDYENQKVLVRRLINKVKVTAEDIVINWKI

SEQ ID NO: 17373 - protein, 481 aa, synthetic construct
MITTNKVAIYVRVSTTNQVEEGYSIDEQKDKLSSYCDIKDWNVYKVYTDGGFSGSNTDRPALESLIKDAKKRKFDTVLVYKLDRLSRSQKDTLHLIEDVFIKNGIEFLSLQENFDTSTPFGKAMIGLLSVFAQLEREQIKERMQLGKLGRAKSGKSMMWAKTSYGYDYHKETGTVTINPAQALTIKFIFESYLRGRSITKLRDDLNEKYPKHVPWSYRAVRTILDNPVYCGFNQYKGEIYPGNHEPIISKEEYDKTQSELKIRQRTAAENVNPRPFQAKYILSGIAQCGYCGAPLKIMLGVKRKDGSRLKKYECHQRHPRTLRGVTTYNDNKKCDSGFYYKDKLEAYVLKEISKLQDDADYLDNIFLGDNAETIDRESYKKQIEELSKKLSRLNDLYIDDRITLEELQSKSAEFISMRATLETELENDPALRKNKIKADMRKLLNAEKVFSMDYEGQKVLVRRLINKVKVTAEDIVINWKI

SEQ ID NO: 17374 - protein, 481 aa, synthetic construct
MITTNKVAIYVRVSTTSQVEEGYSIDEQKAKLSSYCDIKDWSVYKIYTDGGFSGSNTDRPALEGLIKDAKKRKFDTVLVYKLDRLSRSQKDTLHLIEDVFIKNGIEFLSLQENFDTSTPFGKAMIGLLSVFAQLEREQIKERMQLGKLGRAKSGKSMMWAKTSYGYDYHKETGTVTINPAQALTIKFIFESYLRGRSITKLRDDLNEKYPKHVPWSYRAVRTILDNPVYCGFNQYKGEIYPGNHEPIISKEEYDKTQSELKIRQRTAAENANPRPFQAKYILSGIAQCGYCGAPLKIMLGVKRKDGSRLKKYECHQRHPRTLRGVTTYNDNKKCDSGFYYKDKLEASVLKEISKLQDDADYLDKIFSGDNAETIDRESYKKQIEELSKKLSRLNDLYIDDRITLEELQSKSAEFISMRGTLETELENDPALRKNKRKADMRKLLNAEKVFSMDYESQKVLVRRLINKVKVTDEDIVINWKI

SEQ ID NO: 17375 - protein, 481 aa, synthetic construct
MITTNKVAIYVRVSTTNQVEEGYSIDEQKDKLSSYCDIKDWNVYKVYTDGGFSGSNTDRPALESLIKDAKKRKFDTVLVYKLDRLSRSQKDTLHLIEDVFIKNGIEFLSLQENFDTSTPFGKAMIGLLSVFAQLEREQIKERMQLGKLGRAKSGKSMMWAKTSYGYDYHKETGTVTINPAQALTIKFIFESYLRGRSITKLRDDLNEKYPKHVPWSYRAVRTILDNPVYCGFNQYKGEIYPGNHEPIISKEEYDKAQSELKIRQRTAAENVNPRPFQAKYILSGIAQCGYCGAPLKIMLGVKRKDGSRLKKYECHQRHPRTLRGVTTYNDNKKCDSGFYYKDKLEAYVLKEISKLQDDADYLDKIFSGDNAETIDRESYKKQIEELSKKLSRLNDLYIDDRITLEELQSKSAEFISMRGTLETELENDPALRKNKRKADMRKLLNAEKVFSMDYEGQKVLVRRLINKVKVTAEDIVINWKI

SEQ ID NO: 17376 - protein, 479 aa, synthetic construct
MNKVAIYVRVSTKGQAEEGYSIDEQIALLTSYCSIHKWKIFDTYVDAGISGATIERPELSRLSRDAQKKKFNTMIVYDLKRLGRSQRNNIAFIEDVLEKNGIGFISLTENFDTSTPLGKAMVGILSAFGQLDRDTIRERMMMGKIGRAKSGKPMMTSTIAFGYTYDKVTSSLNINQAEAIIVKTIFNEYLSGRSLTKLRDYLNENDLLRNGKPWNYQGVSRILRNPVYMGMVRFRGEVYQGNHDPIIDSETFEAVQKELKKRQLETYEFNKNTRPFRAKYMLSGIIKCGYCGSPMGVTLGTKRKDGTRNIRYQCVNRFPRTTKGITVYNNGQKCNSGFYEKDDIEIYVLGQVRLLQLNKAKLNKMFETPEIINVEEIENQINSLNNKMKRLNDLYLNDMISLDELKTQTYTFLKQKDLLENELNNNPAIHQEENRKQFQKLLGTKDITQLSYEEQSFAIKNLIDKVFVKPGIIDINWRI

SEQ ID NO: 17377 - protein, 515 aa, synthetic construct
MKTAIYLRKSRADLEAEARGEGETLAKHRSTLLKIAKEMNLNVLAVREEIVSGESLVKRPEMLALLEEIEDNKYDVVLCMDMDRLGRGGMKEQGIILETFKRSNTKIMTPRKTYDLNDEWDEEYSEFEAFMARKELKIITRRMQRGRIASVEAGNYLGTHAPFGYDIHRLNKRERTLTMDPEEASVVRMIFDWYANEDMGASAIRNKLNDLGYKSKLGNEWNPYSILDILKNNVYIGKVTWQKRKEVKRPDAVKRSCARQDKSDWIIADGKHEPIIPESLFEQVQEKLNSRYHVPYNTNGIKNPLAGIIKCSKCGYSMVQRYPKNRKETMDCKHRGCENKSSYTELIEKRLLEALKEWYINYKADFEAHKQGDKLKETQVIQMNEAALRKLEKELVDVQKQKNNLHDLLERGVYTVDMFLERSQVISDRINEITSTMENLKKEIKTEIKKEKVKKDTIPQVEHVLDLYFKTDDPKKKNSLLKSVLEKAVYKKEKWQRLDDFELVLYPKLPQDGDI

SEQ ID NO: 17378 - protein, 438 aa, synthetic construct
MVKDALDGKIDLIVTKSVSRFARNTVDSLSTIRKLKEHGTEVFFEKENIWTFDSKGELLITIMSSLAQEESRSISENCTWGQRKRFADGKVTIPFERFLGYDRGEDGNLVVNPEQAKVVKKIYRLFLQGYSPFGIAKELTGEGILTPGGKKKWSARTVAAILSNEKYKGDALLQKSFTVDFLTKEKKKNKGEIPQYYVTGNHEAIIPPSTFDRVQRLLEQRKAGKNRISSVSIYSSKIKCGDCGSWYGSKTWHSTSKYRQRIWQCNHKFEEKCTTPHLTEEEIQDLFLQAINKLVKNKQEIISNHKEMAKIIFDTSALEMEKIELEEELNIVAEQVNDCINENARKVQNQDEYEVRYSSLVNRFNITKARLDEIKQTIIEKQSKYDEAQDFIKELEKQELMTEFDKNVWLSMVDYLTVHHYGKVEFTFLDGSQIELNR

SEQ ID NO: 17379 - protein, 594 aa, synthetic construct
MGKEVTKLGPKFPEIIKVEKIKVAAYARVSMETDRLKHSLSAQVSYYSKLIQNNPEWEFKGVYSDYGISGTSTSKRPGFMEMMEECEKGNIDIILTKSIKRFARNTVDLLEVVRHLKSKGIEVRFENENINSLSGDGELMLSILASFAQEESRSISENVKWGTVKRFKQGIPNGRFNVFGYVWEGNKLVIVEEEAEIVRRIYSEYLSGKSRMQIEKMFAKEGITTRRGYRWVDSNIKVILRNITYTGNLLLQKEYVVDPITKKRKLNRSELPQYFVENTHEAIIPKETYDKVQVEMERRRVAGAIGNPAIPTTEMTGKIRCPHCGKNFQSSVRNLANGKNKYWVCATRKAGHGNLCHTGDINDRLIKEIICEVLKIEEYDTEIFTKEIDHIDVIKKEKFIFYLTDGKIVEKPYRKIDRKKYFTEEVRAKISEQRKNKHNYHRKNPTTPFTGLIECDRCGNSFNALKTTLKKGEKITYLSCRTKRSECPHNSIQEGTLKKLLCEVLELDEFDEQIMDEKIERIYIADNKVRFKFKDGHEEIKEYLEKKRGTPWTKERREKQIPQMREYWKNEKHRKEASERMIKIRSEKEWPTRK

SEQ ID NO: 17380 - protein, 501 aa, synthetic construct
MKPNIKEVAIYLRKSRDESDGKEDVLAKHESLLLEYAKNHNLKYKIYKEIGSSEYIDSRPKMVRLLSDVSQKLYDAVLVVDLDRLSRGDLEEMGRISRVFRDSTTLVLTPSKTYDFNNEDQALINNFEMVFANHEYRMIKKRMLRGKLQGTKAGKWTNGRPPFPYVYNRLTKELDVDPDKVKVYELMKKMFLEDMKATYEIAWRLNELGFRTNRNSYWYENTVRRILKNEVHLGKVVYGKTSGSGSKKKLNANGVQIKDRSEWIIAEGAHQPLKTEEEHQRILAILESRRYTPKGTRTNVQVLSKLIYCGKCNRIMSFTGKASGKKYVKTCLTTDRFGNRCHNRCLNVEVIYAQLFLDLEQYEQQLLSHEQKEKQGDSSTLQLALQNKHEELERLGKGIERVKDLFIDEIIDKLEMKKRIEKQKQLMQTMKEEIRSIEQSLAVIENVRTDDNRLYIVKEFKKAWNTEGISKRELNILAKQLIDRIEYIRVGNNVQINIKFL

SEQ ID NO: 17381 - protein, 483 aa, synthetic construct
MTTNKVAIYVRVSTTNQAEEGYSIEEQKDKLSSYCHIKDWSIYNIYTDGGFSGSNTERPALEKLIKDAKKKKFDTVLVYKLDRLSRSQKDTLYLIEDIFLENKIDFVSLLENFDTSTPFGKAMVGILSVFAQLEREQIKERMQLGKLGRAKSGKSMMWAKTSYGYDYHKETGTVTVNPWQSIIIADIFDWYLSGKSITKIRDALNDMYGEDNGGKVWNYRAVRMILANPVYCGYNQYKGEIYKGNHEPIISEEVFNKTQEELKIRQQLAAEYSNPRPFQAKYMLSGIAQCGYCYAPLKIIMGMVRKDGTRYIRYECYQRHPRKTKGVTVYNNNEKCHSGAYEKDEVEEYVLNEISKLQNDTNYLDELFSNPETESIDRDSYQKQIDELTKKLSRLNDLYIDDRISLEELQKKSAEFTTIRAFLEAELENDPTLKADKQKENMRQTLATDDILGLDYDKQKAIVRTLINKVQVTDEDIAIKWKI

SEQ ID NO: 17382 - protein, 560 aa, synthetic construct
MEEVKYKNVEEILKLPVVAYCRVSTNKQEQESSYENQHRFFKERATKTENEVLVKIYADKGISATSLKKREEFKQMLYDAGINEYRGRDEFTYEIDHKRKPKFRKVYVRNTSRFTRDASIITILRALLKNGVHVHFLDIDLIYDDTSKEFMLNMFINFAQQESIDRSKKVKDGNVVMASVGSIRVGGYGIYGYEYSSFTKKLSIIKEEADVVCKIYELYLKGYGIRRILNYLQDNGIKPRSGKERFSISSVRRILTNEKYYGCNVRNKYDSGGVFTKHYPKLKDKEEWIYHEDVIPAIISKGTFLKAQEIGNNKVHKISQKGVYKGTSEFAGLITCKCGATYTRNVDKGRVFYNCSTKKSRGVHACDNINISEDKINEGINKLLETGVKKKFDKYKETMTQLLKDMVRSKILAQIDKDNEAEVKVIQEQIDKLTRRKNRLIELYLDENMDKAFLDEKADSINNELEIMNKKINELSKSNQEIYDELHEFDCMIDEINQIQISEVSNREELLQLIHIKIERHSENSKKPIAKIFFKYDEPIKKLSSKYKILEGISSVILHT

SEQ ID NO: 17383 - protein, 551 aa, synthetic construct
MFTLAGSEKFSKTKLDALVTKIKALIYARVSTDGQVDNYSIESQIERCMDLGKQKGINEDEVVVLIEDGESGDNPNRPMINYALFLLEYGIGDHVIFLHPNRMSRFLHLQTQLSNRIWSMGKDFWFVEFEFDKSSPESMLNFNIQGSIAEYNKAKILADTKRGRITKVKNGLIPGLNRIYGYTFDTELDTLVENPEEKEIYLKMVDMLLHKDYSCSRIAEELSLRNVSAPKKDRWYQVTISRIFKNETYTGNFYFGKSKVIRNADGTRKQVPQPRGEWRRIPVPAYITMETYHKIQKRLDFLNKNKPGRPTEDYLLQGICRCGRCGAAVSSGVTTKTKNGLLKYYVCQHKTKKSYKVGTGESNPICEGRNWRVDYVDKIVWEYVKNIISEPTEFFERIVKQQSENSNSDELLKQKTKLEKSLQEKEASRERYTEMYAAGIIKTMKDLEDKVSAVDMQVQDIKEELQTIEHKLSATLHNKNDVNLIQDTLKKYQYIMNKNIISMENRRKIVRVFFSKVVLNDNKIDLHMKASKNIMDGIIDMNKEKILRLYV

SEQ ID NO: 17384 - protein, 539 aa, synthetic construct
MNRTKKYIAALYCRLSKDDGSTNESMSIYSQKAMLKQYAEQNNIAIYDYYVDDGYSGTNFERPAFKKMITDIENGKINCVITKDLSRLGRNYLESGAYIEMYFPQKNVRYIAITDGIDTINSYEFDIMPFKNILNEMYAKDTSKKVKSALKSRMKEGTYIGSKAPFGFKKDPDDKHRLIIDERVKPIIELVYELCLEGKGTQLISQEMMKRKIPRPSSFLENADKLYGLTEENKYKWTHRMVLSILRDPVYCGNMERNKRPTLSFKNRKRLYVPKEDRIVVKDTHEGIVSEVVWTQVQNMLDKRKNTNKSGITYDNIFKGLVKCPDCNYALTPKTDYRLNKKDTIDFVHFSCSGYKKYGVKACTSHRINARDLYNVVLEDIQYHGQMALSSRENFVMKIAEKIDKDKVDERKDKTEKLSLYKNKLNDLDKAFEKLYEDRLSESISERNFNLMNEKLSKQQEELIEEIDLLEEEIKAIADTEENCEQFVENISKFAKIKELNRYILNQVIDKIYVYDKEEVDGEIKQKVEIHYKFIGKLD

SEQ ID NO: 17385 - protein, 563 aa, synthetic construct
MSKEKIKVYLYTRVSTSIQIDGYSLEAQKSRMKAFALYNDYEIVGEYEDAGKSGKSIEGRVQFTRMMEDIKSGKDGVSFVLVFKLSRFARNAADVLSTLQTMQDFGVNLICVEDGIDSSKDAGKLMISVLSAVAEIERENIRVQTMEGRIQKAREGKWNGGFAPYGYQLVDGKLFINEEEAVAIRTIFDQYVNTTIGANGLSKYLENHGIRKIPRQNGKNPLFDAGLIRKILKNPVYNGKIAFGRRTLEKVHGTRNEYKQVEQDEYLIAEGIHEAIISDELWQAAQVKLKSQAKKYEHVNKGKDIRTHLLSGIVKCPVCGAGMFGNKCIKKKKDGTKYKDFYYYGCKHRQMMRGHKCTFNKQIREELLDDAVAEIIVKIVSNPKFASIMQEKINMKVDTSEIEKEIDNYQKELRKSHSTKFKLIEEIDNLDVDDKHYKRRKQDLDDRLYRMYDKIEDLEGQLIEAKVKKETIEAEKLTGDNIYKVLIYFDKLYKVMNDVERRQLIEALISEIQIYEEKQLNGQWLKSITFKLPIIDEDLNISLDNDEQVEAVSLLVRVEASAK

SEQ ID NO: 17386 - protein, 493 aa, synthetic construct
MKCAVYIRVSTDKEEQKASLSNQKDLFYNFIEDKEWSLYNTYTDVESGTSDNREGLQQLIEDAQQKKFDIILAKELSRLARNGGLSYSIRDVAERNHIHIITLDNAINTLEGNNAMFGLYAWIYEQESQRTSERIKAALRTRAQKGLFKGAIPPYGYQVTDGKLYIRDDQSSNIVQRIFKEYIQGKGFDAIARCLYNEGQLTPAQLAGKRHANDKWHGSTIRAILTNPHYTGDLVQGRQTTRSVTTKVRHCTTPDEYIVIENSHEAIITKEDFKLVQALIQSRKRQRPQTETHLFTNTLFCADCLKGMHYKKNRKGYVCGSYNKYGSKACSDHHIVESNLIIAILSDIEELTSYVEEQDIITNIESKISELHLQLQTQLNSVNKEIQNIKKQKTTLIRLLADGVISQEEYREVVQQNEDILTKLSNNRSELKQKMTFRDHQGQIRQLQKELENYSHINVLTPEILHRLIKKIEIKADGTARIFYRFSLSPTFL

SEQ ID NO: 17387 - protein, 516 aa, synthetic construct
MAGKKVTVIPMKPRQWAAENTEEKPKLKVAAYCRVSTEMEEQASSYEAQVQHYTDYIQRNPDWELAGIFADEGISGTGTKKRDGFNRMIEACQKGDVEYIITKSISRFARNTVDCLQYIRQLKDLHIAVFFEKENINTMDAKGEVLLTIMASLAQQESQSLSQNTKMGVQYRFQQGQLRINHNHFLGYTKDEDGNLVIEPKEAEVIKRIFREYLEGSSLQEIANGLMSDGILTGGKRKLWRGEGVRLILRNEKYMGDALLQKTYTTDFLTKKRVKNDGSYAQQYYVENSHPAIIPRDIFMQVQQELDRRKSMKNKHSQCFSGKYALSGITVCGDCGNAYRRVHWKNRGTVWRCKSRVDKREHNCSGRTIYEKDLHEAIIKAINETLVDREDFLQQLSENINSVLTDGLTGRLEELDSKLKELESEIISMAIGGQGYDELATKILALRNERDMVGREIAADANMQQRIDEMGDFVKNHDTISEYSEVLVRRLIEKVTIFEKDIVVDFKSGVNIAIEI

SEQ ID NO: 17388 - protein, 517 aa, synthetic construct
MKTIHKLARPQLPEPPKLKVAAYARVSTSSNEQLASLQTQITHYENHIQNNDQWEYVGVYYDEGISGTKVEKRDGLHRLIKDAELGKIDLILTKSISRFSRNTVDCLNLVRKLTDIGVTIFFEKENINTGDMESELLLSILSSLAESESYSHSENMKWANRKRMAKGIFKTVPPYGYQRKGADFYLIPDEAKVIEQIFKWALEGVSAYQVAKRLNEKNIFTRKGSKWQASGINNILHNIVYTGTMIHQRYFNDDQFRKKKNNGELPMYRIYNNHPPIISWEDYERVQELITLRANAKGTSKGSQKYSQRYVFTKRIICDKCGCNYKRVHTAGKGNTKVVKWSCTGHLKNKDGCDALPITDESLKTAYLTMLNKLILGHTIVLEPLINTPVEGKASKQELEKLSIEITKIDEKLEVLASLNASGVVSTKTALEEQGRLQMELNKLQEKQHKIMESVNGTSTQRIQLEQLHQFTKRSEMLTEWDEDLFLRFAERIVVYSRQEVSFELKCGLLLKERLEA

SEQ ID NO: 17389 - protein, 481 aa, synthetic construct
MIATNKVAIYVRVSTTNQVEEGYSIDEQKDKLSSYCDIKDWNVYKVYTDGGFSGSNTDRPALESLIKDAKKRKFDTVLVYKLDRLSRSQKDTLYLIEDIFIKNNIAFLSLQENFDTSTPFGKAMIGLLSVFAQLEREQIKERMQLGKIGRAKAGKSMMWAKTSYGYDYHRETGTITINPAQALAIKFIFESYLRGRSITKLRDDLNEKYPKHVPWSYRAVRTILDNPVYCGFNQYKGEIYPGNHEPIISKEEYDKTQSELKIRQRTAAENVNPRPFQAKYILSGIAQCGYCGAPLKIMLGVKRKDGSRLKKYECHQRHPRTLRGVTTYNDNKKCDSGFYYKDKLEASVLKEISKLQDDADYLDKIFSGDNAETIDRESYKKQIEELSKKLSRLNDLYIDDRITLEELQSKSAEFISMRGTLETELENDPALRKNKRKADMRKLLNAEKVFSMDYENQKVLVRRLINKVKVTAEDIVINWKI

SEQ ID NO: 17390 - protein, 517 aa, synthetic construct
MYRPRNLDVFIYLRKSRKDIEEEKKAAESGASYDTLQRHRDNLLAVARKEGHNILGIFEEIVSGESIAERSEIQKLLRELETGVADAVLVMDIDRLGRGDMLDQGILDRAFRYSGTKIITPTEVYDPESETWELVFGVKSIVSREELKVITKRLQGGRRDSAAKGRSISKKPPYGYLRDEQLKLYPDPETSWVVVKIFEMVRDGHGRQAIAAELDRLGVKPPDEKRAFWSPSTISAIIKNEVYLGHIIWGKVKYIKQNGKYKRKKMPRERWYVKENAHEPLVSKELWEAANKAYRSRWRPSTVESKPLANPLAGLLKCEVCGYTMWYQPRKDRPHPLVRCPNPKCKGVQKGALLPLVEEKILQSLTEFVDQFEVQEEALARKEQRSVIPLKQKAIEKKEKELRELHKQKDALHDLLERGVYTIETFLERQQTIVSRIKKTQEEIDQLREEIAKEQLKEKNINEYIPTVKKVLDAYRLTDDVEKKNRLLKSVLEKATYLRKPEWTKKDQFTIQLYPRI

SEQ ID NO: 17391 - protein, 481 aa, synthetic construct
MIATNKVAIYVRVSTTNQVEEGYSIDEQKDKLSSYCDIKDWNVYKVYTDGGFSGSNTDRPALESLIKDAKKRKFDTVLVYKLDRLSRSQKDTLHLIEDVFIKNGIEFLSLQENFDTSTPFGKAMIGLLSVFAQLEREQIKERMQLGKLGRAKSGKSMMWAKTSYGYDYHKETGTVTINPAQALTIKFIFESYLRGRSITKLRDDLNEKYPKHVPWSYRAVRTILDNPVYCGFNQYKGEIYPGNHEPIISKEEYDKTQSELKIRQRTAAENVNPRPFQAKYILSGIAQCGYCGAPLKIMLGVKRKDGSRLKKYECHQRHPRTLRGVTTYNDNKKCDSGFYYKDKLEAYVLKEISKLQDDADYLDKIFSGDNAETIDRESYKKQIEELSKKLSRLNDLYIDDRITLEELQSKSAEFISMRGTLETELENDPALRKNKRKADMRKLLNAEKVFSMDYESQKVLVRRLINKVKVTAEDIVINWKI

SEQ ID NO: 17392 - protein, 541 aa, synthetic construct
MEVLEVIRKKSRAAAYCRFSSSNQREESIDAQLRAIYKFMGEHDYTPVGDYIDMALTGTNTDRPNFQRMIEDAKKGLFDVVIVHKMDRFSRNVRDTLNIESELAQYGVKVISVIEQFADTPEGQLQQIIQLGVGQYYSQNLAREVMKGLRENAYKCLHNGGLPPLGYDVDPITKQYIINEKEAESIRIIFKKFLEGWSYRELAEYLNVLGYRTKIGNKFSANSSFYDILVNSKYKGEYVFGRSLSKPKQPGMKRSHRKNKDESEIIRVPNGLPAIVDEGTFEQVQKLLASRQRSKGASKAKEVYLVSGLIECGECGSAYHGSARIGGRNKQKYVSYRCSKRKKIENPCKCKEINRTLLDSFIVNQLFTTILNPQHLEMLHQKVNEKLKQKFSEMDDDLPKLEKQLKEVNQKASNLVQAIAVGGLGSIDTITAELQRLEQQKIVLTNEIQNHQVKQSEVNLTLDQMKDVLEEAKEYVLKNNDEMMKFILSRFIHKIIIHNEAIEIEYNLGGFFVEFKKVVLIETKVYSKKEIYAYSPLKEVS

SEQ ID NO: 17393 - protein, 515 aa, synthetic construct
MYRPQELDVFIYLRKSRKDLEEEKKAIEHGQHYDTLERHRTQLLELAHKGHHNIIDIFEEVVSGEYISERPMMQKLLREVETGIADAVLVMDLDRLGRGDMVDQGTIYRVFRYSETFIITPTEVINPNDENQELTFSIKSLIAREELKTIVKRMQRGRRASAKEGKSISRVPPYGYLRDNNLKLYPDPEKSWVVSKIFESMASGMGRQAIAQELDRLSISPPEGEYWNPSTISSIIKNEVYLGHIIWGKIRYTKQNGKYIRKKVPKERWQRHNHAHPPLVSEELFQKANTAHSKRWRPPTIKTKKLSNPLAGILLCELCGHSMLYQPRKDRPNPQVRCVQPSCKGIQKGASLTLVEQRILDGLKQIIESFEIQENMVQKKKSSNTIHLQQKALEKKEQQINDLQKQKSNLHDFLEKGVYDVDTFLERQKSIAVRLKTTQEAIEELKHEIKRILEKEKHIHEFVPRIKNVLEAYYATNDIEKKNHLLKSALEKVTYLRKKEWKRKDEFVVELYTKI

SEQ ID NO: 17394 - protein, 514 aa, synthetic construct
MAKELTKTASVAAYLRKSREDADQDDTLARHRKQLIDLVKQRGFENVDWYEEIGSADSIKNRPVFSDLLKKIENDEYDAVCVVAYDRLSRGNQIESGIISKAFKDTETLLITPTRTYDWSIEGDEMLSEFESMIARSEYRVIKKRLKQGKINAVKNGRLHSGNVPYGYKWDKNDKTAKIDKEKHEIYRLMVKWFLDEEYSATEIADKLNELGIPSPSGGSTWYSEVVADILTNDFHRGLVWYGKYRARKNGIGIEKNPDSSSIIMHKGNHEPMKSDEEHGAIIRRISKLRTFKPGRKLNKNTFKLSGLVRCPRCGKVQVVHTPKNRNPHVRKCLKKSKTRTTECNNTTGIPEEALYKAIVMKIREYNEVLFSKDSSEKKDEEARTYMNQILSLHEKAISKSNKRIEKIKEMYMDEIIDKDEFKSRIDKEKKSILEAENEIRTLKESADYHDEIEHEQRKIKWNHEKVQEFIESDQGFTPSEINLILKLIISHVSYTMVKNEYGEFDVDLRVNFN

SEQ ID NO: 17395 - protein, 515 aa, synthetic construct
MKTAIYLRKSRADLEAEARGEGETLAKHRTTLLKIAKEMNLNVLSVREEIVSGESLVKRPEMLALLEEIEDNKYDVVLCMDMDRLGRGGMKEQGIILETFKRSNTKIMTPRKTYDLNDEWDEEYSEFEAFMARKELKIITRRMQRGRVASVEAGNYLGTHAPFGYDIHRLNKRERTLTIIPEEASVVRMIFDWYANEDMGANAIRSKLNDLGYKSKLGNEWNPYSILDILKNNVYIGKVTWQKRKEVKRPDAVKRSCARQDKSEWIIADGKHEPIIPQSLFEQVQEKLNSRYHIPYNTNGIKNPLAGIIKCAKCGYSMVQRYPKNRKETMDCKHRGCENKSSYTELIEKRLLEALKEWYINYKADFEKHKQDDKLKETQVIQMNEAALRKLEKELVDVQKQKNNLHDLLERGVYTVDMFLERSNVVSDRITEITSTMKNLKKEIKTEIKKEKVKKDTIPQVEHVLDLYFKTDDPKKKNSLLKSVLEKAVYKKEKWQRLDDFELVLYPKLPQDGDI

SEQ ID NO: 17396 - protein, 453 aa, synthetic construct
MIKGACYVRVSTDNQLENYSIEEQTDRLKAYCKAKDIQIVKIYTDGGYSGGNINRPALQQMLQDIGKGLIDSVIVYKLDRLSRSQKDTLMLIEDCFLAKNVDFVSVNENFDTSTPFGRAMIGILSVFAQLEKDQITERFTMGRIGRAKNGYFHGGGNAPTGYDYIDGELIINDYEALQVKDLYNRFLKGYSIHNCWQYMHQKYGGWSNEVSVRNVLKNELYIGKVKFKGVAYQGNHQPIISEEIFRQVQDLFNSSRRTSDTFKRSPFKANTLLSSLVYCGKCGARFHGEHGNYSCYSRTKGDKKYIVDPNCKNKKWKIEELNKLVLDYITRLDFSKLQNSHPAPVPVTDYSLRLTEIDKQIEKLIDLYQVSGIPLESIQKKMDALTKEKEALLNVSKPKNVPITTLAEMITARDTLMSLSDTGSLDEKRACLTMIIDRIIIDDDNVNIKLKHL

SEQ ID NO: 17397 - protein, 522 aa, synthetic construct
MNHSKRKVAIYIRVSTEEQANEGFSLGAQEDYLKQYANTKGYEVYDIYVDDGYSGKDYNRPEIQRLFKDLYQEKFTGILVKSVDRISRRVSDVTKLIDDVLAPRKCCVLVSDNNLDSSTTGGTAFIQLLATFAEYERSMIVQRVKSGMSKRAELGYWNGGRVLGYDVKNKELKINKEEAEIVRKVFHLRAEGKGYKSIAIILNQQGFKTKRGRLFSIGTIKTILENPLYIGYCRWGRHKNWNLERRKGKTDEYKFVKGKHEPIVSEELWKRVQGVNYAHKKSISKNRNFNGEFVLSGILRCPSCGAGMVMCKTKKRDKSGYHLYYMCQAFHSKGKLACKSNLIRKKDIEEKVLQCINKIILIPSIVDKTFERIQEKQESGIERIKNDLSYINEELKRKKQFIKKLNKDYFDEKIRVETYTELSEPLREEIVELEREKSKLDRKIESSEIPITKEMVIKALENFTNLYENATYEQKKSLLRAIIKKIEVQPNRKEIKGITYWFDCDNGQDDALLVSKEGRTVP

SEQ ID NO: 17398 - protein, 532 aa, synthetic construct
MKQYNEMRLEDILQPGKRVAFYARYSTKDQGYEMQKHSVEVLLERYGCEIKKEYVDAGVSATKVPFEERPHLQKLICDAADKKFDCIVVYKNDRIARQIEEHDKFRKQMFEMNMHVVVSSSHELYTVGEIVPQTVKDGLTRIEAALIQERTKDTFHSKAKRGAWLGGKASYGYEYRVIEENNGGIKNRIEQFVDVEQEQQVVKEIYRLFELGFGFQQIADEIKNKKWDERIKWTKERIRYIITNPFYSGLITMNRYYKGVLNNKSEWIKGKVPNMNPIFSQEYWEYIIGLFEERKERKIHSKDYSTPFLLRNILYCEHCKESMTTKNQEPGGTKSRNKKEKKIRRIYDCKNCNFKLQAEMVHEQFRKKYLPYVLEQVTQGKKDQVELSIEKRLRKELSDLRSANRKLETEAIELNQQIEELNREIKLHYEKEIIQEEVLEFMKILMSHRSNKMHELNVIKDNQDELKKRMNRIEQTIKEKKYLPSHDLLSEFAQENVNPQKLRAFLLQFFKCVYITSNGELLMTVNNSLIES

SEQ ID NO: 17399 - protein, 515 aa, synthetic construct
MKTAIYLRKSRADLEAEARGEGETLAKHRTTLLKIAKEMNLNVLSVREEIVSGESLVKRPEMLALLEEIEDNKYDVVLCMDMDRLGRGGMKEQGIILETFKRSNTKIMTPRKTYDLNDEWDEEYSEFEAFMARKELKIITRRMQRGRVASVEAGNYLGTHAPFGYDIHRLNKRERTLTINPEEASVVRMIFDWYANEDMGANAIRSKLNDLGYKSKLGNEWNPYSILDILKNNVYIGKVTWQKRKEVKRPDAVKRSCARQNKSDWIIADGKHEPIIPESLFEQVQEKLNSRYHIPYNTNGIKNSLAGIIKCAKCGYSMVQRYPKHRKETMDCKHRGCENKSSYTELIEKRLLEALKEWYINYKADFEKHKQDDKLKETQVIQMNEAALRKLEKELVDVQKQKNNLHDLLERGVYTVDMFLERSNVVSDRITEITSTMENLKKEIKTEIKKEKVKKDTIPQVEHVLDLYFKTDDPKKKNSLLKSVLEKAVYKKEKWQRLDDFELVLYPKLPQDGDI

SEQ ID NO: 17400 - protein, 479 aa, synthetic construct
MRYAVYVRVSTDKDEQVSSVENQVDICRYWIEKNGYEWDQNAVYFDDGISGTAWLERHAMQLILQKVRKNELDTVVFKSIHRLARDLKDALEIKEILLGHGVRLVTIEEGYDSYYEGNNDMKFEIYAMFAAQLPKTLSTSISAALSAKVRRGEHTGTIPFGYDRIDKKLIINDEEALLVKEMFDWYEDGRGYRMIANNLNKKGCRTRFGNLWSEASVKTIVTNSLYTGEHVMHKYKTVKVDGKKKTVKNPKEKWLVFENHHDAIISKEQWERINPVSDVKDKKTKSDFRNEFRGIVWCAHCGKRVRAIYAGVRSKYERVYMKCSTYKAYGTCVNHIPVRYEDFRNLILERLKQKQEYIETRLVAQIKDKLQGKIAKSKKTIKQLESKKEKLLELYMDSFIDKETFVNRNRKLEDEMTAQELQLLKLKDKDIQNRETKDIQDAFMLLQEEQDLHKAFQKLIKKIVFYQDGKLDIEYTFDI

SEQ ID NO: 17401 - protein, 515 aa, synthetic construct
MKTAIYLRKSRADLEAEARGEGETLAKHRSTLLKIAKEMNLNVLAVREEIVSGESLVKRPEMLALLEEIEDNKYDVVLCMDMDRLGRGGMKEQGIILETFKRSNTKIMTPRKTYDLNDEWDEEYSEFEAFMARKELKIITRRMQRGRVASVEAGNYLGTHAPFGYDIHRLNKRERTLTINPEEASVVRMIFDWYANEDMGANAIRSKLNDLGYKSKLGNEWNPYSILDILKNNVYIGKVTWQKRKEVKRPDAVKRSCARQDKSDWIIAEGKHEPIIPESLFEQVQEKLNSRYHIPYNTNGIKNPLAGIIKCAKCGYSMVQRYPKNRKETMDCKHRGCENKSSYTELIEKRLLEALKEWYINYKADFEKHKQDDKLKETQVIQMNEAALRKLEKELVDVQKQKNNLHDLLERGVYTVDIFLERSNVVSDRITEITSTMENLKKEIKTEIKKEKVKKDTIPQVEHVLDLYFKTDDPKKKNSLLKSVLEKAVYKKEKWQRLDDFELVLYPKLPQDGDI

SEQ ID NO: 17402 - protein, 452 aa, synthetic construct
MKAAIYIRVSTQEQIENYSIQAQTEKLTALCRSKDWDVYDIFIDGGYSGSNMNRPALNEMLSKLHEIDAVVVYRLDRLSRSQRDTITLIEEYFLKNNVEFVSLSETLDTSSPFGRAMIGILSVFAQLERETIRDRMVMGKIKRIEAGLPLTTAKGRTFGYDVIDTKLYINEEEAKQLQMIYDIFEQEKSITFLQKKLKNLGFNVKSYSSYNNWLTNDLYCGYVSYADKVHTKGVHEPIISEEQFYRVQEIFSRMGKNPNMNRDSASLLNNLVVCGKCGLGFVHRRKDTVSRGKKYHYRYYSCKTYKHTHELEKCGNKIWRADKLEELIIDRVNNYSFASRNVDKEDELDNLNEKLKTEHTKKKRLFDLYISGSYEVSELDGMMADIDARINYYEAQIEANEELKKNKKIQENLADLATVDFDSLEFREKQLYLKSLINKIYIDGEQVTIEWL

SEQ ID NO: 17403 - protein, 515 aa, synthetic construct
MKTAIYLRKSRADLEAEARGEGETLAKHRTTLLKIAKEMNLNVLSVREEIVSGESLVKRPEMLALLEEIEDNKYDVVLCMDMDRLGRGGMKEQGIILETFKRSNTKIMTPRKTYDLNDEWDEEYSEFEAFMARKELKIITRRMQRGRVASVEAGNYLGTHAPFGYDIHRLNKRERTLTINPEEASVVRMIFDWYANEDMGANAIRSKLNDLGYKSKLGNEWNPYSILDILKNNVYIGKVTWQKRKEVKRPDAVKRSCARQDKSDWIIADGKHEPIIPESLFEQVQEKLNSRYHIPYNTNGIKNPLAGIIKCSKCGYSMVQRYPKNRKETMDCKHRGCENKSSYTELIEKRLLEALKEWYINYKADFEKHKQDDKLKETQVIQMNEAALRKLEKELVDVQKQKNNLHDLLERGVYTVDMFLERSNVVSDRITEITSTMENLKKEIKTEIKKEKVKKDTIPQVEHVLDLYFKTDDPKKKNSLLKSVLEKAVYKKEKWQRLDDFELVLYPKLPQDGDI

SEQ ID NO: 17404 - protein, 451 aa, synthetic construct
MTKAAIYIRVSTQDQVENYSIEVQRERIRAFCKAKSWDIYDEYIDGGYSGSNLERPGIKKLITDLKNIDAVVVLKLDRLSRSQRDTLELIEEHFLKNNVDFVSITETLDTSTPFGKAMIGILSVFAQLERETIAERMRMGHIKRAENGLRGNGGDYDPAGYTRKDGHLIIKKDEATHIKRAFDLYEQYYSITKVQEVLKEEGYPIWRFRRYRDILSNTLYIGRVTFSGKEYEGQHEPIISSEQFKRVQALLKRHKGHNAHKAKQSLLSGLITCSCCGENYVSYSTGKSKAAESKRYYYYICRAKRFPAEYEERCMNKTWSRKKLEEVIISELKNLTEEKKQTNKKEKKINYEKLIKDIDKKMERLLDLFMNTTNISKGLLEQQMEKLNLEKEKLLNKQQRSEEESLSREVTLTTIDDAFETLEFKEKQIIINNFIEQIYINQNNVKIIWRF

SEQ ID NO: 17405 - protein, 537 aa, synthetic construct
MKQQIYNTALYLRLSRDDELQGESSSITTQRSMLRLYAKEHHLNVIDEYIDDGWAGTNFERPSFQRMIEDIEAGKINCVVTKDLSRLGRNYIMTGQYTELYFPSHNVRYIAIDDGVDSEKGESEIAPFKNIINEWVARDTSRKVKSAFKTKFAEGAHYGAYAPLGYKKHPDIKGKLLVDDETKWIVEKIFSLAYQGYGSAKITKVLREEKVPTASWLNFTRYGTFAHIFEGKPESKRYEWTIAHVKAILKSEVYIGNSVHNMQSTVSFKSKKKVRKPESEWFRVENTHEPIIDKEVFYRVQEQIKSRRRQTKEKATPIFAGLVKCADCGWSMRFATNTANKTPYSYYACSYYGQFGKGTCSMHYIRYDVLYQAVLKRLQYWAKAVQQDEEKVLNKIQKAGNAERIREKKKKASAFKKAENRQNEIDRLFAKMYEDRACEKITERNFVMLSSKYQKEQIELEQQITNLREELSKMEQDMIGAEKWIELIKEYSVPKELTAPLLNAMIEKILIHEAITNEDNERIQEIEIYYRFIGKVD

SEQ ID NO: 17406 - protein, 515 aa, synthetic construct
MRYEDTAIYVRVSTTKESQKFSPEHQRMDCEEKARQLSLKVREEYIYVDRDSGTSIVGRPSIQTLIEDAGKGYFKTILFSSLSRFSRDTYDSLGLKRTLVDKLGLRVVSLDENYDSQVDHDEFKFQIFSAVNQKLSEQISISSRRGIRQSGMKGNYLGTIAPLGYDKIKVDDRKTIIPNERARIVQLIFDMYVNQKMGEKAITKYLNKEKVPSYRGGKWGVTSVERILTNEIYTGKNIFNKFTVVKVYNDINNISDKSRKLVKRDKELWEESGKQTHEAIVSEELFRKAQEIRLERGGGKRGGVRNKVNVFAGIIKCKHCGSSLNIVTSNGKKNSYRYLLCSKRRRQGETGCENHNRIPYDDFKDALIERLSEKLRSKTKSGKTVTFTKKAKEDTGKLIVKYEKQIQNTRKLLFEIRKQKLNDEIDDEQYEFEKEQYEQEIKQKQEQLSKMKSELERALNDSEQFKEINISLDELSDLGQFTEVDQVNLILKKLVSNITVDKANNVEIHSVLGRL

SEQ ID NO: 17407 - protein, 544 aa, synthetic construct
MRNVAVYPRVSTGMQASEGTSLEGQLELCYKKARSLNISKEEIREYIEYGFTGEDIDRPALNELMQDVKDKKIKRLIVTHPDRLTRDLTDKLILCRELEKNDVELTFVDTEYLTTPEGQLFFNMMSSIAQYELQLIKKRTVRGRIRAVEKEGKVMPMRVAPFGYDFKDGKLTINEEESKFVHLIYQWYVREGRTLREIGEELLMLGALPKRAESKVWNASSISKILTSEIYVGRYFYNRRETKKLKGQKTVSGKAKKTYKIRDRSEWIELSVPAIISESLFSLAQLQRDKNLTRKGGNVKHNYLLKSLIRCSHCGRRWECTTYNSKKQGEKVTYPLYRCSGKYPRRFGESVHKCRVPTLRTDVLDDFVWSIVVKFLDNPEEVLSRLEETSKSPDDNLKELADEYSRQLKSKEDERTKIKLMFRKGIIDEKELDDDITQLNKEASKIKNEYDKIQDKLNSRNNKEATKEQLMELANAFKKYASAKLTDEDKRWIIEKLIDEIVITHNEEEDRFSISCIGYLGAKKDTYSFNLVSSTHRQKVRQYG

SEQ ID NO: 17408 - protein, 663 aa, synthetic construct
MRVLKDHEKLDRSEITALIGKIRAIVYTRVSSDIQIDNYSLESQIDICVKEAKTKFDINEDELIVLREEAESGDNPNRPMLNYMLFLLEKELGNKVIFLHPDRLSRHLHLQQQITHRIWELGCDLHFVEFDLQKGNAESMLNYNIQGSIAQYNKAKILANTKRGRQTMVSNNKIPGMNRIYGYTYDKELNTLVENEYEKERYLTMVNMVLEGSTGSEVAAYLAKKKHPAPKGDNWYQATISRILRNESYMGTYYYGKTEVEQQNGKRRQVPRPRDQWQKITIPAYIDEITFGRLQNCLDGNIKNGGRPSEDYLLKGIARCGRCGAAASSGITTRTQNGLLKYYSCTRKTRKSYSVETGEPNKICLGENWRVDMVDSLIWSEVVRLIDNPKTLIDKMLERISDVSKVKELEGNRDDIGKLIKDKESSKARYIDLYAEGIIKSKEDLSIKLERADTEISELNKELSLITDNLELNKRQNKNTSPGGPLLKKYQNIINNELQMKDARKLMSILVDKIVLHDNKRIEIFYKFTAESDLILSYNDVYDSINFDKLKWVLESSAPKWNEIKHMYPRMLKMYNEDLLSFEQIAEATETDWWSIKQMFKAKGAELLSTKERGIKRRARDFEKIYNLHYVEGLSLTKIYKDYELSPPYCRQVLEENMNKIIN

SEQ ID NO: 17409 - protein, 416 aa, synthetic construct
MNKIKSCLYCRVSTQNEEQNTSYKHQQNISVKGYDIIKVYADRGTGTNIKRKNFQQMLYDCGVDIKEIEGNVLFIASDRKAMFESIIVTHTSRFLRNQLLMKLCIKALKKKNVEIYFSDMNKSSLDNDIEFVLNILFLLDEQESRNTSQKIKKGLERSRKDKKYIQVPNRLWGYDYIKKENKLIINKDGKIIKEIFDMYLNGLGYRKICLNLKEKYNIEKNSTDIKNLLNNSRYCGYNFYNKWTVSRLDGIKKKNKDYDIFPSDKIEPIVSYEDWCKVQNIIKSKSNGRQGLKHNMYPLSQKIKCESCGCSYVRKREKRGNYVRVFWSCKTKFFKQKGECINPNITERIIVKHLLDKDLGIKSYIRAIELELKKSLNDIKGIDIKEIDDLILKVENKRKKLLDIYTTWYLYWRINR

SEQ ID NO: 17410 - protein, 550 aa, synthetic construct
MNRQSTFSTIRKSTLAFEEAKLTALYCRLSRDDELAGDSNSIVNQKAILKKYAEDNGFRNIEFYVDDGVSGTTFDRPDFNRMIADVETGRIGTIIIKDMSRFGRDYLKVGYYTEIMFPEADVRFIAINNGIDSANQADSDFTPFLNIINEWYAKDTSKKIRAVFKSKGQSGKPLCTNPPYGYIKDPKDKLHWIIDEKAAEVVRDIFRLCMAGFGPTQIAKQLEKRCIDTPTVHLRKMGINTPARPPENPYAWSARTVADILAKMEYLGHTVNFKTSKKSYKSKVKILNNPEDWLVFKNTHEAIIDEGTWETVQKIRDGKRRPSRLGEMGMLSGMMFCADCGAKLYQVRGKGWTHDKEYFVCATYRKKKGMCSSHQIRNVVVEQLLLEDLRRVTSFAKDHEQEFIRIVMNNSEKELAKELRQSQKEYEQAQARIADIDKIIRKLYEDNVMGKIPEERFYKMSAEYETEQKALEERITELKHTIDTVNEQSLNTDRFLALVKKYTEITELDAEIIREFIDKIIVFKAEKVDGRRTQRIQIFYNCIGAIDLPN

SEQ ID NO: 17411 - protein, 567 aa, synthetic construct
MFRTAYSVMVMSVAVVVGLLGRLVDNRRLSSSTGTIAVVSSERPARALIVTRLSRVTDNTTSPERQLASCRELITQRGYSEVGIAEDLDVSGSVDPFDRKKRPRLAEWLHDHSHEFDVLIAYRVDRFTRSLRKLQELVHWCDDNGKTLVSATEPHFDTTTPFAAVVIALMGTVAEMELEAISERTKSSSRHLIRTGRYRGSVPPWGYAAEKVDGEWRLVPDPAQTALVEEVARRVIAGESLNSVCHDFTRRGVKTPKGKSWNPTPMKRSLISEAMLGRVTDRDGKAIRGDDGSPITRAEPIIDREVWTELRDVLASRSKGKRPATQGSLLTQVIFCGIPGCGRPAYRFKSGGGKAQHYRYRCQSAVQAYKCRNRTIRADDLCQLIESTVIGLLGDSERLERVWSQGSDNSDELAELNELLEDLTDQLGTGMFKRGTPERARLDDRIRQAATRRDELASEPQKPSGWTWESTGEVFGPWWAQQDVATKNGWLRAAGVRVEFDHESIRVDLGDVETMLKELHAGPAAEATRAALAAMTEAGIAGMELLPGGKAVVHTADGRQYELQEGN

SEQ ID NO: 17412 - protein, 523 aa, synthetic construct
MAVSRNVTVIPAIKRVGNNKTSESKPKIRVAAYCRVSTDSEEQASSYEIQIEHYTNYIKKNKEWELAGIFADDGITGTNTKKREEFNRMIEECMAGKIDMIITKSISRFARNTLDCLKYIRQLKDKNIAVFFEKENINTMDSKGEIMLTIMASLAQQESQSLSQNVKLGIQYRYQQGEVQVNHKRFLGYTKDENKQLVIDPEGAEVVKRIYREYLEGASLLQISRGLEADGILTAAGKAKWRPETLKKILQNEKYIGDALLQKTYTVDFLSKKRVKNNGIVPQYYVENSHEPIIPRELFMQVQEEMVRRANLRGRKGGKKRVYSSKYALSSIVYCGHCGDIYRRVHWNNRGYKSIVWRCVSRLEEKGSECTAPTINEETLQTAVVKAINELLANKEPFLSTLQKNIATVFNEENDNATDDIDGKLEELQQQLLIQAKSKNDYEDVADEIYRLRELKQNALAENAEREGKRQRIAEMTDFLNEQSCELEEYDEQLVRRLIEKVTVFDDKLTVEFKSGVEIDIEI

SEQ ID NO: 17413 - protein, 523 aa, synthetic construct
MSRPTNLDVIIHLRKSRKDIEEEKKALETGIPFDTLDKHKRELMELVRREQHNVIKIFEEIVSGEFLSERPEAQEMLRNVEDGECDGVIVMDLDRLGRGDMIDAGTIFRAFKYSETLIITPSEVIDCNAEGAELLFGVKSIIAREELKQINKRLQGGRRRAVKDGRHIAKTPPYGYLRDENLKLYPHPEEAPVVKKIFELLAEGYGRFKVIEYLMQAGYKAPSKRDIWEHSTISYLVKNEVYIGHIVWGRKKHTKRNGKRVTKRLPPELWTRHDNAHEPIVSQELFIKANEAHTGRFRVSRKEGSSVSNPLAGIARCGVCGRTLAQLVNPERPNPQIRCTNVACKTIQKGIVTYLVEEKIIAGLEELVEQKEMTQTELSSRNKRKDKNEERMSALTNYIQKATTELKEQHSMRETTFEMLERKIYTEELFLQRHKTISDKIKQLEAEIEKSQNEINQLKSRLKMQAQVIPKIHKVIQAYKSLDDPEQKNNLLKTIIEKVIYIRKKEWKKPEQFEIEIILRFPT

SEQ ID NO: 17414 - protein, 510 aa, synthetic construct
MYRPLIKCAIYTRVSTDHQADSTINQEAQGREYISRLGPEYDKTDIIVYRDEVVSGYYTSVFDRAEMKRAIQDAKENKFKLLIFKEVSRVGRDKQENPAIIGVFEQYGVRVIAINDNYDSLNKDNITFDILSVLSEQESKKISSRVSSARRQKARRGQWGGEAPIGYKVNRETKKLEIDPENCYIPKLIFDLYVNHGLGTFKVAEHLNGHGIRTKNGNLWGRVSINRVIRNQAYIGNVVYGTRRNALQREYDDTGKMSKKKVQIKIDKTEWEVAEDVHEPIIEKETFYNAQKILLSKSHGRTPRRAYHPLTGILFCAKCGQGMVCQKRTCKDKEYRYYICKTYHKYGRSVCSQANVNADVLEQDVIDIVKNELNSMPADKVEITGSKTNDIERLGKEIKKNNVKREKLKKDQIDIFNQRELFDESTYQQQMLEIKSQINHIDEEIQIIEKQIKVLMEQVAESSTLDYLIEEVKNISLNDPEKLRVLLHDIIKRIELKEKHLQIEFNYDFR

SEQ ID NO: 17415 - protein, 480 aa, synthetic construct
MRVGTYRRVSTEMQREDGVSLQTQDERLNAFIQSQGWALVEDYADEGYSAKNMDRPSLKRLIEDIKRQKIDVVLVYRLDRFVRSVSDLHHLLQVMDKHDVKFKSCTEVFDTTSATGRMFITIIATLAQWERETIAERVFDNMLHRSEQGKRNGAPAPYGYNLEDGILTPDENEATWVRYIFQKYKTNGSQNIAKYLNVRGIRTKKGEVWSDYSVRYILKNPIYAGYVRWNLRSAAKGKNTETVIAKYEQKNFEPLISKSDWDDIQELMKERSFMAFRSDNHYPFSSIAKCEECGHSFTGAFKKRKSGGVHRFYKCAGRFRTGTCKVTVIAEEAIEKAFLETMYFSMYDEKEYLAEKEPEIDAQQIQKELVHIEGKKARIKELYVDGDIAKEDYKKKIAELQERENDLLLQLETEDVRASEEEVRMWISSVKANWNTLSYESKKAAVHAIFRSMTIRVIEPPKVGKVAAPPVVEIVNFELR

SEQ ID NO: 17416 - protein, 508 aa, synthetic construct
MRCAIYARVSTKRDEQRNSLDNQIAFTTGIVAEKGWQLTKTYIDDGVSGTTFSKRKAIQQLIHDAKRKFDAVIAKSVSRFGRNSVESMTVADELERLGIRLIFPEDNYDTSTSDTKLMFRLKAILAEEESRKLSDRIKIGRQTSARLGKYQASLVAYGYRRGENGQLVLDEQYSLIVREIFDLYLYKGWGWYRIASFLNTRKIPTPRAVSGGSNAGTMWHESSIRVILENVVYTGALVHHREETIDFISKKRRAIEPDKQVVIENAHPAIITKEELLAALEKMRTKGRHKSNGRESLFAHIACCADCGKGMMFRKDRNKREGGAYVCGGYVKHTSSYCSSHIIGNQKLRQIVIDDLHELISNNLKLEQLYRVVGGEIELHQNSYSKELQGVNKQLAKLDSEFRSLLSLFQQKIVGIEQFRSTNAVIEAEQRRLTEHKVELERMIESKKDTDRYLQDFQRQINKIAKLDIKDEQILKQVIQKLIHKIEVHNDGSIKIHYNIARPLNIGA

SEQ ID NO: 17417 - protein, 546 aa, synthetic construct
MSLKREYLIELGIEHIINYLRRSRQDEERERRTGEDVLKEQKELMDRILEPLGIPFTQKAEVGSGDKISTRPVFQNVIGELRAKKYQAIAVKEISRMGRGSYTDMGIIYDLIVDNRIFIITPYKTYDPRNSSDLRQIRFELFMSREEFETTRERLFGGRVNNAMAGRWVAGAAPFGFNYNKTTKKLEINEEQAAVVRMIFNYYVNGVPQENGTRRDVSFRALATYFSKKTPIKTPQGKREWTFMQLKQLITNERYIGTMKFRVHQTINGKRVVRPEEEHIIVPNAIPAIIDMETWELAQKKVKDSSHKPRTKMDFSPCELAGLCICNQCGKRMVRQYSTQNYKTKAGTINTYHKEFLWCTTSGCTFVKYRAIEEDLLETLRHFHDMEDDLLKEEISTKLTEDKETNNADLIEDLTGYFEQRTKELKNRLSFIYDKYENGIYTDEMFLERKAEIDREMEKLNDIKENQSTENNEQKFDPQIIKKNIGSILEAYKTNTNKTQRNKILRSVFDHAYITIIEKGRGRKPAKHVIYPVLKHNILQDDFLVP

SEQ ID NO: 17418 - protein, 553 aa, synthetic construct
MNQGQPKKVAIYARVSTEEQAEHGYSIDAQLETLRKYCELYGGEIVDEYVDRGVSGKSIKGRYEIQRLLKDAEESKFNEVIVWKFNRMARKSIDLLHIVDLLEKNNISFRSFTENFETSTPMGRFALQMMGAVGELERNTIVDNVKMGHKQRAKMGHHNGKVPLGYKVIAGIGSSRESKSVVVIAEEEAVIVRHIFEQYASGHGLKTIANELNHRGHRTQTGKPFSTTAIRDLLDNPMFVGKIRYNRYENWAERRRKGKNKEPILVEGHHPPIISQELWDKVQLLREKKASLPKKRFEGEYLLTGLIRCPECGAAMTASRTVNRSKDGEKVTRMYYSCGRFRSQGSAVCHANSVRKVEAEQAVTERIRQAVVNPEILQRVVHSINERRSGRIKPLRDELAAVQTRITSLEDKKRKYLELYEIDNIDRNMFSERLSVLNKELDSELTRRSKLELELRDDQADPVSYEFVRSLMTTFDALLRRSPFQQRKTLLHLIVKKITLDDKKRVRNVDLAFDKETQKHFLSVTPSADNTAEGVFPIKGKTPNLKSSLLISL

SEQ ID NO: 17419 - protein, 518 aa, synthetic construct
MMEKQVVALYIRVSTEEQVHGFSLEAQKSALYNYCREKQLDIYKLYIDAGRSGKSISGRPSLNELLEDARTEHFQQVLCLRLSRLSRSLKDLLSITELFDKHGITLHSLTENLQTDTPMGKFALQMLGSIAEHERGQITQNVRLGMNRRNKLGKWNSGNLVLGYRWVSHPVNRHLSYVEIIPDEAELVQTIFTWYASGLGLKAIVNRLNKNGYRTKKRKLFHIASVRGILTNVNYIGKITYTDKSASEHKKIVDGEHEPIISIELWEQVQQQLAHRSHQPNRRTSHVFMLTGLLKCPTCGNSMVTAHVSRRRKRKASYVDHYYVCGRYNSGGYAACQPHHIPAEQAEDWVNQHVQQFLSQPSIAEQLAIRLNQRRDKKLEPFRKRLKEIETQQALLKKRTLRCYELFEDGHIDSRELKLKLGKLQSQTAMFEQEKKELEKRIADDPDQSIPLGSIRHVLNDFHPVFRRATSEQQKALLRSMISKIILPANRNIKQAVIQGSAALLNLETPTLQHEGER

SEQ ID NO: 17420 - protein, 462 aa, synthetic construct
MKRAGIYIRVSTQEQANEGYSIGAQTDRLTKYVEAKEYKLYKKYVDAGYSGSKIDRPAMKELIEDVCNNTLDVIIVYKLDRLSRSQKDTMYLIEDIFRPNNVELISMQESFDTSTAFGNATVGMLSVFAQLERKSISERMITGRVERAKKGMYHTGGQSRPPAGYEFQNKKLVVNEYEAAAIRDLFRLFNEGLGRRSISDYLQKNYPGRNKWLPCSIDRMLKNDLYIGKVKFSGESFEGIHKPIIDDVTFFKTQKEIKKRKANNSQKYDYVALLGGLCECGICGAKMANRRSVGRKGKVYRYYRCYSKKGSPKHMMKISDCPSSAQQQDFIDEAVITKLKTLDIDSEIKKRTTSKVNNESIEKQIDNINNQINKLIELFQVDSIPMEVLTKKIDKLNSEKESMKALIDKSQTVNINEFRSRLKVLENFDWDNSEKSEKRKIIEMLIHKVIVYERHIEIILIE

SEQ ID NO: 17421 - protein, 407 aa, synthetic construct
MKRIAIYSRKSRETDTGESIKNQIDMCKTYFNRADDDCLFEIFQDEGFSGGNINRPSFQRMLELAKHKQFDIIAVYKVDRVARNIVDFVNIYDELENHDVKLVSITEGFDPSTPIGKMMMMLLASFAEMERMNIAERVRDNMKGLAKIGRWSGGTPPTGYKNKTIINDNGKKESYLELIPEKKQLIISIFRKAADGYTTYQIGKMFNMSPKTVSNILCNPTYVKSDELSANYLKSIGYSVFGELNGNGYLSYNRRPKKKGKKLSNAKGMFTAVSNHEAPIDSKTWIKANNNLKDRATEAKPRISSNSFLAHLVKCSCGSGMYIHTGHAKKDGTKNLYFVCSKKKGGSKCTSRWLRVDGVEKKVLNVFKKISLNPKLLESYLKQKNKHVDYTESIKNIKNKLIKMTKK

SEQ ID NO: 17422 - protein, 503 aa, synthetic construct
MKMKALVEKILTDLNLKKMIKAAKNKKFNILICYRLDRISRNVADFSNTIEELQKYNIDFISIKEQFDTSTPMGRAMMNIAAVFAQLERETIAERIKDNMVELAKTGRWLGGTSPLGYKSEPIEYSNEDGKSKKMYKLTEVENEMNIVKLIYKLYLEKRGFSSVATYLCKNKYKGKNGGEFSRETARQIVINPVYCISDKTIFKWFKSKGATTYGTPDGIHGLMVYNKREGGKKDKPINEWIIAVGKHRGVISSDIWLKCQNLIQQNNAKSSPRSGTGEKFLLSGMVVCKECGSGMSSWSHFNKKTNFMERYYRCNLRNRASNRCSTKMLNAYKAEEYVANYLKELDINAIKKMYHSNKKNIIDYDAKYEVNKLNKSIEENKKIIQGIIKKIALFDDLDILGMLKNELERLKKENDEMKIKLKELKSILELEDEEEIFLSTMEENISNFKKFYDFVNITQKRILIKGLVESIVWDTGGEEKILEINLIGSNTKLPSGKVKRRE

SEQ ID NO: 17423 - protein, 452 aa, synthetic construct
MKAAIYIRVSTQEQIENYSIQAQTEKLTALCRSKDWDVYDIFIDGGYSGSNMNRPALNEMLSKLHEIDAVVVYRLDRLSRSQRDTITLIEEYFLKNNVEFVSLSETLDTSSPFGRAMIGILSVFAQLERETIRDRMVMGKIKRIEAGLPLTTAKGRTFGYDVIDTKLYINEEEAKQLQMIYDIFEEEKSITTLQKRLKKIGFKVKSYSSYNNWLTNDLYCGYVSYADKVHTKGVHEPIISEEQFYRVQEIFSRMGKNPNMNRDSASLLNNLVVCGKCGLGFVHRRKDTVSRGKKYHYRYYSCKTYKHTHELEKCGNKIWRADKLEELIIDRVNNYSFASRNVDKEDELDSLNEKLKIEHTKKKRLFDLYISGSYEVSELDAMMSDIDAQINYYEAQIEANEELKKNKKIQENLADLATVDFNSLEFREKQIYLKSLINKIYIDDEQVTIEWL

SEQ ID NO: 17424 - protein, 452 aa, synthetic construct
MKAAIYIRVSTQEQIENYSIQAQTEKLTALCRSKDWDVYDIFIDGGYSGSNMNRPALNEMLSKLHEIDAVVVYRLDRLSRSQRDTITLIEEYFLKNNVEFVSLSETLDTSSPFGRAMIGILSVFAQLERETIRDRMVMGKIKRIEAGLPLTTAKGRTFGYDVIDTKLYINEEEAKQLQMIYDIFEEEKSITSLQKRLKKLGFKVKSYSSYNNWLTNDLYCGYVSYADKVHTKGVHEPIISEEQFYRVQEIFSCMGKNPNMNRDSASLLNNLVVCGKCGLGFVHRRKDTVSRGKKYHYRYYSCKTYKHTHELEKCGNKIWRADKLEELIVDRVNNYSFASRNVDKEDELDSLNEKLKTEHVKKKRLFDLYISGSYEVSELDAMMADIDAQINYYEAQIEANEELKKNKKIQENLADLATVDFDSLEFREKQLYLKSLINKIYIDGEQVTIEWL

SEQ ID NO: 17425 - protein, 452 aa, synthetic construct
MKAAIYIRVSTQEQVENYSIQAQTEKLTALCRSKDWDVYDIFIDGGYSGSNMNRPALNEMLSKLHEIDAVVVYRLDRLSRSQRDTITLIEEYFLKNNVEFVSLSETLDTSSPFGRAMIGILSVFAQLERETIRDRMVMGKIKRIEAGLPLTTAKGRTFGYDVIDTKLYINEEEAKQLQMIYDIFEEEKSITTLQKRLKKLGFKVKSYSSYNNWLTNDLYCGYVSYADKVHTKGVHEPIISEEQFYRVQEIFSRMGKNPNMNRDSASLLNNLVVCGKCGLGYVHRRKDTVSRGKKYHYRYYSCKTYKHTHELEKCGNKIWRADKLEELIIDRVNNYSFASRNVDKEDELDSLNEKLKTEHTKKKRLFDLYISGSYEVSELDAMMSDIDAQINYYEAQIEANEELKKNKKIQENLADLATVDFDSLEFREKQLYLKSLINKIYIDGEQVTIEWL

SEQ ID NO: 17426 - protein, 452 aa, synthetic construct
MKAAIYIRVSTQEQIENYSIQAQTEKLTALCRSKDWDVYDIFIDGGYSGSNMNRPALNEMLSKLHEIDAVVVYRLDRLSRSQRDTITLIEEYFLKNNVEFVSLSETLDTSSPFGRAMIGILSVFAQLERETIRDRMVMGKIKRIEAGLPLTTAKGRTFGYDVIDTKLYINEEEAKQLQMIYDIFEKEKSITTLQKRLKKLGFKVKSYSSYNNWLTNDLYCGYVSYADKVHTKGVHEPIISEEQFYRVQEIFSRMGKNPNMNRDSASLLNNLVVCSKCGLGFVHRRKDTVSRGKKYHYRYYSCKTYKHTHELEKCGNKIWRADKLEELIIDRVNNYSFASRNVDKEDELDILNEKLKTEHTKKKRLFDLYISGSYEVSELDGMMADIDARINYYEAQIEANEELKKNKKIQENLADLATVDFDSLEFREKQLYLKSLINKIYIDGEQVTIEWL

SEQ ID NO: 17427 - protein, 413 aa, synthetic construct
MSVKKIRVNRQKHRKRVCAYIRVSTTNGSQLDSLENQKQYFENLYSNRDDIDFIGVYHDRGISGSKDNRPNFQAMIEDCRRGKIDVIHTKSIARFARNTVTVLEISRELKAIGVDIFFEEQNIHTLSSEGEVMLSVLASIAEDELRSMSGNQRWAFQKKFQRGELVINTKRFLGYDVDENGELIINPEEALIVREIFALYLAGNGTHRIAKQLNEKGVGTVTGAKWHDTTIRQMLSNEKYKGSVLLQKYFHDGVNGPKKLNQGELEQYFIEDNHEAIISMEDWQTVQDKLSSRRWQQGRNKTYKFTGLLKCQHCGSTLKRQVSYKKKIVWCCSKYIKEGKAACQGMRVPEVDISNWEITSTVTVIERDRNGEKYYSYSGQESADQCSSSGQKENQCSRLLPSVHRPRRTAIKL

SEQ ID NO: 17428 - protein, 430 aa, synthetic construct
MSTDQDEQLSSYENQVNYYRDYISKHEDYELVDIYADEGISATNTKKRDAFNRLIQDCRAGKVDRILVKSISRFARNTLDCIKYVRELKELGVGVTFEKENIDSLDSKGEVLLTILSSLAQDESRSISENATWGIRKKFERGEVRVNTTKFMGYDKDDNGRLIINPQQAETVKFIYEKFLDGYSPESIAKYLNDNEIPGWTGKANWYPSAIQKMLQNEKYKGDALLQKTFTVDFLTKKRVQNDGQVNQYYVENSHEAIIDEETWETVQLEMARRKTYRDEHQLKSYIMQSEDNPFTTKVFCGACGSAFGRKNWATSRGKRKVWQCNNRYRIKGVEGCYSSHLDEATLEQIFLKALELLSENIDLLDGKWEKILAENRLLDKHYSMALSDLLRQEQIDFNPSDMCRVLDHIRIGLDGEITVCFLEGTEVDL

SEQ ID NO: 17429 - protein, 560 aa, synthetic construct
MTKLYSYIRFSSMRQGEGSSYERQIKMAKEIADRYDLELVNDYQDLGVSAFKGANSKTGALSRFLDEIGRSIPVGSWLFIENLDRLSRQDIISAQELFLSIIRRGITIVTGMDNKIYSIETVTANPMDLMFSILLFIRGNEESQTKRNRTNSSALLKIKAHQQNPQSPAVAIEEIGKNMWWTDTTSGYVLPHPVYFPILQKIVKMKQEGHSTGSVLDYLNEHHEPPAPTSNKQHRKWSIAMVSRLFKTKALIGVKEVNVDGVQYELKDYYPRVLSDSEYYFLKNNLIKKAWSFGHAQEKTIPLLSGIGLLKCVHCGSPMVKRKAANGKVEQYRYTCDGEGSRRTDCLYPNWGFRASSLEGAVLQLLADKVWIAEDKANPIPEIQVQIDEISRKIDNLINLSAMTGATKELANQITDLNTQREALHEEIRLFEREMYSVDSQGWEKLAQFDLSDVQNEERLQIRLKIKGALRSIECARIDRNKNLFTLVYLDGLRQRLVIENNRGIRKGQIFVDLKTINDRQILESAGMVLHDHIDILIDEKAFYDGLPKEEDGPLSKFGI

SEQ ID NO: 17430 - protein, 413 aa, synthetic construct
MSVKKIRVNRQKHRKRVCAYIRVSTTNGSQLESLENQKQYFENLYSNRDDIDFVGVYHDRGISGSKDNRPNFQAMIEDCRKGMIDVIHTKSIARFARNTITVLEISRELKAIGVDIFFEEQNIHTLSSEGEVMLSVLASIAEDELRSMSGNQRWAFQKKFQRGELVINTKRFLGYDVDENGELIINPEEALIVREIFSLYLAGNGTHRIAKHLNEKGVATVTGAKWHDTTIRQMLSNEKYKGSVLLQKYFHDGVNGPKKLNQGELEQYLIEDNHDAIISKEDWQKVQDKLNSRRWQKGRNKTYKFTGLLKCQHCGSTLKRQVSYKKKIVWCCSKYIKEGKVACQGMRVPEVDISNWVITSPVTVIERDGNGEKYYSYSGQESADQRSSSGQEENQSSRILSSVHRPRRTTIKL

SEQ ID NO: 17431 - protein, 430 aa, synthetic construct
MSTDQEEQLSSYENQVNYYREYISKHEDYELVDIYADEGISATNTKKRDAFNRLIQDCRAGKVDRILVKSISRFARNTLDCIKYVRELKELGVGVTFEKENIDSLDSKGEVLLTILSSLAQDESRSISENATWGIRKKFERGEVRVNTTKFMGYDKDENGRLIINPQQAETVKFIYEKFLDGYSPESIAKYLNDNEISGWTGKANWYPSAIQKMLQNEKYKGDALLQKTFTVDFLTKKRVQNDGQVDQYYVENSHEAIIDKDIWELVQLELARRKAYREEHQLKSYIMQNDDNPFTTKVFCKECGSAFGRKNWTTSRGKRKVWQCNNRYRVKGQIGCQNNHIDEETLEKAVVMAVELLSENVDLLHGKWNKIIEENRLLEKHYSTKLAEMINKPSWEFDSYEMCQALDSITIVEDGQITVRFLEGTEVDL

SEQ ID NO: 17432 - protein, 476 aa, synthetic construct
MDRNKVAIYVRVSTQGQVDDGYSLDEQVDLLTNYCKLKEWTLYDVYVDPGISGKNMHRPEIERLTRDAKRKLFDIVLIYDLKRLGRSQKENIVLVEDVFNPNGIRLVSFTENFDASTPVGKMVFGMLSAYAELDRANIAERMMMGKIGRAKAGKAMSWGMPPFAYNYNKETGDLELDEVKAPIVEMIYSEFLKGASVNKIVQKLNSMNYHGKNHDWKHHAVTVIIDNPVYCGMMKYMGQTYQAKHTPIIDKKTFELAQLERKKRLAKYHNAEWVPPFQRKYIGSKICYCGLCGAHLKSEKDKKNKLTGIRSISFFCPNTRSRGTGECTNPRFKQSVLEGYILNEVAKLQQNPEKLKDIKPAEDNELHNKIATYEKKIKQNTSKLSKLNDLYLNDLISLDDLKQQSKSLLNENEFMEEQIKLLSATTREDELRKKIDTFLAFPDILTADYDTQKQAVELVISRVEATKDGIDIFFNF

SEQ ID NO: 17433 - protein, 588 aa, synthetic construct
MKLYSYQRWSSAVQADGTSKARQSHAAEKYAVANNLELVEIVDAGISGFKSANLKSGALAQFLEAVDAGLIIKNSYLYVESLDRITRDEIDIALELFMGILRRGITIVTGMDNKVYTHAGIKGNPIDLISSLLLFMRAHEESKTKQNRTNGNALALIRRFQEGKPTTIKSVGSHPWWIDCSTDKFESVRRHPTLWQPAQDAMNMFMDGMSVFKVVQYLDEKYPHAYKGKAWKTANIRKLRFNKAVYGLREINVDDKDYELQNYFPALITEGQFGRLKEIRENTKYIGKVGKGKTVIDKEGNSKVIAERNNINLLAGMKLFRCGHCGGTMMAMRNGDTIRYLCEKGRGHLNDCKTWSLPGILVEHTLMIVTTIAYINIQRKGGVEKEDYTAQISSTKMLIEDISKKISNGAHLVLAGLGDLDEVIKELQELKDSRSNLTLELEVLQRKQLLLQDNTFESLMMDFFTYAQYGVLQDPVHEYRNKLRDIVYSSIDEAKAWKIDKKLMLSFKIKGDDEYYTFSAGDERYNYNFYYGYPVQVGDELTYELTEDVKSAYRKVHDATNELLNTAKEMLRVIHYPPLDGRLFWPKK

SEQ ID NO: 17434 - protein, 579 aa, synthetic construct
MQTNVRVVGCGRQSVTRTEDENSLSIGAQRRDLQYWADTPGQGRLIVGWALDTNTSGTTNPFQREQLRPWLTDRLEEWDVLAFPRIDRISRKVRYFSELLDWVEENNKHIVTVDGSLNTQAAGGSAVAKVLSVLAEEEHRKIRKNVASGMRTLRELGRFTGGPQPFGYLSIDSEDEHRILTPDPVYAELLREIAKRVRDGDSTYTIAEDFNRRGIMTWSDHLRSLAGKPVKGIPWKAATIARVIQNPVCVGYQTYNGEIWETEEGEPSVIADEPILKLGQWEAANKALAARTRLKKVRRRDTACLLTGIAICGSCGSRMVCHHTTKTLKNGETKTYRDYRCTSRNRSVACSAVATVGESELEAVFTEALIGAIGHAPEMVKLVDPGEDHTAELEQKRQRLNKLESDYAEGKYDTEAKEQSYWRTLENLTKKIAELEAHPIRPRTVVFQPTGRTWADKWKAMGTQDRREFLSERNVRVIVWRDPMPAVKRGAVVHFGNLKEFAIAGGVDGAELSDWGETGWNVPAHWMDPIALMDAEQRATIAETYGTAELPETLRKVRAKTVETFPEAASVFVSTLRAA

SEQ ID NO: 17435 - protein, 559 aa, synthetic construct
MKEKTKVYIYTRVSTAVQVDGYSLDAQKSRMKAYAEFNDFEIVGEYEDAGKSGKSIEGRLEFNRMMEDIKSGKDGVSYVLVFKLSRFGRNAADVLSTLQVMQDFDVNLICVEDGIDSSKDAGKLMISVLSAVAEIERENIRVQTMEGRIQKAREGKWNGGFAPYGYKLEKGMLYINEEEAEAIRIIFDQYVHTDIGANGLAKYLANHGINKIQRQNGKNPLFDAALIRRILKNPVYCGKIAYGRRRTEKVHGTRNDYRLVEQENYLLVDGLHEAIVSEGLWHEAQVKLLAQAKKYEKVNNGKDNKVHLLTGLLKCPICGAGMYGNKSIKHKPDGTKYKDFFYYGCKHRTMTRGHKCEYKKQINEELLDGAVAEVIIKLVSNPKFAAMMQQKINMKIDTSAIEQEIANYEKQLRQSYATKSRLIDEIDTLDPDDKHYIKRKADLDDRLYKMYDKIEDTENLLIEARAKKMAIEAEKLTADNIYKVLIYFEKLYAVMDEQEKRQIMESLISEIHIYEERQPNGQWLKSIKFKLPIIEEDMEMSLDSDTHVESVVLMQYCGK

SEQ ID NO: 17436 - protein, 546 aa, synthetic construct
MAARRKPTTRRREAITPETMLRVAIYTRRSTDDEHQPYTIEAQTQKLTAYVDSQPGWQITARFTDDASGATLDRPGLTKALAAARAGRFDLLLVYRLDRFSRRIRDLATLMDDLDAAGVHFRSATEPFDTSSPAGRLFVQMLGAFAEFEREVIIDRVINGMERKAAKGEWTHGPRPYGYLVDPDTHRLVPHPDEQHIVKEIFDLYAGTRLGTRAIAAKLNEHGKRTRAGKPWSGHTIGRMLGNRLYLGEVGFRDVTAEYAHPPLVDEDLFNQCQAILEARGEAHSQRAAANSDYDLTGRITCPKCGCKYVGTSATGKLRRYRYYTCFTRARYGSSGCDAARIDADLLDGTVAEGLIDFFRKPDLIIEAVAAERTLRADGADRHQAELDAIAGQISTAEAAVDRYLTAFENGTLDERTCGHRVQDLTRKLDQLRARQDELHQLCHDLPAMPSPKAIDRLRRELAHVLQHGTPGQRKAVIETHVAEIKIQGSTLTPVYKIPLEQLDQDDDGPVETSTGPSFRTMVRVVGRRGLEPRTLRSSKEKEAPP

SEQ ID NO: 17437 - protein, 581 aa, synthetic construct
MKEKALTTERFDSLVDMAAKEARYEEGFGVKGCDLTNSCWWAAYTRQSWEEQANNNRLPEYLLTCAKEAKKLGVVVPLEYILYDTVTGEHLERPDMIRLRKLLTKRLISGVIFPALDRLSREPLHQQIFELEATHYEIQIHYADVPNGNDPNSQFTRTILAHAAKLVKLANRRNNRGGNIGRVVSGNVPAGKPSYGYIYRAEYQALEHGRRKLIRAWWEINALEADGTYKIGSEAWVVKEIFRWIGLEGRSTFWVAEELNRMRIKPRYAEKWSPALVGFICKNRAYTGKHAYNKACYVTNPNRPLTDITAEIKRTLRKAKPEDDWAHFEVPLLVSEELWQRANDNIHERGKGRGKAGKSIPALFRARVFCPKCGHIMRLHRDSTCSWLTYYVCRTQGCSMKFIRVSHLDDIGWENVAAILQDHSFIDAKAENTSRDDGGIQKRIRLELFQKREAERKIARIQDDLLSDEPVITRQEAVAKIGELRKVVEKTDTEIARLQGIVQTAKQAEEKIEALKKALEDSRDINLNTATFQQKAEWIARLGVKVYPAKDLTNYHIKCGIKITEPQKVSCYKTSIASPKL

SEQ ID NO: 17438 - protein, 520 aa, synthetic construct
MTITDFIKPGMKGVFYGRHSTDKQEMDSQESACEEFVKRHELNLVGSYLDSAISARKKGMYERPELKKLLDDAQKRKFDFVLVWSEDRLARKTREHREIRKKFLEYKIPVYVLHNNTRYDEGELLSQTIRDSFSQYQGDKIAGDTQRAMRTLIKEGQWTGGTAPYGYKYLTDSKKFQTIPDEIEHVDKIFSLYKQGNLGFRAIAGMMPKESRRGRDWKWNHIKEIITNPFYAGILTLNRRDPISHLTVIKEMTEWLQGSNTSIEPVLNFDEWKKTWFIYKNRRDYYDGEKSLKNAGLKFAQFYVTKNVLNGLLYCAECNKRLKCKDMTSENKDSGKVYGDIFYICKDCNYKVGSEKLLPIIEAIWKKIQRSVDVTRISEVVYARFQNEVNSIQHRTDIYDKEIQEFANNKVYYELWIEDYEKTKSEEKDIYEAFSLANSYNEKNLLAAKKMYVRYKHKLDFLKQDKETVIHDTEKLVNIIKGDHKRLPIHDVKQLLQFALAHLTIDQNGKIEYAIKSELL

SEQ ID NO: 17439 - protein, 486 aa, synthetic construct
MNVENTTSRFVAIYCRVSTDEQAREGVSLDEQQERLKAYCRAMGWADEVMLFVDDGYSAKSTDRPQLKRLMTYIENGEISKVMVTKLDRMSRRLLDLLTLIDMFQQHQVAFISISESFDTNTPSGRLTLQVLGAVAEFERERIRERVLDNMFHAANQGKWLTQSPYGYRLEDKVLVIHEPEAKTVRQMYDLYLNQGLGFFAIARQLNEEGIPSRHNKEWSIRSVKLLLTNPVYKGTFVWNRVDSSMKKRTIKDDKDWIVIDDCLPAIIDKNTWERVQNKMNRPSIAPRAQTSPHLLGGILKCGNCGSGMSIGWSGSRDRRYRVYRCSANKNKGTCTSKQYKADEVESWFLEGLASLSDSLSHELVPHLVEKARSSQSSRGDQQITAAKNRYKRKVEAYTAGLIELQDLNEEKQRMERIIQENQQSDEQREKVQVEELKGMLESKIKTVLDAIYMLPVEEAKVLLRTLVSKVTVLGEGELDIELLFI

SEQ ID NO: 17440 - protein, 478 aa, synthetic construct
MRVAGYVRVSTDEQAEQGNSLFEQQERMTAYCRAMNWESPTFFIDDGYSAKNLKRPAVDRLVKEVSQQKFDVVLNTKLDRLCRNLLDLLQTVSHFQTYNCAYVSVSEGFDTSTAVGRMTMHVLGAFAEFERERIRERVKDNMISLAKNTHKALAIPCFGYDIIDGHYAINQNEAESVKYIFDLILQGYGHRSISISLNDKGIVTKRGKSWDQINVKRLINNRTLCGTRIFNMRENIDGKIKIRDESEWVVVENNHPAIIEPSIFEEAQEIMNSRKPARKHAESETYLLTGLVYCSHCNNTMGGQTNRSKNKYGEYEYFRYICSSYVRKGGCKYHAVHRNDLESSVINEIRQLASKSNKEVVVITNSRSKEAEKIELKNALAKVDKKMQRQIEAYENELISAEDLKKARTRVENEKERLLKDLMNLENKYTDANVIHQRAKDLIGEIDGIDRKRSKFLIRQLIDQIDYKDGEYSITWRI

SEQ ID NO: 17441 - protein, 565 aa, synthetic construct
MFNYSESTQVKDVAVYARVSSDDQQERETIENQVEFAEKYCELHKMNIVEWYKDDGVTGTIGLDQRDQGKRLLEEAKSGRFHTVLIYNMKRLGRKARVTLDAIYQLEEHGVKIKSMTEPFDTGDPMGRFIITVLAGQAEFDRDTLLETLWHGANRHARLGKWLGGIIPYGYKVNSERFLEVNEEPLPGKEDMSEAGVIRLIYHLIADQKLSTIKAADYLNALKIPPSYVIHGRQVKKGKRKENTAGVWSPGRIRNMIVNTTYKGVHEYGKRATRERETIIREVASIVSEDTWQLAQQVLRDNQIEAFRNQTRHYLLRGLIRCGCCGLTYHGGAFKGAKNKPQAYYLCGGKTAYKGPLQGKCYSKNIPCEWIEEMVWDECVRFIRNPGEALKEFEQGLNLRKSHTANYLQEKEMILKGLKDKEPERQGILSLYRQKMIKATDVEIQLQDILTETNTLERRLKELDKLMEAEKDHSYQFDSAEIMLNKLRSKIEGSPSFETRREIVKTLVQEIIIETIDPPGGGRKKASVNVRYSFYNSKGVPRTVVIADFWGAGILNSGVPAVRLV

SEQ ID NO: 17442 - protein, 520 aa, synthetic construct
MKTAVIYARFSSDRQTEQSIEGQVRVCNDYAERNDILIVSQYIDRATTGTNDNREAFQKMMKDSDKKAWDYVLVYKLDRFSRNKFEMAIHRKHLKDNGIKILSAMENIPDSPEGILLESLLEGMNQYYSEELAQKTRRGQRETRLKGLHCAGRLNYGYYTKNKKVFIHEEESPIVKEIFERYAAGERGNEIAISFAERGILYRGKPFSAANIYVILHGEKYTGRYELHGEVYDNIYPRIIEPALYEKCKQKIDANRYGNHIPDYSYLLRRRVYCGECGTRMTSYSGTSKSGRVSKYYKCWNSIGKKNCKAKFIKKDMLDNIVVKTLQETLTGKNLSVIVDEIYRQHNAKLMGENTVKLLEKELTQINKSISNIMRAIEQGIITDTTKERLQELEKSRQELQEKLIFERMQEQTVLDKETIAEYLQEGIKHEPEMMIELLVEKVFVHSDHIEIILHYVDEPIKPKPRIDGKEESLEGNDLRGSLIFTAMTWIDEYSFQGLKKKDLEPKFKGTRNTLVYIEI

SEQ ID NO: 17443 - protein, 629 aa, synthetic construct
MPQLYSYIRWSSDRQDQGTTRNRQVAAAKAYAEETGLEMVEILEPGISAFRGKNRAGKLGDFIDAVKNNAIPSDSWLYCENLDRLSRDQVDEALRLFLELIGLGLTIVTGMDRKVYNSKSIKQNPIDLMISILMFIRGNEESETKSNRTVGNVVALVERHKEGLPVNIKSVGRHPFWIDDSGSQYEAVKEHPVYWSIAREAIEMFLAGDGIYTVKRYLDDKYPNGLKGKEWDYQVLKKMRDNRALIGERTINVAGATYKLDNYYPWLCKDEAEFLTLAERKQQNNYKAKKDKVEEIKLLSGLQVLRCSKCGGTMHSFMNHGSARYICTNGVHLQKNCSGWSISAQLVEHCTMISLLIGYMDKSRKDGIDTTAIEEEISRKATLITDLESRISNMAKAIAIAPEVSELAVQLNAFDLERKKAVLEVDKLKERLHSLKGKGSLEVDITDFLMLIQWSVFTNMEDADRNKIRKIISSIIESIIIDKTDGCITIKIKCHNKDEWLVFGGVNRKPFWAFTIEYSTNDAKDIEGEDFSNFVSNPLFQKAVEQLDSIKQSYLNLFETANTMLGVVGYSDIRGASFWPNTEQYERANVEYEGITYSIAMNGRVSKAITAALEATGLSRKAFIERYKV

SEQ ID NO: 17444 - protein, 541 aa, synthetic construct
MKNKYLLPQVYLYMRFSKKRQEDGDSLRRQMKLAEETSKKHNIPINEDLIMRDRGLSAFKAEHIKRGALGKFIAAIEDGLIAEGSILIVESMDRLSRDTPLAAQIQFNILMSKGITVITANDGLTYNEATLATESSKLFLIMGSMQRAHDESKHKHIRSLEAIEAKIQAFKDGAKPKSVGGDPHWIKTQDGYLQLDQERADIVKLIVDMYLKEHRGLNLIARELTKRGYSTPSGKGKAWGATTIRKILDNKALYGHKKFSLTYLKNGRYIAEPPYELDDYYPPIITKEEYDIIQVRKGNTSGSRESYGEDENVYLLSAYGKGKSVCAHCGKNTHTQYQKQKNRKNEYTGRNVQRLHCGSHKESSDCQPSFICQELEMAFIRAICTHINPQFLEKENAGKIDEERLRKDISILDVKIDVLLKSIDELDSKDLIMKIKEKIRAFDLEKKELSGLLNQSYDHQTGVEDFHKMRELAEKCIDIKNSNERRTFKKILLQSIDKITINFEDKSLTAQFKNGNNFSLGKDGQGIYQTVTFYKRRPKNH

SEQ ID NO: 17445 - protein, 572 aa, synthetic construct
MNMQSPHVSLRAALYLRVSTARQAEHDVSIPDQRKQGEAYCASRGYQLVETYVEAGASATNDRRPEFQRMIEAGTSKPAPFDVVVVHSFSRFFRDHFELEFNVRKLAKNGVKLVSITQEMGDDPMHVMMRQIMALFDEYQSKENGKHVMRALKENARQGFWNGSLPPIGYRVVDAEQRGAKMKKKLEIDPLHADTVRLIFRLASEGDGMSGPMGVKNIVNYLNKHRMFTRNGGRWGIGQLHRVLTRRTYIGEHRFNRRSNKGVVKPEDEIVTVAVPPLIDLEIFEAVQHRLKVNNPKVTPPRVVSGPNLLTGICHCGNCGGAMTLRTGKNGRYRYYACSTRARQGDTGCKGRAIPMDKLDRIVVSHIEERLLDPERIEDVLASLLDRRQESVERRSQHIAELNHRAAEADNRLKRLYDAIEAGSLDPAESSLGERIAGLTALRDQARADATRIEAMLASSTHQRLTGAAVRELASEARTRLRLGKGGYRREHVRAFAQHVEVADDAIYIKGNKNVLLRTLAATKGGKTAGIGVPGFIPKWRRGGDSNPRYASTYAAFRVRYIQPLCHLSAGR

SEQ ID NO: 17446 - protein, 498 aa, synthetic construct
MRDEGLSAYHQKHVKSGALGVFLAAVESGKVPPGSVLVVEGLDRLSRAEPIQAQGQLAQIVNAGITVVTASDGKAYSRERLKANPMDLVYSLLVMIRAHEESDTKSKRVTASIVRQCQGWIAGTYRGLIRNGKDPLWVELVDGKWQLIPERVEAVRAALDLYRRGYSATRILDAMADLKLSLTGQGLQTLQIYRLIRQRALLGEKELEVDGQQFHLPGYYPALLTEAEWSELQALAAGRGRRVAKGAVPHIITGMRITICGYCGRALVGQNIGTRNRRPDGGILDGHRRLHCTSYSHEGGCPVPGSCSVAPIERALMAYCSDMINLQALYGGDRAAAPRATLAAARARHAELAVQLERLTDAMLAAADDGGAPATFAKRARALEAEQATVAADIAAAERDLAAVARTDLQGVDEIWRKLAAGVEAQDTDARIQARQLVADTFEKIVIYKKGVDPETAPDKTIDLLLLAKGGTARPLRIDAKGNWVAAEASTETPPLID

SEQ ID NO: 17447 - protein, 532 aa, synthetic construct
MRACLYARYSTDNQSQKSIEDQLRAGRERAAREGWPIAMMHADEGISGSTPVSLRAGGKALLADALADRFDVLIVEGLDRITRDLAEQERTVKRMEHRGIRIIGTADGYDTQQAGRKVMRIARGLVNELYIDDLRKKTHRGLQGQFERGMAAGGRTYGYTSVPVEGGHRIVIDEEQAKHVRWIYEQVAAGATLRSIVYTLNAQGVPSPRGNGWAASALVGNAKMGDGLLNNEMYIGRLVWNRRQWLKDPDTGKRLPVARPREEWLVREAPELRIIDQTLWGQTRPQELKRGNPTRGRPHATLFGGLLRCDTCSGPIIAINASRYGCSAHKDKGPTSCRNAATWRRTDVDNRLLAELREDLLSPAALAEVQTTVRRLLAELDGGQERAQAAARRRGAELDREIQRIVDAIVTVGASEALASRLRAAELERKTLQATLEQAPQLQVSATEIASRYRQLVMNLKETLSGEANTVSAARPVIAELLGAVTLRRDPDTGESWAQMKNPAEQLLLAVASAGSPILVARARFELATFGL

SEQ ID NO: 17448 - protein, 495 aa, synthetic construct
MKAFPILRVSTTAQVKEDGGLDSQLLYLQHWLEQHPDYTIESTLELDGYSAYTSKHRPLIERFVVSLPRNSTIVFSEVSRLARMGQKESLEFLFWIMNQGVSIAFAQTNTILKAQDEIDVMTMQQLSMLFEMSRSESAIKALRINNAFKLRLDRIREGSHFKTNNLSAWLDPNKETKTYHVSDYDIETIQTAFNKRLQGSSVGDLHKWLVADRKPFGKMKGWTVNYVGKLLRMRQVLGEYQPVSIYQENGTTKRKPNGDPVLDYFPRIITNELFSQVQVTFRNEARGRTSASVINPYRGILKCKGCGGAMALNNSKSQGARLRCEAQRNKSRICTNKSMLFSLADERIQSFLHSFDATTFNATRRPQEALQLEIDTVNQSIAQLTQALIAVGTDVPEIATKIQELTEKRNQLQHESLLPKDLPLSPVEVNRDTTPELYNQAIRDLLKGIYLSPTHTKFVFNDILSQGIPTLTIDHTQSTDDDSDSLKLIGNHYQL

SEQ ID NO: 17449 - protein, 648 aa, synthetic construct
MSLIADPVLTPPTKITDIALAPAITYLRVSTKEQATKGGHDEGFSIPAQRAANYAKADSIGATVVKEFVDAGESAKKADRPALKAMIAYVRAHRVAYCIVHKVDRLARNRADDVEIHLALREAGVTLVSATENIDETPSGMLLHGIMSSIAEFYSVNLANEVMKGLVQKASTGGTPMRAPLGYLNTLHRDELGREVRGIKIDEKRAALVKWAFTAYAAGNYSLAQLCKELTKKGLRSVPTPKRQARPLGISTVHRMLQNPYYKGDVVYRGVRYDGAHERLIEPEVWYQVQTMLRSHAQSGVRTQKHDHYLKGTLYCGRCRQRMTIIHAKNRHGNIYPYFICLGRNNKRTDCIMPSAPVDRVEQLVADYYQRITLTPAMTDALRGMLTHEFDQLTAGTNQSIRDLTERRKQILTEQDKLLEAHLADALSLDQLKKFQTRLRAELDGIEAQIAEHHNDYQGARDLIDGALDLARDFASIYERCDEQNKRLANQTFFSRIYLDEGGSLTVDTAAPFEAILDDNTLEQAIAWADQRSETNEKSDVATQDLFLKSGVTTSLIKCTPLDAASPTCCVCAAAKCRSLRMPCSTRPPRWRSTSCSPSVRTSALRSCLSAVGRASSPASTRFARISAAVSASVWRASMRSSTSMRSR

SEQ ID NO: 17450 - protein, 613 aa, synthetic construct
MEIFADGGESIAEVAEPLSANQLSLRRMEDGVEFDDVTFDATGDGTDLTDEAGPVRITSQMDDHVDAHRHCGNDEGGGDVRPGKHIKGDVQIYTGFMGNRGVIYGRASKDVKHTGTSVRKQIERGERWARGEGIELLEPIRDDNMGATRGSRERPGFKKVRALIEQRAIDVLILWEVSRSTRDATESMGLLDAAEDNNVDIAVDGKRYDPSDDADRMQLQFMFMMADSEGRRTKKRNIDSVTTNAQRGTPHGRFPYGYRRIYDSTSGVLLEQTPFAGDGQLLPEAKTLQEAASAVLSGTPLRRVCRNLNERGVPSPRKPRAKTLAENPNGVVNVWERATLRQLLLNPTIAGRRVYQGEDIGPAQWDAIVPFDEWLELRALLTDPSRLTVAVPRGPEPRHLLSGIARCGECGARMKASTNERRMKRAYACRHEGCMRVMVTAGKVDEMVEATILGLFDTPGFRGKLAAAHKERDEARTAGPSLSSQIAAKEAERTEIDGLRDSDPPRISLHAYIAETNRIEKRLEELRASESAQVTSPALRKMMTSKSVSEGWKQADLMDRREIIRMLLDVKIDRATVNRGRRFDFSRVTIDPSAFILDDVLEGQSMEWFGSGD

SEQ ID NO: 17451 - protein, 602 aa, synthetic construct
MYQEGEEAAATLAQPNLTSVAGLEHLFKGDDTMHVPLRTGMAISYLRVSTTRQLNTAADLDEDGNSIATQREWAIRKAKELGVPILPEFVEPGQSAQTIDKRPEFKKLLRFVDANPDIRYVVIYMRSRVFRNHLDAAITKRQLRDKGVELISAKENFGDGYMGDAMEAITDVVNELQVRMSGEDIRIKMAHKVERGGSVGRAKLGYLNVRKDFDGRLVNTIDVDPVRAPLIVWAFEQYATNQFSITQLQMMLEDQGLTTRQSSKRAAKPLSSSQLAMILRDPYYTGVIRYKGKLHPGRHTPLISKELFLAVQKILDGRNRKGDRDRIHFHFLRGLLYCAECKSEGRTSRLVYSQNKGHGGTYEYYVCTAKQRGHCSMPSARLDELEDEVAQRVAAERFDAEDIASVREEVRRALVELQAADQEEEDALRKQLKKLEAQEERLIELAADGTIAVEKLRQRLEYVTLQKGAITEKLTRTVERIRQGVDKAFAFVDLLEDPAALYRQLPDNVRRQLLTAFFTRLDVQVTDREVSIGVERTELNAGLHDWRSQHRLSASTHPPAKEKRASRTSAEDSLSDLYPLTQSKGLNKPVLVGLTGFEPATP

SEQ ID NO: 17452 - protein, 532 aa, synthetic construct
MKQAISYVRFSSDRQKHGSSVERQEGMIAAWLKAHPDYEMSDLKFSDLGKSGYHGEHIKEAGGFGKLLKALEDGFIRVGDVVLVEAIDRTGRLEPMDMLTLVINPILKAGVSIITLDDNTTYSKESVNTAQIFLLVAKIQAAHGYSAALSTRVADSYKKRRKDAAKHGIVPRRITPVWLNPDGTVREEVAPWIKTAFELYVSGVGKSTIAKRMRESGVERLAKASGPGVEAWLRNKAVIGKWETLEGTPDHQIIDDIYPAIIEPSLFYKAQVHAEKMKTQRPIKTASHFLVGLVRCGECGKNYIVQNLHGKPHSMRCRTRQSQNDCKNSHCVPKPVLDAIYRYTSVTAAIEAVQQQQMGVNDKEIVTRETELLTITKRVDGLVQALTQTGPIPEVIEALKQSRIEREAAESALVILRSTVVPSAGTHWQDMGKVWKLEADDAQRLAAMLRMVGYHITVQNTGEITSSHSDVLYRYIGVDRALDKYKLLVNGKLTLIPKGYVDDYPYHEPFQEVEGEVTWNAEDYTNLQAQYE

SEQ ID NO: 17453 - protein, 534 aa, synthetic construct
MGVKKQGPFDESQAQPCVIYARYSSHAQRDASIEQQVADCEEYAQRNGLRVVKIYADRHLTGKNDKRPQFQQMLKDAAHGHWSYVLCWKLDRFARNRYDSATYKYRLKKHGIRVIYAKESIPDGPEGILLESVLEGSAEYYSANLSQNIKRGMRYNALACKVNNGSMPFGYCKGPDGRFAIYEPEAEVVREIFRKVSKGTPFVDIANSLNGRGIHTKRGGLWGKNSFHAILHNEAYIGVYHYSDVRVEGGMPAIIDKALFLEVEQRLKTKKNPQGRHRENGDYMLTGKLFCGLCGSPMIGVAGTSRSGELYFYYSCNKRRVERACKKRHVRRDWIERLVVQAALDHILQPEVIQWVADSVMAYQERAGNSSVLAGLRDDLSENQKATENVMKAIEAGIITVTTKGRLMELEAEASRIRDAICLEEASLTHIERDFIVYWMEQFRGGNVESAEFRRKVIDSFVNAVYLWDDHIRIAFNYSGKGSAVDMDIIMETEAESFAGPGCSCNAPGTPPKHTNPNSEMGSDLCVFSSSDRH

SEQ ID NO: 17454 - protein, 432 aa, synthetic construct
MQRIIKIVAPATLQQAPKEKRVAAYARVSSGREGPLHSLSAQISYYNSLIQKTPGWQYVGVYADEALTGTKENRAEFQKLLKACHAGEIDMVITKSVSRFARNTVTTLKTIRELRLAGVDVYFEEQNIHTLGEDGEFLLTLLAAYAEEEARSVSENQKWRIKANFEQGIPWSATMYGYRLVDGRLEIVPEEAEVLRLAADLYLAGYGRYKLEDAFAKAGVRGRHGGILSGNSIIGLLCNEKTVGDLLLQKSFRVDPLTKKEKINQGEKPQYFVEESHEPILDRETQRRVIEERARRKAIYKPRSGSYERKVFPFSGKVFCENCGKSFTRKIICPGMARENVIWICRTTHQKGKALCPAKHYTEAVMEQVAAEVMGLPEFDPAAFEKKMQEIRVQMDGSLIYIFRDGHQISRDWEDIPRRMKKKERGLVSCQQ

SEQ ID NO: 17455 - protein, 538 aa, synthetic construct
MPAVKAPRVTVIPAKKDQLPINVLSGEAIKRLRVAAYARVSTNNEEQLTSYEAQVDYYTRYIQSKEEWEFVAVYTDEGISATNTKKREGFNRMVADALAGKIDLIITKSISRFARNTVDTLTTVRKLKEKGIEVFFEKENIHTLDGKGELLITIMSSLAQEESRSISENVTWGQRKRFADGKVSLPYGRFLGYKRGDNGLPEIIEKEAQIVQLIFRLFLYGKAPSAIAAYLTGEGIPTPGGKTIWRSKTVESILTNEKYKGDARLQKKFTVDFLSKKVKVNEGEVPQYYVENSHPAIIPPEVFDLVQYEWKQRKTDGHWTSSAHPFSGKIFCGECGGQYGSKIWDSNTEYRRLIWQCNNKYKGGHCHTPHLTEAEIKAAFLSAFNAILHDRAEIMAAYNEVIEALTDTSDLDAERGELQNEADVVTELIKKAISENAHKAQDQEEYQRKYEGYCARFEKARNRLAEIEDICLERNAKKVKIQMFMERMGQYADLVTVFDEELWYSTVDMVTVFEDKRMAFTFRDGTQVTIKKEAWEAA

SEQ ID NO: 17456 - protein, 541 aa, synthetic construct
MTGTTPRVIVIPPKPELARSKAVQRQLRVAAYCRVSTDDEEQLTSYEAQQTYYTDKIMTNPQWTMAGIFADEGITGTSAQKRPEFQRMIRKCRQKKIDLVLVKSISRFARNTVDCLNYIRALRTLGIAVIFEKENINTLETDSEMLITMMGAFAQAESESMSANIVWGKRQAMREGKTNVQFQHLYGYELDEDGKPRIVPEQATVVKHIYDSFLAGRSIRMIKKELESQGVLTAKGGTVWSEAAIRNILKNEKYCGDVLMQKTYTQDCISKKQLRNMGQLPMYLVQDNHEGIITRDRFNQAKAEFARRNAGRAPSQKLAPTGRSCYSAKYALTERLVCGECGTLYRRCVWVKRGQKFAVWRCASRVDYGSEYCHDSPTLREGPLQAAILAAINTAMSQQEALMGQIEDAMRMELIPFPGAMSISDIDQRLDELDKEFQGLFADSKDGGFMKHAEEFKRISADMTALKEQRARLLEQQNSDSAASQRIANAMEILKTGDAAIQWEESTIRQLVDTVKVLSANRIRIYLHGGIEIEQTIGEEQ

SEQ ID NO: 17457 - protein, 552 aa, synthetic construct
MNMHSPTVTARAALYLRVSTARQAEHDISIPDQKRQGEAYCEQRGYQLVETYVEPGATATNDKRPEFQRMIEAGTSKPAPFDIVVVHSFSRFFRDHFEMEFYVRKLAKNGVKLVSITQEMGDDPMHQMMRQIMALFDEYQSKENAKHVLRAMNENARQGFWNGARPPIGYRIVAAEQRGSKTKKKLEIDPLHADTVRMIYRLFLEGDGTRGAMGVKAIATYLNERRFFTRDGGRWGLAQIHAILTRTTYIGEHRFNTRSHKDRQKKPESEVAIMAVPPLIERETFDAVQARLKSRNPMVTPARVSSGPTLLTGICFCAKCGGAMTLRTGQGSTGATYRYYTCSTKARQGKTGCKGRTIPMDKLDHTVADYIGDRLLLPKRLETVLASVIDRRQERTERRREHLAELQRRITEADQRLGRLFDAIEAGMVDKDDAMAKERMVSLKALRDQAAADAERTQLALDSSGNQGVTPDMLKGFARKARERIRLNDGGYRRDHLRALAQRVEVADDEVRIMGSKSELLRTLVAASSVETAAFGVHSSVLKWRTRHDSNV

SEQ ID NO: 17458 - protein, 539 aa, synthetic construct
MHGRRAAIYARYSTELQDGRSIDDQVALCREHAARSGLTVVATYDDRAKTSASIFGRDGLARMMEQARARQFDVVIVEALDRLSRDQEDLAHIHKRLSFARIDILTVHEGVADSVSVGLRGLMGTMFLEALKAKTRRGLAGVVRDGRHAGGQTYGYRGVPGEPGKREIVAHEAEIIREIFAAYVEGKSPRTIAGELNARGIAAPRGPKWNASTLNGNPQRGYGILRNPMYDGRLVWNRVTMVRDPDTGRRVNRENPLDARQEVEAEHLRIVPRPLFEAAVRRHAQQAEAVRTGKITKAPPRPFSGLIRCACCGGGMSIHDRCGEAIRIRCSTANESGSCENKARYRLEKIEEAIFHRLRAQLDRPDYLKEFVRVYAEERRRLTETARRDRARLERAAADSRARYMRLVDMMARGLIEGEEADAQVLQAKQAAEIARSELEIALSEDNVVELHPQATAAYTRAIADLSAALQRGDGTFDATSVEALRRIITEITVHPKDETGDVLVEVRGNMERLLGIGQQIVGGPMVARGGLEPPTPRL

SEQ ID NO: 17459 - protein, 527 aa, synthetic construct
MQYCLYLRKSRADLEAEARGEGETLKRHEQILLELAKKLNLNITKIYREIVSGETIAARPVMQQLLVDVEQGTWDGVLVMEIERLARGDTIDQGIVAQTFKYSNTKIITPMKIYDPNNEFDEEYFEFGLFMSRREYKTINRRLQNGRISSVKEGKYVGSIPPYGYVRKKLQNDKGYTLEPLPAQADIVRLIFELYTKGELQPDGNYKRLGTSLIARKLNDLHIPPAKADIWVTSSIQSILRNPVYAGKIRWDWRRTVKKMTDGQIEKTRPKNGPNEYLLFNGIHEALVDEQTWNLAQKFLSNNPAKPAPKGMPIKNPLASIVVCGFCGRKMVRRPYNNSEQADTLMCYSTACPNVSAPLHLVEERVLQSLEEWLKNYKIKWSTDKNKTAETTQLEIKKSAVNKLNEQIKTLEKQMNSLYDLLEQGVYSTDVFLERSKVINDRLEKAQKDRDALLDDLKLGQKMGEESIAIPKIEKILELYKSTDDPALKNKLLKEVLEKAVYTKTVNGRWHNSPGDFELVLYPKLPR

SEQ ID NO: 17460 - protein, 522 aa, synthetic construct
MAIRNVTVIPARKRIGNSAKAEELPKLRVAAYCRVSTDSEEQATSYEAQIEHYTNYIKSNPEWELAGIFADEGITGTNTKKREEFNRMIEECMQGKIDMIITKSISRFARNTLDCLKYIRQLKEKNIPVYFEKENINTLDSKGEILLTIMASLAQQESQSLSQNVKLGIQYRYQQGKIHINHNRFLGYTKDKDGNLVIVPEEAEIVKRIYREYLEGSSMLQIARGLEADGILTGAGNHRWHTSTINKILRNEKYIGDALLQKTYTVDFLSKKRVANNGIVPQYYVENSHEPIIPREIYMQVQEELVRRRCVHISKNGKKRNYSNNHPLSQMVFCGKCHEVFRRVHWNNRGKKSIVWRCVSRLENTGLFCTASTILEDTLKEKIVEAINIAVSGKNSFLAILKKNIETVLNEDLDESTADIDKRLEELQAELIQLANSKEAYDNIVNEIYRLRDLRQETLSRNALRQDKRDRIAEMTDFLNMQTGGITEFDDKLVRKLIEKATVYNDRLVVEFKSGLEIEVNL

SEQ ID NO: 17461 - protein, 522 aa, synthetic construct
MRKVTRIDGNNALQAFKPKVRVAAYCRVSTDSDEQMASLEAQKDHYESYIKANPDWEFAGIYYDEGISGTKKENRTELLRLLADCENMKIDFIITKSVSRFARNTTDCIEMVRKLTDLGVFIYFEKENINTQRMEGELVLTILSSLAENESLSIAENSKWSIRRRFQNGTYKISYPPYGYDYVDGKLFINKEQAEIIKRIFSEALAGKGTQKIADGLNLDKIPTKRGSHWTATTIRGILSNEKYTGDVLLQKTYTDENFKRHYNRGEKDQYMIKDHHEAIISHEEFEAVKEILKQRGKEKGVIKGSSKYQNRYPFSGKIKCAECGSSFKRRIHGSGNHKYIAWCCTKHIKDASACSMKFVREDGIHQAFVVMMNKLIFGHKFILRPLLQSLKKTNYSDNITKIQELETKIKENTERVQVIMGLMAKGYLEPALFNTQKNELSKEAALLKEQKEAINRAINGGMTALVEVEKLLKFAMKAEKQIDRFDSEIFENFIEEIIVFSQEEIGFKMKCGLNLRERMVR

SEQ ID NO: 17462 - protein, 529 aa, synthetic construct
MTRAAIYARFSSDLQSDHSVDDQIALCRTYADRHGWHVAAVFADRAASGSSVHGRPDYARMLGLAFEGGFEIVLAEDMDRFSRNLGDIARLHERMGFLGLKLWTVADGEISDMHVGLKGTMSAMFLKNLAAKTRRGMAGVVRSGRHAGGRAYGYHAVPGEPGRLEIVPDEAIIVRRIFTLYLEGHSPRQIASILNQQGVPPPRGNYWAASTINGNRQRGHGIILNPLYAGEIVWNRVRMVKDPDTGRRISRVNAEADWQRAEAPHLAIIDKATFDAANNRKASRGGERPHLHRKARHLLSGLLRCGCCGAGMSVKDRTTGGIRIMCTRAKEADACSNRRPYPLGRIERAVVGGLREQLADDKAIRWYVSVYNDERQRLAAATIRSRSDCERTLSRIDSDLQRMTDLAIRGVISEADAVQRLPAMRAERERAAADLAATDEPPNIVALHSGTVADYRRKLSRLEQAIAEGDGTLEAESKSALRDMIETVTVHPPQAGTGDIEISVAGHLASLTNPAAKHQGGNGGSGRGT

SEQ ID NO: 17463 - protein, 694 aa, synthetic construct
MPKIRDFDRVTALYERLSKDDEQQGESNSILNQKRFLEDFARKSGMTNIKHFTDDGYTGRNFNRPGFQAMLAEAEAGKIGTIIVKDMSRFGRNYLEVGFYTEILFPKKQIRFIAINNSVDSDKPQDNDFTPFLNIMNEWYAKDTSNKIKSIFLSRMSDGKRCSGSIPYGYNRLPEDKQTLVVDPVASQVVKHIFELAAEGLTPPAIARQLTEEKVLIPSAYTLQYHPEQCNRKAEYGCTNWNANTVREILSRQEYLGHTVLRKTIGTNFKTDERRFATDEERLLFEDTHEPIVDGELWEQAHRRLKHATRRIKEGTHQEECLLPGLVYCADCGSKMSYQTNYYKSGEPYHSFRCSSYGNRTVNCTIHHISDKVLYQLVLRSIQRLSSHIIADERGFAEELKSKWEAQANGKPQKQKDELQTINRRLNELDRLIGSLYENFISGLLPEKQYKSLMKKYSAEQDSLESQVSEIQEKLEQTKASSAHIGRFIRLIKKYKQPTELTKEMACELIDKIVVHEAVGKKPNRQQQVDIYYNFIGQFDLPLSEKEIAEARQKAEQEAAEKAKRKKNRQRESNVAHQAKAKAERWAANDGHKYPKRVCEQCGKEFYPSSTRQRFCNTDCTKAHQQAEKEKKRFAEKGEHTFRQKVCKICGKPFWPSNGQEVLCSEECKTINRRQKQLAYYHRKQSEQKAGEAI

SEQ ID NO: 17464 - protein, 511 aa, synthetic construct
MHIAAYCRVSTDKADQLNSLEAQKRFFAEYTEKTGHALVRLYADEGISGTKIKKRREFQRLMRDAETGLFDMVVVKDISRFARNTVDLLQSIRKLKSLGIETLFLTANMTSMGNSEFVLTIFGALAQEESANTSKRVKFGKKLNAEKGRVPNIVFGYDKTPGDYFNLSVNEAEAAAVRQIYHWYAEEGYGASKIARMLNAKSLRTKRGCIWSQNAVCRILTNELYAGKIINGKQEVADFLTGVRAEKDETEWMVTDRPDLRIVAPELFKKAGQVMRERGKTFKVNKERQSNKYLFSTLIKCKECGWSFRRSVRTYKNTYVRWVCSGHNGKGADSCPNKTGVDEDALVGALNAYFAEVLKSRKNIVRYVVSEFNRLYKAKSDHAEYGRELQQKLTRLQRTRQKYMDLYADGLISREEINEKIGGMREEAERLENDRKLAELNIDKSDRLEGIIRKTFQTIESITDVRQLTNAQLKQIIRKIEVDKDGNVDVHLRLLGDLGLNQTVPIRDSGT

SEQ ID NO: 17465 - protein, 481 aa, synthetic construct
MKSINKVAIYVRVSTTSQAEEGYSIEEQKAKLSSYCDIKDWSVYKIYTDGGFSGSNTDRPALEGLIKDAKRKKFDTVLVYKLDRLSRSQKDTLYLIEDIFIKNNIAFLSLQENFDTSTPFGKAMIGLLSVFAQLEREQIKERMQLGKIGRAKAGKSMMWAKTSYGYNYHKETGTVTINPAQALAVKFIFESYLRGRSITKLRDDLNEKYSKHVPWSYRAVRAILDNPVYCGFNQYKGEIYPGNHEPIITEEVYNKTKEELKIRQRTAAENVNPRPFQAKYILSGIAQCGYCGAPLKIMLGVKRKDGSRLKKYECHQRHPRTLRGVTTYNDNKKCDSGFYYKDKLEAYVLKEISKLQDDADYLDKIFSEDSAETIDRESYKRQIEELSKKLSRLNDLYIDDRITLEELQSKSAEFISMRGTLEAELENDPALGKDKRKADMRKLLNAEKVFSMDYEGQKVLVRGLINKVQVTAEDIVIKWKI

SEQ ID NO: 17466 - protein, 604 aa, synthetic construct
MKKVFVYHRVSSDQQLDGSGIARQAELLEGYLERTGICAEMDDPAPVVLSDQGVSAFKGLNISEGELGAWMEQVRNGMWDSSILVVESIDRFSRQNPFDVMGYINALMAHNVAIHDVMANIVISRSNSKDLPFVMMNAQRAYDESKYKSDRIRKGWAKKREHAFNKGTIVTNKRPQWIEVENDKYVLNHKAAVVKEIFSLYQTGMGCPTIAKQLQTKEGEQYKFNRPWTGELVHKILTNRRVTGKIFISEIIRNHDDVENPVTQKKYDMDVYPVVINEEEFELVQELLKSRRPNAGRVTVKKDGQEEVLIKSNLFSGIARCTECGGPMYHNVVRAKRTPKKGDPKIEEYRYIRCLNERDGLCENKAMTYEMVERFVVEHLLGMDLSTVIKEHEFNPEIEVLRIQIDQVKDQITNYENGIERRKSAGKPISFDMREELDDAKSALERLLARQASLATVKVDVPVLQDVNVTELYDVNNVDIRTRYENELNKIVSNIRLKRNGKSYTIEINYKQNELKRHVLFVENKKKEQTLISEVIIEDVDGANFYYTPSFMIMLKDGEIRFQQTNEDLSIIDYSLLLNYIDAVDRNDVVGVWMRNQFNFLTSN

SEQ ID NO: 17467 - protein, 515 aa, synthetic construct
MKTAIYLRKSRADLEAEARGEGETLAKHRTTLLKIAKEKSLNVLAVREEIVSGESLVKRPEMLALLEEIEDNKYDVVLCMDMDRLGRGGMKEQGIILETFKRSNTKIMTPRKTYDLNDEWDEEYSEFEAFMARKELKIITRRMQRGRIASVEAGNYLGTHAPYGYDIHRLNKRERTLTINLEEASVVRMIFEWYANEDMGASMITNKLNQLGYKSKLGNDWNPYSVLDMLKNNIYIGKVTWQKRKEVKRPDATKRSCARQDKSEWIIADGKHDSIISESLFEKAQEKLNTRYHVPYNTNGLKNPLAGIIRCGKCGYSMVQRYPKNRKKTMDCKHRGCENKSSYTELIERRLLEALKEWYINYKADFAKNIQDSLSKEKQVIKINQATLRKLEKELLDVQKQKNNLHDLLERGVYTVDMFLERSNVVSDRMNEITDMMENLQKEINTEITKERVKKDTIPQVEHVLDLYFKTDDPMKKNSLLKSVLKKAIYTKEKWQRLDDFKLVLYPKLPKDGDK

SEQ ID NO: 17468 - protein, 539 aa, synthetic construct
MSIAVIYTRVSSKSQVKKGDGLASQHQRCSEFAAYKGYEVVESFQDEGVSGGIVDRPAIKQMLQWLRKHRAQEPIVLVDDISRIARSIEAHWKLRNAIGSVGAKLESPSIEFGEDSDSQLIENMLASVSQHHRQKNGEQTAHRMKARLLNGYFAFWVPTGYRYTRVKGHSGKVMVRDEPHASLIQEALEGFASGRFTTQAEVKRFFEPHDIFARDKKGEIHPQRIKNMLTNKIYAGYYEYKPWNVPLTMGIHEPLISWKTFQKIQTLLEEKAYAPTRRDTEGQFPLKGYVTCACCGHPLTAYHAKGRNKHYPYYECFNKECPESRKSIRKETLESDFEALIKKLRPSMPIMVTIAAMFREAWDKQSRELATQWKSQKQALKDINATMNKLTDRLIETTSPSAIKAYEQKLEKLEAQKALITENLANKPDPKKNFDASFRTALSFLANPWNLWTSHNPEHRKALIKLVFAAPLPYMRNQGFRTVKTTSPFKALTSICDEEKEMAERQGFEPWRRLPAYTRSRRAPSTTRPPLRTSSVGAL

SEQ ID NO: 17469 - protein, 540 aa, synthetic construct
MSVADLYIRVSTDEQADKGYSQRNQEEVLKRYCDHHNIMVRKVIFEDHSAKTFNRPRWIELLTYLKKSRGRGVDKILFTKWDRFSRNAGDAYQMINTLRNLDVEPQAIEQPLDLNIPENKMMLAIYLAAPEVENDRRALNIFHGMRRALKEGRYLRKAPFGYINRMEGSRKFIALKEPEASIVKWVFNTILKKRYPTENIWEMVKKKGLKISRSHFHRMVRNPLYCGKIYVPAFKDEEDQFVNGQHEPLISEGEFYRVQNILEDIGRDEYLPKVVSDDRLPLRGFLVCPKCGKVLTGSGSKGRSRRYYYYHCLSKCGFREKASLFNDQMVIEMKRFTLKQEKKEIFSAILHEFFKYHFKDEGEEHKKVAASLESLHEKLKRSRDLLVAGDLEADDYREIKSECNREISSLENQLAATKPERVSNYSKYVDRALERLSRLDLLYENGDVETKRELIGSIFPEKLCFSKTGYRTGRINSVVECIYQINNGLRIKKNERKTKKSSNSHWVELAVRGSNSFLEEMEMIEKLMALGSNRPIKPVL

SEQ ID NO: 17470 - protein, 548 aa, synthetic construct
MQASVKKNISVIPAKPAYDRSIRPQMRTLRVAAYCRVSTLMEQQESSYEAQVQYYTEKIKSNPNWKLAGIYADDGKSATSTRKRSDFQSMIDDCMAGKIDMVITKSISRFARNTVDSLTNIRKLKEKNIAVFFEKEGINTLEGSGELLITILSSQAQEESRNISENCHWGIVRRFEAGQVIVNHSKFLGYTKNRDGNLVIVPEEAELVRRIYRLFLEGNSSYRIKRILESEGIKTVTGNTVWQATVIDKMLTNEKYMGDALLQKTYTVDFLTKKKVANKGIVPQYYIEDDHEAIIPKELFYRVQEEKARRGNIYRAAIKKKRGEEKSKYSGKYALSDLMVCAECGQPYRRQVWSKYGKKSAVWRCDNRLKHGSERCRNSPTLKEEILHEAIMTAISKVVEDQGEFVQAFRENVIRIIGNYGSKAEPTEYDTEIQKQEKRLMTLIEESAKGNCQEADFDREYRGVTEQLKELRKKKEQFMKEQRLAEAYDQRVEEMDSYMKKTGVLRREFDNDLVWRLIQTVKVINQNKIEIQFRSGIVMVQRLDAWED

SEQ ID NO: 17471 - protein, 575 aa, synthetic construct
MSKGNRVAIYARFSTDLQREASIEDQLVYCREAALRQGWQVVAEYSDRATSGASMFRSGIEALQRGARAGQFDIVLWEGMDRLSRKLSDISRFHERMEHAGIRIWTITEEDVDDMKIGLKGTMNAMQLRDIALKTRRGQRGRVRQGKVAGGNSYGYDVVAGPADGKGRTEGGERAINPGKAAVVRRIFEDYARGLSPRRIAEALNTEGIPGPRGRAWGASTLHGNRERRTGILNNELYIGRLVWNRLQYRKDPDTGKRMSRPNAGDVLVTTDVPHLRIVDDDLWQRVRARQGALTSKGTQVAVWDRRRPKFLFSRLMKCGCCGSGVSKEGRDGFSCSAARSKGAAVCTNRTVIKQADLEGRVLHALEHHLMDEAAVRIFCEEYAAERNRLAAGATANRKGLEKELAQVKRDHAKLVDAIIAGVPVEQVKERMNALDARRKELERQLSAEAAPDPVRFHPSMSGAYRERIGALIRALREPEGMEEAKEAIRAMVEKIVLTPVMGPDGKTELAIDLHGALASLLRLATGLPMADVPRRAAGGANSVTASDGVSEAVEFVDKLVLVAGAGFEPAAFRL

SEQ ID NO: 17472 - protein, 575 aa, synthetic construct
MSKGNRVAIYARFSTDLQREASIEDQLVSCREAALRQGWQVVAEYSDRATSGASMFRAGIEALQRDAKAGRFDIVLSEGMDRLSRKLSDISRFHERMEHAGVRIWTITEEDVDDMKIGLKGTMNAMQLRDIALKTRRGQRGRVRQGKVAGGNSYGYDVVAGPADGKGRTEGGERAINPGKAAVVRRIFEDYARGLSPRRIAEALNTEGIPGPRGRAWGASTLHGNRERRTGILNNELYIGRLVWNRLQYRKDPDTGKRMSRPNAGDVLVTTDVPHLRIVDDDLWQRVRARQGALTSKGTQVAVWDRRRPKFLFSRLMKCGCCGSGVSKEGRDGFSCSAARSKGAAVCTNRTVIKQADLEGRVLHALEHHLMDEAAVRIFCEEYAAERNRLAAGATANRKGLEKELAQVKRDHAKLVDAIIAGVPVEQVKERMNALDARRKELERQLSAEAAPDPVRFHPSMSGAYRERIGALIRALREPEGMEEAKEAIRAMVEKIVLTPVMGPDGKTELAIDLHGALASLLRLATGLPMADVPRRAAGGANSVTASDGVSEAVEFVDKLVLVAGAGFEPAAFRL

SEQ ID NO: 17473 - protein, 463 aa, synthetic construct
MKHVGLYIRVSTEEQTENYSIPEQRERLENFCKAKDWLVVDEYIDGGYSGAKLDRPAVQKMITDAGTGTIDTVLVWKLDRLSRSQKDMLYLIEDVFIPNSVDFVSLNESLDTGTAFGRAMIGILSAFAQLEREQIKERTMMGRIARAKSGLVMGPTAPYGYRYVDGQLIVDEYEASIVREIYDLYLQGYGMEKVSNMLYEKMQLTSASGYAAVRRILSRPTYAGLVHYSGEVYPGQHEKIIDVDMWKRVQEKREHSRNYQRGKRQKHLLTGMIYCKRCGAKYAYHVHSGNNYYDRYMCYSVCRSRKELIKDPHCDNTKYLAAELEQLIIAQIKELALDESKFNKVIQKRIEAPDPTQAMQKQIKEIDKQINNFMDLYQYGKVPVETINERIEKLTQEKSAIEKSIRELNIKPIPKREDYEPTLSRVDSIFETGSADEQRAAVRNLIDHIDIDGENVVIHWVFE

SEQ ID NO: 17474 - protein, 522 aa, synthetic construct
MLIILHIYYYKRIKHINFICNQVIRGTFIMKTCIYLRKSRADIEAEKEGEYETLHRHKTTLLKVAKERKLNIIDIKEELVSGEYVEHRPRMIELLEEVKNKKYDAVLVMDLDRLGRGNMQDQGLILDTFKQSKTKIITPRKIYNLDDEFDEEYSEFEAFMARKELKLINRRLQRGRAKSIEEGKYISPDAPYGYEFKYDDKGKKYLAINDEQAAAVRLIFDMYLQNNGATKIANKLNSLGYETNNHIEFKAKAVRDILSNITYCGYVKWKTIDRKNHSRPRPANEQIITKGKHEPIIDEFTFNRVQEIRKSKYISPTKTKVSNPLAGIVVCKKCGHNLIQKISRGKIYLNCRHCDNKSSSLKYVEDAIIESLEGWLNKYKVKIELKDDTSDIDKLKFEVKKLQRELNETEKQKSKLFDFLERGIYDDNTFLERSTILSSRIDDLKNRIAECNLSIITYKDNLQAKKQIIPTLEKVLQNYSNSNDAKEQNLLLKSVLDKVLYEKAKDAKKDEFNLEVHPKLPK

SEQ ID NO: 17475 - protein, 577 aa, synthetic construct
MAATALLTEPEHPVRSTPGMETGTARPGTDGAPAPMLRGLRAIRLSVHTDETTSPERQREADDRAAQEKGIDFGEGDAVREAVDLGVSASKTSPFDRPELGAWLARPDDFDALVFWRFDRAIRSMVDMHDLAKWARTYRKMIVFAEGVGGGGTMTFDFRNPMDPVSELMMMMFAFAAQVEAMSIKERVIGAQAAMRAMPLRWRGSRPPYGYMPVKLEGGGWTLIPDPDAVKVIEWIIRELLTGGKDGKGKAASLIAVELNEKGVPSPRDHWAIKQGRETGGKAGAPLGQKSETHKRFKWSAVTIRRILTSPAMLGWKTHQGKPVRDAEGRPVLATNSPIMDRAEYDVVCAVFERRAKAPRERKDSKSMLLRVAHCSACGSRMYVNPRKDRNPIYRCSYLQRGITCPAPAGVRADWAESFVEREFLSVVGDIPVREVREIPGYDPAPEIAATLAEFEEHQKQEGRQKSKAAAAAWQRHADALDARLAELEATPKVEARREVIDTGQTYADLWASRDVQGKQRILISAGVRLDVRPGRAAGWKSVDESRLRFTLTGGDLDGVLEELRAVALDNAEPASV

SEQ ID NO: 17476 - protein, 642 aa, synthetic construct
MSNQNDVRLSAVYVRKSTEEDTRQIESFAGQEREITKFAEANGYIIVKSYREAFTGTEVKRRKVFLEMLNDARTKNVNFSYILCYDISRFGRLDNDEAGYYRHEFRKHGVEIIYVTENLQGDDTDDLIVSTKQWLAREYSRKIGEYVCRNIVSRAGDAKDKARAFNIGRAAPFGYDTVYIDKDGNPHTIVRWLHDRSKEVYDIDGKLLRVLPAGTRFQKADTDLIGLIPSLPERVETIRKMFRLYVDENLGQYAIVNRLNKALKNNIGCASPTGKPWSIGTVQQILQNEHYIGNTVFNKRSMGKFFRLTVEGDGVKTERLPKHMPTTIRHNNKKDWIILEGTHEPLVSKDIFEAAKAKRKIRCTDKSQSRRSLGSKYLFSGKIKCGNCGFHFQGATKKKNGKEKEGYICGGYKLRGKHTCDSNFLPSNIIEPAVFDALDQEVKSMNLSGVIGRANRDLSNAPALAQQRRGDLKRELCTIEERLETLVDCITPENKDIISGKMVSLRKERDRINLELANTSTIEKKIVASTKVVERLVKLASELKELWAVATLPEKKEFVSLMVDSISIQPKKKTAHIMLSSNYLELKQLATPSDAASFLYDCRGNWPNFEPKPAVVAPVVSLFLKPPSPYLFMATRIIRESA

SEQ ID NO: 17477 - protein, 601 aa, synthetic construct
MNMHETQDRDISKAVIYCRVSSTKQTVRGDGLGSQETRCREFAKYKNYEVVEVFRDDSSGSLTSRPGMQAMLAFLSKHRKEPHAVIIDDISRLARGLMAHFELRVKIGDAGGVLVSPSIEFGEDSDSQLVENLLASVSQHQRQKNGEQTVNRMRARMQNGYWVHQAPVGYRYERESGHGKILVRDEPNASVLQEALEGYASGRFETQVEVKRFLERQPSFPKDLPNGEIRNQRITDVLTRVVYAGYIESPGWGVTLRKGKHEGLISFETFEKIQTRLKGTAKAPARKDINADFPLRGFILCDDCQKPLTACWSQGKNQKYPYYLCPTKGCESYRKSIKREELESSFEGLLERLEPSENLFKLAKAMFKDAWDMRLAQAKQATKHLKANVAEVEKKIEAVLDRIVETDNASVVAAYEKRISKLEREKALAEEKLATNGKPRLTWEESFEHALHFLSSPWKIWKNADLIGKKTVLRLAFLEPLAYSRIEGLRTPNLSVPFRILGDFPPPKSEMAHPTGFEPVTSAFGGQRSIQLSYGCRPVGRRSSTTRDWKRGDDCRFLTEAGRCINQEIAADPLRAVLGRCRTRGARSRLNRPGLAAGRWM

SEQ ID NO: 17478 - protein, 546 aa, synthetic construct
MAAKARVYSYLRFSDPKQAAGGSIDRQLEYAARWAADHGMELDASLSLRDEGLSAYHQRHVRQGALGVFLRAIEDSQVPDGSVLIVEGLDRLSRAEPLQAQSQLAQIVNAGITVVTASDGREYNRERLKAQPMDLVYSLLVMIRAHEESDTKSKRVKAAIRRQCQGWIAGTWRAPIRVGKDPQWVREGEGGRFELIPERAAAVRLVVEMFKQGHGAVRTIRELSERGLAVTESGRMAASHIYKILANRMLVGEKSVELDGETYRLEGYYPALLSAEEFADLRYLAEQRGRRKGKGEIPGVVTGLGITHCGYCGAAIVAQNLMSRKRMADGRPAPGHRRLHCVTYSTGAGCKVSGSCSVVPVERALMLYCSDQMNLTRLLEGDGGTAALSAQLASARQRVAELEAQVQRVTDALLVDDGDAPAAVLRRLRELESRLLIERRDVDSFEHHLAASAANVTPAAADAWRELVHGVEHLDYDARMLARQLVADTFSRIVIYQSGFRPDADDGTIGVVLVAKRGTIRMLHVDRKTGEWRAAEEIDVNKMLID

SEQ ID NO: 17479 - protein, 485 aa, synthetic construct
MMKSAYLYVRVSTDEQKRRGYSLPEQEDRLIKYCESNDIYVKGIYREDFSAKDFNRPEWKKLVSELRRGRAKEENNILFIKWDRFSRNIQYAYEMLGILRKLNVSAMAIDQQIDLSVPESSVMLAIYLSVPEAENTRRAMNTLNGIRKAKEMGRYPNKAPVGYVNMASLDGRKIIVPKQPESGIIRWVFRQLAKNIYMIGHLSEMALNKGLRSTRSNFSKLIRNPVYCGQIPLKLGNGDVVMIKGIHEPLIPEALFYEVQDVINTKRKVSTIRADFRPTFFLTGFLVCPLCGKRLTGSFSQGNTRKYAYYHCRKGCRARVRADKLNDSYRDQLQKLQLSEIVGDLFVAILADWNVDTQKTGFLYERQALRRQLVEQETMLSRARKLFVENILKYDDYSEMKNEFRRITEVIKKELCDVATKLKTIEEQRKLGFQTSIDVFRGFDSLDTADKKQLVSFFPPVDIDLNKREVSIGYNIALSKVLVCK

SEQ ID NO: 17480 - protein, 536 aa, synthetic construct
MSDIQFFDAFAKGTKKVKAVSGKDCVIYTRVSSKDQTENLSLATQLKACTHYAEKLGYNIMATFGGTYESAETDERKQFVEMITFVKKYKGRIAHILVYSLERFSRNDNSIWLTNQLRKLGTEIVSVTQPIDTSNASGQMQQKLLFLFGEFDNQLRKQKCSAGIKECLLRGEWPTKPPLGYERVNGNRRKITINGKGKLIRQAFEWKAFENVTNEVIRERLAERGLKMNHQRVSETFRNPFYCGLMAHKMLEGKVVEGNYEPIVSKNIFLKVNGLLDQYARGYTINEENAEIPLKRFAFCASCGQPLRGYNTRKKNIYYYKCNTKACCNNKNANQLNGMFANILDYFKIDIAKDALSLLRQQMIASFNQMSIGKRDAKEELMRQFQELSGKVNRLEERYIEEQIGAELYQRYRAKYLEERAEIEANLMKLSGQVSNLEKVVDVALKFCVELPKKWLFADYHTKQQLQQLVFPSGITYDKKNNNCRTSRINSVFLYLAYFQQVVGKKKSGIPDLGLDYSAFASLVAGSRIELPTSGL

SEQ ID NO: 17481 - protein, 612 aa, synthetic construct
MRNFEKITALYERLSRDDELQGESNSIINQKKILEEYASKNNLSNIIHFTDDGISGTQFDRPGFMAMMNGVNQGNIGCIIVKDMSRLGRDYLKVGQCMEILRQKGVRLIAINDNVDSFYREDDFTPFRNIMNEWYARDTSRKIQSTFRSKGESGKHTASTPPYGYIKDEKDKNKWIVDEKAAEIVRRIFNLTMQGNGPYRIAKILESEKVDIPAYHQQKLGYGLYQSKNFEHPYRWCSSTIASILKKQEYLGHTVNFKTRKHFKDKKSKYVSEDNWLIFENTHEPIIDQETFDNVQRIRGNVKRYPDGWGEYHPLTGLMYCADCGSKMYVHRTSNYKNIPYYTCSAYTKTPCGMLCPSAHRIKAEVVLNLIQDTLKDIKKYLDEDNEDFICSIQNEMEEKEKIEIEKKKVRLTESQNRLRELERLMCRIYEDMILNKIPNSRYEILNNQYETEQITLSKEIKDLEQQVSRYEKETDRARKFISLISRYENFDELTTTMINEFVEKIIVHERDRKGSQTSKQKIEIYFNFIGNYELPQAELSEEKKQKLEEEERKIEERKDKLHQNYLKRKASGKQKEYEDKYKARREQKKQEKIKVLKRVGIPVSEYIKTNI

SEQ ID NO: 17482 - protein, 601 aa, synthetic construct
MKKEVKVIKGDTTLKRTASGCVERSIKRVAAYCRVSTDTEDQINSYNSQVEHYTEFIQKNNEWTLAGIYADEAITGTQVDRRIDFQRLINDCMNGDIDMIITKSISRFARNTLDTLKYVRKLKEFNVAVFFEEENINTLTMDGELLLTILSSVAQQEVENISANVKKGLRMKMERGEMVGFQGCLGYDYDPETKSISINEKEAEIVRYIFRRYIEGVGGMVISRELEEQGYLSPRGNKRWTETTVLGIIKNEKYKGDLMMGKTYTVDPISKRRLDNYGEQDKFYIENHHEPIISEEDFEKAQGIRLRRSKNRNTVANNGGKREKYSRKYAFSSMLECGFCGHNLSRRNWHSSSEYTKVIWQCVNATKNGKKYCPHSKGIEEEAIEKAFMESYRQVCHNNVEITNEFLKTVEEELKDNSLAKDLKKINNQLDKILKKEKDLVELRLNESISMDIYQDKYNEIAISKEKLLAEKRTLEVTLTDEKALKKRLEGFKKLLESNKYLEEFDRAVFESIVDKIIIGGTNDEGEIDPAMITIIYKTGKKDSQDGRLFKSRRKNAKEVDEKTDNKLYPQSSDEVNDLCSYPMDNTCGVCGSARKSLETF

SEQ ID NO: 17483 - protein, 601 aa, synthetic construct
MKRDVKVIKGDTTLKRTASGCVERSIKRVAAYCRVSTDTEDQINSYNSQVEHYTDFIKQNNEWTLAGIYADEAITGTQVDRRIDFQRLINDCMNGDIDMVITKSISRFARNTLDTLKYVRKLKEYNVAVFFEEENINTLTMDGELLLTILSSVAQQEVENISANVKKGLRMKMERGEMVGFQGCLGYDYDPETKSISVNEKEAEIVRYIFRRYLEGVGGMVISRELEEQGYLSPRGNKRWTETTVLGIIKNEKYKGDLMMGKTYTVDPISKRRLDNYGEQDKFYIENHHEPIISEEDFEKAQGIRLRRSKNRNTVANNGGKREKYSRKYAFSSMLECGFCGHNLSRRNWHSSSEYTKVIWQCVNATKNGKKYCPHSKGIEEEAIEKAFMESYRQVCHNNVEITNEFLKTVEEELKDNSLAKDLKKINNQLDKILKKEKDLVELRLNESISMDIYQDKYNEIAISKEKLLAEKRTLEVTLTDEKALKKRLEGFKKLLESNKYLEEFDRAVFESIVDKIIIGGTNDEGEIDPAMITIIYKTGKKDSQDGRLFKSRRKNAKEVDEKTDNKLYPQSSDEVNDLCSYPMDNTCGVCGSARKSLETF

SEQ ID NO: 17484 - protein, 453 aa, synthetic construct
MEEVIAYVRQSTLKQQSLATQKSLIIDTAKQYGWSNVTFYDDKKTGRHTKRSGYQKMVEMITSGKCKVLCCYRLNRLHRNLKNAIQFFEICKKHHVTIISVNDGYFDLSKEFDCFRLNILMSLAEMESNNISEQTRNGTREKAKQGKLITTHAPFGYRYRQGHFVLHEEEAYTVKAVYRWYLHGLGYKKISQHLDNHPKLIPRKPYQVRNILLNPNYCGRVINKYGTFNDIVPPIIDVDMFEEAQERRIHKQHNRSNSRNKLKRRIKCPYCQSTLTNLTIKKEKHSLRYYVCPKNMNEAYHTCPFKGINAQMIETEVLNTCKAYCDNPSFHDKLNKTILKALKHQQMKHRQSHLTQEQLIEKLAQNQIDIETFKRLSAGFEREERYSNYSHKQITETIRHIIKDKLTLETIAPLINDITITQTKQLQGIYFKNSPLNIVEQSHLIISERMEVI

SEQ ID NO: 17485 - protein, 493 aa, synthetic construct
MKTCIYLRKSRADIEAEKEGEYETLHRHKTTLLKVAKDMKLNIVDIKEELVSGEYVEHRPRMMELLEEVKNKKYDAVLVMDLDRLGRGNMQDQGLILDTFKNSKTKIITPRKIYNLDDEFDEEYSEFEAFMARKELKLINRRLQRGRAKSIEEGKYISPDAPYGYEFKYDDRGKKYLAINEEQAAAVRLVFNMYLENKGATKIANKLNALGYETNNHIEFKAKAVRDILSNITYCGYVKWKTIDRKNHSRLRPDGEQIIAKGHHEPIIDEFTFNRVQEIRKGKHISPTKNKVSNPLAGIVVCKKCGHNIIQKISRGKTYLWCRHCDNKSSSLDYVEDAIINSLEGWLENYKIKIELKDDAEEIDKIKFELKKLQRELKETEKQKGKLYDFLERGIYDDKTFLERSTVLGSRIDDLKNQISECNLSIISYKDNLQAKKQVIPSLEKVLKNYSSSNDAKEQNLLLKSVLDKVLYEKAKDASKDDFTLEVYPKLPK

SEQ ID NO: 17486 - protein, 479 aa, synthetic construct
MTKVAIYVRVSTKGQVEEGYSIEEQISMLTSYCSIHKWTVFDTYVDAGISGATIERPELSRLSRDAQKKKFNTMIVYDLKRLGRSQRNNIAFIEDILEKNGIGFISLTENFDTSTPLGKAMVGILSAFGQLDRDTIRERMMMGKIGRAKSGKPMMTSTIAFGYTYDKLTSSLNINQAEAIIVKIIYDEYLAGKSLTKLRDYLNENNLLRKGKPWNYQGVSRVLRNPVYIGMVRFRGEVYQGNHEAIIDAEIFEAAQKELKRRQLETYEFNKNPRPFRAKYMLSGIIKCGLCGCPMEITLGTKRKDGTRNIRYQCVNRFPRTTKGITVYNNGQKCNSGFYEKSDIEIYVLGQVRLLQLNEAKLDKMFESPEIINVEEIENQINSLNNKMKRLNDLYLNDMISLDDLKTKTYTFLKQKELLENELDNNPAIQQEENRKQFQKLLGTNDITQLSYEEQAFAVKNLIDKVFVKPGIIDINWKI

SEQ ID NO: 17487 - protein, 402 aa, synthetic construct
MKQIKTIQAQKVTTIKRLKVAAYTRVSHTSLLQSLSNQVSHYSQMIQANPKWDYVGVYSDSAISGRSQAHRRDFQQLLEDCWKGKIDIILTKSISRFGRNTVELLETVRELKRLGISVRFEKEKIDTLTAEGELLLTLLASMAQEESQSISQNIRWRVKKRFEEGKPYIPQDIFGYRWNGEEYVIEPHEASIVRQVFEWYMEGLSAPKIAKKLDDRGERTRLGNRFTKRIIYNMFDQEAYCGRLILQKTFRDHFGSRSIPNDGQMAKYIVENAHEAIVTPEYFQQVNQEKKRRARRRVSKHDALAKLQGKVYCEHCGLDMILTLETKSNQEKRVRYYCRTRDAKGVEACLGRTVTEEQLFQAFGERINTEDIHHISFNSVTNEAKATYRNGEEKHVIIQKGR

SEQ ID NO: 17488 - protein, 452 aa, synthetic construct
MKAAIYIRVSTQEQIENYSIQAQTEKLTALCRSKDWDVYDIFIDGGYSGSNMNRPALNEMLSKLHEIDAVVVYRLDRLSRSQRDTITLIEEYFLKNNVEFVSLSETLDTSSPFGRAMIGILSVFAQLERETIRDRMVMGKIKRIEAGLPLTTAKGRTFGYDVIDTKLYINEEEAKQLQMIYDIFEEEKSITTLQKRLKKIGFKVKSYSSYNNWLTNDLYCGYVSYADKVHTKGVHEPIISEEQFYRVQEIFSRMGKNPNMNRDSASLLNNLVVCGKCGLGFVHRRKDTVSRGKKYHYRYYSCKTYKHTHELEKCGNKIWRADKLEELIIDRVNNYSFASRNVDKEDELDNLNEKLKTEHTKKKRLFDLYISGSYEVSELDAMMADIDAQINYYEAQIEANEELKKNKKIQENLADLATVDFDSLEFREKQLYLKSLINKIYIDGEQVTIEWL

SEQ ID NO: 17489 - protein, 452 aa, synthetic construct
MKAAIYIRVSTQEQIENYSIQAQTEKLTALCRSKDWDVYDIFIDGGYSGSNMNRPALNEMLSKLHEIDAVVVYRLDRLSRSQRDTITLIEEYFLKNNVEFVSLSETLDTSSPFGRAMIGILSVFAQLERETIRDRMVMGKIKRIEAGLPLTTAKGRTFGYDVIDTKLYINEEEAKQLRLIYDIFEEEQSITFLQKRLKKLGFKVRTYNRYNNWLTNDLYCGYVSYKDKVHVKGIHEPIISEEQFYRVQEIFSRMGKNPNMNRDSASLLNNLVVCGKCGLGFVHRRKDTVSRGKKYHYRYYSCKTYKHTHELEKCGNKIWRADKLEELIIDRVNNYSFASRNIDKEDELDSLNEKLKIEHTKKKRLFDLYISGSYEVSELDAMMSDIDAQINYYEAQIEANEELKKNKKIQENLADLATVDFNSLEFREKQLYLKSLINKIYIDDEQVTIEWL

SEQ ID NO: 17490 - protein, 452 aa, synthetic construct
MKAAIYIRVSTQEQIENYSIQAQTEKLTALCRSKDWDVYDIFIDGGYSGSNMNRPALNEMLSKLHEIDAVVVYRLDRLSRSQRDTITLIEEYFLKNNVEFVSLSETLDTSSPFGRAMIGILSVFAQLERETIRDRMVMGKIKRIEAGLPLTTAKGRTFGYDVIDTKLYINEEEAKQLRLIYDIFEEEQSITFLQKRLKKLGFKVRTYNRYNNWLTNDLYCGYVSYKDKVHVKGIHEPIISEEQFYRVQEIFARMGKNPNMNRDSASLLNNLVVCGKCGLGFVHRRKDTVSRGKKYHYRYYSCKTYKHTHELEKCGNKIWRADKLEELIIDRVNNYSFASRNVDKEDELDYLNEKLKIEHAKKKRLFDLYINGSYEVSELDSMMNDIDAQINYYESQIEANEELKKNKKIQENLADLATVDFDSLEFREKQLYLKSLINKIYIDDEQVTIEWL

SEQ ID NO: 17491 - protein, 452 aa, synthetic construct
MKAAIYIRVSTQEQVENYSIQAQTEKLTALCRSKDWDVYDIFIDGGYSGSNMNRPALNEMLSKLHEIDAVVVYRLDRLSRSQRDTITLIEEYFLKNNVEFVSLSETLDTSSPFGRAMIGILSVFAQLERETIRDRMVMGKIKRIEAGLPLTTAKGRTFGYDVIDTKLYINEEEAKQLQLIYDIFEEEQSITFLQKRLKKLGFKVRTYNRYNNWLTNDLYCGYVSYKDKVHVKGIHEPIISEEQFYRVQEIFTRMGKNPNMNRDSASLLNNLVVCSKCGLGFVHRRKDTMSRGKKYHYRYYSCKTYKHTHELEKCGNKIWRADKLEELIINRVNNYSFASRNVDKEDELDSLNEKLKIEHAKKKRLFDLYINGSYEVSELDSMMNDIDAQINYYESQIEANEELKKNKKIQENLADLATVDFDSLEFREKQLYLKSLINKIYIDGEQVTIEWL

SEQ ID NO: 17492 - protein, 452 aa, synthetic construct
MKAAIYIRVSTQEQIENYSIQAQTEKLTALCLSKDWDVYDIFIDGGYSGSNMNRPALNEMLSKLHEIDAVVVYRLDRLSRSQRDTITLIEEYFLKNNVEFVSLSETLDTSSPFGRAMIGILSVFAQLERETIRDRMVMGKIKRIEAGLPLTTAKGRTFGYDVIDTKLYINEEEAKQLRLIYDIFEEEQSITFLQKRLKKLGFKVRTYNRYNNWLTNDLYCGYVSYADKVHVRGIHEPIISEEQFYRVQEIFSRMGKNPNMNKESASLLNNLVVCSKCGLGFVHRRKDTVSRGKKYHYRYYSCKTYKHTHELEKCGNKIWRADKLEELIIDRVNNYSFASRNIDKEDELDSLNEKLKIEHAKKKRLFDLYINGSYEVSELDSMMNDIDAQINYYEARIEANEELKKNKKIQENLADLATVDFNSLEFREKQLYLKSLINKIYIDGEQVTIEWL

SEQ ID NO: 17493 - protein, 529 aa, synthetic construct
MTTTQIRRKRVTAIPATKTPGHNATAQGVQRRRRVAAYARVSTEAEEQASSYEAQIDYYTRHIQSRSEWEFAGMYADEGITGTTTKHRTGFKTMIADALAGKIDLILTKSVSRFARNTVDTLTHVRQLKDAGVEVYFEKENIWTLDSKGELLITIMSSLAQEESRSISENVTWGHRKRFADGKIMVPYSSLLGYKKGDDGNLAIDETEAPIVRRIYARFLEGATPQTIAKELTADQIPTPCDKTVWLPSTVRSILANEKYKGDALLQKSFTTDFLTKTMKVNEGEVPQYYVTGNHEPIINPATWDAVQAELARRAGKGTSNTHPFANTITCSDCGGSFGRKVWHSTSKYRRHIWRCNNKYKKTHRCATPHVTEDQIKDAFVAALTERVTGNDVLDDTMHLLDDTIFNTRELETQQNRLGERLEETITLMNQLITAAAATVHDPDDYDRRYHELENRHRQLETEHQHISEQIDDLRHRRAQAIKVRDYLATQPPLAYSDQAWNTLVDHATVTADGVITILLKDEISTSKD

SEQ ID NO: 17494 - protein, 516 aa, synthetic construct
MKTIHKLARPKLPETPKLKVAAYARVSTASDEQLSSLKTQITHYENYIQKNDQWEYVGVYYDEGISGTKTDKRDGLHRLINDAEHGKIDLILTKSISRFSRNTVDCLNLVRKLTDIGVTMIFEKENINTSDMESELLLSILSSLAESESYSHSENMKWANRKRMAKGNYKGVPPYGYCRKGIDFHLVPDEAKVVEQIFQWTLNGLSMHQIASKLNAANITTKRGVKWQASGVSVILHNIVYTGTMIFQRYFNDEQFKKRKNNGELPMYRIDNNHPAIVSMEEYERVQEIIRIRATSKGNTKDGKNTNRYAFSKKVLCDKCGNTYKRIHTYWKGNTRKVQWACKGHLKDKNSCVALPISDEQLKIAYLTMLNKLIFAHKVVLEPLLKNQSNAAELERALDEISNKASEIDEKLEVLASLNTSGIVSVKTSFEEQNKLQLELKNLQEEQQQIINSANGKSTQRIELEELHRFTKRSNMLTEWEESLFSRFADQVFVYNRQEVGFKLKCGLILKERLPE

SEQ ID NO: 17495 - protein, 529 aa, synthetic construct
MTYQEGGERMKKITKIEGNLANSFIKPKTRVVAYCRVSTDSNEQLVSLQAQKAHYETYIKANPEWEYAGLYYDEGISGTKKENRSDLLRMLSDCETGRIDLIITKSISRFARNTTDCLEMVRKLIGLGVHIYFEKENINTGTMESELMLSILSGLAESESISISENTKWAIQRRFQNGIFKISYPPYGYQNMDGQMIVIPKQAEIVKYIFAEVLSGKGTQKVANDLNQKGIPSKRGGRWTATTIRGILTNEKYTGDVLLQKTYTDSHFNRHTNYGEKNMYLVENHHEAIISHEDFEAVDVVLNQRAKEKGIEKRNSKYQNRYSFSGKIICSECGSTFKRRIHSSGRKYVAWCCSKHIGNITECSMQFIRDEDIKTAFVTMMNKLIYGQKFILRPLLNGLRNQNNVASFRRIEELETKIENNMEQSQMLTGLMAKGYLEPALFNKEKNSLEAERERLLVEKDQLTRSVNGNFTKVEEVDRLLKFATKSQMLTAYEDELFENYVEKIMVFSREEVGFELKCGITLKERLVN

SEQ ID NO: 17496 - protein, 452 aa, synthetic construct
MKAAIYIRVSTQEQVENYSIQAQTEKLTALCRSKDWDVYDIFIDGGYSGSNMNRPALNEMLSKLHEIDAVVVYRLDRLSRSQRDTITLIEEYFLKNNVEFVSLSETLDTSSPFGRAMIGILSVFAQLERETIRDRMVMGKIKRIEAGLPLTTAKGRTFGYDVIDTKLYINEEEAKQLQLIYDIFEEEQSITFLQKRLKKLGFKVRTYNRYNNWLTNDLYCGYVSYKDKVHVKGIHEPIISEEQFYRVQEIFTRMGKNPNMNRDSASLLNNLVVCSKCGLGFVHRRKDTMSRGKKYHYRYYSCKTYKHTHELEKCGNKIWRADKLEELIIDRVNNYSFASRNIDKEDELDSLNEKLKIEHTKKKRLFDLYISGSYEVSELDAMMSDIDAQINYYEAQIEANEELKKNKKIQENLADLATVDFNSLEFREKQLYLKSLINKIYIDDEQVTIEWL

SEQ ID NO: 17497 - protein, 452 aa, synthetic construct
MKAAIYIRVSTQEQIENYSIQAQTEKLTALCLSKDWDVYDIFIDGGYSGSNMNRPALNEMLSKLHEIDAVVVYRLDRLSRSQRDTITLIEEYFLKNNVEFVSLSETLDTSSPFGRAMIGILSVFAQLERETIRDRMVMGKIKRIEAGLPLTTAKGRTFGYDVIDTKLYINEEEAKQLRLIYDIFEEEQSITFLQKRLKKLGFKVRTYNRYNNWLTNDLYCGYVSYKDKVHVKGIHEPIISEEQFYRVQEIFSRMGKNPNMNKESASLLNNLVVCSKCRLGFVHRRKDTVSRGKKYHYRYYSCKTYKHTHELEKCGNKIWRADKLEELIIDRVNNYSFASRNIDKEDELDSLNEKLKIEHAKKKRLFDLYINGSYEVSELDSMMNDIDAQINYYEARIEANEELKKNKKIQENLADLATVDFNSLEFREKQLYLKSLINKIYIDGEQVTIEWL

SEQ ID NO: 17498 - protein, 452 aa, synthetic construct
MLRVALYIRVSTEEQALNGDSIRTQIEALEQYSKENDFNIVGKYIDEGCSATNLKRPNLQRLLRDVEKDKVDLVLMTKIDRLSRGVKNYYKIMETFEKHKCDWKTILENYDSSTAAGRLHINIMLSVAENEAAQTSERIKFVFQDKLRRKEVISGTIPIGYKIENKHLVIDKEKKYIVKAIFDEYEKSGSVRTLIETINNLHGELYSYNKIKNILRNELYIGIYNKRGFYVEDYCEPIISKKQFKQIQRILEKNKKTTPNKNIHYHIFSGLLKCKECGYTLKGNSSNVGEKLYLSYRCSTFYLNKNCVHNVTHNEKHIENYLLTNLKPQLHKHMVKLEAQNEKIRQNKKSNKKDEKKKIMKKLDKIKDLYLEDLIDKETYRKDYEKLQSQLDNITEEQESQIIDTSHIKKFLDIDINEMYSDLSRVERRRFWLSIIDYIEIDNDKNITINFI

SEQ ID NO: 17499 - protein, 454 aa, synthetic construct
MKSKKAVVYARFSSDNQRDESIDAQLRAINEYADKNNIKIVNQFIDRAKSATSDKRPEFQNMIKFCEADTTGISMVIVHKLDRFSRDKYDSAMYKQKLKVKGIRVVSVLENLDNSPESLILESVIEGMAQYYSANLAREVAKGQKENALKALHNGGDAPLGYDVAHDKTYTVNEEEAQAVKIIFDRYIKGYSYSKIIDELNDLGYKTKRGNKFGKNSLHGILNNEKYTGVYVFNKTQRKGVDGKRNGHEQKSEDEIIKVEGGIPVIIDKEVFEQAQEMIQKRKKTPGAHKATTTYLLTGLIKCGECGHAFQGHKRKDSYGNEYVSYRCGCRKQKRDYLEEFILQELEKNILNDEAIPALSKALNEKLNYKNESNAELLKNLDQKLEKVNKEISNILNAIMNGIVSSMLKDKLDELEQVKLNLDLKMNELKIENKVVDGVGVTEEQIRSMFSRFK

SEQ ID NO: 17500 - protein, 457 aa, synthetic construct
MDKIKRVALYIRVSTEEQVLHGDSIRTQTEALEQYSKDNNFIIVDKYIDEGYSATNLKRPNLKRMIEDVKNNKIDLVMITKIDRLSRGVKNYYKIMETLEKHKCDWKTILEDYDSSTAAGRLHINIMLSVAENEAAQTSERIKFVFQDKLKRGEVITGSVPFGYKIKDKHLVIKEDEASIVREAFDAYQDFSSLAKTIQHINTKFSTKYMFKWMPKMLKNKIYIGIYEKGDLVVENYCEPIISREQFNFVQTLLKKNIRFSENKFKMNYLFSGMIVCGSCGRKMGGVHSRGGANRHYLYYRCPLSFATKLCDNKPYLNEKKVEAFLLENVKKELQKTILEHESNKKKRQKKNNNKNLRNKLEKQIEKLQDLYFDDLINKDTYKFKYKKLNDDLSELNKAENEAESVEKDLKSMKIFLDTNFEDNYYDMNYSEKRTLWTSAIDRIEVQKNGELVIKFL

SEQ ID NO: 17501 - protein, 521 aa, synthetic construct
MELQTRNVTIIPARTYLHRSHTEEKPKCRVAAYCRVSTDSDEQATSYETQIEHYTTYIHNHPDWKLAGIYADDGISGTNTKKRNEFNRMIEDCMAGTIDMIITKSISRFARNTLDCLKYIRQLKDKHIPVFFEKENINTMDSKGEVLLTIMASLAQQESQSLSQNVKLGLQYRYQRGEVQINCNHFLGYAKDENKHMVVVPEEAEIVKRIYREYLDGASMLKIARNLTADGLKNGAGHTKWRDSNIRQILQNEKYMGDALLQKTYTVDFLTKKRVKNTGIMPQYYVKDNHEAIIPRDIFLQVQEEMVRRSSIHLKNGRKLTYSSNHCFSQRIRCGKCGEIFRRIHWNNRGKKSIVWRCVNRVDHTGKCDARTISEPALEQVCLTAINQVLCGKKDFLTMLQQNIETVLSHNNDETLAAIDTRLEKLQTQLVKLASSKAGYDDVAEEIYHLREQKQQALAKSANQDEIRSRIDDMTAFLKTQSTAITQFDEHLVRQLIKTITVFEDSCTVAFKSGVTVDVEE

SEQ ID NO: 17502 - protein, 519 aa, synthetic construct
MKTVTKIGGQLACPMQKHKLQVAAYCRVSTDSEEQLVSLATQRKHYEAYITANPDWEFAGIYYDEGITGTKKEKRPALLHLIDDCEHKKIDFIVTKSISRFARNTTDCLELVRKLLELTVYIYFEKENLNTGSMESELMLSILSGLAENESVSIAENSTWSIQRRFQNGTFKLAYAPYGYDVIEGKLVLQPEQATIVKAMFDQTLAGIGTDAIAKELNARAIPAKRGTRWTATTVRGILKNENYTGDAIFQKTYTDSHFNRHHNHGEKDKYRVEHHHEAIITKDMFEATQQVIRQRGKEKGALPQNKKYQNRYPFSGVIRCHQCGATFKRRIQGGRNSYVAWCCATHLVDATKCSLKYIKEAALEYAFVTMMNKLIFGHAFVLKPLLASLHILHSDDSITVIQDLDTKLAENAEHQKTLAYLLAKKYLEPAMYQKGNNELLQEAEQWQHQKDSLVDFLNDDNKTVHETRKLLQYTCKAKMLTGFDGAIFQQFVEQILVYSRTYIGFKLKCGITLRERLV

SEQ ID NO: 17503 - protein, 616 aa, synthetic construct
MTDYSKITALYSRLSVGDEDRDGGESNSIQNQKVFLENYARGQHLTNIRHYIDDDESGRFFDRSAYSRMMDDVENGKIGVCIMKDLTRWGRDYLQVGNAMEIFRRNNVRFIAVNNGIDSEKPDTLEFAPFINIMSEWYAKDISKKVKTGIKTKGMSGKPIVTEAPYGYVKDPDNKDFWKIDEEAAEVVRLIFRLFIGGKNRNQIAVYLTQEQIPTPTFYMKDRGRGTCKNKTLNEDNRCKWNKATLTNILTRQEYCGDVVNFKTTKHFRDKHNHYVDRSQWHITENVHEPIISRSDFETVQRILENAPVRRPNGDGEIHPLSGLLFCKDCGAKMHIRIDYRNGGKRHVAFCSEYHKGKAKNPKCHSPHIMDADLLMQTIAEVLKKIEDYSISNRAEFEALVKKNLAMQQTDQTKKQQKRIPQITTRLEQIDKVLNKLYEDNALGTIPQDRYEQMSQKYSEEYYALKAELATLQEQLSAYENAGGRAQKFLKLTERHAAFTELTPAILNEFISRIEVHERDQKRARYAIQHISIYFNYIGKFENEVTQLAEPTEQEIRQMREEIEEAKKEKSRAYHRNYSREYRARNLEKQREYDRMKAREYRARRKAQAAAAQPTQ

SEQ ID NO: 17504 - protein, 538 aa, synthetic construct
MAKKVTVIKAAKAQKHTQEERRLKVCGYARVSTGSQAQATSYTAQVEYYTEKIESNPLWEFAGVYADEGISGTNVKHRDEFQMMIADCEDGNIDLILTKSITRFARNTVECIQTIRKLKEIGVGIYFEKENINTLSEKSELFITILASVAQGESENISSNNRWAIQKRFQDGTYIISTPAYGYGKDEDGNLVIIESEAETVRWIYESYLNGMGVYVIAKALNQKGIPTIRGAEKWQDGVIQDILKNPIYEGDMLQQRTYTETRFPFVRRVNNGQRNQYLIKDSHPPIVTHEEAEAVRNLMAYRVDVLHMNKSDYTKRYLFSGRIICGECGRTFRRQKIYIGKPYEKIIWTCSGHVEDKESCCMKAIREDVLHRAFTDMWNKLYTNQGTILEPLLKELTELVAARQDSEEIRQLDKEIKDISGQSQILNQVMRKGYMDSALFMESSSKLGWQLTECRRKKTLLTRKLRRTKEIVRTEQLIQLIAEQDGLREEFDEQLFKMTAEKIVVSKEHDITFCLYNGLKLTERGGGQDAVAHANRL

SEQ ID NO: 17505 - protein, 540 aa, synthetic construct
MKQPYNTTIYNTALYMRLSRDDENYGDSVSIETQRTILQQYAKEQGLHVVGEYVDDGWSGTNFERPDFQRMMDDVEAGKVNCIVTKDLSRFGREHVMMDYYLEFLFPEKRVRYIAVAENEDTEKGLSDFVPFKNLFNEWFAKDTSRKVKAAFKAKFATGQRIGAYAPIGYRKHPEIKNKLIIDEETRWIVEKIFDLAIHGRGAASITRILIMEKVPTPGFINFQRDGTFANIYAGAPEEKSYAWTIAQVKSIMKDETYIGHTIHYRETNISFKNKRRVRKPQSEWVRVENTQEPIISEQVFRQVQEQIANRRRKCKDGTTQIFSGLVKCADCGWSLSYGENRQNSKPYGHYHCSKYGQGTRQCSMHYIRYDVLYAYVLSRLQYWSGLVQHDEERLLKRLLNATDKGQAAARKKQAAELKKAEKRKAEVDTLFARMYEDWAAGRITEYNFSMLSGKYQSEQAELDEKIERLQSAIATESQNAADAEKWIALMKECVNPTELTAELLNTLIEKIVVHEAVKGEDGSREQEVEIFYRFIGKID

SEQ ID NO: 17506 - protein, 584 aa, synthetic construct
MAYRKITDIKDTIGMRAVFYARVSTAEEEQLNAIELQIEENRGCIKDHGWKLVGEYIDRSKSGTMVKGRDDYQRLYEDLYEDLFDIVVIKDQERLQRNTLDWYLFINRVVQTGKLLFMYMDGKFYSPDDALITGVRAIIAEEFSRNLSKKLHNYHDHRIEKARQGQEIALQGSGNVYGWDKKDGKYYINPEQAKVRRLMCEGIMARKGSTLIAKELNDAGYRNTVGKPWKPMDIPKFVYDCKNVGTMIINKERHDFESKQTIKLPKEEWVYVENALPPIVTQEEWDLICKIHEERVIATGSDRRGKKTSGYSFSGKLVCGICGAPYWRKQRVSKDEYWVCSTKQTKGRRTRKRDSTMGKAGEINPLGCDNENISYNSLMEIMGVVSERLQANTDTIKQDMINWLTKLRKQLLEANGGHTEADLQRELSRKSKLLDAYLDGILNKQEYQKKAEELDERIIQLKTETEKNKANSGDIAEIDKVLANIDEEVARYVDGNEKLKVEYLLEHLEQVQIFPDKVIVIVPILSEGIVVEKTQYVSRYKRCRQDYLYENDRWSGKADKRRDIHVWILWKGFVKGTLKSGLPD

SEQ ID NO: 17507 - protein, 520 aa, synthetic construct
MNKLRAAAYCRVSTDRTEQSGSLASQRSFFDNYIRNSDSMTLVGVFYDEGTSGTTTLNRYGFNKMISLAVSGGIDIILTKEVSRFARNTVDTLNITRMLRAKGVGIIFINDNIDTRDSDGELRLSIMATIAQEESRKISERVKWGQQRKMEQGVVFGRSCLGYDVKDGKITVNADSAEIVKRIFTEYTVLLKGAESIADGLNAEQIRTVNGGRWSGAFIRKVLRNVKYVGDLEQKKTCTPDFLTHKKRLNSSEHIYIRNHHEPIISRELWEQTQAEISRRKPTDTSRHSDRYVFSGKVYCGVCGSVMVSRVKMLKNGKIYHALRCSGRIGGKSCNNETLNVTALKACVKRIFTDIPIDKTSVINAVIKGLSRTDKPDIPALRRKIETLNAKKRRAVDLMLDGLITQQELIEQKSYYDSIIEKLSQEISSDRSVFETDKIRKNAERFLDFTSDPLWLLVIRADYIHGTLTVYLKDIEKGFTTCFTATGRGDSYRVITGNTVRSQGIISGTMQVQKNYPTSK

SEQ ID NO: 17508 - protein, 523 aa, synthetic construct
MAKVVTTIPATLSRFTAASINSKKKRRVAAYARVSTDHEEQLTSYEAQVDYYTNYIKGRDDWEFVGVYTDEGITGTNTKKREGFKRMVADALAGKIDLIITKSVSRFARNTVDSLTTIRSLKEHNVECYFEKENIWTFDGKGELLLTIMSSLAQEESRSISENCTWGQRKRFADGKVTVPFKRFLGYDMGPDHNLVINPEQAKLVKRIYGMFLQGQSPFQIARILTEEGILSPGGKNHWNPSNIKSILTNEKYKGDALLQKSFTVDFLTTKKKANEGEIPQYYVKDNHEAIIDPETFEMVQTLMATRKRGWNRKSSVSIFSSKIKCGDCGSWYGPKVWHSNDAYRKTIWQCNHKFDGQKCATPTLTEEEIKELFLRAANQVIDQKDQFISVYEQVLSKSLDTRSLERELSELEAEINIAAELIEECIKENSHVALDQADYQKRYDALVARFDKAKARHAEVTDLITEHTARKHQIETYLQELRDREPLTEFRETDWLAMVDYTTVHSRDDIRVTFKDGMEIKV

SEQ ID NO: 17509 - protein, 590 aa, synthetic construct
MKTVEKIKPKLPALKTRKRVAAYARVSMDSERMQHSLSAQVSYYSALIQKNPEWEYAGVFADYGISGTGTKKREEFNRMLAECEAGNIDIILTKSIQRFARNTVDLLNTVRHLKELGIEVRFEKENINSLSGDGELMLSILASFAQEESRSISENVKWGTIKRFKQGIPNGKFSIFGYEWQDDKLVIIPEEAEIIRWMYSEYMKGASRIEIGRALMARGIYTRQGKPWVDSNVKVVLTNITYTGNMLFQKEYCEDPITKRRRKNYGELPQYFVEDTHEAIIPMDEWQAVQAEFKRRRELGPFGNKSLKLSAFSTKITCGCCGKHYRHSGKRNTAGEVYYIWTCQTKSQKGVSACSSKNIPEKMLQKITAEVMGLDEFDEGAFNQQIEEIVVIGDNTLTFRFYDGHEITTQWQSTAKTDWWTDERRKLWGERHKRKDTNPNKNAFHEFTGFIKCGCCGANYRCQSGKRKDGTPTRSWYCTGPRDQCHNPSVRDETMKQLVTDVLGLDKFDEDTMDAQIESATILNHTVTFHFRNGHTESRDYLDKRHSTPWTEERREKVRKSMKAAWTDERREQMSERIKKIRSEKKWPKS

SEQ ID NO: 17510 - protein, 545 aa, synthetic construct
METTPTKRVALYIRVSTQEQALEGHSIQAQEQNGRQFAERMGYEVVEVYADEGISGKSTKNRFAYQRMMNDARNHRFDLLVIWKLTRLGRNMLDVLQTVEELLRYDVGLHSISEQFDVTTSTGKLMLQLLGSFGEFERNQIAENVQMSMQSLVKDKKRYAGGRRLGYVSGIDTNGQKQLVIEPEEAKIVRLIYAKYLGGAGYRAIANFLNRQGYQTVKKNAFSTTAVKDILRNKIYAGYLEYARYINWETKRRKGKNPKPILVKGTHEPIISEEDYQKVQERFALEGKQPKWNHTGENVLTGLLRCPECGAPMAASNVTNTLKDGTKKRIRYYSCSVFRNKGASVCHANSIRAEQAETFVADRLKEIIQLPEVLPRLVAALNEEIVRQSQPLEQELVVLLERKEELKTKIEKWEAALEDSPELFPMLKDRLDELTEKRRQLHIRENEILGIFQQQGEPIQVKDVQRILTSLDRFLAQSEKKQVKALYRTFIEKITFDPNYKEILEITMKFTPAVVQQLNEQYQIAVSKTKDTAIFVLKTPFTLTI

SEQ ID NO: 17511 - protein, 517 aa, synthetic construct
MKPTKPRAYSYLRFSTPEQLKGDSYRRQTTMALEYAARHGLALDQDLTFEDLGVSAYRGANAEAGRLGEFLEAVRVGLVPRGSYLLVEALDRLSRLVPRKAVRVLEDIVEEGITVVTLNDGREYTSENLDADPTSLLIAIVLFMRANEESATKSRRLKAAWEGKRQNIEHRPLTAVTPAWVSLSEETGKLELVEDRAAIVRRIFDMYVAGIGYASIAETFNREGIVCFGRAQHWHRTYVRKILTNDAVVGVFTPHRIVHEGGKKVRVPLEKVPGYFPVVIPEEVFARAQAQLSGGSGAAPKHRGAVVSNLIAGLARCPLCGSTMTRVMKGAAPKGGRPKLICTKAKAGAGCQYHAVPLENVETAIAENASYITGNVPSGREGLDTELESVEVRIGATRDEIENLIQALAAAPSTAIAERVRDLEVSLEALQSERDSLADQLVSANGPLLAKRVDDLRVTLETDPMDRAKANAALRLLLSSVTVDYGRGKLRLEWKHGGETEVVYAMPLERKVNSPSA

SEQ ID NO: 17512 - protein, 490 aa, synthetic construct
MNDDAKTLILDTYARVSRKGDARRRSMEGQNAANRRRAEQLGATVGEVFDKDDGRSAWNPKVKRHDWDRLMARLESGASDGVVVFDLARFSRRPSEGERLIEAAERGLIIADSEATYDLTTGAGRKAFRDAMAAAAYYSDEISARTKRGKQEKAMAGEPNHSRRPFGFESDGLAIRENEAQELRDATARFIRGESLESITADWNIRGVTTSLDARWTSRTVKNVLRRSRNMGSVEYKGVEVARIPGEPIISAEGFERMEAVFAARRPGRPPSEKYLCSGIAQCGKCGNALTGRPRQGVGPDGEPRREYLCVKRVGRGGCWGIVVDGGSLDGWVRDFVIVRFSDAHNAPDISSALARGRAAADRSAHLADEIGKAEELAQQLADRLGRGEINLARFDAAVGPLDKRIAELRAEAQTLEPAAAGLAAVLSREEAALLWRGAATVERRTMLRQALVGRRLVVNGADAATAREFDPGRVTVESSPPAASGEPSL

SEQ ID NO: 17513 - protein, 459 aa, synthetic construct
MTQKKVEVIPATKRSVHNGGQLKVQSNIRVAAYCRVSTGDESQQTSYTTQKAFYTNLITNKPGWRFAGIYADEAKSGTSREHREDFNRMMADALDGKLDYIVTKSISRFARNTVDTLNCVRQLRQQNPPVGVYFEKENIDTLDATGELILTILSALAQDESRSISDNIRWSIQKNFQAGKPKIDLNRMLGYDKGENGEWVINPEQAKTVRYIFERYVCGQTANRIAKELNELGRKTVNKKNWSASSVLTVLRNEKYVGDIEMQKTITKDFLTHRSTINKGEAPRYYVENHHVGIIDRSTWDKAQTMLYEKPSKVGDSVPAQKKKRGYTGSPFGNLVCGAVLEHGERAGKECGEGFFRVTYTGVATGYTDDRSLAATGGDMDIYLEKYAYAYPVWRCKQKMGKREGEKPDRMAHRIRSCTAGKNTGDCRMPREKQPMKDALRKASMNVPWNRVLWKCCTA

SEQ ID NO: 17514 - protein, 504 aa, synthetic construct
MKKKRVAFFSRVSTMDQHSSIENQQKIFTQWLERNPDCEYYKMYEDEGISGAKGYKRIKWLQMLEDGKNELYDVVVCKSFSRFGRNIVETLSAIKELRTKGIRCVFLEDGLDSEKDASKFGLFAWLAEEEANKTSNRIKTVWDSFNKEGKIHVTVAPYGYDYSVQDKNFVVNEDEREVVKNIFNLYLQGYGFNRIAQMLIENNIPTKKGGSWAGATIQSILTNEFYIGTLVQGKTRTIDATMKENIKIDESEWFRHENRHEAIVDIEVFKKVNRQIEERSKKAKGYYTKEHGNAKRNSNKSLFSNLLICGECGSMMTIKRKKKEKYKPHYQCLNYDRISLKCGHKSNRINESELVQIVKNKLINLSEDNFRRLKNMQIKNRDKKDVKVIEKEITMINKKIEQQINLSNNLLMLFTNGTIKEEQFKLQNESIYKALNGFMERKNVLEEELKVDVSKEQETVVFTGIEYILNKPVEEWKNSELKEFIENIKIFIDGTIELKVKYFN

SEQ ID NO: 17515 - protein, 541 aa, synthetic construct
MAQAATAKKVVIVPIKTMDIVEGIQAILKKKVAAYCRVSTDSEEQKESYTNQVNHYTQYIQNNLEWEMADIYADEGITGTSTKNRTHFNRMIQDARNGKLDLILVKSISRFARNTLDLLKYVRELKSLGVAVFFERENINTLDTTGEVLLTILSSLAQDESRNISENSRWGILRGFQNGKVFCNTNRFLGYDKDEHGELVINEKEAEIVRRIYEEYLDGKSYQAIARGLMRDKIKTVTGGDTWWDSSITLILTNEKYYGALLQQKTVTVDFLTHKRIRNKGQEQQYLIEDNHEPIVSKELFEAVQKEKERRAKLKGSVMGESKRYSSKYALSSKVYCGCCGAIFKRRTWNSNNPSKKVVWQCKTYVNEGKAACDAKSVDEPVLHSAFVRLFNRMYKDKKRLIKTLKANIESVLSSGVEQKSLLDIEGKMQQLKSDLKKLVNLKLRNQIDETVYDEETNRLSSELNELRQQMLRLEEEEDQKEKIKERVDEIIQVLSSRQDILEQFDDNLFNALVEKITILSPAHFVFTLKSGMSIDEIIED

SEQ ID NO: 17516 - protein, 517 aa, synthetic construct
MRLTMNELTMTKPKAYSYIRFSTPEQMKGDSFRRQLEAAEKYAALHGLEIDTTFDFHDLGVSAWQGKNRTEGMLGEFLSFVRSGDIKRGSYLLVENLDRVSRENALDALDTLKDIAREGVTVVTLNDGREYTHDSLRRNPIDLMVAVMMFMRANEESEVKARRLREAWTSKRDKAQNGSKPLTALCPGWLRLNADRSGFDVIPERAAIVHRVFAMTLDGVGQHSIAQRLNREGVPVFGRGKMWQRSYINKMLADHAVIGNFTPHRAERINGKKVRIPTDTIEGYFPAVVEREAFERVASMISARPTSTRAPVANILAGLARCPLCDASMTRINKGSTPKQAKPFLVCSRAKVGAGCDYKQVRMENVEHAILHHAEELLGGLPSPTEGLQAKWEELLVHRDVIHDEIERLVEAVARAGHSKALLSRLRKMEHERDEIAKKLEEIEGLIADSLTNRVQNTVKELVARTQDEERDVAKINATMRQLFSKVVVDYRDGQLWFHWKHAEGEQTRIVYAMPQT

SEQ ID NO: 17517 - protein, 512 aa, synthetic construct
MELDAALSLRDEGLSAYHQRHVRQGALGVFLRAVEDGQVPPGSVLIVEGLDRLSRAEPLQAQAQLAQIVNAGITVVTASDGREYNRERLKAQPMDLVYSLLVMIRAHEESDTKSKRVKAAVRRQCQGWIAGTWRAPIRVGKDPHWVRESEGGGFELIPERAEAVRHVIAMFRQGHGAVRIVRDLAERGLTVTDSGRTQSSNLYRLLANRMLLGEKSVEVDGEAFRLENYYPALLTPAEFADLRYLAEQRGRRKGKGEIPGVVTGLGITHCGYCGAAIVAQNLMGRKRLPDGRPHAGHRRLHCVTYSQGAGCKISGSCSVVPVERALMLYCSDQMNLTRLLEGDSGVTALNAELAQARAAVGTLERQIARVTEALLIDEEQAPAALLRKMRDLEAELERERHRCDALDLKVQAMASAETPAAADAWSALVRGVEQLDYDARMQARQLVADTFSRIVIFQSGFYPETDDGLIGLMLIAKRGSTRLLHVDRRSGEWRSADDVAIGTDLPLPHDAG

SEQ ID NO: 17518 - protein, 545 aa, synthetic construct
MKIKAWSPAQLGKVPLVVFLYVRVSLGRDIMDSPETQEKNGELTAKLLGVKIKEIVPDIDESGQFFGHRKVLWMIEQIRQGAANGIMVLDTSRWGRNLMESRQYVKELYDAGGVLISMTQPIDPTTADGLMIMNHFMNMDEHQGNKIGESWVRAHNMRKDNGKPHHGREVFGYKRCPDCRRSERNKRAYEWCKTCEGVLQVDEDVELYYRNAFKDYNANRKSMQTIVREGNALGITTVNGNPLSVSGLRNAMDSGFAAGFVRVNDPTQNSRTSTPWDWKSWKRGKHKRIISLGTWMRYVQKRRKQSRPESRNIEPAYSLSTLMRCGRGETHDARCLASMHANPHKRADESTFRCSNESQGKGCQGITVTIVRAERLVLEWVADRARGEEQAALEMKRSAQANFDMKELRKLEKRKKALKTQQDRLLDALLDGVFTKEQVRKKQDELNTDLSIVEQKLSMLGESIASNQAPPAEAFQGFLALWPKLTVVEKQKSLSVIIDHIVVYPTPAGMPNRLEIVPKWAPLEDRLITKTKNWDRIRAQRAAAA

SEQ ID NO: 17519 - protein, 522 aa, synthetic construct
MVKKVTKIKETNNRLQKKLKLRVAAYARVSTDNTEQLISLEAQKVHYEAYIKANPDWEFVGIYFDEGISGTKKENRTELLRLISDCENKKIDFVITKSISRFARNTIDCLEIVRKLTDLGVFIYFEKENINTQSMESELMLTILSSLAENESISISENNKWSIQKRFRNGTYKLSYPPYGYDYIDGQIVVNKKQAEVVKRIFTDALAGKGTQKIAQELNDEGVRTKKGGQWRGSTIRGILRNEKYTGDVILQKTYTDDNFTRRTNKGEKDQFLIENNHEAIISHEEFKAVNLAIEQRGKEKGIKSGNSKYLNRYPLSGKIQCSECGSTFKRRIHGTKNNKYIAWCCSKHITNIEECSMIYIREDSIHQGFVTMINKLIFSHKVVLRPLLQKLKLMNYSDNLIRVQEIESKMEKNAEQLQVLINLMTKGYLEPALFNKQNNELRSEAEKLKDQKEALYRFINGGMAKITELERLIKYVSKSKNIESFNKEVFEQFVEKIVAFSPTEIGFSLKCGLLLKERMER

SEQ ID NO: 17520 - protein, 527 aa, synthetic construct
MAKKVTTIPATLNRFDSRSIAAAKKRKTAGYARVSTDSEEQATSYEAQVDYYTRYINGREDWEFAGVYTDEGISATNTKKRDGFNQMIEDALDGKIDLIITKSVSRFARNTVDSLTTVRKLKEKGIEVYFEKENIYTLDSKGELLITIMSSLAQEESRSISENTTWGKRKQFADGKGSLAYSTFLGYEKGEDGSLRVNPEQAETVKLIYQLFLQGLSPYAIGKKLTGLGIKSPAGKDTWHQSSVKSILTNEKYKGDALLQKQYTADFLTKKRKKNQGEIPQYYVEGNHEAIIPPETWELVQEEMERRRNMDARYSSTSIFSSKIKCSECGNWYGSKVWHSQDKYRRVIFQCNRKFKNDKKCRTPHLTEDEIKDAFVRAVNAVIPEKDELIANTKVMMRTLCDTTELEVEQSRFLTETKMVAEMVKRIVAENKAEAMDQEEYQRRRNELVARYEAARDGYEKASGEISDRQGKRKTYMRFIGGLQRLDGFCREFDEELWTSLLDHATIYTKDDIRFTFKVGDEVKVTG

SEQ ID NO: 17521 - protein, 503 aa, synthetic construct
MPRISVIGQVLPELKKRKRVAAYARVSMETEMLLHSLSAQVSHYNGLIQKNPDWEFAGIYADEGISGRDTSHRDDFNRLLADCDAGKIDMVLVKSVSRFARDTVDTLTVTRHLKELGIDVYFERENIHSISDEGELLLTLLASFAQEESRSISENVKWGIRKRFEQGIPNGHKAPYGYEWDGEMYRIIPEQGEVVKEIFAKYLSGASAYGIAKELSKRGVTGQKGVPMDDSTIKFILTNPSYTGSMLLQKNFISEGHTRKRNKGELPMYMVEGMFEPLIPQGDFEKAKLIREQRADAAANKNPTLTAFSGLVKCGECGHSVSRRTTKYGKKWNCNTRERKGKAECGLRPIYETELEQAATKALEFAAFDGAAVRREVEQIVINADRIEFRMKSGKAREVMRAYQRGRSAFSQKITCGCCGRKLECDYWKMGPKGQKEKYKVWVCRGCSFRRLLDDEFRKAAAEVLGREDYEPRFVKEIAGVTAYGDRFEFHFTDGEVAEWQRK

SEQ ID NO: 17522 - protein, 457 aa, synthetic construct
MRCAIYRRVSTDEQAEKGFSLENQKLRLESFATSQGWEVSDDYVDDGFSGKNMDRPALRRMFNDVDNFDVILVYKLDRFTRSVKDLNEMLETIKEHNIAFKSATESIDTTTATGRMILNMMGTTAQWERETISERIKDVFGKMRENGIFSTGHPPYGYKCGGNKSIEIVEERAKAVRYIFEQSKTKGLLKISLELNRMGVKTRRNNKFSESTVKRILHNPFYCGYMTVNDKWVPIKNEGYMPIISEEEFKTTQKILTKRNNKQTKSRSVSYYPFSGIVLCPDCQRTMIGDRAKYGDYYYRYYRCVYGRASNNCTNKKRIRAEQVDKAFAEYISESFENATIKLDSRDIKSDIEHELKRLDSKIDRLSDLYIEGDITKSKYNEKMNLLLNDKEKLERDLTSCKENVSVEFVQDQIKQLESVWHLIDDKTKSESIRSVFDTIKIKKEKNQVIIIEHTLL

SEQ ID NO: 17523 - protein, 491 aa, synthetic construct
MRVVLYIRVSTEEQANEGYSIRAQKNQLIDYCRVNGYEIVKICIDDGYSAKNTKRPRLQEVLTLAQNKEIDAVVVYKLDRFTRSVKDLYELLEDLQSNGVGFISRQEKFDTTTAMGRAMIGILGVFAQFERELIAERVRLGMEQKVKEGKRPGGKYPFGYTSTGLLIGEEANYIKMVRSLYMSGMSYQAIAAQMFNEGIVRRNGEWTATNVALTLENPFYAGIIRFGSKMANGKYPQRKREERVDVIEVIGSHEAIWTVEEFKEHILRMRRRSNGGNSRKAIYWFNGVLRCGRCGASMYGRSTTKRSRVDGKELLGTFYWCAKRKENKSCNQPMFRQKHVEHLIKEHIKNIRVEMDQVKEYQTEIDERESEKKKEVAKLKRELEKVKSRIKKWQYAFAEDLIDENDLRLRMDEEHIAEQGINNKLELVTGVSVQTPDQLFQLIDLWDDMNDIEKQQVIGVMFDRIVLITEEENVKGVKNAYFPATVKVSFR

SEQ ID NO: 17524 - protein, 533 aa, synthetic construct
MKRAAIYARYSTDLQNDKSVEDQIRLCEAHAQRIGAQIVKTFHDRAKSGASMFGRAGLSQLMQDAENGTFEVLISESPDRVSRDIADLAHIHKTLKFRGVEMNCVNGGVMDTMQIGMYGVVGQMQREEGAKKVKRGMVGVVRSGRHAGGRAYGYEPVPGKPGELRILPDEAQIIVRIFKQYAAGTSPRTIAGALNEEGIAPPRGDKWNASTINGSGTRGYGILRNPIYDGRMVWNRVRMVKDPSTGRRVSRTNDASEHETIDVPHLRIVDEWLFQKVQERKAATGGEHKMMQPRSKRLLSGLLRCGACGGGMVIVGPDRGGNRIQCSTYRESGTCDNRRRFYIDRIEEQVIDSLRMAFADTSVIEAYVKTYEEELKRRRGNAFKSRAAAQRGLNDAKDGITKIVEKISKGLIEDDEAAVLLAGLREERNKFQAILDSVEEPANVIELQPKALLRFRSSIESLAKILRSSDGNVPMELGETFRQLVAAVVVEPTPAGEAYSVSLKAYLSSLMSSELSVIKLVAGEGLEPPTRGL

SEQ ID NO: 17525 - protein, 638 aa, synthetic construct
MKPKLYSYVRFSSVKQREGNSLERQQDTALKIAARYNLELDTTAFHDLGMSAFKGRNAHEGKLSEFIKQIGVKVPVGSWLVVENLDRISRDDAWTALDIFKSILSKGIVVVTGMDEKVYKYADVKNNPTDLIISLLMFTRAHDESLTKKNRVEAQARSLIRYNLTRKAGTPAKAIESVGQNVWWVDTKSGYVTPHPMYFSAAQKIIELKQNGETLLGIQRYLNEHYTAPKKRVYKDKTGQALTPKTKQWGKHLIRTFLNPTVHGQKIFTLDKRDESGAIIYDSESDEPLKETFIIPDYYPALMSEVDYLTLSKLDRHRAVTRSSSTYPGGNPEPEIPLLSGIGILFCGKCGSFMFKSGSSENKYRYICGSKIVQGKPCGKKGFTSYQLEHTILQLIADHVWNNHQEDKTAWYESEIEKASEAVKKLLKLATLTDNIEELADQINANKQKKITLEKEFQQCKISRSEIQTTGWDQFRHFDVHDTKNPERKRIRLKVKQAIKRIDCYDIDGRHSHFEVTFADETKQRIVIKFNRNRSPGISYVEAQTVNDHDLLKMQGLVLHSFIDELISPEKFAQHIKDKHEVSILNPTFITELEDGVTRDEDSGIAIRVDGITSKSYATVNGIKYEINSLEDLEKLSQ

SEQ ID NO: 17526 - protein, 549 aa, synthetic construct
MNKEAPLVATRAALYLRVSTTRQAEHDVSIPDQKRQGEAYCVTRGYQLIDTFVEPGASATNDRRPEFQRMIEAGTSKPAPFDIVVVHSFSRFFRDHFELEFYVRKLAKNGVKLVSITQEMGDDPMHVMMRQIMALFDEYQSKENGKHVIRALKENARQGFWNGALPPIGYRIVAAEQRGSKTKKKLEIDPLHADTVRLIYRLALEGNGTSGPMGVKAIVSHLNARRIFTRDGGRWGIGQLHRILTRRTYIGEHEFNKRGKSKELKPVSEIVMVSVPPLIDTDTFDAVQAHLRARNPKVTPPRVVSGPTLLTGICFCKKCGGAMTIRTGKGGRYRYYTCSIKARQGETGCSGRSIPMEKLDTIVASHIEDRLLHPDRLEEVLSSVLDRRHERAERRQEHIAELNRRAAETDLRLKRLYDAIESGVADLSDPALKDRITGLKALRDQAQVDAERAQAMLENSGNQAVTPAAVRRFANVARQRIRLDGGGYRRDHLRAFAQRVEVGETEVRIMGSKGELLRTLTAVSGGKSAAIGVPSLGLKWRRGRDSNPR

SEQ ID NO: 17527 - protein, 492 aa, synthetic construct
MKRAISYIRFSSEKQSRGDSLRRQSKMVNDWLKAHPEYYLDQDLSFRDLGVSGFTGKHLKGGLGDFLTAIEKGLVKAGDTLLIESLDRLSRQNVDRASELLRNILRSGVDVVTLSDGEHYTRESLKDPLALIKSILIMQRSHEESLRKSERIQAAWNRKKELISEGIKISKRCPAWLRLNDDRKSFSVIPEKVETVKRCFQLRLEGKSIWEIVRTLNDEGHQTLNQYKAGKFGQTSVQDLLKNRSVIGYFTPKGCEEITGYFPSIIPETDFYKVQQLSYSRYGRKPVSDKPLSVNLFKGVIRCSECGHALIITGFSDTRSGIYRCPLRNENRCSAKGLSRKQTDGTLLTLLSRLDRFDSDMTNTIDMLRLHREHISSNIEKLVQLSLEIEDLSAITSKLKQLKGELSQVDADIEKETQRLKSIDVGCLSDCDLTTKAGRIEAQLIIKSAVKEVVLNTAKRRCKVTFHNSKSIHPTNNRKPLRQRYRGYTVAF

SEQ ID NO: 17528 - protein, 540 aa, synthetic construct
MPKAISYIRFSSKIQASGDSTKRQNKYIYEWLKNNPDYQLDESLRFQDLGISGYSGANAKSGAFGEFLAAVESGVIQAGSVLLVESLDRVSRQDIDTARERLRKILLAGVDVVTLADNSWYKKESLNDPLSLIKAVLIMQRANEESATKSKRLRSAWDAKREAAAKGKIMTRRCVAWLRVSGDMSHFELIPDNVKAVQRVFQLRLEGLPFVRIARQMNEEGFYTLNQRNPVKGAWSHTTVKALLDNRSVIGFKVPSNCTVTQGVKEIPNYYPAVISEEQFYAVQQLKQGAGRRPSSEKPLLTNLFKGVMRCGECGFVTVVNCATEKWHGVYRCSMRYEGRCDAKSINRRLADKALVQGLLYNTNRLSLNRGNGSAIGSLQSELEQLQKQRERLIKLAMLADDTESMAKDLKALNSQIKDAEKSVSEVHQREQSSQLETISHLDLTVKKDRIEAQIIIKRIIKEIRLNTAGKKCDVFLHNGLRLLNFPLDRVVDGGQWIEILPLIDGDEFDFEGFTTKPRHIALEEAPEWVKELEFNSKIQ

SEQ ID NO: 17529 - protein, 547 aa, synthetic construct
MKLLVPYIRWSTKEQDSGDSLRRQTNLIDAFYSKHKEEYYLLPAHRYVDKGKSGFHQQHKNQGSDFRRMFENVMSGVIPEGSLIVVENFDRFSRADIDTAIDDVRQILRKGVSILTLGDGELYDKSALTDPVKLIKHIIIAERAHQESLVKQKRIAQVWNHKTQLARELKKPMGKQAPGWLELSEDGSHYIVDEDKASLVNIIYDKRLSGMSMFAICKWLNEQGYPTINQRKVRISKTKKPDGNWSALSVKHILTSRSVLGYLPAKISTEDRKTVLREEIEGFYPQIVTDSKFYAVQQLLEETGKGKTSSGDHWLYVNILKGIIRCKCGLVMTPTGIRKPVYQGTYRCNGNKESRCSYGTVSRKLLDTQLCSRLFSKLSQLHDEATDTAKLDELQRRLNTVDSELEKLTETLIQLPNITQIQEALRVKQEEKDELIAQLSREKARVKSVSSLDLSGLDMESVEGRTEAQIIIKRLVKEIVVSGNEKLVDIYLHNGNMIRGFQIDGKDDHTLTLEEATDEMQSLDDMLIFGEPVTRIYPAGDMEEVDA

SEQ ID NO: 17530 - protein, 644 aa, synthetic construct
MLRPICYERVSSIQQIEGGGGLDDQRSALEGYLDRNSDKFSNDRIFIQDRGVSAFKNSNISSESQLGIFLQDVQNRKYGEGDALIVMSLDRISRRSSWAEDTIRFIVNSGIEVHDISASTVLRKDDPHSKLIMELIQMRSHNESLMKSVRAKAAWDRKIIEAVQNGTVISNKMPMWLKNVDNRYQVIQEKADLINRCFEWYRDGFSTGEIVKRIADPKWQMVTVSRLVRDRRLLGEHKRYNDEIIHNVYPKVIDDDLFLTANRMMDRVMLEKNKPAEDLLLESDVVQEIFQLYESGLGSGAIVKRLPKGWSTVNVLRVLRDKNVVTQKIIDNLTFERVNQKLSMNGVANRIRKDITIAQDDYITNLFPKILKCGCCGGNIAIHYNHVRTKYVICRNREERKICDAKSIQYIRIEKNILKCVKNVDFQKLMIESTGSETSVLDGLREELSSLRREESSYNDKINERKLAGKRVGIHLNDGLTEVQDRIEEIEKEIISAQTVREIPKFDFDMDEVLDPMNIELRAKVRKQLRLVLKAVKYWMFDKRIFIQLEYFNDVLSHMLVIDNKRGGGEVMYEMSIEEKKGERIYTVHENGYAVFIASVTIGTELWSLALSRTRTIDSVGNYLSLLAREGFEIFVNEDQIDWF

SEQ ID NO: 17531 - protein, 604 aa, synthetic construct
MKKVFVYHRVSSDQQLDGSGIARQAELLEGYLERTGICKEMDDPTPVVLSDQGVSAFKGLNISEGELGAWMEQVRNGMWDSSILVVESIDRFSRQNPFDVMGYINALMAHNVAIHDVMANIVISRSNSKDLPFVMLNAQRAYDESKYKSDRIRKGWAKKREQAFNKGTIVTNKRPQWIEVEKDKYVLNEKAAVVKEIFALYQTGMGCPTIAKQLQRKEGEQYKFNRPWTGELVHKILTNRRVTGKIFISEIIRNHDDIDNPVTQKKYDMDVYPVVISEDEFELVQELLKSRRPNAGRITVKKEGQEEVLIKSNLFSGIARCTECGGSMYHNVVRAKRTPKKGDPKIEEYRYIRCLNERDGLCENKAMTYETVERFVVEHLLGMDLSTVLKEQEFNPEIEVLRIQIDQVKDQITNYENGIERRKSAGKPISFEMREELDDAKSELERLLARQASLATVQVDVPVLQDVNVTELYNVNNVDIRTRYENELNKIVSNICLKRNGKSYTIDINYKQNELKRHVLFVENKKKEQTLISEVIIEDVDGGKFYYTPSFMIRLKDGEIRFQQINEDLSIVDYSLLLNYVDAVDRNDAVSVWMRNQFNFLTSN

SEQ ID NO: 17532 - protein, 599 aa, synthetic construct
MIADLYIRVSTDDQADKGYSQRDQNERLRKYCEMYNLTIGQVIYEDHSAKNFERPEWKKYLSYLKKRSTKTNIVLFTKWDRFSRNAGDAYQMIGLLTKLGVEPQAIEQPLDLSVPENKMMLAIYLATPEVENDRRALNTYNGMRRAKKEGRLMGRAPYGYINRSREDGRKYIALKEPEASNMKWAFNEISKGIMATNQVREKMNKMGGKKIEKSAFYMALKNPMYCGKVFIDKNKEEDAFCVQGQHEALVSEALFDKVQFILDGKKIERLPKTKFLSDENLPLRGFLVCPDCGGVITGSASRGRSQRYYYYHCKSPCGVRHRADLANDIFLNGLKELEMKEPIKEYVKKIFLENYSSSIVNPLTEKKRIGKEIDKLNNKISIARDKLLSEIIEDDEYIQIKKECKEKIEKLENQLSKDQDRTEIKNINIEKLLEKALEALTNVAFLYSSGDIETKREVIGSIFPEKLEFDGKNYRTARMNAVMHLIFQINNGLEDKKNRRKSELSPFSGFVPSAGIEPARLAALEFESSASTNSANWATRNCECKYRNIFVPEKSFFQKLKNNFLPVIRQLNMGWQLFIHFIVKTNMMAQMGEQSLGRF

SEQ ID NO: 17533 - protein, 376 aa, synthetic construct
MKKAIAYMRFSSPGQMSGDSLNRQRRLIAEWLKVNSDYYLDTITYEDLGLSAFKGKHAQSGAFSEFLDAIEHGYILPGTTLLVESLDRLSREKVGEAIERLKLILNHGIDVITLCDNTVYNIDSLNEPYSLIKAILIAQRANEESEIKSSRVKLSWKKKRQDALESGTIMTASCPRWLSLDDKRTAFVPDPDRVKTIELIFKLRMERRSLNAIAKYLNDHAVKNFSGKESAWGPSVIEKLLANKALIGICVPSYRARGKGISEIAGYYPRVISDDLFYAVQEIRLAPFGISNSSKNPMLINLLRTVMKCEACGNTMIVHAVSGSLHGYYVCPMRRLHRCDRPSIKRDLVDYNIINELLLIVAKFNQLKTRKMLMKL

SEQ ID NO: 17534 - protein, 507 aa, synthetic construct
MKRVISYIRFSSEKQAKGDSLRRQSKMVTDWLKAHPEYYLDQDLSFRDLGVSGFTGKHLKGGLGDFLTAIEKGLVKAGDTLLIESLDRLSRQAVDRASELLRNILRSGVDVVTLSDGEHYTSESLKDPLALIKSILIMQRAHEESLRKSERIQAAWNRKKELISEGIKISKRCPAWLKLNDDRKSFSVIPEKVETVKRCFQLRLEGKSIWEIVRTMNAEGHQTLHQHKPGSFGQSSVQDLLKNRSVIGYFTPKGCEEISGYYPAIIDETTFYKVQQLSYARHGRKPASAKPLSVNLFKGVIRCSECGHALIITGFSDTRSGIYRCPLRNENRCSAKGLSRKQTDGTLLALLSRLDRFDSDMTNTVDTLKLHREHISSNIEKLVQLSLEIEDLNAITSKLKQLKGELSQVDADIEKETQRLKSIDVGCLSDCDLTTKAGRIEAQLIIKSAVKEVVLNTAKRRCKVTFHNGRAITLPITENPSEDVTEAIQSLSEVTERGLLDVDEVII

SEQ ID NO: 17535 - protein, 547 aa, synthetic construct
MKLLVTYIRWSTKEQDSGDSLRRQTNLIDAFYVKHKDEYYLLPAHRYVDKGKSGFHQQHKAQGSDFRRMFENVMSGAIPEGSLIVVENFDRFSRADIDTAIDDVRQILRKGVSILTLGDGELYDKSALTDPVKLIKHIIIAERAHQESLVKQKRIAQVWNHKTQLARELKKPMGKQAPGWLELSEDGSHYIIDEDKAALVNLIYDKRLSGMSMFAITKWLNEQGYPTINQRKVRISKTKRPDGNWSSLSVKHILTSRSVLGYLPAKISSEDHKTVLREEIEGFYPQIVTDSKFYAVQQLLKDTGKGKTSSGEHWLYVNILRGLVRCRCGLVMIPSGIRKPVYQGVYRCNGKHEGRCNYGTVSRKLLDTQLCSRLFSKLSQLHDEATDTAKLDELQRRLNTVDGELEKLTETLIQLPNITQIQEALRVKQEEKDELIVQLSREKARVKSVSSLDLSGLDMESVEGRTEAQIIIKRLVKEIVVSGNERLVDIYLHNGNLIRGFHLDGKDDHTLTLEEATDEMQSLDDMLIFGEPVIRIYPAGDMEEVDA

SEQ ID NO: 17536 - protein, 548 aa, synthetic construct
MKLLVTYIRWSTKEQDSGDSLRRQTNLIDAFYSKHKEDYYLLPAHRYVDKGKSGFHQQHKNQGSDFRRMFENVMSGGIPEGSLIVVENFDRFSRADIDTAIDDVRQILRKGVSILTLGDGELYDKSALTDPVKLIKHIIIAERAHQESLVKQKRIAQVWNHKTQLARELKKPMGKQAPGWLELSDDGSHYIIDEDKASLVNLIFDKRLSGLSMFAICKWLNEQGYPTINQRKVRISKTQKPDGNWSALSVKHILTSRSVLGYLPAKVSTEDRKTVLREEIEGFYPQIVTDSKFYAVQQLLEETGKGKTSGGEHWLYVNILKGLIRCKCGLVMTPTGIRKPVYQGTYRCNGNKESRCNYGTVSRKLLDTQLCSRLFSKLSQLHNEATDTARLDELQRRLTTVDSELEKLTETLVQLPNITQIQEALRVKQEEKDELIAKLSREKARVKSVSSLDLSGLDMESVEGRTEAQIIIKRLVKEIVVSGNEKLVDIYLHNGNMIRGFPLDGKDDHTLTLEEATDEMQSLDDMLIFGEPVTRVYPAGDMEEVDYS

SEQ ID NO: 17537 - protein, 605 aa, synthetic construct
MKKCFIYHRVSSECQLAGTGIQRQADNLQAYVERTNLLAEMEDPEATIISDKGISAFKTNQNNLSIGELGRWMEQVRECMWDGSALVLESIDRFSRQNPFTVVAYLSELVNHNITIHDVSLNMLINRTNSAMLPIVTMSAQRAYEESKIKSDRIRDGWRRKRENAFNNGTIVTNKRPQWIDVQDDKYVLNDKVAIVREIFRLYQTGIGTPTIAKVLNAKGDEWLFESGRLWRGESVHKILKNKRVTGTIFISEIIRDYNSTSNPVEQKTYEMDVYPIAIPKEEFDLVQQLMKTRRPNNGRITTSKDTEELKKSNIFNSVCRCARCGEAMYHNVVLANRDSKKNGKFTEEYRYIRCIGERDGFCDNKALRYEVVEKFVIEHIKGMDFTQILKPNNNNPEIELVRRHIEEEKAHIQEYELGIERLKNQDKKIPFDVLTELQESRDKLKELEEHQSTFTEVQVDTDYLKTVDPSVLFDQTNIEVRSRIEQELSKIIDTIQLYRTGKHYVITLKYRNVDVLKHVLFVEAKKLPLLISGVAIERMGDTIVYSTPSFSIYMVDGDLPRLTNIEGEPLNIIDNSLLLNYVDAVDMNDTVEVWMRNKFNTLMQ

SEQ ID NO: 17538 - protein, 523 aa, synthetic construct
MRQVITYLRFSSKPQERGDSIRRQKGLFERWLKDNPDAKVVDEFSDEGASAYHGHHLKGDFGRMLQNIQDGKYLSGQTVLLVESETRLNRQKARNTENLVDLITGKGVDVICLESGKIYTSTNIDDLDTSIQLKIAAHIAHQQSKEKSIKVSAAWEHRAQLALEGKQQLTKNVPGWIDPDTRKLNEHSSTVVTIFDLLLSGESLHNIARYLQAHNIKSFSRREKANGFSVHSVRTILRSESTVGTLAASKRNDRPAIHNYYEPAIDIATFNKAQEILSKNRVGRAPASDNPITINLFKGIIRCQCGASVHPTGVKATYQGVYRCNNVPDGRCNVPTIKRKPFDKWMLDNIVGFLERSDGNNTDKRKAEIEYQISLVTSKLKKAATLLLELDDVTELKEQVKELNIQRSNMQSELDGLNQRETLSDKPLHHLSEIDLTTKAGRVEAQLILSKFVQSIELQREMIIITLRNGTVIGKSRDLSPVLSQDLMKQVVSSPSPKDIDMFSVITSDEEFRKSGKQVTKRS

SEQ ID NO: 17539 - protein, 547 aa, synthetic construct
MKLLVPYIRWSTKEQDSGDSLRRQTNLIDAFYAKHKDDYYLLPAHRYVDKGKSGFHQQHKAQGSDFRRMFENVMSGVIPEGSLIVVENFDRFSRADIDTAIDDVRQILRKGVSILTLGDGEIYDKSALTDPVKLIKHIIIAERAHQESLVKQKRIAQVWNHKTQLARELKKPMGKQAPGWLELSEDGSHYIVDEDKASLVNIIYDKRLSGMSMFAICKWLNEQGYPTINQRKVRISKTKKPDGNWSALSVKHILTSRSVLGYLPAKISTEDRKTVLREEIESFYPQIVTDSKFYAVQQLLEETGKGKTSSGEHWLYVNILKGLIRCKCGLVMTPTGIRKPVYQGTYRCNGNKESRCSYGTVSRKLLDTQLCSRLFSKLSQLHDEATDTAKLDELQRRLNTVDSELEKLTETLIQLPNITQIQEALRVKQEEKDELIVQLSREKARVKSVSSLDLSGLDMESVEGRTEAQIIIKRLVKEIVVSGNEKLVDIYLHNGNMIRGFPLDGKDDHTLTLEEATDEMQSLDDMLIFGEPVTRIYPAGDMEEVDA

SEQ ID NO: 17540 - protein, 581 aa, synthetic construct
MSSKQKLYSYVRWSSEKQSAGTSSERQTSRAMRFAEENELEYVEIKDAGVSAFKGKNTTQGKLGLFISEVDKGVIPRDSWLYVENLDRLTREDVLTANELFLRLLRMGLTIVTGMDNRVFTRESVNNNPMDLMASILMFMRAHEESKTKSDRVTSHVLALLERQRKGLPVNIKAIGKHPFWIDDSGSAHEKVKKHPDFWLPAQEAVRLFLEGHGAFYVTDYLNQNYPVPPAFKKTQRREGGWPLQAIKKMRANMALVGTRIFNLSGKEYRLENYYPPLCTLGEFAQLQDIKANNKRYSGKTSTAINLLGGMKILRCGHCKGTMTAFLQRGQLRYICEYGRSGGNCTAWSLKASIVERCLMPVLITGFLIGAYKTHSDLSLLDKQTNELKEQLKKVQSQQDNVIDAIADLGRTPKLDAKFKALENEEQRVSGKLQQLHQAKSLYASTKDFSENIVDFVAGECHWMIISDVHNPKREALRERIRSVINEAIVTKDNRCIRIEFRFPTGETFVFAGSRPGEYEVFLPRKVHDIPPDATEQEINEWERSDYEYNKNFLKLWYQVVNKNLLSHYPAIDGKDFWPKR

SEQ ID NO: 17541 - protein, 452 aa, synthetic construct
MKLLVTYIRWSTKEQDSGDSLRRQTILIDAFYSKHKNDYYLLPAHRYVDKGKSGFHQQHKAQGSDFRRMFENVMSGAIPEGSLIVVENFDRFSRADIDTAIDDVRQILRKGVSILTLGDGELYDKSALTDPVKLIKHIIIAERAHQESLVKQKRIAQVWNHKTQLARELKKPMGKQAPGWLELSEDGSHYIVDEDKASLVNIIYDKRLSGMSMFAICKWLNEQGYPTINQRKVRISKTKKPDGNWSALSVKHILTSRSVLGYLPAKISTEDRKTVLREEIEGFYPQIVTDSKFYAVQRLLEETGKGKTSSGEHWLYVNILKGLIRCRCGLVMTPTGIRKPVYQGTYRCNGNKESRCSYGTVSRKLLDTQLCSRLFSKLSQLHDEATDTAKLDELQRRLNTVDSELEKLTETLIQLPNITQIQEALRVKQEEKDELIVQLSREKGKRPISDVL

SEQ ID NO: 17542 - protein, 358 aa, synthetic construct
MRKVAIYSRVSTINQAEEGYSIQGQIEALTKYCEAMEWKIYKNYSDAGFSGGKLERPAITELIEDGKNNKFDTILVYKLDRLSRNVKDTLYLVKDVFTANNIHFVSLKENIDTSSAMGNLFLTLLSAIAEFEREQIKERMQFGVMNRAKSGKTTAWKTPPYGYRYNKDEKTLSVNELEAANVRQMFDMIISGCSIMSITNYARDNFVGNTWTHVKVKRILENETYKGLVKYREQTFSGDHQAIIDEKTYNKAQIALAHRTDTKTNTRPFQGKYMLSHIAKCGYCGAPLKVCTGRAKNDGTRRQTYVCVNKTESLARRSVNNYNNQKICNTGRYEKNTSKNMLLMFFINFNTIKNILKK

SEQ ID NO: 17543 - protein, 560 aa, synthetic construct
MSKEKIKVYLYTRVSTSIQIDGYSLEAQKSRMKAFALYNDYEIVGEYEDAGKSGKSIEGRIQFTRMMEDIKSGKDGVSFVLVFKLSRFARNAADVLSTLQTMQDFGVNLICVEDGIDSSKDAGKLMISVLSAVAEIERENIRVQTMEGRIQKAREGKWNGGFAPYGYQLIDGKLLINEEEAIAIRTIFDQYVNTSIGANGLSKYLENHGIRKIPRQNGKNPLFDAGLIRKILKNPVYNGKIAFGRRTLEKVHGTRNEYRQVDQDDYIVAEGIHEAIIPDELWQAAQVKLKAQAKKYEHVNKGKNMRTHLLSGIVKCPICGAGMFGNKSIKYKKDGTKYKDFYYYGCKHRLMNRGHKCTYNKQIREELLDDAVAEVIIKLVSNPKFASMMQEKINMKVDTSAIENEIDNYQKELRKSHSTKFKLIEEIDNLDVEDKHYKRRKNDLDDRLYRMYDKIEELESLLIDAKAKKQTIEAEKLTGDNIYKVLIYFDKLYKVMNDVERRQLITALISEIQIYEEKQPNGQWLKSITFKLPIIDKDLNIGLDNDEQVECVVLLQRSKG

SEQ ID NO: 17544 - protein, 430 aa, synthetic construct
MSTDQEEQLSSYENQVNYYREYISKHEDYELVDIYADEGISATNTKKRDAFNRLIQDCRAGKVDRILVKSISRFARNTLDCIKYVRELKELGVGVTFEKENIDSLDSKGEVLLTILSSLAQDESRSISENATWGIRKKFERGEVRVNTTKFMGYDKDENGRLIINPQQAETVKFIYEKFLEGYSPESIAKYLNDNEIPGWTGKANWYPSAIQKMLQNEKYKGDALLQKTFTVDFLTKKRVQNDGQVNQYYVENSHEAIIDKDTWELVQLELARRKAYREEHQLKSYIMQNDDNPFTTKVFCKECGSAYGRKNWTTSRGKRKVWQCNNRYRVKGQSGCQNNHIDEETLEKAVVMAVELLSENVDLLHGKWNKILEENRPLEKHYSTKLADMINKPSWEFDSYEMCQTLDSITIVEDGQITVRFLEGTEVEL

SEQ ID NO: 17545 - protein, 413 aa, synthetic construct
MSVKKIRVNRQKHRKRVCAYIRVSTTNGSQLDSLENQKQYFEKLYSNRDDIDFIGVYHDRGISGSKDNRPNFQAMIEDCCRGKIDVIHTKSIARFARNTVTVLEISRELKAIGVDIFFEEQNIHTLSSEGEVMLSVLASIAEDELRSMSGNQRWAFQKKFQRGELVINTKRFLGYDVDENGELIINPEEALIVREIFALYLAGNGTHRIAKQLNEKGVATVTGAKWHDTTIRQMLSNEKYKGSVLLQKYFHDGVNGPKKLNQGELEQYLIEDNHEAIISKEDWQVVQDKLNSRGWQQGRNKTYKFTGLLKCQYCGSTLKRQVSYKKKIVWCCSKYIKEGKVACQGMRVPEVDISNWEINSPVTVIERDRNGEKYYSYSGQESADQRFSSGQEENQGSRILSSVHRPRRTAIKL

SEQ ID NO: 17546 - protein, 520 aa, synthetic construct
MKKVITIQATPSIIRSSSDDFSLKKRRVAGYARVSTDHEDQATSYESQMRYYSEYISGRDDWEFVKMYSDEGISGTNTKLRTGFKAMVEDALNGKIDLIITKSVSRFARNTVDSLTTVRQLKEVGVEIYFEKENIWTLDSKGELLITIMSSLAQEESRSISENVTWGLRKQFAEGKVHFPYTNVLGFKAGEDGAIVVDQDEAKTVRYIFQQALIGKSPYHIAKDLTEQGIPSPSGKSRWNATTIKRMLRNEKYKGDALLQKTYTIDFLTKKKNINRGELPQYYVENNHEAIVDRETFDAVQQVLDAKGKKSSTSIFSSKLVCGDCGHFFGSKVWHSTSKYRRVIYRCNEKYNGENRCATPHVTEKEIKQWFVLAVNQVIENKDEIIDNIKVLCSIGSLEGIDNQIKELETETEILSQMVSRLVMENASTLQDQDEYQSKYRQLSAKYESLVEEIEELEVQKLAKSKRNKDLQDFITGLKQQEGLLTDFDELLWETMIESITITKDSDVEITFKNGAVSTI

SEQ ID NO: 17547 - protein, 411 aa, synthetic construct
MRTVRRIQPIKSPCKPRFKVAAYARVSDSRLHHSLSTQISYYNRLIQAHPDWELVGIYYDEGISGKEQCNRQGFQNLIKDCDDGKIDRIITKSIARFGRNTVELLTTVRQLRLKNIGVTFEKENIDSLSSEGELMLTLLASVAQEESQNMSENIKWRVQKKFEKGIPHTPQDMYGYRWDGEQYQIEPNEAKVIRKVFKWYLEGDSVQQIVDKLNQEQVLTRLGNPFTVASIREFFKQEAYFGRLVLQKTYRESFSRNPKRNKGQRNKYIIENAHEPIVTKEYFDLVLHEKERRYQLMSQESHLNKGIFRDKISCSECGCLMIVKVDSKQVNKTIRYYCRTRNRFGASSCSCRTLGEKRLLASFKSKLGIVPDKEWVENNIKHIDYDFGQRIIWVIPVKGRKYPIEIREGRY

SEQ ID NO: 17548 - protein, 527 aa, synthetic construct
MITTNKVAIYVRVSTTSQVEEGYSIDEQKAKLSSYCDIKDWSVYKIYTDGGFSGSNTDRPALEGLIKDAKKRKFDTVLVYKLDRLSRSQKDTLYLIEDIFIKNNIAFLSLQENFDTSTPFGKAMIGLLSVFAQLEREQIKERMQLGKIGRAKAGKSMMWAKTSYGYDYHRETGTITINPAQALAVKFIFESYLRGRSITKLRDDLNEKYPKHVPWSYRAVRTILDNPVYCGFNQYKGEIYPGNHESIISKEEYDKTQSELKIRQRTAAENVNPRPFQAKYILSGIAQCGYCGAPLKIMLGVKRKDGSRLKKYECHQRHPRTLRGVTTYNDNKKCDSGFYYKDKLEAYVLTEISKLQDNAGYLDKIFSGDNAETIDRESYKKQIEELSKKLSRLNDLYIDDRITLEELQSKSAEFISMRGTLETELENDPALRKNKRKADMRKLLNAEKIFSMDYEGQKVLVRGLINKVQVTAEDIVKKSTLIISKTTNISTNVKALTLAFFKNVIIFFILKIYLHILIHGHEHCRIK

SEQ ID NO: 17549 - protein, 481 aa, synthetic construct
MITTNKVAIYVRVSTTNQVEEGYSIDEQKDKLSSYCDIKDWNVYKVYTDGGFSGSNTDRPALESLIKDAKKRKFDTVLVYKLDRLSRSQKDTLHLIEDVFIKNGIEFLSLQENFDTSTPFGKAMIGLLSVFAQLEREQIKERMQLGKIGRAKAGKSMMWAKTSYGYDYHRETGTITINPAQALAIKFIFESYLRGRSITKLRDDLNEKYPKHVPWSYRAVRTILDNPVYCGFNQYKGEIYPGNHEPIISKEEYDKTQSELKIRQRTAAENVNPRPFQAKYILSGIAQCGYCGAPLKIMLGVKRKDGSRLKKYECHQRHPRTLRGVTTYNDNKKCDSGFYYKDKLEVSVLKEISKLQDDADYLDKIFSGDNAETIDRESYKKQIEELSKKLSRLNDLYIDDRITLEELQSKSAEFISMRGTLETELENDPALRKNKRKADMRKLLNAEKVFSMDYENQKVLVRRLINKVKVTAEDIVINWKI

SEQ ID NO: 17550 - protein, 523 aa, synthetic construct
MILARNITMIPAKRMVGTQKPTEKPQKLRVAAYARVSTEFEEQESSYDVQVEHYTSYIKSNPEWELVEIYADDGISATSTTKREAFNRMIHDAKDGKIDMILTKSISRFSRNTVDCLKYTRELKALNIAVFFEKENINTLDAKGEVLMTIMAALAQQESESLSANVRLGIQFRNQQGKVQINHNRFLGYTKDEDGNLVIVPEEAKIVRRIYAEYMDGSSFLQIKRSLEKDGILNGAKHTKWHESNIRQILTNEKYIGDALLQKTFTLNTLEKKRVINNGIAPKYYVEGSHDAIIDRDVFLRVQAEISRRTNILNGGKKRVYSSKYALSSIVFCGHCGDIFRRIKWNNRGCKSTVWRCVSRVLKKTSGIDCPAKTIREEDLQAAVLTAVNDTFNKKEEIMPILMKIIQEVINEDSQESLEKLDIKIKDLQVKLLEAGKEQKIIDEIGDKIITLRKEKHDIMTKSAKNIELQERINDMFSFLEEQTQAITEYSDTLVRRLIEKITVFDNKVVVEFKSGIQSEVEL

SEQ ID NO: 17551 - protein, 513 aa, synthetic construct
MKRITKIEPVNKKANKKLKVAAYARVSTNRDDQLISLDVQKNHYEKYIKARPNWEYAGLYFDEGISGTHMEKRNGLLKLLEDCERGKIDYVIVKSISRFSRNTIDSIETARKLCEKGIYIFFEKENIDTGKMDSELLLSIFSSLAEGESRSISENNKWGIQKRYQNGTFKIGYPPYGYHNIDGQMVIDENQAEIVRLIFSEVLVGKSPGLIAKELNEKKIPSKRGKEWSSGVIHGMVRNEKYTGDVIFQKTFTDENFNRHVNYGERNQYYAKDHHEPIVSHDTFEKANNIIEKNGKEKGIEKYTDKYKNRYALSGKIVCDECGGKWKRVKLNSYFGFACNTHIKNIKMCSMKTIPEDSVKLAFATMMNKLSSTREVVLLPLERNLKRISNDMQLSRLEELESLLEKNTERKNQVMDFFTSGLLDPAVNSEEIMRLEEERKTIVKEQDLISKNLSGGHERQKSLEDILSYTAKKNIITEFDDSLFLKYVDHIIVYSRTEIGFVMKFGPIFKERI

SEQ ID NO: 17552 - protein, 457 aa, synthetic construct
MRVACYDRTSVYEEAKISNDAQYDAVKEYVLEKYEQIPQRFSDKGESGGKADRPAFRQLRAWVCASEEEGVIYVWRYDRLARQAKIALEFIELCQQHQVQVCSISEPLPASFSHTSTNKLFVQLLFTFAEQQRNVIIENVRAGLAYKKQQRQYLSSAVPYGYRLVNGKIQQEAHEAKVVRHIFQLYLTKKYGYKKLCQQLTQQKFFFRERPFQPYHIYSILKNPLYYGEIKGGSLGKYLGTFEPILSKTIFLQAQEIRQSRCTAKKDTYPYLLRQKIRCPFCGRHLSSKYQWNTKKTKTLHYYHCTDRSCQGIFLRAERVESEVLEKIQAFFQYEGVYQALIAQLTQQLAEKRKDEKHKVIQQKKQEAQWLKAFEEGNCSLEELKQQLQALQKPMSTSSFLSLQQCEAKVKEWLQLKDLSSRQLLCDHVCRIEVTKEKTVCGIYFRQLTQNILEGNE

SEQ ID NO: 17553 - protein, 457 aa, synthetic construct
MRVACYDRTSVYEEAKISNDAQYDAVKEYVLEKYEQIPQRFSDKGESGGKAERPAFRQLRAWVCASEEEGVIYVWRYDRLARQAKIALEFIELCQQHQVQVYSISEPLPASFSHASTNKLFVQLLFTFAEQQRNVIIENVRAGLAYKKQQRQYLSSAVPYGYRLVNGKIQQEAQEAKVVHYIFQLYLTKKYGYKKLCQRLTQQKIFFRKRPFQPYHIYSILKNPLYYGEVKGGSFGKYLGTFEPILSKTIFLQAQEIRQSRCTAKKDTYPYLLRQKIRCPFCGRHLSSKYQWNTKKTKTLHYYHCTNRSCQGIFLRAERVESEVLEKIQAFFQYEGVYQALIAQLTQQLAEKRKDEKHKVIQQKKQEAQWLKAFEEGNCSLEELKQQLQALQKPLSTSSFLSLQQYEAKVKEWLQLKDLSSRQLLCDYVCRIEVTKDKTVCGIYFRQLTQNILEGNE

SEQ ID NO: 17554 - protein, 452 aa, synthetic construct
MKAAIYIRVSTQEQIENYSIQAQTEKLTALCRSKDWDVYDIFIDGGYSGSNMNRPALNEMLSKLHEIDAVVVYRLDRLSRSQRDTITLIEEYFLKNNVEFVSLSETLDTSSPFGRAMIGILSVFAQLERETIRDRMVMGKIKRIEAGLPLTTAKGRTFGYDVIDTKLYINEEEAKQLRLIYDIFEEEQSITFLQKRLKKLGFKVRTYNRYNNWLTNDLYCGYVSYKDKVHVKGIHEPIISEEQFYRVQEIFSRMGKNPNMNKESASLLNNLVVCSKCGLGFVHRRKDTVSRGKKYHYRYYSCKTYKHTHELEKCGNKIWRADKLEELIIDRVNNYSFASRNVDKEDELDYLNEKLKIEHAKKKRLFDLYINGSYEVSELDSMMNDIDAQINYYESQIEANEELKKNKKIQENLADLATVDFDSLEFREKQLYLKSLINKIYIDGEQVTIEWL

SEQ ID NO: 17555 - protein, 1250 aa, synthetic construct
MSKEKIKVYLYTRVSTSIQIDGYSLEAQKSRMKAFALYNDYEIVGEYEDAGKSGKSIEGRVQFTRMMEDIKSGKDGVSFVLVFKLSRFARNAADVLSTLQIMQDFGVNLICVEDGIDSSKDAGKLMISVLSAVAEIERENIRVQTMEGRIQKAKEGKWNGGFAPYGYQLIDGKLIINEEEAIAIRTIFDQYVNTSIGANGLSKYLENHGIRKIPRQNGKNPLFDAGLIRKILKNPVYNGKIAFGRRTLEKVHGTRNEYRQVEQDDYLVAEGIHEAIIPDELWQAAQVKLKAQAKKYEHVNKGKNMRTHLLSGIVKCPICGAGMFGNKSIKYKKDGTKYKDFYYYGCKHRLMNRGHKCTYNKQIREELLDDAVAEVIIKLVSNPKFASMIQEKINMKVDTSAIENEIDNYQNELRKSHSTKYKLIEEIDNLDVEDKHYKRRKNDLDDRLYRMYDKIEELESQLIEAKAKKETIEVEKLTGDNIYKVLIYFDKLYKVMNDVERRQLIEALISEIQIYEEKQPNGQWLKSITFKLPIIDEDLNISLENDEQVDGVSVPGVDPNTGFPLPDIGGGIGVEVTFDVVVESIPNPNPTNNIATIDYSYTPVEGGIPNDFSVDSNPVPVEVISADVEVTKLSEPTIVNPGEELIYTIKVVNNGPFPSENVVLTDDVPASIINPEYSLDGGVTFQPWTGSLNIGTLEVGETRVIIIRGIVNPSTVGIITNTAVVSSTTADPNLNNNTSTIETEVNLLADILVMKTAEPNSAVPGTLLRYTIQVENLGPANAENVILNDDIPASIINPEYSLDGGASFQPWNGSLNIGTLNSGISLTVLIQGTVSLNSSEYIVNTATVSSTTPDPDLSNNISTIITPVNPQAGISIIKVADEDVAVPGEEFVYTIEIFNEGPSNATNVVLTDDIPDVILNPEYSLDGGATFQPWNGSLNIGTVAPGQLIRIIIKGLVSSTATGDITNTAEVSADVPEPVTDSSTVTTPIVPSADIEVIKTSNMDTAVPGETFSYTITVINLGPSAAQSIVLTDDIPDVILNPEYSLDGGVTFQPWNGNLSIGTLDAGEIRSIIIRGTVSQTAVGTIINTATISSPTPDPNPDNNTSTDETDISPLADISVIKGNEPVAIPGGRFIYGIEIANAGPSFAENVTLTDNIPASILNPEYSIDNGVTFQPWNGSLNIGTLDAGEIRNIIIRGTVSQTAIGTIINTATVSSTTPDPNLNNNTSTSEAEVSSSADISVVKRSNQTV

SEQ ID NO: 17556 - protein, 452 aa, synthetic construct
MKAAIYIRVSTQEQVENYSIQAQTEKLTALCRSKDWDVYDTFIDGGYSGSNMNRPALNEMLSKLHEIDAVVVYRLDRLSRSQRDTITLIEEYFLKNNVEFVSLSETLDTSSPFGRAMIGILSVFAQLERETIRDRMVMGQIKRVESGLPLTTAKGRTFGYNVVDAKLYINEEEAKHLQLIYDIFEEEKSITFLQKKLKELGFKVKSYSSYNKWLMNDLYIGYVSYADKVHVKGIHEPIISEDQFYRVQEIFSRMGKNPNMNKESSSLLNNLIVCEKCGLGYVHRAKDTVSRGKKYHYRYYSCKTYKHTHELEKCGNKIWRADKLEEIIIDRVKNYSFATRNVDKEDELDSINAKLKVEHSKKKRLFDLYINGSYEVAELDKMMADIDAQINYYNSQIEANKELKRNKKVQESLAELATVDFDSLEFREKQIYLKSIINKIYIDGEQVTIEWI

SEQ ID NO: 17557 - protein, 1346 aa, synthetic construct
MSKEKIKVYLYTRVSTSIQIDGYSLEAQKSRMKAFALYNDYEIVGEYEDAGKSGKSIEGRVQFTRMMEDIKSGKDGVSFVLVFKLSRFARNAADVLSTLQIMQDFGVNLICVEDGIDSSKDAGKLMISVLSAVAEIERENIRVQTMEGRIQKAKEGKWNGGFAPYGYQLIDGKLIINEEEAIAIRTIFDQYVNTSIGANGLSKYLENHGIRKIPRQNGKNPLFDAGLIRKILKNPVYNGKIAFGRRTLEKVHGTRNEYRQVEQDDYLVAEGIHEAIIPDELWQAAQVKLKAQAKKYEHVNKGKNMRTHLLSGIVKCPICGAGMFGNKSIKYKKDGTKYKDFYYYGCKHRLMNRGHKCTYNKQIREELLDDAVAEVIIKLVSNPKFASMIQEKINMKVDTSAIENEIDNYQNELRKSHSTKYKLIEEIDNLDVEDKHYKRRKNDLDDRLYRMYDKIEELESQLIEAKAKKETIEVEKLTGDNIYKVLIYFDKLYKVMNDVERRQLIEALISEIQIYEEKQPNGQWLKSITFKLPIIDEDLNISLENDEQVDGVSVPGVDPNTGFPLPDIGGGIGVEVTFDVVVESIPNPNPTNNIATIDYSYTPVEGGIPNDFSVDSNPVPVEVISADVEVTKLSEPTIVNPGEELIYTIKVVNNGPFPSENVVLTDDVPASIINPEYSLDGGVTFQPWTGSLNIGTLEVGETRVIIIRGIVNPSTVGIITNTAVVSSTTADPNLNNNTSTIETEVNLLADILVMKTAEPNSAVPGTLLRYTIQVENLGPANAENVILNDDIPASIINPEYSLDGGASFQPWNGSLNIGTLNSGISLTVLIQGTVSLNSSEYIVNTATVSSTTPDPDLSNNISTIITPVNPQAGISIIKVADEDVAVPGEEFVYTIEIFNEGPSNATNVVLTDDIPDVILNPEYSLDGGATFQPWNGSLNIGTVAPGQLIRIIIKGLVSSTATGDITNTAEVSADVPEPVTDSSTVTTPIVPSADIEVIKTSNMDTAVPGETFSYTITVINLGPSAAQSIVLTDDIPDVILNPEYSLDGGVTFQPWNGNLSIGTLDAGEIRSIIIRGTVSQTAVGTIINTATISSPTPDPNPDNNTSTDETDISPLADISVIKGNEPVAIPGGRFIYGIEIANAGPSFAENVTLTDNIPASILNPEYSIDNGVTFQPWNGSLNIGTLDAGEIRNIIIRGTVSQTAIGTIINTATVSSTTPDPNLNNNTSTSEAEVSSSADISVVKRSNQTVVVPGDVLDYTIEVRNAGPSTAQNVTLTDNIPASILSPEYSIDNGVTFQPWNGSLSIGTLGAGEIRNIIIRGIVSQTAIGTIINTATVSSTTPDPNL

SEQ ID NO: 17558 - protein, 464 aa, synthetic construct
MDKKAAIYIRVSTQEQATEGYSIQAQTDRLTKYVEAKDFILYKKYIDAGYSASKLERPAMQELIQDVKSKKVDVVIVYKLDRLSRSQKDTMYLIEDIFRPNDVELISMQESFDTSTAFGSATVGMLSVFAQLERKSISERMITGRVERAKKGFYHTGGQDRPPAGYQFNSDNQLIINEYEAAAIKDLFRLYNDGLGKSSISEYLKKNYPGKNKWLPSSIDRMLKNSLYIGKVKFSGVEYDGIHEPIIDEVTFYKTQKEIARRKQSNTKRYNYVALLGGLCECGICGAKMANRRAVGRKGKVYRYYRCYSKKGSPKHMMKTDGCSSKAQQQFIIDEAVINNLKNIDVEAELKRRSAPQTNTSLISSQIESIDKQINKLIDLFQVDSMPLDVISEKIDKLNKEKQSMEKLLERKNRLDKTELQHRFDILKSFDWDNSSIESKRAVIEMLVQKVIIHDNSIEIILVE

SEQ ID NO: 17559 - protein, 452 aa, synthetic construct
MKAAIYIRVSTQEQIENYSIQAQTEKLTALCRSKDWDVYDIFIDGGYSGSNMNRPALNEMLSKLHEIDAVVVYRLDRLSRSQRDTITLIEEYFLKNNVEFVSLSETLDTSSPFGRAMIGILSVFAQLERETIRDRMVMGKIKRIEAGLPLTTAKGRTFGYDVIDTKLYINEEEAKQLQMIYDIFEEEKSITTLQKRLKKLGFKVKSYSSYNNWLTNDLYCGYVSYADKVHTKGVHEPIISEEQFYRVQEIFSRMGKNPNMNRDSASLLNNLVVCGKCGLGYVHRRKDTVSRGKKYHYRYYSCKTYKHTHELEKCGNKIWRADKLEELIIDRVNNYSFASRNVDKEDELDSLNEKLKTEHAKKKRLFDLYISGSYEVSELDGMMADIDAQINYYEAQIEANEELKKNKKIQENLADLATVDFDSLEFREKQLYLKSLINKIYIDGEQVTIEWL

SEQ ID NO: 17560 - protein, 452 aa, synthetic construct
MKAAIYIRVSTQEQIENYSIQAQTEKLTALCRSKDWDVYDIFIDGGYSGSNMNRPALNEMLSKLHEIDAVVVYRLDRLSRSQRDTITLIEEYFLKNNVEFVSLSETLDTSSPFGRAMIGILSVFAQLERETIRDRMVMGKIKRIEAGLPLTTAKGRTFGYDVIDTKLYINEEEAKQLQLIYDIFEEEQSITFLQKRLKKLGFKVRTYNRYNNWLTNDLYCGYVSYKDKVHVKGIHEPIISEEQFYRVQEIFSRMGKNPNMNKESASLLNNLVVCSKCGLGFVHRRKDTVSRGKKYHYRYYSCKTYKHTHELEKCGNKIWRADKLEELIIDRVNNYSFASRNVDKEDELDYLNEKLKIEHAKKKRLFDLYINGSYEVSELDAMMADIDAQINYYEAQIEANEELKKNKKIQENLADLATVDFDSLEFREKQLYLKSLINKIYIDDEQVTIEWL

SEQ ID NO: 17561 - protein, 452 aa, synthetic construct
MKAAIYIRVSTQEQIENYSIQAQTEKLTALCRSKDWDVYDIFIDGGYSGSNMNRPALNEMLSKLHEIDAVVVYRLDRLSRSQRDTITLIEEYFLKNNVEFVSLSETLDTSSPFGRAMIGILSVFAQLERETIRDRMVMGKIKRIEAGLPLTTAKGRTFGYDVIDTKLYINEEEAKQLQMIYDIFEEEKSITTLQKRLKKLGFKVKSYSSYNNWLTNDLYCGYVSYADKVHTKGVHEPIISEEQFYRVQEIFSRMGKNPNMNRDSASLLNNLIVCGKCGLGFVHRRKDTVSRGKKYHYRYYSCKTYKHTHELEKCGNKIWRADKLEELIIDRVNNYSFASRNVDKEDELDNLNEKLKTEHTKKKRLFDLYISGSYEVSELDAMMADIDAQINYYEAQIEANEELKKNKKIQENLADLATVDFDSLEFREKQLYLKSLINKIYIDGEQVTIEWL

SEQ ID NO: 17562 - protein, 547 aa, synthetic construct
MKLLVTYIRWSTKEQDSGDSLRRQTNLIDAFYSKHKNDYYLLPAHRYVDKGKSGFHQQHKNQGSDFRRMFENVMSGAIPEGSLIVVENFDRFSRADIDTAIDDVRQILRKGVSILTLGDGELYDKSALTDPVKLIKHIIIAERAHQESLVKQKRIAQVWNHKTQLARELKKPMGKQAPGWLELSEDGSYYIVDEDKASLVNIIYDKRLSGMSMFAICKWLNEQGYPTINQRKVRISKTKKPDGNWSALSVKHILTSRSVLGYLPAKISSEDRKTVLREEIEGFYPQIVTDSKFYAVQQLLEETGKGKTSSGEHWLYVNILKGIIRCKCGLVMTPTGIRKPVYQGTYRCNGNKESRCNYGTVSRKLLDTQLCSRLFSKLSQLHDEATDTAKLDELQRRLNTVDSELEKLTETLIQLPNITQIQEALRIKQEEKDELIVQLSREKARVKSVSSLDLSGLDMESVEGRTEAQIIIKRMVKEIVVSGNEKLVDIYLHNGNMIRGFPLDGKDDHTLTLEEATDEMQSLDDMLIFGEPVTRIYPAGDMEEVDA

SEQ ID NO: 17563 - protein, 624 aa, synthetic construct
MIKTFIYSRVSSQEQLSGGGLDRQETDVREYVTRNGLDQYEIVAMVDRGISGYDGSNMRDGELGKWYKDAITGMYWGSHLVLEAIDRFSRRDPMLAMEDFTVLVNKGGIKVHIVKFNTFINGDNLPMLSMMMNLAHSESKQKSDRISKGWQRRRRMALDNGTAITARTPYWIDVRDNEYRLNNSSIAVVEAFAMYKQGLSCGLIAKKLNELKHYFPYMWTKTAVQHIVDGLNTSGIIDAPRAIKTIKAFYKSGFSVEDIAKKMNAEFQFMKEWNAPAVHKLLQNKSVTGLVEIQKRKLIQEFDSDGKPLELRTKSEGEKYFESIYPQIISIDDFELIQKLLESNRKVDTKTGKGQTTGGTVTQNEDGELVKQFILSSLCRCYKCGGAMFNNIVRSKRKNGKVDTYSYLRCLNERDAHCDVKALNYPVIERAIIEHVKGLNFDTMFKGTNNSELELLKTREVELLRDIATYEDAIAARKAAGKNTSPVLVTSLVDAQDDLEALQKKIRAISGVNVNAEELTSLNESVFDVAEYELRNMVELELQKIIKRITFNCTEKNIYFITIQYNTGTVLQHGLKVDKKKGVIETYELHEGNKGYVSNGEVITPALIEAAESKNIGIFEGKVM

SEQ ID NO: 17564 - protein, 556 aa, synthetic construct
MNIAIYSRKSVFTGKGESVENQIELCKNYCENYLKDKDFEYIIYEDEGFSGKNTNRPRFKELLEDIKSKKIDILICYRLDRISRNVADFSTTLELLQSNNCDFISIKEQFDTSTPMGRAMIYIASVFAQLERETIAERVKDNMVQMAKLGKWLGGQLPLGFESKKVNYMNEEMKEKYFSKLIPINEELDIVKFIYDTYLLKNSIREVTKELNLKNYKSKNGGNFDLMQVKRVLRNPLYVQSNENTHKYLNNINYNVFGNPNGNGYLTYNKKTDKDNLIVAVAAHKGIISSTDWLFIQSKLDSNRDKSSSKSGTGNSNTLFSTILKCGKCGASMVIKYNSKNKDGKNYIYYVCSNKEKKYGENKCDCPNLRSDIIDEKIINKIKAYNKDVILEAYNRKIDELASLSSKNLISNLKLQLSKTESQARNLVSKISDTLDEVTSELLMEELKSLGNKITLLKEEISNDDISKKHIENQIDNVRLLKNSFVNFDKSFENTDDIITKRALIKNIVQDIVYNITTNDFDVTFLGLKNMHFDNTSESMDCHIYSSKRRSSSGFT

SEQ ID NO: 17565 - protein, 573 aa, synthetic construct
MKAAIYSRKSKFTEKGDSIENQIHMCIQYAKNIGIDDYEIYEDEGFSGGNTNRPKFQKLMRDVKAKKFTHLICYRLDRISRNVADFASTIEILNKYDTAFISIREQFDTSSAMGRAMMNISATFAQLERETIAERIKDNLRELSKTGRWLGGPPPLGYESIEVENNDSNGKNRKKHILQINPNESEIPKLVYELFMKYKSYQKVSRLLEDQGIYSRKGSLFSRNLVKQTIDNPTYSVADKNILDYLKKHGAEVFGYEKINGINGVMAYNRRTEKGSFASIDNWIISVGEHPGIIDSDTWIRCQHIANEIKDSNASNRKGTSQQALLSGLVVCKECESSMAPRQNLSSKYAYRYYSCNSRNSNANRCTNDALNAYDAEDFVVNTLKSLTHNDIIKNYEKLKKKNVVKISNKAQISNFTKEIESNKKSISNLVMKIVYLDNDPELLEPFKTEIKKLIDRNNELTSLINELSLANDSIASTYESLDEILTTLDNFQKFYDFTEKFEDRKRLIRSLVKYVVWDSKTRILDIILIGSDKERPRQVVLPLSNSSRRNGSCGDYCYNGISAYGKCNYRGN

SEQ ID NO: 17566 - protein, 556 aa, synthetic construct
MLKKVAIYTRVSTTEQAEEGYSSEEQEKIGTKYCADNGYEVYKIYSDKGISGKSIKARPAMKELLKDAEEKKFDMVITWKINRIARNMLDLLKIVDLLEKNNISFKSYSENFETETPMGKFSLQMMGAVGELERGTIAQNVKMGMMARAREGRWNGNVLLGYNLKGKDGSTNKKRKDTELVINESEAEIIRTIFSMYSEGNGYKSIANKLNTFGYATKRGNPFSVNAIKDILKNPVYIGKIRYNVLQNWSEKRRRHKNPKPLIVDGIHEAIIDQELWDKVQKMMEDSKGKPSRIYDGEFPLTGILKCPICGAGMVIMRSSKARKDGTRHRIEYYCCGAWKNKGTAVCHSNSINVNKANDYVFGKLSELLSNDKLIKDIVANINTTRKAMVAPSKDELEKILKELDKLEAKKKKVFEAYEDDIITKKDFSDRMEEITSREEMLQQEVNNLKSNILDDGAQEVSYEFVREILSSFSKMLSELPSREQQKRLLHMLISKITINKTRDIESIELNINDNLIMYLRNGGEPNPDGTGGGSPSYFVSRRKLMINPVNIKICI

SEQ ID NO: 17567 - protein, 536 aa, synthetic construct
MLRQTNQQPITALYPRLSHEDELQGESNSISNQKRILETYAKQNGFSNLRWYTDDGYSGANFQRPGFQAMLADIEAGKVGTVIVKDMSRLGRNYLQVGMYTEMIFPQKGVRFIAINDGVDSAQGDNDFAPLRNIFNEWLVRDTSKKIRAVKRSKGMSGKPITSKPVYGYLMDEDENFIIDEEAAPVVKQIYNLCLAGNGPTKIARMLTEQQIPTPGTLEYRRTGSTRRYHPGYECKWATNTVVHILENREYTGCLVNFKTEKLSYKVKHSVENPPEKQVIFENHHEPIIDTQTWERVQELRKQRKRPNRYDEVGLFSGILFCADCGSVMYQQRYQTDKRKQDCYICGNYKKRTHDCTAHFIRTDLLTAGVLSNLRKVTSYAAKHEARFMKLLIEQNEDGGKRRNAAKKKELEAAEKRIAELSAIFKRLYEDSVTGRISDERFTELSADYEAEQRELKERAAAIQAELSKAQEATVNAEKFMNVVRRHTSFEELTPTLLREFVEKIVVHECSYDENKTRRQDIEIYYSFVGKVDLPE

SEQ ID NO: 17568 - protein, 585 aa, synthetic construct
MTDNTTTGPQIAVSYLRVSTTRQMDTGADVDAEGNSIATQREANNAKAARMGAIIEKEFVEPGASAQTIDKRPVFKQLLAYLGEHPEVSLVIIYMRSRAFRNLGDAVITKRRLEAMGVKLVSAKEDFGEGIMADAMEAVTDIINEVQVRMSGEDIKVKMRHKAQMGGTNGRAPIGYRNVRLDHAGRQVNGIAVDEERAPLIKQAFELYATGDYSIDRLQETMADLGLKARPQGRGGTKQLSRSHLHRILSDPYYIGIVRYKGETFPGRHQPIISADLFERVQKVIEDRSARGQRDRVLYHYLKGLLYCERCRANGRTSRLVYTEAKGNGGNYAYYLCLARQRGECDLPHLPVPDVEWYVLDHYAKLGLPPKFLDYIREAIDRAMADAQTHVRGLHVTYRKKLDKLAQQEERLLDLAADGDLAPDKIRVRLRKIQAERTRAQQGLDETGEQLELGARKLQQYLDLLDDPQSLYVRAPEDGRRDLNTASFRKLWLDDAGVVTDELTPAISELHEAARAFTRHNSTSEADCATDNQQGPDQGETQKLPGDSREFRLDHRFRLADMFRVGSSKNVLVPSVRFELTLHGF

SEQ ID NO: 17569 - protein, 602 aa, synthetic construct
MSRSIEFEEPAKAVLYLRVSSKKQMDTAVDIDPDGNSIATQREVASRKASSLGADVVREFVEPGVSASTIEKRQAFQEMLAFLRENPDVRYVVVYARSRAFRNYIDAAITKRLLDKLNVKLVSAREDFGDGVYADMMEAVTDIFNDVQNKLSGEDIRIKLQHKAENGGTTGKAPLGYLNARVEHEGRLINTIQLDPKRAPLVRRAFELYSTGEYGLERLEATMADLGLTARAAGDLPERPVTFKWLHRMLQDRYYMGCVVYKGEVYAGRHEPIVDPVLFERVQEVVAFRSKSGQRDRVLQHYLKGILFCDRCERNERTSRLIYTEATNRSGNRYGYFLCRGRQDGVCDLPYLPVDKVEQAIVDHYETLNLPTNFVDDVRQLLDDALTEEQHSVAELHAAVSRKLKELETKEDRLLDLLTDDRLPQAKVREKLRKIQIERTATEARLANSGEVLAVGATALLDALDFMSDPAATYASGTDSIRRNLNETYYQRIFLDEEGVQAGELKPPFDEFHAALAMTKERRTTVTTSTSTTPPTKQGPLAGALDRVSDDRSSSGLALALTDILSDAGSSKTSLVELRGIEPLTFSMRTRRATNCAIAPRR

SEQ ID NO: 17570 - protein, 552 aa, synthetic construct
MAAPKPATLAVADGEAPLRAALYLRVSTGRQAESDLSIPDQRRQATAFCKAKGWSVVTEFVDAGLSGTDDNRPQLQRLLDIATGGGAPFDAVVVHSFSRFARDHFALEYHVRRLRKHNVRLVSITQDLGDDPMSVMVRQVFALFDEYQSKENAKHVLRAMQENARQGFWNGAAAPYGYAIVAAEQRGAKTKKKLAVDPVEAEVVRQIFKLIREGDGASGPMGIKAAANWLNERGYRTRKGARWGIGPLHKLITSTTYKGEHRFNTKAWKTREAKPDAEHVVVPVDPIIDPATFDAIQAQLKTRNPKATPPRVVTGPILLTGIATCATCGGGMTLRTGKSGRYRYYTCASAMQKGKSACKGRSIPMDKLDEIVLDVLGDKLLTERFVEDLLAGLLERQTARDEDHAQRLSALKGKLADAEERLKRLYQAIENGVADPSDPTLKERIGVVKTERDIAHVALTRAAAELSPEARITGEKIAVAVEAMRANVLQGPIPFRRAYLRAMIDNVEVDDTEVRIYGRRTVLERLVMGDGVAPAGVPSFVRKWRARRDSNS

SEQ ID NO: 17571 - protein, 547 aa, synthetic construct
MPRLISYVRMSTSEQLKGFSLERQRNLIADFARKNGLSLEDSHILEDIGRSSFSDDTEQKELTKFFEDLGNDKFQKGDVFALENIDRLTRRGPIDALMKVNQIISKGLKLAIISDKEQRILEEIDVFSIITLSIDASRANKESQVKSDKGLQNWAFKRELAATHKIAMTAQAPAWIDTETYYIMDETKNKQVKRRRYVLNEDRAKTVKLIFELFQNGNGSLKIKNILNEQNIPTFKGIEYWEPSTISKIIRNPATYGMYQPKKQNTGKRDLVAIGEPIENYFPAVISKEIFDQCQQITATNTTRKGRRGKLFTNLFTGLLKCADCDGPIHLLNPGIDKRAKNPKPVNYLICKKGKFTKECITKRLRYEDFENVMLKAIQEINLADVLHENNPLENLIKQQRNLQADIEKKKKLLENFERNFVENDGDLPSFMIAQAKQAEIDIKSLDSEIKSIRLEISQLNVYNSNIDNAIDELKVNGTYEARSKINLILHEIIKHIVIDFELDDYGVMFKNGAKRFINNGIIQNVFRTENTKQRDDEINEILNHKN

SEQ ID NO: 17572 - protein, 517 aa, synthetic construct
MINQDTQKAVIYCRVSSAAQMQKGDGINSQMTRCKEFAKHKGYEVCEIFKDEATKGSVIDRPGMQAMLRYLKKHKNAHMVVLIDDISRLARDISTHIQLRTAISAASGRLESPSIEFGEDSDSLLVENLLASVSQHQRQKNAEQTLNRMKARTMNGYWVFNAPLGYRYCRVSGHAGQVLVRDEPLASIVTEALEGFANGRFETQSEVKRFLDASAHYPKDNSGEVRFQRVTDLLNKVVYSGYIEVPTWNISLRKAQHEPLISFETFQKIQDRLHAKPKVPVRADISDDFPLRGFIICGCCGHPMTACWSKGRNASYPYYMCFKKGCVDYRKSIAKHTIEGEFEQLLLQLAPSENLISMVKVMFKVLWDDRASRRTQNSVAFENEIKKISLNIDKLLNRILESENQTLVSTYEKKLKSLEYEKAALNEKIARCGSALPDYDKTFRTAFDFLQNPYKLWDSKDLIHKRTVLKLVFAERLPYIRNEGFRTAQLSLPFKFLKDIEGCKMQVAEKAGFTYKY

SEQ ID NO: 17573 - protein, 570 aa, synthetic construct
MTIAAVYTRVSSKAQMKKGDGLASQQSRCREFAAYKGYSVEKVYEDKGVSGGLVDRPAIKEMLVWLRKNRKHEPVVIIDDISRLARDLDAHLKLRAAIGSVGARLESPSIEFGDDSDSLLIENMLASVSQHHRQKNAETTRNRMRARLQAGYYPFFVPRGYKYVKGDSGGKVLIRDEPAASTLQEALEGFASGRFDSQADVARFLVPHGIYKLDANGTLHPQRIKNMLTNKIYAGYYEYKPWGIPLSKGKFDPIISWETFQRIQTRLNGTSTAPQKKVANEDFPLRGYVACDSCGHPMTAYWAKGRNKRYPYYECFQKGCDARRKSIRRADVEGAFETLLQSLRPPRSLFAVASAMFKDLWDARIGDFEIRRKEQQTSLRKIETDIRKAADLLIDTESAATARALEAKIEKLETQSALISENLAKTKPKQKDFDTSFRTALDFLANPWKLWQTGRDDDRQTVLKLVFEAPIPYHREKGFRTAKTTLPFKALDDLDDDSEKVAERQGFEPWVGLHPQRFSRPPRSTTPAPLRGGLGEGAFRPQSGPLQPEIYTIRSSRRCPLGNPAHGAYR

SEQ ID NO: 17574 - protein, 526 aa, synthetic construct
MTLRALVVIRLSRVTDETTSPERQREACEQLCRERGFEIVDVATDLDVSGSVDPFTRPVLGRWLAERHDKFDCLVAWRVDRLTRSIRHLRRLVDWAEDHGKLIVSATEPHFDMASPFAAVLIALLGTVAEMELAAISERNRSAARHNIKAGKYRGGLPPWGYVPDKSSGEWRLIKDDEQVVVIEEVVKRVLRREPLRSIAHDLTERGVPTPKDSFAKRQGREAKGLGWSSGRLKQSLTSEALLGYAMSGGQPVRAEDGSPIIRAEPILTRDKFDRLRKELESRENRKEPYARTTALLLRVIYCGCGKQMYSLKGGKGRQYRYRCASAQYKTNCGGPSCLAPEADQLVETSILQLLGDSERLEKEWDAGDDHSAELADVDAELADLAGQLGTAAFRPGTPQRLRLNDRIERLSQRQAELSRDVSRPAGWVWRPTGERFGDWWASQDVVGRNVWLRDAGVRLIFDGRYNLDLGDVETMTKQLQPAGAIAEYQRMFAAMTESGIAGTEINGDDVVIHYRDGTTERVTLA

SEQ ID NO: 17575 - protein, 542 aa, synthetic construct
MQQLKQKRVGIYVRVSTEMQSSEGYSIDGQINQIKEYCNFHHFEVKDIYADRGISGKSMNRPELQRMLKDANEGLIDCVMVYKTNRLARNTSDLLKIVEDLHRQNVEFFSLSERMEVNTSSGKLMLQILASFSEFERNNIVENVFMGQTRRAQEGYYQGNLPLGYEKIPDSKHELMINQHEANIVKYIFEAYAKGHGYRKIANALNHKGYVTKKGKPFSVGSITYILSNPFYIGQIQFAKYKDWNEKRRKGLNDKPVIAQGKHSPIISQDLWEKVQMRKKQIKEKPQVHGKGTNLLTGIIRCPQCGAAMAASNTTNTLKDGTKKRIRYYSCSNFRNKGSRVCSANSVRAEVIEKYVMDQILEIVKSDKVIKKVVERVNQENQVDVTALNHDIAYKQQQFDEINTKLKNLVQTIEDNPDLTSALKPTIHQYETQLNDITNQMNQLKQQQNQEKPSYDTKQIALLLQRIFQNIESMDKSQLKALYLSVIDRIDIRKDTHHKKQFYVTLKLNNEIIKQLFNNKQLDEVHLSTSFLFLPQTLYFQI

SEQ ID NO: 17576 - protein, 479 aa, synthetic construct
MKAAIYLRVSTEEQAKEGFSIRAQRERLDMFARSQDWDVVDFYIDEGRSAKDTERPELQRMLDDIAHNRIEVVLVYKLDRLTRSVMDLYQLLAQFDKYGCMFKSATEVFDTTTPTGRLFITLVAAVAQWERENLADRVKFGMEQMVEEGRWPGGPAPFGYSLDDHSKLQIDPEESALYRYIYDLYENFKGDNAISVILNHELKMKTRLGNSFSSKTVRDIIKNPISYGALQWGGRIYEDFCEGIITRERYERIMALRAARSTIPAKAVSSTYIFTGTIKCARCGAPLKGRMNKTAKNRTYAYLVCTNQREKKCDLPMVSELNVEKHFLNELQFLLASHYDAANEIAATADKEEQHFHQQVQQIKKQLQSIKERKKKWQMAYADDVISLEELREHTFQDRSRQEELENELTNLGEQEASHSPAQIVDILSNFLDNWDQLTPMEKKQAVLLLLEKFDVNTENGKRVLHAKRELALSNFKFR

SEQ ID NO: 17577 - protein, 445 aa, synthetic construct
MAAYCRVSTDQLEQLSSYEAQVAYYTNYIDNHPDYELAGIYADEGISGTNTKKREQFNRMIGDCKAGKIDMIITKSISRFARNTLDTLNYVRTLKELGIGVLFEKENINTLDSKGEVLLTILSSLAQDESRSISENSTWGIRRKFEQGKVIVNHKKFLGYDKDEDGNLVINEKQAKIVKRIYKDFLNGKGANRIAKELEEERIQNWNGTTKWYVSSIRKMLTNEKYKGDAILQKTYTVDFLTKKRVENKGEVPMYYVEESHPAIIDKEMWEAVQLEMERRKNYVERYGLTKIDYSCKENPFSGKVICGCCGSIFGRKVWNSTDERLRRYIWRCNRKYEIKGKKICENKHIDDKVLYEVFINTFNMMLENKDYFIKKWEEHLDSDDLLKKYKAKQFIKVIEKVESIEKFNTDLFNIFIEKMVVFDGGKIMLSLIDGMEIECDIKIR

SEQ ID NO: 17578 - protein, 428 aa, synthetic construct
MRVRIIEPTKKVENKKLKVCAYARVSTDNTKQGESLENQITYYERIITSNPKYEFVGIFADKGITGTTEKRPEFKRMLDLCREKKIDVIITKSISRFARNTVVMLQLVRELKDLGIEVRFEKENINTLSEDGEFMLTVLSSFAEEESRNVSENLRWSAKKKFQNGELIINTNRFLGYDKDKKGNLIINEAEAKVIQRIFTEYLSGKGVFTIAKGLNAEGIPTVSGARWYENTVLYILKNEKYKGDALLQKYYVPKHKKKKTYLNKGQLESYYIEDNHPAIVSKEIWGKVQEEIERRANEKSIERDTKKYLKRYPLTGMLYCSKCGATLQRRTWNSNLPSKKIVWQCRNYIKNGKNACDGTVIKDEEVNRLKIKEETIVEEVIKNGKKSYRYTSKNNQSKYSRETRTIEKENGSLLQGINRPTRTIIKL

SEQ ID NO: 17579 - protein, 442 aa, synthetic construct
MAAYCRVSTDQLEQLSSYEAQVAYYTNYIDNHSDYELAGIYADEGISGTNTKKREQFNRMIGDCKAGKIDMIITKSISRFARNTLDTLNYVRKLKELGIGVLFEKENINTLDSKGEVLLTILSSLAQDESRSISENSTWGIRRKFEQGKVILNHKKFLGYDKDEEGNLVINEKQAKIVRRIYKDFLNGKGANRIAKELEEEGVPNWNGTTKWYVSSIRKMLTNEKYKGDAILQKTYTVDFLTKKRVENKGEVPMYYVEESHPAIIDKEMWEAVQLEMKRRKNYVERYGLTKIDYSCKENPFAGKVICGCCGSVFGRKVWNSTDERLRRYIWRCNRKYEVKGKKICDNKHIDDKVLYEAFINTFNMMLENKDYFKQKWKEYLECDDLLKKYKGKQFIKVLEKARPLENFDLALFEKMVEKIIVFENKTIKFSMFDGIDVECKI

SEQ ID NO: 17580 - protein, 428 aa, synthetic construct
MRVRIIEPTKKVENKKLRVCAYARVSTDNTKQGESLENQITYYERLITSNPEYVFVGIFADKGITGTTENRPEFKRMLDLCRENKIDVIITKSISRFARNTVVMLQLVRELKDLGIEVRFEKENINTLSEDGEFMLTVLSSFAEEESRNVSENLRWSAKKKFQKGELIINTNRFLGYDKDEKGNLVINEAEAKVIQRIFTEYLSGKGVFTIAKGLNAEGIPTVSGARWYENTVLYILKNEKYKGDALLQKYYVPEHKKKKTYLNKGRLESYYIEDNHPAIVSKEMWHKVQEELERRANEKSIERDTKKYLKRYPLTGMLYCSKCGATLQRRTWNSNLPSKKIVWQCSNYIKNGKNACRGTKIDDEFVSRLKIKEETIVEEVIKNGKKSYRYTSKNNQSKYSREIRTNEKENGSLLQGINRPTRTIIKL

SEQ ID NO: 17581 - protein, 534 aa, synthetic construct
MSNFNMTPNQPPAKCYSYVRFSTVSQGKEGKDSYIRQTLAAKEYAERMGLEYQDKSFSDLGISGFRSSKKRDGLSSMLEAIQSGAIEPTSTICIDGFDRLSRASFEHTYDTVRLIVGTGVKLHVVQDDMTLDKSSLNDLISIVRLALQSDLAHQESAKKSYLIKQSRLRAREAHRVTGKLPAWIKRDDSTPTGFAFNEMVDCIKELVRLRVEGKSLQSIAKNLNAMGYTTTTGAPWSSAGCRSIIESRALHGSKSYHETDPETGRMLLEPVDIVAGIFPALIDFDVWKSIQQKSKSAPTKVTKVSKKGAYSGLLRCGCCSAGMVMRTTTYTPKGSGVPEVRMYRKCIRATEGSCTQTEQVREPETYIDLALSNLKYVTSEKRHVSRVPEIREQIATLEKTEDILLQRGMAEKLADVYIKIDDMKTKLVEAQEEDSKHKVPTETSFAKVIEIKDLEHRNMVLRGLLRGVYFTLLWKYKTQSKWKVTIEQINGLKTTFILSQKHGFGNSHIELLSDPLRWTNLVQSDLQPWELDRD

SEQ ID NO: 17582 - protein, 522 aa, synthetic construct
MTDSPARAIVGARVSIFTDGKESQITQRTKGTAYAESQGWTVVGAFEDLDVSAIKKSPWDRPDLKQWLTDRADDWDALVFAKTDRVFRSAADCVKLSEWCRDHNKILVLVDDGIKLDYYHPDSEQDAFAGAMSKVFLILASVFAEIEGQRFVQRALDRVTQYRHQPRWAYGVPPYGFQVVDRPEGGKTLGHDLEAQQVLKGIATRLLSGDSLTRIAAELNETGVLSPADRLRQRAGKELRGSSWTVITVQTILTNPATQGIKTAKGKPVLDAGGEPVRVGPPSFDPETWGRIRSELAQRSQSGQQRRHSDNPLLGVAKCGVCGKNMRHFQRTKGGRHYRYYICGSTPKACPGVLINADTAELAVEASFLDVHTNRRIKERVWRAGSDHSSELDQTTNTIKALWEDRALGLFTTPEDQDMFRSQMAALVAKRDALALTPVIKAGWVDVETEQTYGAAWPDATPVERRKMLTDAGMKLTVYRANKYETYTDLDKALGDGSVGEDLHNEIEARAAEQRQRWGIPG

SEQ ID NO: 17583 - protein, 532 aa, synthetic construct
MENRLNKEIADAPKVALYTRVSTDEQETSIHNQHDSYTRLIEEKGWEIYKVYTDEGISGTKSVKRLAFQQLLEDGKNGKYNILLAKSLSRFARNQREALQAIADLRAVGIRVIFREDGLDSAVDTMRFGLFAWLAEQESQTTSKRIKETWRGMEKRGQMYIPNMPYGYQYVKGKKGIKIVAEQAKVVNRVFELYLSGMGFRNISNLLKEEGVLTQGGTNGWHASMIGRMLQNRAYIGYLVQHQTETIDVTMNKRRKIPRSDWAVHKGVFPPIIRDSVFQRVQEEVAKRQTAIKANGRPTRHSSKSLFSNLVVCADCGASFTVKRKKSKREYEPYYICLNYEQFGKAKCGHGRVAVYEGDLVQILRQEIGVLIETNFKAIMDAIKARSIDSHAMTPKEELKAIQAKIDSLLRLSNTLLTSYSEGIVGATQYKLQNEQIEGQLQALLKHKEQLDMAVVTNRSQENKEQLLIRSIKELARFNREEWTNQMLKEVVERIEISDDRTIKVYLRYQKPQKPQNTQYLNTQYHNVTESS

SEQ ID NO: 17584 - protein, 400 aa, synthetic construct
MTSRSFRVIPPRPATPRRLRVAGYARVSTEHERQLSSIAAQVSYYSHLIQSTPGWDYAGVFIDEGITGTSTVRREGFQTMMAAARSGDIDMILTKSISRLTRNTVDLLDAVRELKILGVSVRFEREQIDTATADGELLLTLLASFAQEESRSMSKNVKWGIRKKYADGLMHSRQPYGYQYVGSDLAIIETEAKIISQLNAEGVKPRRGAKFRGKTIRKWLENEIYTGRVILQKYYRPNVAELNCHTNTGELPRYLVDESHPPIIDQTTFGAVQAELARRRHLGRGATPSARTTGLTSRIECSVCSRFYHRRTKTRRHTSYKFWWCETATKGKGNPCQAPQIRETHLTQICTRVLGLDDWDDEYALTRLVKIVVNPDRTLTIHTISGEVPVAVSLDEESAI

SEQ ID NO: 17585 - protein, 553 aa, synthetic construct
MYQQLHDNRITALYCRLSRDDGFYEDSCSIVSQKSLLEKYAGDQGFGNCQFFVDDGYTGTNYDRPDFQRLIRLVESGDVGIIIVKDLSRLGREYLQTGYYTEVAFPSHDVRFIAINDGIDSANGENEFAPFKNIINEWYARDISRKIKTIRRISAEHGEYVNGRPPYGYIKDPEQHNHLMPDPNNAPVVKRIFDMCVSGKGCTEIARTLKTEEIPRPSSYHLDKDGINKSDPDDEERFEWCQRSVRDILMNPVYIGHLFSLRETKRSFKDKRPVKIPEEQWVKCYNNHEAIVTEEVFRIAQSRVAVRKPRNPASSRNIYRGLIFCADCGSRMHFIIRRPPHKGIGYYVCGFAKRKGVGCGCSQHYITIEQIEELLLKDINRILTWITEDKDGFEKYVESLSAAEKEKTRNDSRAELDEAIKRIYELNIIIKRLYEDRALGVISTDRYKILVSDYEAESTALDEKVRNLKENIVKNSSKRKDTESFINLISSCGEITEMDADIAHNLIDKILVHEKESEGNRVIMRVEVHYRFIGCIDKALMIPKTKGRIKRAV

SEQ ID NO: 17586 - protein, 338 aa, synthetic construct
MRSVITYLRYSSAIQGAEGADSTRRQNDLFKQWLKKNSDAQVVASFSDEGLSGYKGKHLTGQFGDMLARIESGEFPEGTILLVESIDRIGRLEHLETEALMNRILGNGLEIHTLQDGLIYTKDALADDLGISIIQRVKAYIAHQESKQKSFRVSQKWEQRAKLALAGEQRLTKMVPGWIDPDTFKLNEHAETVRLIFKLLLSGESLHNIARHLQANNISSFSRRKDANGFSVHSVRTILRSETTIGTLPASQRNDRPAIPNYYEPAIDASTFNKAQEILDKNRKGRTPASDNPLTINIFKDYSGVSVGLVSILPEPRISMRGSTGAIAILTVAVVFHR

SEQ ID NO: 17587 - protein, 506 aa, synthetic construct
MRHAITYLRFSSAIQGAEGADSTRRQNDLFKQWLKKNSDAQVVASFSDEGLSGYKGKHLTGQFGDMLARIEAGEFPGGTILLVESIDRIGRLEHLETEALMNRIIAHGIEIHTLQDGLIYTRDALSDDLGISIIQRVKSYLAHQESKQKSFRVSEKWKQRAKLALAGEQRLTKMVPGWIDPDTFKLNEHAETVRLIFKLLLSGESLHNIARHLQSNGIKSFSRRKDANGFSVHSVRTVLRSESVIGTLPASQRNDRPAIPNYYEAAIDAATFNKAQEILDKNRKGRTPASDNPLTINIFKGLFRCQCGASVHPTGTKNKYAGVYRCNNHLDGRCDVPPLKRKPFDRWMIDNFLGMIDVGNDGESERKIAALQHEVEIVTARIKKATALLLEMDDIDELKIQLKELNQRRTELQTTIDSMRRKTSLTDKELPQLKDIDLTTKAGRVECQLILSKHLKGLTLGKGSVTITLQNDTEITIPTNPLPLNDGSPIFEIADKELLDIDAYQL

SEQ ID NO: 17588 - protein, 452 aa, synthetic construct
MKAAIYIRVSTQEQIENYSIQAQTEKLTALCRSKDWDVYDIFIDGGYSGSNMNRPALNEMLSKLHEIDAVVVYRLDRLSRSQRDTITLIEEYFLKNNVEFVSLSETLDTSSPFGRAMIGILSVFAQLERETIRDRMVMGKIKRIEAGLPLTTAKGRTFGYDVKDTKLYINEEEAKQLRLIYDIFEEEQSITFLQKRLKKLGFKVRTYNRYNNWLTNDLYCGYVSYKDKVHVKGIHEPIISEEQFYRVQEIFSRMGKNPNMNRDSASLLNNLVVCGKCGLGFVHRRKDTVSRGKKYHYRYYSCKTYKHTHELEKCGNKIWRADKLEELIIDRVNNYSFASRNVDKEDELDSLNEKLKIEHTKKKRLFDLYISGSYEVSELDSMMSDIDAQINYYEAQIEANEELKKNKKIQENLADLATVDFNSLEFREKQLYLKSLINKIYIDDEQVTIEWL

SEQ ID NO: 17589 - protein, 402 aa, synthetic construct
MKQIKTIQAQKVTAIKRLKVAAYTRVSHTSLLQSLSNQVSHYSQLIQANPEWDYVGVYSDSAISGRSQAYRRDFQQLLEDCRKGKIDLILTKSISRFGRNTVELLETVRELKRLGISVRFEKEKIDTLTAEGELLLTLLASMAQEESQSISQNIRWRVKKRFEEGKPYIPQDIFGYRWNGDEYVIEPHEASIVRQVFEWYMEGLSAPKIAKRLDDRGERTRLGNRFTKRVIYNMFDQEAYCGRLILQKTFRDQFGSRSILNDGQMAKYIVENAHEAIVTPEYFQLVNQEKKRRARRRVSKHDALAKLQGKVYCEHCGLDMVLTLETKFNQEKRMRYYCRTRDAKGVETCLGRTVTEEQLFQAFGESINTEDIHHISFNSVTNEAKAIYRNGEEKHVIIQKGR

SEQ ID NO: 17590 - protein, 508 aa, synthetic construct
MKKAIAYMRFSSPGQMSGDSLNRQRRLIAEWLKVNSDYYLDTITYEDLGLSAFKGKHAQSGAFSEFLDAIEHGYILPGTTLLVESLDRLSREKVGEAIERLKLILNHGIDVITLCDNTVYNIDSLNEPYSLIKAILIAQRANEESEIKSSRVKLSWKKKRQDALESGTIMTASCPRWLSLDDKRTAFVPDPDRVKTIELIFKLRMERRSLNAIAKYLNDHAVKNFSGKESAWGPSVIEKLLANKALIGICVPSYRARGKGISEIAGYYPRVISDDLFYAVQEIRLAPFGISNSSKNPMLINLLRTVMKCEACGNTMIVHAVSGSLHGYYVCPMRRLHRCDRPSIKRDLVDYNIINELLFNCSKIQPVENKKDANESLELKIIELQMKINNLIVALSVAPEVTAIAEKIRLLDKELRRASVSLKTLKSKGVNSFSDFYAIDLTSKNGRELCRTLAYKTFEKIIINTDNKTCDIYFMNGIVFKHYPLMKVISAQQAISALKYMVDGEIYF

SEQ ID NO: 17591 - protein, 559 aa, synthetic construct
MSKEKIKVYLYIRVSTSIQIEGYSLEAQKSRMKAFAIYNDYEIVGEYEDAGKSGKSIEGRIQFNRMMEDIKSGKDGVSFVLVFKLSRFARNAADVLSTLQIMQDYGVNLICVEDGIDSSKDAGKLMISVLSAVAEIERENIRIQTMEGCIQKAREGKWNGGFAPYGYKLEDGKLFINEEEAVAIRTIFDQYVNTTIGANGISKYLENHGIRKIPRQNGKNPLFDAGLIRKILKNPVYNGKIAFGRRTLEKVHGTRNEYKQVEQDEYLISEGIHEAIVSDEVWQAAQVKLKSQAKKYEHVNKGKDTRTHLLSGIVKCPICGVGMFGNKCIKKKKDGTKYKDFYYYGCKHRQMIRGHKCTFSKQIREELLDDAVAEVIVKIVSNPKFASMMQEKINMKVDTSEIEKEIDNYQKELRKSHSTKFKLIEEIDNLDVEDKHYKRRKQDLDDRLYRMYDKIDELESSLIDAKAKKQTIEAEKLTGDNIYKVLIYFDKLYKVMNDVERRQLISALISEIQVYEEKQSNGQWLKSITFKLPIIEENLNIDLDNDEQVECVSLLEKRS

SEQ ID NO: 17592 - protein, 516 aa, synthetic construct
MAGKKVTVIPMKPRQWAAENTEEKPKLKVAAYCRVSTEMEEQASSYEAQVQHYTDYIQRNPDWELAGIFADEGISGTGTKKRDGFNRMIEACQKGDVEYIITKSISRFARNTVDCLQYIRQLKDLHIAVFFEKENINTMDAKGEVLLTIMASLAQQESQSLSQNTKMGVQYRFQQGQLRINHNHFLGYTKDEDGNLVIEPKEAEVIKRIFREYLEGSSLQEIANGLMSDGILTGGKRKLWRGEGVRLILRNEKYMGDALLQKTYTTDFLTKKRVKNDGSYAQQYYVENSHPAIIPRDIFMQVQQELDRRKSMKNKHSQCFSGKYALSGITVCGDCGNAYRRVHWKNRGTVWRCKSRVDKREHNCSGRTIYEKDLHEAIIKAINETVVDREDFLQQLSENINSVLTDGLTGRLEELDRKLKELESEIISMAIGGQGYDELASQIFSLRDERDAVAKQIAANTNLQQRVDEMVVFVKEHDVINEYSEVLVRRLIEKVTIFEKNIVVDFKSGVRVTVEI

SEQ ID NO: 17593 - protein, 516 aa, synthetic construct
MKTIHKLERPKLPETPKLKVAAYARVSTASDEQLSSLKTQITHYENYIQKNDQWEYVGVYYDEGISGTKTDKRDGLHRLINDAEHGKIDLILTKSISRFSRNTVDCLNLVRKLTEIGVTMIFEKENINTSDMESELLLSILSSLAESESYSHSENMKWANRKRMAKGNYKGVPPYGYCRKGIDFHLVPDEAKVVEQIFQWTLNGLSMHQIASKMNVANITTKRGVKWQASGVSIILHNIVYTGTMIFQRYFNDEQFKKRKNNGELPMYRIDNNHPAIVSMEEYERVQEIIRIRATSKGNTKDGKNTNRYAFSKKVLCDKCGNTYKRIQTYWKGNTRKVQWGCKGHLKDKNSCDALPITDEKLKIAYLTMLNKLIFVHKVVLEPLLKQQSNAAELERALDEMSNKASEIDEKLEVLASLNASGIVSTKTSFEEQNKLQLELKNLQEEQQKIINSANGKSTQRIELEELYRFTKRSNMLTEWEELLFSRFADQVIVYNRQEVGFKLKCGLILKERLPE

SEQ ID NO: 17594 - protein, 536 aa, synthetic construct
MIKAVIYARVSTAEQAEEGYSIDAQLDIVKQKCDQEGREVIDQYIDRGISGKAMKNRPDLQRLLRDAKENKFQEIWVWKTNRLARNHLDLLKIVDELDKNNVGFKSCSEAFDTATPAGKLLMNVLASIGEFERESIVENVKMGMKQRAREGKWNGGIVLGYNSVRINEIENKTRLEIEEKEAFIVKEIFNLYVKGRGLKAITNLVNKLGYRTKKENFFTPIAIRTILLNPIYIGKIRYNLRENWSEKRRKGINKNPIYVAGNHEPIISLDLWNKVQELYRRKSQRPKRVFDGIFPLTGLVKCPMCGAPMVAGRVKKQLKDGSIKIIRYYHCGVWRNKGTAACRSNGIRADKIEKLVFERINKVVMNGKILKDTVSKLNLNTKNKIKPLEEELNMTNKNIRNLENRKNKVFDLYEEGIIAKEVLTSRIGHILNEMDTNFTNKNRIEKELQQNTSNPIPMDKVKNLFIKFHHLIGAAEPSKQKLILQLIITKITINNNRELDSIVLHMNEQIEKYIIGTEEDGTSQQVPSSFAFTIII

SEQ ID NO: 17595 - protein, 507 aa, synthetic construct
MKRAISYIRFSSEKQSRGDSLRRQAKMVTDWLKAHPEYYLDESLTFRDLGVSGFTGKHLKGGLGDFLTAIEKGLVKAGDTLLIESLDRLSRQDIDIASELLRRILRAGVDVVTLSDGEHYTKESLKDPLSLIKSILIMQRAHEESLRKAERIQAAWDAKKEAAKAGIKISRRCPAWLKLNDDRKSFSVIPEKVETVKRCFQLRLEGKSIWAIVKALNDEGHQTLNQYKAGKFGQTSVQDLLKNRSVIGYFTPKGCEEIAGYYPAIIDETTFYKVQQLSHSRYGKRSVSDKPLSVNLFKGVIRCSECGHALIITGFSDTRNGIYRCPLRNENRCSAKGLSRKQTDGTLLALLSRLDRFDSDTTNTIDTLKLHREHISNNIEKLVQLSLEIEDLSAITSKLKQLKGELSQVDADIEKETQRLKSIDVGCLSDCDLTTKAGRIEAQLIIKSAVKEVVLNTAKRRCKVTFHNGKVIDLPITENPSEDVTEAIQSLSEVTERGLIDVDEVII

SEQ ID NO: 17596 - protein, 553 aa, synthetic construct
MNQQPEQITALYCRLSRDDELQGDSNSIVNQKSILSKYAEEHRLLNTRFFIDDGVSGTTFDRPGLNEMLALIDEEKVSTVIVKDMSRLGRDYLKVGLLTEIQLPEKGVRFIAINDGVDSNQGVSEFIAFRNVINEWYAKDTSKKIKAVFTAKGQSGKPLSTFPPYGYIKDPEDKNRWIVDGAAAEVVREIFRLCMEGNGPTKIARILSERRALIPSAYAKSNGRSAPADVPADRCKWCDSTVAHILERKEYLGHTVNFKTYKESFRNKKQRKNPKENQMVFENTHQPIIEQDVWDTVQQLRQNKRRPSKTGKTNMFSGIAHCADCGSKLYYCTTRYFETRQDHFRCSASQKAVDPCTSHFIRAVVLEEMVLAHMRYVIGFVQRYEDSFRVSIEAERSTEIQKELSAKRKQIAQSQKRVDDLDVLFRIVYEDNASGKLTDERFMQLSRGYDLEQKTLRQMITMLEKEIDQQEQKTTQVEDFIAKCKRYSSLETLTPAILNDLVIKVFVEAPDKSTGKRRQGIHISYNLVGILPPLERFQPVVVERPNKEKAETA

SEQ ID NO: 17597 - protein, 523 aa, synthetic construct
MRQVITYLRFSSKPQERGDSIRRQKGLFERWLKDNPDAKVVDEFSDEGASAYHGHHLKGDFGRMLQNIQDGKYLSGQTVLLVESETRLNRQKARNTENLVDLITGKGVDVICLESGKIYTSTNIDDLDTSIQLKIAAHIAHQQSKEKSIKVSAAWEHRAQLALEGKQQLTKNVPGWIDPDTRKLNEHSSTVVTIFDLLLSGESLHNIARYLQANNIKSFSRREKANGFSVHSVRTILRSESTVGTLAASKRNDRPAIPNYYEPAIDVATFNKAQEILSKNRVGRAPASDNPITINLFKGIIRCQCGASVHPTGVKATYQGVYRCNNVPDGRCNVPTIKRKPFDKWMLDNIVGFLERDDGNNTDKRKAEIEYQISLVTSKLKKATTLLLELDDVTELKEQVKELNIQRSNLQSELDELTQRETLSDKPLHHLSEIDLTTKAGRVEAQLILSKFVQSIELQREMIIITLRNGTVIGKSRDLSPVLSQDLMKQVVSSPSPTDIDMFSVITSDEEFRKSGKQVTKRS

SEQ ID NO: 17598 - protein, 589 aa, synthetic construct
MSAHVTILRNTVLPVKFNTMNRPRLYSYIRYSSERQGKGSSIERQKSYIAEMAKQIATEYDLEIFEEYQDLGVSAYKGKNVQEGALSDFIDQVESGLIPKGSFLLIESLDRFSRQNAMQAVNLFTSLLLNGITVITGIDKQVYRQTEVNTETLQQLMFSVMLFSRANEESSTKSHRTIASALSKIRRHQERKPGDPVVAIKELGSDKWWTDSSTGYVNPHPVLFPIAKKIIQLKQDGWSNRMILQHLKNNYDGPVIGNKKSKGIWNMQHCSRILEPAIYGRKVITVNNAEYVLDDYYPAIISKDEYEALKLQVGNKGFAPNRESNPEIPLLSGIGILHCAHCSCYMVKAKSTLKNHPHAYRYQCASRDLHQDCNKWGFRASTLERTILQLIADRIFLQTKYQPSGLEGKIADIQSQIENYVLAIGSAKSPEIINSLTSQIDQLEQEKQSLIVEKRLYDESIVQMNTEGWDKFRKFDIDDALNPLRTKIRANIKTVIMRVDCSRIDKKNNLFTITYRDQHKQRIVIENNSGWKKGKIYVEAQTINDIQILESEGLILHDHIDILINRDKFMTEAKKRLDHPRTLIDELTE

SEQ ID NO: 17599 - protein, 604 aa, synthetic construct
MKKVFVYHRVSSDQQLDGSGIARQAELLEGYLERTGICAEMDDPAPVVLSDQGVSAFKGLNISEGELGAWMEQVRNGMWDSSILVVESIDRFSRQNPFDVMGYINALMAHNVAIHDVMANIVISRSNSKDLPFVMMNAQRAYDESKYKSDRIRKGWAKKREHAFNKGTIVTNKRPQWIEVENDKYVLNHKAAVVKEIFALYQTGMGCPTIAKQLQTKEGEQYKFNRPWTGELVHKILTNRRVTGKIFISEIIRNHDDIENPVTQKKYDMDVYPVVINEEEFELVQELLKSRRPNAGRVTVKKDGQEEVLIKSNLFSGIARCTECGGPMYHNVVRAKRTPKKGDPKIEEYRYIRCLNERDGLCKNKSMTYETVEHFVVEHLLGMDLSTVIKEHEFNPEIEVLRIQIDQVKDQITNYENGIERRKSAGKPISFDMREELDDAKSALERLLARQASLATVQVDVPVLQDVNVTELYDVNNVDIRTRYENELNKIVSNIRLKRNGTSYTIDINYKQNELKRHVLFVENKKKEQTLISEVIIEDVDGAKFYYTPSFMIMLKDGEIRFQQTNEDLSIIDYSLLLNYIDAVDRSDAVGVWMRNQFNFLTFN

SEQ ID NO: 17600 - protein, 528 aa, synthetic construct
MKVPVWCYARISTLKQIDGFGIQRQINTINQFLQCVELDHRLPFTLDVDNVTQMVAEGKSAFRDKNWNEKTKLGQYRKLVMDGVISDSVLIVENIDRLTRLDPYMAIEIISGLVNRGTTILEIETGMTYSRYIPESITVLVMQCNRANGESKRKSIMMQKSHANRYGKVSKVRPRWFDVVEIDGIKQYRPNETAKAIQRMYNDYINGIGAAHIVRTYGNTDNGKAWTLVTVLRALSDKRVADDARYPPIIDKKLYDSVQALKAATNKKGNTHQKNMLNIFSGMSRCPVCNQSIIVKRNSHGNLFTVCLGKRTNKTCEARSISYFALERPLLTAIRGLDFSEVYKHEDKNVLTLRDQWIQNERDIAAFRERLSKASRYEKFVILDELETMNREQEELTIRLKSVDVPKDIQLTFDDDKLDLDTNYRIELNNRIKKLIQHINIVREDVTKSSYTIYCTIKYWTDVISHLVIIDVNIKRTGTGGTNTLTTTLRSVSSLNMDGTVSGNPDSDAWEYWKGFLDGTIGLVDYKK

SEQ ID NO: 17601 - protein, 505 aa, synthetic construct
MTQAFSYVRFSTKHQTMGTSLERQVNASKLFCTQNKLTLSHHSYHDLGISGFKNVKRPELEQMLEAIQNGDIPSGSYILIEAIDRLSRKGISHTQDILKKILQYDVKVAFVGEDAKTLQGHILNKDSLNDLSSVILVALAADLAHKESLRKSKLVKASKAIAREKAADGEILPGKSVFYLDYDRKNKKYIFNNRVDLARKIIQMRLEGKGPRKIARLLNEENIPGPTGKEWYQMSVKRLLKSPVLYGAYQTHQIIEQKYIPVSLIENYYPALIDYHTFSQIQFDEKRISKGRPSRHKFSGVLYCECGSVLCRKVNVYETKKGPKEYQYFNCFGAMEKRCKNNRAIRDLHIPLEKTIDRLEIKTNSVKNIKNEQIIAKREKIDQLNQMLLELDMPPVSVLKTISKLEKELQELLEQPEIQAPKSADVNTLVAIKDTEKYNLHLKRLVKRITIYQLNGPKNIRIKIEKTDGHYQSFIVNNGKIMFNSDTKALQGHLLKLKEGTENGV

SEQ ID NO: 17602 - protein, 523 aa, synthetic construct
MRQVITYLRFSSKPQERGDSIRRQKGLFERWLKDNPDAKVVDEFSDEGASAYHGHHLKGDFGRMLQKIQDGKYLSGQTVLLVESETRLNRQKARNTENLVDLITGKGVDVICLESGKIYTSTNIDDLDTSIQLKIAAHIAHQQSKEKSIKVSAAWEHRAQLALEGKQQLTKNVPGWIDPDTRKLNEHSSTVVTIFDLLLSGESLHNIARYLQANNIKSFSRREKANGFSVHSVRTILRSESTVGTLAASKRNDRPAIPNYYEPAIDIATFNKAQEILSKNRVGRAPASDNPITINLFKGIIRCQCGASVHPTGVKATYQGVYRCNNVPDGRCNVATIKRKPFDKWMLDNIVGFLERSDGNNTDKRKAEIEYQISLVTSKLKKATTLLLELDDVTELKEQVKELNIQRSNMQSELDELNQRETLSDKPLHHLSEIDLTTKAGRVEAQLILSKFVQSIELQREMIIITLRNGTVIGKSRDLSPVLSQDLMKQVVSSPSPTDIDMFSVITSDEEFRKSGKQVTKRS

SEQ ID NO: 17603 - protein, 480 aa, synthetic construct
MQTINKVAIYVRVSTTNQAEEGYSIDEQKDKLKSYCSIKDWNVYKVYTDGGFSGSNTERPALEKLIKDAKNKKFDTVLVYKLDRLSRSQKDTLYLIEEIFIKNGIEFLSLQENFDTSTPFGKAMIGLLAVFAQLEREQIKERMQLGKLGRAKSGKSMMWARTSYGYDYHRDTGAMTINELEAIAIRDIFESYLNGMSITKIRDMLNDKYPKTPNWHYRIVRGILANPVYCGYNQYKGHVFPGNHEPIITEEAFNKTQEELKIRQQTALEKFNPRPFRAKYMLSGIAQCGYCGAPLSITLGTIRKDGTRNIRYQCKNRFPRATKGVTVYNGNKKCDSGFYEKSDIEQYVIEQICKLQHDKKYVEELFADNGPSVDRVACQKQIDLLTNKISRLNDLYIDDRITLEELQTKSSEFSSQRSILEEELENDPALKRKKREAEMKKILKTDDILGMDYERQKTIVRSLINKVRVTVDKIVIKWKI

SEQ ID NO: 17604 - protein, 559 aa, synthetic construct
MKGKIALYSRVSTSEQSEHGYSIHEQEQVLIKEVVKNFPGYDYETYTDSGISGKNIEGRPAMKRLLQDVKDNKIEMVLSWKLNRISRSMRDVFNIIHEFKEHDVGYKSISENIDTSNASGEVLVTMFGLIGSIERQTLISNVKLSMNAKARSGEAITGRVLGYKLSLNPLTQKNDLVIDENEAHIVREIFDLYLNHNKGLKAITTILNQKGYRTINQKPFSVFGVKYILNNPVYKGYVRFNNHQNWAVQRRSGKSDKNDVILVKGKHEAIISEDVFDQVHEKLASKSFKPGRPIGGDFYLRGLIKCPECGNNMVCRRTYYKTKKSKERTIKRYYICSLFNRSGSSACHSNAINAEVVERVINVHLNRILSQPNVIKQIASSVIEELKQKHSKQTEIKYDIDSLEKQKAKVKTQQERLLELFLDDEMDSEMLKAKQSEMNQQLEVLDQQIKEAKQANQSQDDIPNFDKLKAQLILMITRFSVYLRKATPEAKNQLMKMLIDSIEITTDKQVKLVRYKIDESLIPQSLKKDWGSFFMPKFNFVINVTNENRIENLSLLPLF

SEQ ID NO: 17605 - protein, 461 aa, synthetic construct
MEKNITVIPAKKLQQTVISQTRKKIRVAAYCRVSTDQDEQLSSYENQVNYYREYILKHEDYELVDIYADEGISATNTKKRDAFNRLIQDCRDGKVDRILVKSISRFARNTLDCIKYVRELKELGIGVTFEKENIDSLDSKGEVLLTILSSLAQDESRSISENSTWGIRKKFERGEIRVNTTKFVGYDKGENGNLIINEEQAKIVRRIFQDFLQGETPESIARSLKEEGVPGWNGKVNWYPTTIQRMLQNEKYMGDALLQKTYTVDFLTKKRSENQGQVNQYYIEGNHEAIIDKEEWELVQLEIERRNQFRQDNHINFYIIQCEQNPFTCKVFCKECGGLFGRKNWTTSRGKRPVWQCNNRYKVKGIQGCTNRHTDEETLQQAFLRAVEVLRENEEKLQEKWGNFSEEQKLEKYHAAKLKETLNSNQEEFNGRKMCQVLEKISLGEDGSISIKFLEGTEVNL

SEQ ID NO: 17606 - protein, 542 aa, synthetic construct
MQQLKTKRVGIYVRVSTEMQSTEGYSIDGQINQIKEYCDFHHFEVKDIYADRGISGKSMNRPDLQRMLKDAKEGNIDCVMVYKTNRLARNTSDLLKIVEDLHKQNVEFFSLSERMEVNTSSGKLMLQILASFSEFERNNIVENVFMGQTRRAQEGYYQGNLPLGYDKIPNSKHELMINQHEANIVKYIFESYAKGHGYRKIANALNHKGYVTKKGKPFSISSITYILANPFYIGKIQFAKYKDWSEKRRKGLNDKPVIAEGKHSPIINQDLWDKVQMRKKQVSQKPQVHGKGTNLLTGIIHCPQCGAPMAASNTTNTLKDGTKKRIRYYSCSNFRNKGSKVCSANSVRADVIEDYVMRQILEVVKNDKVIQRVVARVNQKNKVDGASLHHDIAYKQQQYDEVQIKLNNLIKTIEDNPDLTSVIRPSIQKYEKQLNDITNQINQLKNQQNEDKTLFDAKEISKLLQHIFHDIKHIEKSRLKALYLSVIDRIDIKKDGNHKKQFYVTLKLNNEIIKQLFNNKQLDEVHLSTSSLFLPQTLYLTI

SEQ ID NO: 17607 - protein, 601 aa, synthetic construct
MKKEVKVIKGDTTLKRTASGCVERSIKRVAAYCRVSTDTEDQINSYNSQVEHYTEFIQKNNEWTLAGIYADEAITGTQVDRRIDFQRLINDCMNGDIDMIITKSISRFARNTLDTLKYVRKLKEFNVAVFFEEENINTLTMDGELLLTILSSVAQQEVENISANVKKGLRMKMERGEMVGFQGCLGYDYDPETKSISINEKEAEIVRYIFRRYIEGVGGMVISRELEEQGYLSPRGNKRWTETTVLGIIKNEKYKGDLMMGKTYTVDPISKRRLDNFGEQDKFYIENHHEPIISEEDFEKAQGIRLRRSKNRNTVANNGGKREKYSRKYAFSSMLECGFCGYNLSRRNWHSSSEYTKVIWQCVNATKNGKKYCPHSKGIEEEAIEKAFMESYRQVCHNNVEITNEFLKTVEEELKDNSLSKDLKKISNQLDKILKKEKDLVELRLNESISMDIYQDKYNEIAISKEKLLAEKRTLEVTLTDEKALKKRLEGFKKLLESNKYLEEFDRAVFESIVDKIIIGGTNDEGEIDPAMITIIYKTGKKDSQDGRLFKSRRKNAKEVNEKADSKLYPQSSDEVNNLYSYPIDNTCGVCGSARKSLETF

SEQ ID NO: 17608 - protein, 428 aa, synthetic construct
MSTDQDEQLSSYENQVSYYRDYILKHEDYELVDIYADEGISATNTKKREAFNRLIQDCRAGKVDRILVKSISRFARNTLDCIKYVRELKELGIGVTFEKENIDSLDSKGEVLLTILSSLAQDESRSISENATWGIRKKFERGEVRVNTTKFMGYDKDENGKLVINPEQAEVVKHIYQQFLKGYSPESIAKELNTNGIKGWSGKANWYPSSILKMLQNEKYKGDALLQKTYTVDFLTKKRTENDGQVNQYYVTNNHEAIIDTEMWDTVQEELARRKDFREKHKLKTYIMQSDDNPFTTKVFCAECGSAFGRKNWTTSRGKRKVWKCNNRYKVKGQIGCQNNHIDEEMLEKAFMKAVELLQEHRADVVVKWQKLEKGTNLLHKHYAKQMYQLLDLEKFDGTIMNKVLDHISISEVGQIIVIFLEGTEVEL

SEQ ID NO: 17609 - protein, 559 aa, synthetic construct
MKGKIALYSRVSTSEQSEHGYSIHEQEQVLIKEVVKNFPGYDYETYTDSGISGKNIEGRPAMKRLLQDVKDNKIEMVLSWKLNRISRSMRDVFNIIHEFKEHDVGYKSISENIDTSNASGEVLVTMFGLIGSIERQTLISNVKLSMNAKARSGEAITGRVLGYKLSLNPLTQKNDLVIDENEAHIVREIFDLYLNHNKGLKAITTILNQKGYRTINQKPFSVFGVKYILNNPVYKGYVRFNNHQNWAVQRRSGKSDKNDVILVKGKHEAIISEDVFDQVHEKLASKSFKPGRPIGGDFYLRGLIKCPECGNNMVCRRTYYKTKKSKERTIKRYYICSLFNRSGSSACHSNAINAEVVERVINVHLNRILSQPNVIKQIASSVIEELKQKHSKQTEIKYDINSLEKQKAKVKTQQERLLELFLDDEMDSEMLKAKQSEMNQQLEVLDQQIKEAKQANQSQDDIPNFDKLKARLILMITRFSVYLRKAIPEAKNQLMKMLIDSIEITKDKQVKLVRYKIDESLIPQSLKKDWGSFFIPKFNFVINVTKKNRIENLSLLPLF

SEQ ID NO: 17610 - protein, 378 aa, synthetic construct
MAGIRTENKIYEVGIYCRLSKDDGTDNESASIATQKSILTDYVKRQGWHLAKTYVDDGYSGTNFQRPSFQNMIKDIENGLINCVITKDLSRLGRNYLDCGLYLEVFFPEHNVRYIAVNDGVDTLNKSAMDITPFRNILNEMYSADVSVKIKSAYRARFQQGKFMGTTAPYGYVKDPADHNHLLIDDKVAHVVREIFDLALAGNGIAKIRKHINKQHILRPAAYAVEQGATGYERYFEDNEENRYIWSENSVRGILRSPIYAGNLAGYKRIAANMKSKKRPSKLPEEWEVIPDTHEGIVTQEEFDTVQQLMTSRRREQNAGGFENIFSGVIKCADCGYAMRAASANRRKRPDIIDCVQYTCNNYGRYGNHLSQITYHKS

SEQ ID NO: 17611 - protein, 601 aa, synthetic construct
MKKNNVEIIKADSLVRRRGDNFERESKRVAAYCRVSSDSEDQKNSYESQVRHYKDYISQRSDWELAGIYADEGISGTQVGKRQDFQRLINDCVNGEIDYIVTKAIARFARNTLDTLKYVRMLKDMQIGVYFEEENIDTLTMDGELLLTILSSVAQQEVENTSAHVKKGLKMKMQRGELIGFQGCLGYDYDVETKQLSINKKEAKIVRYIFERYLEGIGGKVIARELDELGYKSPRGLDHWNDTTVLGIIKNEKYKGDILMGKTFTVDPISKRRLSNFGEEDKYYIKDNHEPIISKEDFEKAQEIRLRRAGNKKTAANVNGKRERYSKMYAFSSMLECGFCGSILSRRSWHCRSDYRKVVWHCVTSIKKGKKFCKHSKGLEELAIEGAFMEAYRKLYHSNENLMTDLLETIESELNDNSLNKELKRITNKLRTLLKKEENLVNLRLEGKISDTIYNEKYNEISSEKEFLAEEKVNIETTLKSEIDVKKRLTEFKHLLSSQKMLTEFDRAVFESIVEKIIVGGVNSDGEIDPAMLTIIFKTGETQNKDGKQFKSKRKNAKLETDKLCPQNSDEDKKLYSQGPDNTRGVCFSARESLEPFDKWK

SEQ ID NO: 17612 - protein, 541 aa, synthetic construct
MNEMKKKRIGAYIRVSTERQVEGYSIDGQITQIEQFCQFNGYDLVDIYADRGISGKSMNRPALQRMLQDAKNGKLDCVIVYKINRLARNTSDLLTIVEELHRQNVEFFSLSERMEVKNSTGKLLLNILASFSEFERNTILENIYTGQHQRALEGYYQGNIPLGYSNIPDNKKELMINQHEANIVNYIFESYAKGHGYRKIANALNHKGYVTKKGNPFSISAVTYILSNPFYIGKIQFAKYKDWNDKRRKGLNDKPVIAEGKHTPIISQDLWDKVQARKKQVSKKPQVHGKGTNLLTGIIFCEKCGAAYAASNTTNTLKDGTKKRIRYYSCSNFRNKGSKVCSANSVRADVIEKYVMDQILEIVKSDKVLKQVVERVNQENQIDVASLNHDIAYKQQQFDEINTKLKNLIQTIEDNPDLTSALKPTIHQYETQLNDITNQINQLKHQQNQEKPSYDTKQIAALLQQIFQNVESMDKAQLKALYLTVIDRIDIRKDGNHKKQFYVTLKLNNEIIKQLFNDTPLDEVLLSTSSLFLPQTLFLQI

SEQ ID NO: 17613 - protein, 618 aa, synthetic construct
MAGIKEEKKIYLVGIYCRLSKDDGTDNESASIATQKSILTDYVKKQGWHIAKTYVDDGYSGTNFQRPSFQNMIKDIESGLINCVITKDLSRLGRNYLDCGLYLEVFFPEHNVRYIAVNDGVDTLNKSAMDITPFRNILNEMYAADISVKIKSAYRARFQQGKFMGTTAPYGYIKDPADHNHLLIDDKVAHVVKEIFDLALKGNGVAKICRYLNKQHILRPAAYAAERGETGFERHFEGNEDKRYIWSGNSVRSILRSPIYAGNLVGYKRIAANMKSKKRPSKLPEEWEVIPNTHEGIVTQEEFDIVQQLITSRRLPQNKGGFVNIFAGVIKCVDCGCALRAMNVHRRKRPEIIDCVQYSCNNYARNGRSECSAHNIEARDLFNAVLADINCFADMAVNDEKAVRAIEKRLTETDQSRAKALEKERKKLNKRLAELDRLFSSLYEDKVMERITERNFEMMSGKYQKEQLEIEARLKEVTETLNESYEKSRGIRDFLALIRNYQGLKELDATVINALIDKILVSEREKMADGTVKQEIKIYYKFIGFVDELHIIPTKRWAAMPAKNCTVCGVEYVPGSGASRYCPACAKKIRREKSNESKRRSREQKRIACMNCPQKMTD

SEQ ID NO: 17614 - protein, 484 aa, synthetic construct
MNKVAIYVRVSTTMQAEEGYSIDEQIDKLTSYCKIKDWTVYDIYKDGGFSGGNIERPAMERLISDAERKKFDTVLVYKLDRLSRSQKDTLFLIEEVFGKNDISFLSLNESFDTSTAFGKAMIGILSVFAQLEREQIKERMLLGKIGRAKTGKAMMFSKVSFGYTYDKLKDELVVNQAESIIVRKIFEAYLGGLSLNKLRDYLNNNGIYRGDKPWNYQGLRRILSNPVYIGMIRYRGEIYPGNHQAIIDIDDYNKTQEELKKRQITALEFSNNPRPFRAKYMLSGIAKCGYCGTPLRIILGSKRKDGSRNMRYQCINRFPRNTKGVTVYNDGQKCNSGFYEKADVEEFVINQIRDLQFNINKLDNLFDKHPSIDIKSIERQISSLDNKLKRLNDLYLNDMIDLEDLKKQTQLLRQQKTMLEDELLNNPAITQEKNKKYFKEFLATKDITKLDYETQKNIVNNLINKVFVKSGYIKIEWKIPFKKM

SEQ ID NO: 17615 - protein, 402 aa, synthetic construct
MNKVAIYVRVSTTNQADEGYSIDEQIDKLKAYCKIKDWTVYKVFTDAGFTGSNIDRPAMTNLISAAKKRQFDTILVYKLDRLSRSQKDTLYLIEEIFIKNGIDFLSLSENFDTSSAFGKAMIGILSVFAQLEREQIKERMMLGKVGRAKSGKTMMWAHPAYGYTYNKETSSLDIVPAEAALIKKIYELYIKGKSISKLRDYLNDNKIFVNKSVPWSHRTISYALTNPVYCGMIRYEGKLYDGLHEPIITKELFNKTQEVLAERRMEASKKNPRPFQSKYMLSGIIRCGCCNAPMKSLLGMPRKDGTRTRRYQCVNRFPRKTKPTTVYNDNKKCDSGYYYMQDLENIVLNKISLMQMDKANIDEIFDEKSDFDIEKAKISIAKIENKINKLNDLYINDLISLD

SEQ ID NO: 17616 - protein, 483 aa, synthetic construct
MNKKVAIYVRVSTLEQAESGYSIGEQIDKLKKFADIKEWQVYDVYEDGGFSGSNTTRPALERMISDAKRKLFDTVLVYKLDRLSRSQKDTLFLIEDVFKVNNIDFVSLNENFDTSTAFGTAMIGILSVFAQLEREQIRERMKLGLVGRAKSGKAMGWHMTPFGYTYDKKSGNFIIDEVAAGVVKMIFDDYLSGISITKLRDKLNSEGHIGKDRNWSYRTLRQTLDNPTYTGVVKYDGKTFPGNHEPILTSETFQSVQYELDIRQKQAYLKNNNSRPFQSKYILSGIAKCGYCGAPLVSILGNKRKDGTRLLKYQCANRIIRKAHPVTTYNDNKQCDSGFYMMQNIEAYVINSISELQTNPQKIQEIIKLDNDQPVIDTLYLESELAKISSRLKKLSDLYMSDLMTLDDLKNRTKELKQTRKNIEAKIFSEENKHGHTKSDIFRSRIDGNNITELDYDKQSMLAKSLIRKVSVTNETIEISWDF

SEQ ID NO: 17617 - protein, 482 aa, synthetic construct
MITTNKVAIYVRVSTTNQAEEGYSIEEQKDKLSSYCNIKDWSVYKIYTDGGFSGSNTKRPALEQLIKDAKKKLFDTVLVYKLDRLSRSQKDTLYLIEDVFIENDIAFLSLQENFDTSTPFGKAMIGLLSVFAQLEREQIKERMQLGKLGRAKAGKSMMWAKTSYGYDYHKETGTVTINPAQSLAIKFIFEEYLAGRSITKLRDDLNEKFPKDIDWNYRAVRIILANPVYCGYNQYKGQVYPGNHEPIISEEIFNKTQEELKVRQIAAAQFSNNPRPFRAKYMLSGIAQCGYCGTPLTITLGTIRKDGSRNIRYQCKNRFPRTTRGVTTYNDNKKCDSYFYEKADVEENVLNQISKLQEDTSYLDELFSSTEDNGIDRDSYQKQIEELTAKLSRLNDLYIDDRITLEELQRRSAEFTLMRATLEAELENDQALKQQERKDDMREILNREDVLNMDYEGQKVVVRALINKVQVTSEEIVIKWKI

SEQ ID NO: 17618 - protein, 467 aa, synthetic construct
MKCVIYRRVSTDMQVEEGISLDMQQLRLEQYAKSQGWVVVNDYCDEGYSAKNTERPAFQKMIKDMKKKQFDIILVYRLDRFTRSVSDLHSILKIMDEYNVKFKSSTEIFDTTTATGRMFITLVATLAQWERETTAERVRDSMHKKAELGLRNGAKSPMGYDLNKGNLYINPTEAEIVKYIFEMFKTKGIISIVKSLNSRGVKTKRGKIFNYDAVRYIINNPIYIGKIRWGDDILTDIAQKDFETFIDKDTWYTVQQVQDSRKRGKVRLHNFFVFSNVLKCARCGKHFLGNKQVRSHNRIVMSYRCSSRHHKGTCDMPQVPEDVIEKEFLNLLEDAIVDLDDTEEKPIELSNLQEQYNRIQDKKARLKYLFIEGDIPKNEYKKDMLTLTQEENIIQKQLANITDTASSLEIKELLNQLKDEWYNLNNESKKAAVNAIVSSITVEVTKPARVGKNPIAPVIKVTDFKIK

SEQ ID NO: 17619 - protein, 541 aa, synthetic construct
MRIYIYSRKSVYTGKGESVENQIEMCREYISTKIPESDNAEIVVYEDEGFSAKNTDRPQFQQMLRDIKLNKPEYVVCYRLDRISRNVSDFSSLIEDLNSYNISFICIKEEFDTSKPMGKAMMYIASVFAQLERETIAERVRDNMLMLARTGRWLGGTTPTGFTSEKIQEIIIDGKIKTSCKLKDNPDELKAIDCILEKFLELRSISGVSKYLIKQGIKSRTGKMFSLLGIKEILQNPVYCIADEDAWEYFTEHHSDVCFEKTDCSNKYGLLAYNKRDYRKKSAPRQDMDKWIVAIGKHKGRISGKKWVAIQNILKDNIPTGKKPAIMHNDYSLLSGLIFCDKCQSRMFAKQRSGKGGNRELYDYICNNKLRGGLDLCDCQNLNGQQADDIVCEYLMQYTDENSGIYKLLEKLKRDLQGQTQKSPVAVIDDKIKKCNSEIDNLINTLSHGSLGAAFIERVNARITELDKELASMKEEKARLHKDVNIIADREIQVDMLSTALSSFKDNFHTLTIEEKRTLIKLMVKKIVWDGKDLHIFIDGE

SEQ ID NO: 17620 - protein, 408 aa, synthetic construct
MAAYCRVSTDQDEQLSSYENQVRYYKEYIRQNPLYELVDIYADEGISGTNTKKRTEFNWLIGDCRKGKVDRIIVKSISRFSRNTLDCLKYVRELKELGIGVTFEKENIDSLDAKGEVLLTILSSLAQDESRSISENATWGIRKKFERGEVRVNTTKFVGYDKGENGNLVINEEQAKIVRRIFRDFLQGETPESIARTLKEEGVPGWNGKVNWYPTTIQRMLQNEKYMGDALLQKTYTVDFLTKKRSENQGQINQYYIEGNHEAIIDKEEWDLVQLEVERRNQFRQDNHINFYIIQCEQNPFTCKVFCKECGGLFGRKNWTTSRGKRPVWQCNNRYKVKGVQGCTNRHIDEETLQQAFLRAIEILHENKGQLLGKWAIFDEEQKLEKYHAAQLKELLDSEQEAFDGRKM

SEQ ID NO: 17621 - protein, 407 aa, synthetic construct
MKPGKIRVCAYARVSTMTEKQQDSLINQQAYYNHFYQNKNDVEFIGLYYDQGISGKLAKRPGFQQMLEDCRAGKIDVIHTKSISRFARNTELLLAVSRELKTIQVDIFFEEQNLHTLSNEGEVMLTVLASYAEEELRNMSENQRWAFQKKFQRGELVINTKRFLGYDKDENGELIINPEEAKIVQRIYNLYLSGKGVHAVAKLFNEEKVATVDGGRWYSSTITNILKNEKYKGDAILQKYYFAEIKAKQRLNQGQVQQYLITDNHEAIVSREDWESVQKRLQQNRKANLSIDYNRRYSLSGLLKCEHCGSTLKRQKYYKGKVVWVCSKYIREGKVSCIGMRVPDSAVQDWSIHEPTVVKEENTGGKKYYSYSSKENDTSRAEATHSENPDGGLLPGVHRPRRTAIKL

SEQ ID NO: 17622 - protein, 451 aa, synthetic construct
MTKAAIYIRVSTQDQVENYSIEVQRERIRAFCKAKNWTVYDEYIDGGYSGSNLERPSIKKLLTDLKNIDVVVVYKLDRLSRSQRDTLELIEEHFLKNKVDFVSITETLDTSTPFGKAMIGILSVFAQLERETIAERMRMGHIKRAENGLRGNGGDYDPAGYTRQDGHLIIKKDEANHIKRLFDLYEQQHSITKVQEVLKEEGYPIWRFRRYRDILSNTLYIGRVTFAGKEYEGQHEPIVSSEQFKRVQALLKRHKGHNAHKAKQSLLSGLITCSCCGENYVAYSTGKSKDVESKRYYYYICRAKRFPAEYEERCMNKTWSRKKLEDIIITGLKRLTVEDNVNNKQKKKINYEKLIKDIDKKMERLLDLFTTNTNISRQLLEQQMEKLNSEKENLIQKQKRQEEEKTIAQDTLIDSIKSIDLLEFKDKQVLINNLIRQINIDHKNVEIIWRF

SEQ ID NO: 17623 - protein, 536 aa, synthetic construct
MKAAIYSRKSVFTGKGESIENQINLCKDYGKKNLGVEDYLIYEDEGFSGGNTNRPKFKQLIKDAKNKKFDVLICYRLDRISRNVADFSSTLELLQENNISFVSIKEQFDTSSPMGKAMVYIASVFAQLERETIAERVRDNMLELAKTGRWLGGQTPLGFESEKISYFDAEMKERTMYKLSPVKEELDKVKLIYKKYLELKSLRKVTQYLLENNFKTKLGANWHTSVVSDLLQNPTYVKSSQGVFNYLRESGITCVGTPDGIHGLLTYNKKKGTKKQRDKTDWIATVAKHKGIIDSDIWLQIQSKMNCNKAKAPKLGRTHNALLTGLLRCEKCGSPMSVIHGPKDKNGNKTYFYGCSMKIYSKGTRCDNSNIRTTEMETVVINKLKSVTKNNGLLLKELNAVKEQLAPSKEETNELTLLNSKIKSNKQAIENLVKQLSLNSSSTASKYIIEEIEKKEEEIKQTESKMESLKEDKMEMNKLEIDLDLIISNLKNFYDTIDNVDIEKKKYLISVLVDKITWNGSTGEVDIKLWGSSKKK

SEQ ID NO: 17624 - protein, 508 aa, synthetic construct
MKIAIYSRKSIETDTGESIKNQIQICKDYFLRRKNNIEFEIFEDEGFSGGNTNRPAFKLMMSKIKEFNIVACYKIDRIARNIVDFVNVYNELEKHNIKLVSITEGFDPSTPLGKLIMMILASFAEMERENIRQRVKDNMKELAKAGRWTGGNVPFGYISKRIDEGNKKATYLVLDPLKENLIKEIFNTYISTNSMHKVQKWLYDTKNIKWCLSTIKNILTSPVYVKCNKEIIKYLSNFGEVFGDPNGVNGMITYNRRPYTNGKHRWNDKSMFYAVSKHTGVIDPNIWLKVQSIQEKSKITPRPKNSQVSYLTGVLKCAKCKAPMTISYNHKNKDGSITYVYLCTGRKTYGKKYCDCKQIKQNIIDPLVEEGLNAYAKLDIKQFNKIVGTRSKPENNISKIEKSIQKNNIKINNLVDKISMLSNAASNVLLKKIEELTSQNEEFKRELLFLKQEEINNQMTSPEEKFEKIKLFSNALKYADIDTKRELLHSITEEIYWDEDIKDINIVI

SEQ ID NO: 17625 - protein, 528 aa, synthetic construct
MIKAAFYGRFSSNNQREESIDAQLRASEEFAEKNGYGIVCNYADKAKSGTSDKRPEFLRMIKDAEKGLFNVVIVHKLDRFSRDKYDSALYKRKLKQCGIRLVSVTEQLDGSPESVILESVIEGMAEYYSKNLARETMKGLKENAYKCKHTGGLAPLGYEVNEGKKYVINEREAKSVRLIFDMYISGYSHSQMVDELNSRGFKTKVGAIFRTNSINSVLNNEKYTGVYIYNRSAKKDAFGKRNSHAYKDPSEIIKIEGGMPQIISKETFKKAHEILKSRKRKPGANKAKENYLLSGLIRCACCGKSYQGNRRQAKNKPMYISYRCSYRGATSSKVCDNKEIRKEYIEEYVLSELERKIFNDGAIAYLVEGINNNLQKQNKVDDEKKEVIVNELKEIDAKINNIVTAIASGFMQEEFKMKMDELKEKKSDLEFKQAQLKSNDITQVVTEKDVRNLLNNFSGYVISRNIPECKKFIQDFVKEVVVYKEHIEVLFNVSFNMLKNCEEVEVFSKIKRYDLYLKYSKSFYINVS

SEQ ID NO: 17626 - protein, 405 aa, synthetic construct
MQELIQDVQSKKVDVVIVYKLDRLSRSQKDTMYLIEDIFRPNDVELISMQESFDTSTAFGSATVGMLSVFAQLERKSISERMITGRVERAKKGFYHTGGQDRPPAGYQFNSDNQLIINEYEAAAIKDLFRLYNDGLGKSSISEYLKKNYPGKNKWLPSSIDRMLKNSLYIGKVKFSGVEYDGIHEPIIDEVTFYKTQKEIARRKQSNTKRYNYVALLGGLCECGICGAKMANRRAVGRKGKVYRYYRCYSKKGSPKHMMKTDGCSSKAQQQFIIDEAVINNLKNIDVEAELKRRSAPQTNTSLISSQIESIDKQINKLIDLFQVDSMPLDVISEKIDKLNKEKQSMEKLLERKNRLDKTELQHRFDILKSFDWDNSSIESKRAVIEMLVQKVIIHDNSIEIILVE

SEQ ID NO: 17627 - protein, 522 aa, synthetic construct
MNHSKRKVAIYIRVSTEEQANEGFSLGAQEDYLKQYANNKGYEVYDIYIDDGYSGKDYNRPEIQRLFKDLYQEKFTGILVKSVDRISRRVSDVTKLIDDVLAPRKCYVLVSDNNLDSSTTGGTAFIQLLATFAEYERLMIVQRVKAGMSKRAELGYWNGGHVLGYDVKNKELKVNKEEAEIVRKIFHLRTEGKGYKSIALILNQQGFKTKRGRLFSIGTIKTILENPLYMGYCRWGRHKNWNVERRKGKTDEYKFVKGKHEPIVSEELWKRVQGVNYAHKKSISKNRNFNGEFVLSGILRCPSCGAGMVMCKTKKRDKSGYHLYYMCQAFHSKGKLACKSNLIRKEGIEEKVLQCINKIILIPSIVDKTFERIQEKKEQGIERIKNDLLYINEELKRKKQFIKKLNKDYFDEKIRVETYTELSEPLREEIDELESEKGKLDRKIESVEIPITKEMVIKALENFTNLYENATYEQKKSLLRAIIKKIEVQPNRKEIKGITYWFDCDNGQDDALLVSKEGRTVP

SEQ ID NO: 17628 - protein, 501 aa, synthetic construct
MKPNIKEVAIYLRKSRDESDGKEDVLAKHESLLLEYVKNHNLKYEIYKEIGSSEYIDSRPKMVRLLNDVSQKLYDAVLVVDLDRLSRGDLEEMGRIGRIFKDSKTIVLTPTKTYDFNDEEQALINNFEMVFANHEFRMIKKRMLRGKLQGTKAGKWTNGRPPFPYVYNRLTKELDVDSDKVKVYEFMKKMFLEDMKATYEIAWKLNELGFKTNRNSYWYENTVRRLLINEVHLGKVVYGKTSGSGSKKKLNANGVQIKDRSEWIIAEGSHQQLKTEEEHQRILAILESRRYTPKGTRTNVQVLSKLIYCGKCNRVMSFTGKASGKKYVKTCLTTDHFGNRCHNRCLNVEVIYAQLFLDLEQYEQQLLNHKPKEKQGDSSTLQLALHNKLEELERLEKGVNRIKDLFIDEVIDKSEMKKRLEKQKQLMQTKKEEIRSIEQSLAVIENVITDDDRLHAIKEFKKAWNTEGIRKKELNTLAKQLIDRIEYVREGNNVQINIKFL

SEQ ID NO: 17629 - protein, 515 aa, synthetic construct
MKTAIYLRKSRADLEAEARGEGETLAKHRSTLLKIAKEMNLNVLAVREEIVSGESLVKRPEMLALLEEIEDNKYDVVLCMDMDRLGRGGMKEQGIILETFKRSNTKIMTPRKTYDLNDEWDEEYSEFEAFMARKELKIITRRMQRGRVASVEAGNYLGTHAPYGYDIHRLNKRERTLTINSEEASVVRMIFDWYANEDMGASAIRNKLNDLGYKSKLGNDWNPYSILDILKNNVYIGKVTWQKRKEVKRPDAVKRSCARQDKSDWIIADGKHEPIIPESLFEQVQEKLNSRYHLPYNTNGIKNPLAGIIKCSKCGYSMVQRYPKNRKETMDCKHRGCENKSSYTELIEKRLLEALKEWYINYKADFEKHKQDDKLKETQVIQMNEAALRKLEKELVDVQKQKNNLHDLLERGVYTVDMFLERSNVVSDRITEITSTMGNLKKEIKTEIKKEKVKKDTIPQVEHVLDLYFKTDDPKKKNSLLKSVLEKAVYKKEKWQRLDDFELVLYPKLPQDGDI

SEQ ID NO: 17630 - protein, 487 aa, synthetic construct
MKYAVYVRVSTDKDEQVSSIQNQIEICRYWIEKNGFEWDENSIYKDEAVSGTAWLERRAMQLILGKARKKELDTVVFKSIHRLGRDLRDALEIKEILLGHGVRLVTIEEGYDSYYEGKNDLKFEMYAMFASQLPKTLSVSISAALAAKVRRGEYTGGTVPYGYKIVDKKYVINQEEAEIVREMYELYDNGLGYLRISNALNDVGKYKRSGKLWTYSAVKLIITNPMYKGDYVMGRSTEVKVDGRKKRIQEPREKWVVFENHHPAIIERPLWDKINNPKINKKIKRRVAVTNELRGIARCIHCGSPFVLHTYKYKNKEGEELNYGYLTCGTYKLTGGRGCVKHSGLRYERLRSLVLRKLKEKERDLEKVFKLNDKDKHQEKQKKLRKEKKELEIKRERLLDLYLDGGSIDKETFTKRDANFAKNIKEKELEILKLDDVKALIVEQQKVKDAFKLLEDSENLYPVFKKLIAGIDISQNGAVDIRYRFEE

SEQ ID NO: 17631 - protein, 515 aa, synthetic construct
MRTAIYLRKSRADLEAEARGEGETLSKHRTTLLKIAKEMNLNVLSVREEIVSGESLVKRPEMLALLEEIEDNKYDVVLCMDMDRLGRGGMKEQGIILETFKRSNTKIMTPRKTYDLNDEWDEEYSEFEAFMARKELKIITRRMQRGRIASVEAGNYLGTHAPYGYDIHRLNKRERTLTINSEEASVVRMIFDWYANEDMGANAIRSKLNDLGYKSKLGNEWNPYSILDILKNNVYIGKVTWQKRKEVKQPDAVKRSCARQDKSDWIIADGKHEPIIPGSLFEQVQEKLNSRYHVPYNTNGIKNPLAGIIKCSKCGYSMVQRYPKNRKETMDCKHRGCENKSSYTELIEKRLLEALKEWYINYKADFEKHKQDDKLKETQVIQMNEAALRKLEKELVDVQKQKNNLHDLLERGVYTVDMFLERSNVVSDRITEITSTMENLKKEIKTEIKKEKVKKDTIPQVEHVLDLYFKTDDPKKKNSLLKSVLEKAVYKKEKWQRLDDFELVLYPKLPQDGDI

SEQ ID NO: 17632 - protein, 450 aa, synthetic construct
MTKAAIYIRVSTQDQVENYSIEVQRERIRAYCKAKGWDIYDEYIDGGYSGSNLDRPDIKRLLNDLKKIDVVVVYKLDRLSRSQRDTLELIEEHFLKNNVDFVSITETLDTSTPFGKAMIGILSVFAQLERETIAERMRMGHIKRAENGLRGNGGDYDPSGYTRVDGHLILNPNEAKHIKRAFDLYEQYHSITRVQEVLKEEGYTIWRFRRYRDVLSNTLYIGQITFAGKTYKGQHEPIVSLEQFKRVQALLKRHKGHNAHKAKQSLLSGLITCSCCGEKFVAYSTGKSKDIESKRYYYYICRAKRFPSEYDEKCLNKTWSRKKLEEVIFDELKNLTVKKSASQKKEKKINYEKLIKDIDKKMERLLDLFTNTTNISRQLLETKMDKLNLEKEHLILKQQSYEQEFSISKDMITTINESLETMDFKDKQIIINTFIQEIHIDHDVVDIIWR

SEQ ID NO: 17633 - protein, 597 aa, synthetic construct
MDVTQSPKTAVLYLRVSTASQVNTDYDPEGLSIPTQRKICLAKAKQLGITIVDEYVELGRSGTKTVNRPEFQAMLERLHTRGDVDCVMVYKLSRLNRSRFDDAVTMMELRKANVTLISATENIDETPEGQLVHGMLAAVNEYRSAADGADIRIKLLRKIEQGGTIGPAPLGYLNIIETIEGRRINTIGLDPERAPLIRKAFELYATGDYSCEHLQQKLTDLGLTTRPSAKRPTPKPLAVSTIHRLLADPYYTGIVTFKGKQYPGRHKPLVSQELFDRVQEIRTLRSNNTRDRVHFHYLKGGILHCERCHRAGRRSRFVYTEAKGKGGTYAYYLCRGRQDGHCDMPYLPVSLVEDYVEQHICTLSLGGDFTQRTEAEMTQALDDQQALIRQSNHAIARKLKDITAKEDRLIDLVADGSLDTTAARRHLTDLTQQRHHLEQTKQTLDQRLAIGRDVLTTSLHLLQDIGTLYHQSPNPVRGMLCQALFHTIYLDDTTVTTSTLKEPYSSLQAAATHDNRHSHTAPSSVGGDRAGQKKGSGTSKAPKQRKFQKRQQRRTPVATTIPLPSDEHEQTLGSRIATEGSSKHGMAERGGFEPPVR

SEQ ID NO: 17634 - protein, 559 aa, synthetic construct
MAGNLRVATFYRVSTKGQLDGNDIPMQRRACTDFIDSKGWTLVKEYVEKGVSGYKTSNDDRDEIQRAKYDAENGHYDILLCFMFDRLGRRTYETPMLIKWFTTQGVEVWSVKEGQQEFKDESHDITNFLRFWQSNNESRKTSLRVDEKHAQMAEDGVFRGGTAPFGYKLVKSGVLNKKGKELMKLEIDEIQAVVIKQIFNLVKNEGYGSNRISQYLNERGIKTSTGSTWNTGALNFILKNPIYKGYPAYGKRKSKEGIFVTKDKSEWTLPEKCQTHLVIISEDDFDYVQTFRSSRSVDNIKNHAYSRVNSTKSPLLFVGMIRCGYCGSPLTTTYNSKKYTLANGDVQKWKRAVYRCSGKALKKVECAGQTMYAQSKIEDTVLEEVENYLSYLRKLDYREYAKDYNQEEFDYIKQAVRMKNKELESCYEEINALKSEISKSILGKSAFKPEMLNELIEQKQTELASTDSEVRKLEIDLQTKKSELNDIKELSESIGMWGDIFKEASDEKKKTMLRSIIDVITVMRDGIDIKFRLDIVQFLSNAGNGSVSELRGRAHRWQR

SEQ ID NO: 17635 - protein, 540 aa, synthetic construct
MKQPYNTTIYNTALYMRLSRDDELQGESGSIQTQRMMLRQYAAEHGLNVIDEYIDDGWSGTNFDRPDFQRMIDDIEDGKINCVVTKDLSRLGRNYILTGQYTEIYFPSKGVRYIAVNDNVDTINGENELAPFLNILNEMHARQTSKKVKAAMRTRFANGAHYGAYAPLGYVKDPDKKGHLLVDPETRWIIEKIFDLAVHGRGAASITRILVEEKVPTPGWLNFQRYGTFANIYAGAPEEKAYAWTIAQVKSILKEETYIGHSVHNKQTNISFKNKKKVRKPKEEWYRVENTHEAIISEDVFRQVQEQICNRRRRQKNGTTQIFSGLVKCADCGWSLAYGVNSQNKNPYAHFHCSKYGQGLHQCSMHYIRYDVLYAYVLSRLQYWSVLAQQDGDKLLKRLLNASDKERNTARKRQTAELKKAEKRKAEVDTLFAKMYEDWSAGRITEYNFNMLSEKYQGEQRELDAKIERLHEAMEAAAQTAVDAEKWIGLMKQYVNPTELTAELLNTLIEKILIHEAVKSEDGSREQEVEIFYRFIGKIE

SEQ ID NO: 17636 - protein, 566 aa, synthetic construct
MLILNGDQKLSTEKIMSLIGKINALIYARVSTTDQANKGFSIDSQIERCKERAIKKFGYKESEIIVLVEPGGMGDDPNRPALNHALYLLERGLGKKFIVLHPDRLTRDNTLQGVVSRRIWGMGVDIEFIEFEVNPHDPESMLMYNIQGSIAQYNKAKIHANSKRGRLAKAKKGEFPSFKRLYGYKFNTVTDLPEYNEEEKEILFEMKDMLLNKKMSSNEIAKELSRRGVAPPNGNTWYQATVSRMLKNEDYTGDFYYGKSKVVQINGEKKQVPTDQEEWILIKIPPLWDHATREQIIEQLKRNFKGRSRATKDYLLKSKAKCGRCGGACGSGITSKTKSGVYKYYSCRAKTAKGYQNGKKVVSCEGKNWRVDIVDEVFWNWFIKLMKNPEKFLESFLEEASDQKKIDEIKAKVSRLEKQLSEIDDEIAKYVILFGKGKIKESMFDELSQPLEKNKEHIENEIKIINSQLAANKQTEDKKQKMIEYIGSFSKMIRNEITIEEKRQFLDFFIEKVTLFDDDHMEVVWKSSSLNNENSHVDFLNGEQGGEFRNSHKRLNHIQAYGRQTA

SEQ ID NO: 17637 - protein, 480 aa, synthetic construct
MNNVAAYIRVSTDEQADKGNSLNEQQERLKAYCVAMGWSEPIFYIDDGYSAKDLRRPAIKKLLDDVTKGKIQIVLTSKLDRLCRNLLDLLQTVKLLTQYNCSYVSASESFDTSTAVGRMTLQLLGTFAEFERERTSERVKDNMISLAKNTDRAIVGPCYGYDVIDKKYVINEEEAKNVRYMFELAEQGDGYRMIAKKLNDRGITTKRNKMFDQTNVKRLITNQALTGTMIYNKRSTKDSKTTFRDESEWIVKEGNHTPIIPIEQFEKVQEILRSRSRARKHADNETYLLTGLAICGHCERNMKGSTARVKNKYNEYTYYRYICGSYQLGYGCKHHAVHREDLETLIIEQVRELVAASTKELNINISPKASAIDEIKDLKLQLSKVGNKMQKQIEAFENDLITAEDLKMARKRVEADRDSLTKRISQLLSKRHEAETVQENAALMLPVILGADRLKAKQAIRQIIEQVTITDGVNIEIVWK

SEQ ID NO: 17638 - protein, 571 aa, synthetic construct
MEKIIEKKENLKKVYGYVRLSRDEDKEQASLENQKQIIRTYAKNNGYILVKIFEDDNVSGMTFDREGLNELKEVIENGNIDILLVKDLSRIGRHKAYSALFMEELRSKKIKVISIAENLDNMDENNDILIGFKQILNEQYAKDISRKIRAAFHQKQKEGLVIVPPFGYEKNNQTNKIEIDEECAGVVKKIFSLYIGGFGYKKIAQQLTEEKVHTPSWHQFQKSGKVYHAGKKWIGQDIWSDRTIARILSNEAYIGTLKCHTTTRSVIYKTRGLIPKDEQIIHENFYPPIIDEEVWEKTKAIKKNRTRGHVRASGNSKIHKYAGLLICKDCGSGFVAKKRKWNGIERIEYICNAYHRFGKTVCTPHRIREEELDNILCGFLERLKETCEENLNRADKFITKWNSKKRNYDKSIDKIQREIFSLKTEVKAYAKQLAKQLINEELFQELTQETKEKIDILENQIDTFQEVKKISKNAKAGLLKSKEIIDKIIEEKDLVSADLQMLVDKIIVHQSCTGELELDIRVNTPFKLHSELKSTFTVIEEQSSCEGDYSVISILNEFCKIYNLDKMQIII

SEQ ID NO: 17639 - protein, 497 aa, synthetic construct
MRGVIYARYSPGPHQTEQSIEGQVADCQQYAEENGIDVIEIYADRHVSGRSVAGRDEFQRMLRDAEKGLFDCVLVWKIDRFGRDRQDIALGKLSLKRAGVKLLYAKESVPEGPEGIILESVLEGLAEYYSADLRQKVIRGMKETAKKGQYCGQPLPIGYKVDAQRHIIVDEEKAAVVREAFQMHIAGARLKDLIELFRSRGITGQRDRPITQAVVYRMLRNEKYLGRFEVQGVKLPVEPIIDQATFEEAAAHFKTSRNNAAGRAKVDYLLSCKCFCGYCGAMLNAETGTSKTGKIYHYYKCGDKKRGKKCEMKAIPQQRLEDAVILATVNDMLTDDMIDRLTVRVMEVQAQETADDPVVALRRRLDSNKKRQRNLLDAIEEGGARGLVARLTALEEEEEQLVVEIQRAEIKKPRLTEEVVRAWLRSFRDGDVTDDDFRARLIDTFIARVEVRNDEALIFYNIREKGPHSKVRVRSEWWSAGTAARAIWDGPRYTVQR

SEQ ID NO: 17640 - protein, 417 aa, synthetic construct
MHVGEMRVIPAKLARPQRLKVAAYARVSTEHERQLSSIAAQVSYYSHLIQSTPGWDYAGVFIDEGITGTSTKHRDGFNDLMDTARAGGIDVILTKSISRLARNTVDLLEAVRELKALGVAVRFEREQIDTATADGELLLTLLASFAQEESRSMSKNVKWGIRKKYADGFMHSRQPYGYQYVGSDLVVIEAEAEIIRRIFAEFLAGISPEATAAQLNAEGITPRRGAKFRGKTIRKWLENEIYTGRVILQKYYRPKVSESNCHTNTGELPRYLVEESHPAIIDQATFDAVQAEFARRRHLGRGATPSGGTTGLTSRIECSVCGRFYHRRTKKRRASTYKFWWCETATKGKGNPCRAPQIRETHLTRVCASVLGLDDWDDEHALTHLTKIVVNADRTLTIHTTSGEAPVTVSLDERSAR

SEQ ID NO: 17641 - protein, 522 aa, synthetic construct
MTTTQIRRKRVTAIPATKTPGHNATAQGVQRRRRVAAYARVSTEAEEQASSYEAQIDYYTRHIQSRSEWEFAGMYADEGITGTTTRHREGFKSMIADALAGKIDLILTKSVSRFARNTVDTLTHVRQLKDAGVEVYFEKENIWTLDSKGELLITIMSSLAQEESRSISENVTWGHRKRFADGKIMVPYASLLGYKKGEDGNLVIDETEAPIVRRIYARFLQGATPQTIAKELTADQIRTPRGKQIWSPSTVRSILANEKYKGDALLQKSFTTDFLTKTMKVNEGEVPQYYVTGNHEPIINPATWDAVQVELARRAGKGTSNTHPFANMITCSDCGGSFGRKVWHSTSKYRRYIWRCNNKYRNDSPCSTPHVTEDQIKEAFVKALTELVTDHAVLDDTMRLLDETVYDTSELESQQAEVGERIEETITLMNQLITIAAATAHDPDDYDRRYQQLEERHQQLQTEQQHVTSKIKDLHHRRAQAIEIRDFLATQPPLEYSDQAWNTLVDYATITANGAIEIHFKA

SEQ ID NO: 17642 - protein, 551 aa, synthetic construct
MSRRTRAKKVGNAAAGLDLDTVRVGVYMRRSTDDENQPYSIEAQDTRLEAYVQSQPGWKIVKKFKDDASGKNTDRPDLQKAMQWAKANMIDVLLVYRVDRFSRNLRDTVTLLDELESVGVAFRSATEPFDTSTPVGRMMLQLLSMFAQFERDLIVDRVTAGMEKKAEAGEWKGGYTPPGYGKDPATHKLVVDEAEAVVIRLMFDLYTKDRIGSRSIANELNERGYRTRSGGLWAFKRVLTILENRVYLGEIHYRDVITLDAHPAIITPEQFAEAERIMDSRGDSHSRRATNNSDYVATGRINCPKCKHAMIGTSATGKTKTYRYYTCMKRMKYGKEACDQDRINADALDNALLDSVASFYGNQLDLIRDAVNEARKVYESSHDKVTAELKTIKTKLTTVTAKIDKYLDAFEDDLFDADDEAAKERVRGYRTTQKQLRAREAELREELENEPTMPDAATLKQVNHNIRTIIKAGNPNQRKAVVETFVVKVKLTGPGRMVPVFRVPQTPAPADAANAEGAEPGISDSAPQGVRVCSSLVELRGLEPLTLTLPV

SEQ ID NO: 17643 - protein, 515 aa, synthetic construct
MSYKRVAMYLRKSRADFEAEARGEGETLAKHKKTLLKLSKELKLNIVKIYEEVVSGESLIHRPEMLELLKRVENKEYDAVICMDVDRLGRGNMQEQGLILETFKEAHTNIITPRKTYDLHDEWDEEYSEFEAFMARKELKIITRRLQSGRVRSVEEGNYIGTNPPFGYEINRDNIGRTLIPHPEQAPAIKLIFDLYINGGKGSNKIANELNALGYKTYTGIKWKSSSVLTIIKNPIYAGKITWKKKEIKKSKTPGQKRDTKERPKDEWIIADGRHVPIISMETYMKAQAILKSRYHVPYQLENGISNPLAGLIRCEVCGASMVYRPYTNGRDPHIMCYNRFCQNKSSKFKYVEERLIKALEDWLREYKASWEGYDKEESNETDIIEIKRKAIFNLEKELDQLENQKEKLHDFLERGIYDEETYLERSQNLATRIEETLKTITLSKKELKQDARKELAQKNIIPKLENVIKLYKTSKDPAQKNSLLKSVLEKAIYNKEKIQRNDDFYLTLYPKLPK

SEQ ID NO: 17644 - protein, 457 aa, synthetic construct
MQQKDITIIPPDPKYDSHIRIEHKTLNVAAYCRVSTRFEQQENSYDAQIAYYTRKIGMNKSWNCAGIYADEGKAATGTKFRDSFNDMIEDCYAGKIDLILTKSISRFARNTVDCLRIIRELKERQIRILFEKENIDTMDNTGELLITILSSQAQEESRNLSENTRWGIIRKFEQGIVQVNHKKFMGYTKNEDEKLIIIPEEAAVVKRIFDLYLQGLGTYKIARVLESEGIRTTTGKEKWHHETIYKMLQCEKYMGDAILQKTYTIDFLTKKKVMNNGYVKKYYVRNSHEAIITKEQFYLVQEEMKRRSCASERSTRKRYSSAYPLSGLIICGKCSGTYNRVSWQNKSGKSFVWRCRERLKAGTVQCKQSATIRESEMMKLLSKLFNTIIKTDPADSTVYLIKTKAVLIVNLGDKGEFNDDDLTKQLLNKVIERIVVKDEKTVIVHFKTGLIMEKTLS

SEQ ID NO: 17645 - protein, 551 aa, synthetic construct
MAVAKKTVAIIPPQMKYDRHVRVEQKTLRVAAYCRVSTLLEQQEGSYEAQVDYYTEKINSNPNWKCAGIFADDGKSATQTKKRDDFNAMIDACMAGKVDLVLTKSVSRFARNTVDALQCIRKLKEKNVPVIFEKEGVNTMESGGELLITILSSQAQEESRNISENTRWGLTRRFENGIISVNHKKFLGYTKDDDGNLIIVPDEAVIVKRIFREYLEGKSIIQIAKGLQDDGIKTVTGLENWHPGTIDKMLSNEKFCGDACMQKTYTIDFLTKKKVKNQGYAPQYYIEDNHEAIIPKELFHQVQVEKARRASLNKAAVTRKANKAKKEKSKYSSKYVLTELLTCGECGHSYRRQTWSKYGQKSAVWRCEDRLKQGTSSKCHHSPTLKEEQLHDAIMKAINKVVENNGDFIGTFRENVIRVIGNYSTKGVTTEYDDQIDALQKQMLTLIEDNARQGAVSEEFDEAYRKLSEQINELKQAKIQLVRAQKQAENYAERVDELDKAIKTVNPEVREFDQELVKRLIYSIKVNKGMKITIQFHSGIVMTESVDYFED

SEQ ID NO: 17646 - protein, 534 aa, synthetic construct
MAKKVTKIEPVRQNVIQTLRPKKRVCAYCRVSTDSTKQHTSYVAQVEYYESYIGKREDWEFIGIFADEAKSGTKVKSRDEFLRMMHECENGNIDVIITKSVTRFARNTVDSIEAIRKLKSLGVTVYFEKENLNTLSEQSEQMLTILSSLAQGESESISTNNRWGIQKRFRDGSYRLSTVAYGYTKDEDGELVIKEDEAEIVRRIYLEYLGGKGSYVITRDLNKDQVPTVRTAETWNESTVKEILQNPIYEGDLILQKTYTTEVLPFTKKRNRGEMPQFFIKDNHEPIITREQGQMVREIYEYRRKQMGNDRSEKYQNRYEFSSIIMCSECNGSFKRQKIYIGKPYEKIQWSCTNHIKNSAMCKMKPVREGIIKDAYLTMWNKLVSNYVYILIPMLDSLKNLRINKEQETEIEELNHKIMELTEQSHILSRVAQKGYVDSALFIQKQNALNVELEETKRKRNSLLDSNGFEKEITGTQRLLEIIRYNPVIMEDYDESLFSHTVEQVIIGQKNTITFKLINGLELIEKAGTGGEQE

SEQ ID NO: 17647 - protein, 629 aa, synthetic construct
MKLKLMRIKKRLTQGQLGIRIGVTQQCISKIENGNTGRVTLEKVQEFAKTFNMCELDFTAMLLNHECPHMCSLWRKEGGNMKNKSAIYIRVSTHYQIDKDSLPLQRKDMINYSKFALNIEDYEIFEDAGLSAKNTDRPAFQDMMKRIRNNEFTHVLVWKIDRISRNLLDFCDMYNEFKKYNVCFVSKNEQFDTSSAMGEAMLKIILVFAELERKLTGERVKATMLSRANEGKWNGAPVPLGYKWDKVAKFPIIDEIEAKTIKLIYSEYLSKKSTTAIRELLNYNNIRTKRGGSWTTKTISDIIRNPFYKGTYRYNYRESSRGKVKDEKEWIVVEDNHSPIVSKELWEQCNKIMNINSQHNNNANFRKSGIVHVFASLIKCGECGGTLYSKQDKPNLDGFRPTIYVCSGRYNNLGCNQKTISDKIVGTFVLTYVSNILRLSKSLKKLSKEDFEKELIKGLKNVIGIEDVEIIYNACNGLGDLVFNKKNNETEIEDYEMENIKKEIAKYKRALERLEDLYLFSDAGMSEKNYIIKKTKINDKLEELNNKIKSSAEIEENLNLDFFMDFGILALDHVFKSKKIDFKEVINNVGKEILRDFMNSIIDNIIVKDKRITSVTFKNGLTNKFVYAS

SEQ ID NO: 17648 - protein, 468 aa, synthetic construct
MEKLKAVAYCRVSTIMQEEGRSLEFQIKKCQDYCEFQNYELIEIIQDVESGGNDDREGFLELREKVRAKAFDVLVVFESSRISRVTLTMLNFVLELQKSNIHFVSISQPELNTTTPTGMLFFTIQATLSEYERKQISVRVKSNKWARAKAGIWQGGKLPLGYKKDPENNNVILIDEDNALFVQNIFSYYLKTQSLAKTAKEFGKHMESLKWILTNTFYTGIFRYGKKENNINTGIVKINEDYQYFEGFHPPIIDSETFNKVQDLIVKNKKNRPVSYRLLFAGLVYCSCGGKYHSSFGGGGYNYRCEKCKKNISAKKLEQAILDKIFLMTELEELNNNDLQNEKYQEEIKLLKKIIVKDKKEKEKNLLLFKNEIINIEELKKEMDKISSSIISKEKEIKELEKLISNNELNSEKSNNFNLLKEVVKNMENEDREELNKLFKLLIDKILILNKNEINVYNKEIKMSINIK

SEQ ID NO: 17649 - protein, 482 aa, synthetic construct
MRDRRPGREADTDRVEVARLTLPAAIYLRVSGKHQAGSDRFGLAAQEHECRVYAARAGLRVARVYVDVISGARDERAQFAQLLADAAGYSVVILGVQDRLARDVPLSYAMLGALQGAGLRVHSALEGPLDLEDDGHALNFGIRAVIADQERRRILKRMYSGKLAKVRDRGQPVAPIRAYGWKDGAPDPETGVRVAWIFEQVERHGLHQVLYELERLGVLSPTGRPRWSKTALLNLIRNPLYRGEYGYGRKGERLTLAVPALVTPEQWERTNAAVARRFKGSGRAGTLAHIYHLQGVARCAECGGVITSTGVQHLKSGGKLRYYFCRSTLKIEGYRCTHRTHYRIEEVHQVVEAALKQLVREEEAVRLALAASVAAPVAASTSRPKTNPLARLNAEWERWKGALRAGAITPEELAAERRRINAARAALAQEIQAAPQLDVTAWQAAMREQLASLPLGEALRAAGVTVLLGAGGAVTFRIRAGA

SEQ ID NO: 17650 - protein, 551 aa, synthetic construct
MGKTSKGLVYSYLRFSDPKQSTGSSTDRQLAYAEKWASEHGLQLDSSLTLRDEGLSAYHQQHIKSGALGVFLRAVEDGRVPHGSVLIVEGLDRLSRAEPIQAQAQLAQIVNAGITVVTASDGKAYSRTRLKENPMDLVYSLLVMIRAHEESDTKSKRVKASIRRLCEGWQNGTYRGHVRQGHDPEWVKEVKGGWEIDADRAAAVRRAVQLYVQGHGGKGIVQRLDAEGLQLYTTSAENRTHQIYRLLKMPQLAGIKPISIDGEEYQLRDYYPALLSADEWTELQRVAAQSGRRRVKGDLPHVITGLGITICGYCGRPMSGQHLATKNRLPDGRLRDGNRRLLCASAAAYGGGCPVSGSTSAAPVERAIMSYCSDIVNLQALYGADRSQAPRAQVVAARQEVDQISAQLDKLTDAMLASADEGTPAVFARRARQLEIELDAAQTRLQAAELDLAGAARTDIAGADAAWRALAAGVEAQQIEPRLQARQLVADTFERIVVYARGVNPDPEAERDYKIDLVLIARGGVARLLTMDRRGNWIAGEQSATQDQAHQ

SEQ ID NO: 17651 - protein, 582 aa, synthetic construct
MVVANRALIEGTEMVKPYRKLRVALYIRVSTEEQRREGFSLGAQEEILRAYCESKGFEIYDLYSDGGYSGKNFERPQMQQLLRDLQQDKFDIVLAVAVDRISRNNLDVLKFVDEELHPRGKKLLISTCDIDSSTETGKMFISLLGTFAEYERRLIISRVNKGMDKRATEGKWNGGMMLGYDSVDGKLVVNEEEAEIVREIFELQAIGKGYRAIANSLNRKGKKTKGSKNKPSDSFSTAAIKTILQNEKYTGSLDWGKQRNWNSTRRSGKSEPIRADGEHEAIIDMELWGRVQAIMKSKKETATHSANYTGQFLLSGILRCPVCGAGTVMSKRNKRNGSGHYLYYICQKFHSKGKTVCQANSIKKDLIEEQVLKFIRTVLAEEQIVDGIMERLKNEESHSTAQLEKDLSIQQKSMKKLLEKQTKQDSDYYEDKINAALYNRLSEKLEAEISEHRNAVAYLEREIEKMQAKVSINKEIIIEALTNFDNLFESATNEEKKALIRALIKEIHVEADRESIKNIVFWFSEDDTIMPSVLPFQETRRTLSQVTAKYFWEKFGPSTHDVCRMRLRAPLEMLAPKAADDG

SEQ ID NO: 17652 - protein, 462 aa, synthetic construct
MKNNHPEKIIRCGLYDRVSTELQARHGLSVDTQKELLTDYAVSHGYEIVDYYIDEGLTARKKLQNRKEFVRLLNDVQAGKIDLILVTKLDRWFRNVKDYHNTQAILEANHCNWKTILEDYDTSTADGQLKINIMLAVAQNESDRTSERIKVVFEHKKRNQEHLNGPIPFGYKVVEKKLQKDEDTRPITEDIFHQYFSCFSKRKTIAYTQNTYGDRSPTAYQINRMLTSEIYAGIRYGKTGYCEPYITLEQHHMVLSICDSKTYPATKEPYLFSQLMKCPHCGAGMTGFINKHKSRNGTVAYSKRYRCSRKIDRHSGSPCITEKRIEDYMLKNLYPELQNRIYQIQQCHKQTPKKDNTWKITSEMERLNLLFQKGRIGIDYYDEQYEKLEQELRDEQAAHKIVTVESYQAIQEKIAGNWKELYEKLDYEHKRSFWRSILAEIYIDPETHKISGFDFLVDRCSN

SEQ ID NO: 17653 - protein, 456 aa, synthetic construct
MIKNKNLSPLIRVALYIRVSGEEQKIKGLSLEAQQERLEAYAREKGWIVTGVYIDAAKTARKNMHKRAEFQKMIESVKRDEVDLLLFCRLDRWFRSVADYYKVMEILQAHGCDWKTVDEEYDTTSANGRLYINVKLSIAQNEADICGERIDVVFDSKIAHGTVVSGSCPFGYRVSKEKRLEIVPEEAGIVQDAFNHFESTISQRGTIKYIRETYGVNWCDATFRRMLLEPLYTGIYDRGGRKNENFCPAIISREQFDKVQSLLKRNARSAPSGKVYIFTSIVKCAECSHNLVGYKSREYYYYRCNQHFQRGRCNHNKSVREEVIEKWLFDNLESELRRVRLEWEVKAAEKKKAALRTDKAALKRKLTKLKELYVNELIDIEEYKKDYEIYTAALRQVPEPAAEAPPDFEAMEKLLQSDFKNIYESLTREEKRTLWRSVISEIRIDSENSITGISFG

SEQ ID NO: 17654 - protein, 638 aa, synthetic construct
MSIDKYETLNQERKIQHTKRKVAAYCRVSTDNEDQANSFESQQRYFRQYIERNPDWELYEVFADEGISGTNTKKRKEFNRMIACAKNGDFDLIVTKEISRFARNTLDSIFYTRDLKKHGVGVIFMNDNINTLDGDAELRLAIMSSIAQEESRKTSERVKWGQKRQMEQGVVFGRSMLGYDVKDGKMYINEDGAKVVRLIFHKFVNEGKGTHVIARELREEGIKPMRVKEWQNTVILRVIRNEKYCGDLVQKKTYTPDFLSHEKKYNRGQEEFVIIKDHHEPIISRELFDKANRILDEKSLSQEGKAKHSNRYPFSGKIKCGCCGSSYVARYKTRKNGSRYKAWRCLEAARHGSPHVDKAGNQVGCSGLSIRNEDAIHIMYLVTSSLKYNKEKITNNLLAIIKSIIAMDTAGTDSEKLKSQIKAIEQKRTNLIDLYTSGDITRDEFSAARAKCENEIAELQSVIDSIDKQREMIEKQQELVAEITEAMNELINGVEYEDDFYKEILDKMVVNDKDHIDVYLNLLPLKWSYTVAKSVNCPQGRPLKKAQAPEMEHFRGFSTDIRQNPSHFLIRHRISLREVPHGRCQFPVRSTILLKQIIRYNPCIYRGYDMYRWNTSCRLFLSRTISSTMLRIKVPLVS

SEQ ID NO: 17655 - protein, 553 aa, synthetic construct
MNRNNNSKKNNSKITSPMITALYCRLSLEDGKDNESMSISNQKLLLKDYAEKNGMFNCEFYVDDGFTGRNFNRPAFQRMISDIEAGKIGCVITKDLSRLGRNYIESGSYMEVFFPKHNVRYIAITDNYDSLNKQEMDIAPFKNILNDMYSRDISKKVLAGRMTRSRQGKFCGGQPPLGLMRDPDDNGHLIIDPETAPIIRRIYDLALDGFGNMKICKVLMEERIPITRTQTGTDCDVNYYAWSGSRISAILRNPFYKGAHVVCKTHQKGIRSNTYNIIPREQREVIEDCHEAIIPKAEWEKVQQLIDRRPPIMKGNNCPYYNIFHGIVYCATCGKSMQVRYEKVGRTDKDRRTGKEREPIDKAYYICQTYNRLGKNACTSHKIEARDLYNLVLSDIQEVAAMALKDKEAFYRRLSRRMEKQYLADTDSLKKEFESLAGRNQEIDDTFISLYADKAKGILTEKRFLKLTDAMEKEQESNQNRMQEIAALISEEEHSEGDVQMFMGEIRRYAAITELDETVLNRLINRILIGEPKKVDGVKTQEVRIVYNFVGEL

SEQ ID NO: 17656 - protein, 508 aa, synthetic construct
MQMYDALYARQSVEKKDSISVESQLEYCRYETRGEAFIEYTDKGFSGKNTNRPGFENMINDIRAGKIRRVIVYKLDRISRSILDFANMMELFQKYRVEFVSSTEKFDTSTPIGRAMLNICIVFAQLERETIQKRVTDTYYARCKRGFYMGGRVPYGYRLTNTVIDNIRTSMYTEVPAESEQLKLIYSMYADSGTSLGDIVRYLNGHQIKNLRGADWNTARISEMLRNPVYVKADIDVYRFFQNQGAVICNPVCDFTGDNACYLYKGTVSATRKQCDLSEKELVLAPHKGFISSQTWLACRQKSLNNRQSTKTCKPKNSWLSGKVKCGRCGYALTIRRAKTKWERYFICSRSGTHGNCKGAGCTVYADVLEEYILNAVSKRLSEFPVLQENISPSISDMANAQTNMTKKIRLTQIEEEIEELLSKVSGAGSILIKYIDEKVSELDAQRKFLQQELVTEGSADTKQKPAQITGHVKTWETLSFEDRQAVVDILIKVIRIADGNLEITWNL

SEQ ID NO: 17657 - protein, 620 aa, synthetic construct
MSIDKYETLNQERKIQHTKRKVAAYCRVSTDNEDQANSFESQQRYFRQYIERNPDWELYEVFADEGISGTNTKKRKEFNRMIACAKNGDFDLIVTKEISRFARNTLDSIFYTRDLKKHGVGVIFLNDNINTLDGDAELRLAIMSSIAQEESRKTSERVKWGQKRQMEQGVVFGRSMLGYDVKDGKMYINEDGAKVVRLIFHKFVNEGKGTHVIARELREEGIKPMRVKEWQNTVILRVIRNEKYCGDLVQKKTYTPDFLSHEKKVNLGQEEFVIIKDHHEPIISRELFDKANRILDEKSLSQEGKAKHSNRYPFSGKIKCGCCGSSYVARYKTRKNGSRYKAWRCLEAARHGSPHVDKAGNQVGCSGLSIRNEDATHIMYLVTSSLKYNKEKITNNLLAIIQSIIAMDTAGTDSEKLKSQIKAIEQKRTNLIDLYTSGDITRDEFSAAKAKCENEIAELQSVIGSIDKQREMIEKQQELVDEITEAMNELINGVEYEDDFYKEILDKMVVNDKDHIDVYLNLLPLKWSYTVAKSVNCPQGRPLKKAQAPEMEHFRGFSTDICQKTCHSVVRHCIALRQIAHGCRKFSVRPAILGDDNLCNFRVGLGDFYRKLQSFFIIPH

SEQ ID NO: 17658 - protein, 643 aa, synthetic construct
MSTRYQVDKDSLPFQRKKLKEYCKLMGIDAFQIFEDDGYSAKNTDRPHFQDMMNRVRAGEFSHIIVWKVDRISRNLLDFAAMYEELKDHRVTFISMNEQFDTSTAIGEAMLKIILIFAELERNMTSERVTGIMLDRAENGLWNGARMPIGFRWNDETKYPEPDPEEVKIVQFIFDEYEKTRSALQVTRYLNNNHVKSKRGGMWSSKLVHDIIRNPFYIGTYRYNLRESGRGPLKPESEWIIRENNHPAIIDKEQFDRCNRIMDENGTSRDVSEIRETVHTHVFAGKIICAVCGSGMIATKDRARENGFRPSNYRCGRRAKMLDCENKKIVSDLYIGPFIFNYVANLARVQKEFKNKKIDSLEKLEAALLKGDEYNGARLTESSLKATFSALAYSGLGKGAYLPDLGLAEGEDDISIAERRSILEKEREKCQNAISRLTELYLYDSEALTKEEFSKKKKELTKKIRDIEGQISEITESGDGSDLADLSFIKKASAFLVAQRIVSKKHIDYIQMCLDLDNEILKDFVDQVVDQIVALDGRVQKIRFVNGLEHEFVYSAPAELPKCRACGYTIGKTVSCRIRTISYKGKNYRRVKVGDPGDPYEGKKVAACAACGVSFGRFHHADCEKEVCPICGGQLATCEHRKK

SEQ ID NO: 17659 - protein, 470 aa, synthetic construct
MARDVTLIPANPHPVTARGGRGQEREVLRVAAYCRVSTNNEDQLLSFDNQVQYYTEYIANKPNCTLAGIYADEGISGVSTNKREQFKKMIKDCEDGKIDMVVTKSISRFARNTQDCLQYSRKLKNLGIGIFFEKENINTLDAAGELLFTIMSSLAQEERRSISENCRWGIRTKFKQGVMHLNANHFLGYDKDEKGNLVINEAQAAIVRRVFDEFMNGLNPEVIAAELNSEGVPGCMGEPKWAVSTIMHILENEKYKGDALLQKYYTSDFLSKKSVRNTGQIEQVYVKDSHPPIVDKELWEAVQLEIERRRLFREKHNLQNMGRYTDVQPFTCRVICGKCGAVYWRRTWTRGSRKIRVWQCGQRYRQKGVAGCKGCNLFEKDLEQAFLTAWNGIVENREGFLTAWKKQITEGNALEKWRAGQMVQLTTEPPLETVCPEIVNMVLESVEVHDGGLLHFHFLDGTEMEIETEE

SEQ ID NO: 17660 - protein, 570 aa, synthetic construct
MRIRKVAIYARVSTEHEAQLSALENQVQYYDDLIDRHPDWVLYRRYIDEGITGTSISKRKNFVRMMEDAKDGHFDLIVTREVSRFARNTVDTLQQTRLLKRMGIEVYFTEDGIWTMNDEDGELRLTIMATLAQNESKKTSMRVKAGQMVSFQNGVVYGTGNVLGYDKVGPEYVINEEQAETVRRIFDLYLAGNGYHKIMKQLEKEGRRTAMGKTMWHYATVGHILKNRLYCGELEYRKEYVPDYLEQKRAKNKGELERVIVEGKHQPIVTKEEFERVQKMMAEKDAQMGQRRKNKGVHSDDLWRRKMRCQCGHAFAKTKWHTKTDFITYTYKCYDQTRTGTIAARLKNGLGIENVCRSPLVQDWKMYTMAQKVLHAVFDDPEGTLLNAAAVLGCGIAGVEQSEVLRDKEIIEEQLKKERGRYETLLDMRMNNEIPKEVFSRKQQEVGERIAELEQRMEQYGDVEPATEADVSGKLENLQKLMGQFSMPEDGEFSEEEMDKYVSGVRVYEDRFEWLLNLSPDAGGGLDDAGSPVYFKKITVTPDDERAWFRKHPQWSKSNRYAELEVWIFI

SEQ ID NO: 17661 - protein, 442 aa, synthetic construct
MAAYCRVSTNNEDQLLSFDNQVQYYTEYIANKPNYTMAGIYADEGISGVSTNRREQFKKMIKDCEDGKIDMVITKSISRFARNTQDCLQYSRKLKNLGIGIYFEKENINTLDAAGELLFTIMSSLAQEESRSISENCRWGIRTKFKQGVMHLNANHFLGYDKDDKGNLVINEAQAAIVRRIYREFMNRLNPETIAARLTDEGVPGCMGEPKWAVSTIMHILENEKYKGDALLQKYYTSDFLSKKSVRNHGQVEQVYVKDSHPPIIERELWEAVQLEIERRRLFRERHNLRTLGRYTDEQPFTCRVVCGKCGAVYWRRTWTRGSRKIRVWQCGKRYQKKGVASCKGCNLFEKDLEKAFLTAWNGIVENREGFLPAWEKQIKEGNALEKWRAGQMVQLTTEPPLEAICPEIVNMTLESVEVHDGGLLHFRFLDGTELEIDTEEE

SEQ ID NO: 17662 - protein, 692 aa, synthetic construct
MNNKISSTHLERRAVVYLRQSTPTQVEFNRESTERQYALADRALTLGWDKSQISVLDSDLGKSGQTTTGREDFHRLMAAVGLGEVGAVLALEASRFSRSQADWHKLLDICALTDTLVIDHDGIYDPNDFNDRVILGFKGTWSHTELHGMRLRLQGAKLNKAKKGELRCSPPTGYVYDPEGKLVLDPDEGVVAAIQLAFQKFRELRTAFKVMRYFCVNQIPFPRRRWRPGDIGTLHWGPANLSRITALLHNPTYTGTYVYGRRRSFNVIEGGQIKKVKIQQLPQEEWKVIIHNAHEAYISWSEYLSNCERLRQNSPISLSDGCPGTPREGFALLQGLVICGKCGRRMSPRYHGTGGCRAAYECSQARKLDGSMGVCWSVAGAAIDTAVSAHVLSAFTDEQLDISLAVLSELENIADEADKTWQLRLERARYEAERAGRQYDATEPENRLVARTLEKRWNEKLQQLAELEEAYQKARLVQRLELTAVQRQQILQLANDIPTLWHASTTTNLERKEILGLLVKQVAITPIDAPERSTRVQILWHTGVTSELIATRPTNAEKFRTPNQVIQLIEELAVGRTDSEIAHELNRRGLVGGTGRAFTKKGVAWIRWKFGIEKPLSNPQVAHDGVSPEGYYSTSALAEKLGVGIHTVYYWRDKGIIQAFQETPRSPWWYIVTPEVLETLREKIRRVPVKSE

SEQ ID NO: 17663 - protein, 467 aa, synthetic construct
MKIIRTAAIYARISSDQTGMGLGVQRQLEDCRKLAAERGWTVAEEYIDNDISAFRSKARPSYERMCEDIRAGRRDAIVAYHQDRLTRRPMEWEQFVELCDQAGVQNLATVTSDIDFGNDNGMLVARITAAVAANESARKSERIKRKIQQNVEQGKPNGGAQRPFGYENDRITVRESEAEIIRTLVQRFLAGESVRSLVSWMTAEEVPTTAAAEGWRTPTLRQILLSGRIAGLRDHHGEAAGPAAWPAIISVAQHHQIQALFQTKKVSGRRAPRSYLLSGMLRCGNCGNRLYSSIRRDRRRYVCLSGPDHRGCGRLTIVAQPVEEWIAAAVLMRLDTPAMDDVLTGRADTNDRQAALLTELQTAQSKMNELSEMWAGGEISKPEWMAARMPLEARANNAEKQMNQIAGANTLDALVGQGEHLTASWDTLNLDRQVAIVRAVLDTATILPGVLGARSVDYNRIIPSWQL

SEQ ID NO: 17664 - protein, 496 aa, synthetic construct
MAKITKIKNQNLKLNAKIKVAAYARVSEATDMTHKSLSAQVNNYKKLIKSNPEWDYAGVYADEGITGRTTKNRAEFNRLLEDCKAGKINMVLVKSISRFARDTVDCLNTVRELKDLNIAVYFERERINSLTSEGELLLTLLASFAQEESRSISENVKWGIKKNFEQGIENGHIAPYGYYWDGEKYRIIPFEGKVVKEIYERYLKGESAYAIAKDLGNRGIVGRQGRQLEQTTVKDILSSISYTGDMILQKNYIDESKVRKRNKGELPMYLVENMYEPLVSKEDYQKALNIRRERAEKMPNKNPILTPYSGLVKCGNCGSGISRRTAGNKKKWVCNTKERKGLDCCDSRPIKEEELIKASDEVIGLSGYSNEEFKDRIKEIKIFGDRLEFKLKNGKIKVIERTYTGERGSNPFTNKIYCKQCGSKCIRHNNGKSKAWFCTNRDFKPLSEEELKKAAFKILGSNFQGKVVEHIKIINISKNKLEFLFKNGDEKIWQRE

SEQ ID NO: 17665 - protein, 523 aa, synthetic construct
MAKRVTKIPATLNLISSQPLSQVKKRRTAGYARVSTDSEEQATSYETQMAYYKNYIESRSDWEFVGMYSDEGISATNTKRRDGFKQMINDALDGKIDLIITKSVSRFARNTVDSLQNVRKLKEKGVEIYFEKENIWTLDAKGELLITIMSSLAQEESRSISENTTWGKRKQFAEGKVSLGYKHFLGYDKDFKINEEEAKIVRLIYRLFITGLSYTAIAKELEKRGFKTTYGKDKWHASTIKSILTNEKYKGDALLQKEYTTDFLQKTRKMNEGEIPQYYVEDHHSGIISPEQFEFVQLEIDRRKSQGRKSGNSIFSSKIKCGCCGAWYGEKVWHSNTKYRHKIYRCNKKYKKGEEPCNSPTIDEEQIKEIFLKSLNSLASIKKEVKQNLQTLLKTVYNTADLERESENLKEELIIISKRIEDLVRENAMSNGNQVNFIGKEERLRNIYNEKFNKFKNIDEEIKQKKDKENEILGFIKNIDSMENSYKSFDKDLWAGLVDYIEMDKEGIAKVIFKGGTVVKVEI

SEQ ID NO: 17666 - protein, 520 aa, synthetic construct
MKKITKIEANQKEESTLRVAAYARVSTDEDAQLVSLKTQKAHYEKVISENKSYTFAGLYFDEGITGTKKECRDGLLKMLKNCENGKIDFILTKSISRLARNTTDCLEIVRRLLDLNIGIYFEKENIDTRTMESELMLSILSSLAESESRSISENNKWSIKKRFQNGTFIISSPPYGYENIDGKMVVNEEEGKIIKEIFEEYLSGKGTHKIAEGLNKRKIKGQRGASWHGSTINGILKNEKYTGDVIYQKTYTDDSYKRHKNKGEEDQYKIIDNHEAIVSREDFEKVQELIRLRAIAKGNGENTKRYQNRYGLSGKIKCGECGSSFKRRHHYNGKDKYIAWTCSEHLKDINKCSMKFIKDKDIKLAFVTLVNKLIFGKDNILTPLLESIKRIDSKEEVEKIEKIEESLEKIKERKEVLNKLITSGVLDASIYTKESSEISSEERNLLKEKERSQKAILGNDEEIRELEKLIGILGKSEMIDHFEGDLFEEIIDQIQVVNRETFEFHLKCGLVLREEVKNNV

SEQ ID NO: 17667 - protein, 490 aa, synthetic construct
MQGYRQTAMNKQLSYDTQVDHYTNYIKKNPDWEFAGVFSDEGVSGTYTKKRDGFNKMIEEAMEGNIDYIITKSISRFARNTLDCLKYIRKLKENNIPVYFEKENINTMDAKGEVLLTIMASFAQQESQSLSQNVKLGFQYRFQQGQVQVNHNRFLGYTKDEEGKLVIVTEEAKIIKRIYREYLEGASLRDIKEGLEKDKIINGAGNKKWHVSNLNQILTNEKYMGDALLQKTYTVDFLNKKRVKNDGIAPQYYVENSHEAIIPKEIFMRVGEEMYRRVNMVSGKGKRRIYSSKYALSSIVYCSKCGDIYRRIAWNNRGKKYTVWRCCTRVTHGPDACHARTIKEEDLQEAVVEAINQLISESSELKEIIKENIKNAITGDGSRQIETIDKEMLNVQEELLKVANAKKDYTDLADRVEELRNEKEKILLTMAEEKNEQSRLMELEEFLNNQELEIESYDEELVRRLIEKIVVYEEKLKVIFKSGLEFEISK

SEQ ID NO: 17668 - protein, 555 aa, synthetic construct
MAAKARVYSYLRFSDPKQAAGGSVDRQLEYAARWAADNEMELDASLSLRDEGLSAYHQRHVRQGALGVFLRAVEDGQVPAGSVLIVEGLDRLSRAEPLQAQAQLAQIVNAGITVVTASDGREYNRERLKAQPMDLVYSLLVMIRAHEESDTKSKRVKAAIRRQCQGWIAGTWRAPIRVGKDPHWVRETEAGGFELADDRAAAVRLVIEMFKQGHGAVRIVRELADRGLKITDSGRSASSHIYRLLANRMLIGEKSVEVDGETFRLEGYYPALLTATEFADLRYLAEQRGRRKGKGEIPGVVTGLGITYCGYCGAAIVAQNIMGRRRAADGRPYPGHRRLHCVTYSQSAGCKVSGSCSVVPVERALMLYCSDQINLTRLLEGDSGTVSLVAQLASARQRVAELEAQVQRVTDALLLDNGEAPAAVLRRVRELESQLLSERRDVDSFEHQLAASAANVAPAAADAWRELVNGVEQLDYDARMLARALVADTFSKIVVFQSGFRPDDDDGTIGLLLIAKRGTIRMLHVDRKTGEWRAAQEHDLAEDTLPFGLGNTEPA

SEQ ID NO: 17669 - protein, 535 aa, synthetic construct
MSTGTELRAVFYARVSTEEEKQLNALEKQIQENKDVIRDHGWRLVGEYIDEGKTGTTTKRRNDYKRLLKDMTENKFDIVVCKDQDRLQRNTLDWYLFVDNLVINNLKLFMYLDNKFFKPSEDALITGVKAIIAEEYSRNLSKKLNNSNKRRIERALNGEEVSAMGNGKSLAFKIVNGKWVKDEEEAKLGKKIFELYLEYDSIRKVRDWVNEHGYTNSVGKPFTSESISRILKNEKAKGVIVMGKYHHDFDKKKIVRRSEEELVRIPAPELAYVSEEVFDKVQERLRAKTGNGRGVNAYSDPLSGKIYCGSCGRKLWKHASNGYVNWMCASQVAKGDVECNGTRITTVAIRNIYKKITDNLEVNKGVVKQDIVKWLNELKATLSDTSVNEKIQKDLDKLERKRTKLLEAYLEDFISKDDYKAKYEAIEGQIEEKKKLLVPVEENEDIKVIESVLQNIDDEIDAYVKTLDMEESKVDFLIEHTKRITVLENRDIIIELDLVAGAIIAGKDFLLYVHDTMHFATQTVHNNTVEIRAAI

SEQ ID NO: 17670 - protein, 591 aa, synthetic construct
MIENGMVMPTNVNFNRARQRRVVFYGRVSTEHEAQLSALENQMQWYDDVADRNPNWYVIKKYIDEGITGTQAKKRPAFLRMIQDAKQKKFDLIVTREVCRFARNTVDTLVVTRELKEYGIEVYFVEDNIWTMDGDGELRLTIMATLAQEESRKISERVRAGQKISRDKGVLYGSGNILGYDRDKAKGTYVINEEQAETVRMIYDMYSAGKGISQIRDEMIRLKRKDSSGLVRWENAKVSRVLHNSTYKGYPAYLKSRRNNFLDQKIILNRDEDTYLYVKGDFEPIISEEQWDRCKQIREQRTRYRKFRTENGEVLHKTGIHESSDVWTKKLKCRCGYKMRKNKWRKNKNGEVTYGYKCYNQLNYGSKDIRIEAGIDDSKSCNLREICDWKLEMMARHIFAGLWGNKKDILNNVSSLYQIGVFQEYQKAAEIKATVDKEIAKLDEKLKRLTRMRLEDEIPKESYLELKKEIEQEKIELINKRRILDAGMVPNEDGEEEPAKKVEDFLLSKMDFTEHYVDREVIKQFVHTIVPVTETCFNWYMNFDLIDVPNDMKKLVWEFTIDYKSARSYRKEKNGMLRPNQWQDLTVKVFI

SEQ ID NO: 17671 - protein, 538 aa, synthetic construct
MAKVIKKVVVVPVKSLVVIDGITQTVKKKVAAYCRVSTDSEEQRESYENQVRHYTQHIEGNSNWDFADIYADEGISGTNTKDRVQFKRMIEDARAGKVDLILTKSISRFSRNTMDLLKYVRELKSLGIAVLFEKENINTLESSGEVFLTIFSSIAQDESRNISENSKWGIQKGFANGKVHCNTTRFLGYDKDKEGELIINEKEAEIVRRIYQEYLEGKSYQAIATGLMKDKIKTVTGNEKWWDSSITIILTNEKYYGALLQQKTITVDFLSHKRVKNRGQEQKYLIEDNHEPIISKEMFDMVQNEKERRALLKGNVMGDRKKYSSKYPLSSKVFCGCCGANFKRRTWNSNNISKKVVWQCRTYVNEGKAACDARAVDEQVLQDTFVRVFNRMHENKDGFIRTLNANIEAVLAKREGHTPLLEIEKQMDQLKADLKGLVTLKLRDQIDEVVYAEENARISKELDGLRQHKMKLEEDNNQKAEFKGRVDEIIQVLSLRQDLLEKFEDDLFNALVEKITILSPAHFVFTLKSGLEIEEFEE

SEQ ID NO: 17672 - protein, 415 aa, synthetic construct
MGEMRVISARPARPQRLRVAAYARVSTEHERQLSSIAAQVSYYSHLIQSTPGWDYVGVFIDEGITGTSTKHRDGFKHLMDTAKAGGIDVILTKSISRLARNTVDLLATVRELKDLGVAVRFEREQIDTLSADGELLLTLLASFAQEESRSLSHNVKWAIRNRYKNGGTNSFVVYGYHWANGEFTIIDEEAKIVRLLFANYLDGISPEKTAGMLNDQGVRSRGGGWFYGSVFRRMLENERYKGCQMLQKMYRPTIQAPTCVLNDGELPRYWVEQALPPIIDEVMFDAVQAEIAHRREVGPAATPSKNTGVFTGRICCGACGKNYQRKTRTYKSGTSYKFWRCWSACTGNGNPCGGHNLRETLLEQACADMLGTQGFDPVHVAEQVVMIEAFEHQLTFHLADGTMAPVGLTSEGRMA

SEQ ID NO: 17673 - protein, 537 aa, synthetic construct
MIPKRQSILSTMKAAIYARYSTDKQREASIEDQFTICARHAEREDLEVAQRYSDDGVSGSTPVSRRAGGARLLMDAFNGRFDVLIVEGLDRLSRDQVEQEQLVRRLEHRGIVIIGVADSYDSRMGGRKIMRGVRGLINEMFLDDLRHKTHRGQAGQVERGYAAGGKSYGYDIVRDHLGSKYQVNDEQAGWVRWIFGRYAEGWSVQRIAHELNARKVPSPRASTWVVSAIYGSPNKGSGILNNCLYQGLYIWNRSQWVKDPDTGKRQRVDRPREDWREIQVPELRIVDEDLWQTVRKRIDGRLPGRKQGAPVRTLFGGLMACPYCGGAIVAINSRLYGCANRKDRGPTVCKGIHFKRETADKNLLDTLRDELLSPAAQEQLRRQVQAILTERQRSSVAEGAAAAGRRKELDGEIQRLVDAIASIGASQALADRLRVAETERAQLAANKPRSGQDGPSAGEIGERIKKTLANLESALAADVQQARILVAELYGKIDVVAEGESVYAEYNNAAEKLLLASSGMSLKLVAGAGFEPTTFGL

SEQ ID NO: 17674 - protein, 470 aa, synthetic construct
MGKNVMTIPATRNRFTADPISSRKKRRVAGYARVSTDMEDQQTSYAAQCDYYTSYIQSREDWEFVGLYSDEGISATSTRHREGFNKMVEDALEGKIDLIITKSVSRFARNTVDSLSTIRKLKDNGTECYFEKEAIDTLDAKGEVLLTILSSLAQDESRNISENSTWGIRKRFEIGQHKMSTKRFLGYDADENGKLVVNKQQAKIVKRIFMEFLWGKTTDYMKRIFEREGVINWDGGTKWQSTTIGSMLENEKYKGDTLLQKSYTVDFLTKKRVQNEGEIQQYYIEDDHEAIIEPWIWECVQLEMKRRERYLEEHNITRFSQNTEVNPFSSKIICGECNRAFARKGWRTPSGDWKVWQCSEQYKVKGVRGCGNRHIYEDTLIQIYLMAWNRLLECREMLLPEWEEKIQSEDLLTKFRVMDFMEITKDAQQIKELDIDLMLRTLDHIKVYESGTIVTVFLDGTEIEYNANNR

SEQ ID NO: 17675 - protein, 522 aa, synthetic construct
MVVEGSDKMAKVSRIEPKILALKKRRRVAAYARVSMETDRLAHSLSAQVSYYNDLIQSNPEWEFAGVYADFGISGTGTAKREEFNRLIADCEAGKIDIVLTKSISRFARNTVDLLSTVRHLKEIGVEVRFEKENIHSFSGDGELMLSILASFAQEEVRSLSENSKWGIRKTYQNGTDGVRNKKVFGYRYDGEKYVVKEDEAEAVKFIFEQTAAGVSASEILAELKKRRVKSWRGYDFTYSHLNGILKNEIYIGDRRLQKCYEEDPIKHNKIKNRGELPQYYISGCHEPVIDKGTFAKVQEILKERAEAVPVYPFTGRIRCGVCGRAFTRKKGKVRGKVYVHWICRGKKETGTTCSSVNFGEEELEAAAAQALGLDAFDGERFGEMVREVTVLPNGNLQLRLSDGGAKVWKNLRLHQARHEVTVTDCFQGKIRCAICGNTYHRVNAGGKWVYWYCIGKKRDHVECHAVNYADFKLRRISASILGLEEFDEDEFERKIKEILVLENGSMEFRFHEGRTETWERM

SEQ ID NO: 17676 - protein, 575 aa, synthetic construct
MIATFYARVSTDSDEQKNSIVSQVDYFNTYLNENNYQLAKTGVFYKTNGTFTVTSGYYVDEGFSGAKSNKYRKAFQEMMNDARARKFNIILTKSISRFGRNVKELLAAVAELRSYDIAVYFEDLKINTMNSSDNFKLTIFAAQAEEESRAKSEAVQFGKLQGYKKGIWGGRAPYGYDVRQGKLVVNPNEAPIVKRVFSMYLNDCMGLRSIAQQLNADEVPTKRGASLWDQSLISKMLKNVVYTGELRLHRTKKMDLNQNLVKKIPIDQQIVTFDSDLVLVDTEDFVLVQIEKEKRREDFGTLNVKEITVENNGEIERQKVHILERGLSRHSSKHIFSNILKCGNCGGSMRRKVQRNKHRTFIQWICRNNDQYGRKGCQYRNLQYEEELMKYVKREIDKYRNNEQIHQENLNYYIKSQFDLKNVERDIQILKNETKELTQEREVNFRLLTKSIIDDQEYEQRNTSIQANLTDKQNNLSRLENISVEIEKLELRHKKFLTFLSQVDVDSLTNATLRQIIDRFEATSPDGAAPLPRFTQHEFNENQLKIYWRVFGKSRESVIEDTVDKLIDGFTLDSL

SEQ ID NO: 17677 - protein, 467 aa, synthetic construct
MIRKRDDFQAMIDDCMAGKIDMVITKSISRFARNTVDSLTYIRKLKERNISVFFEKENIDTLGSGGEMLITILSSQAQEESRNLSENVHWGYVRKFENGVVYVNCKKFLGYTKDADGNLVIVPEEAELVRRIFRMFLEGNSSMKIAKILTEEGVRTVTGKNTWHATVIDKMLSNEKYMGDALLQKTYTVDFLSKKKVINKGLVPQYYIEGNHEAIIPKELFYKVQEEKARRANIYRPAKKKGATIKSKYSSKYVLSDIMYCKECGQPYRRQVWVRNGNRKPVWRCDSRLKQGAKRCRHSPTLEERTLHGAIMQAINSVIEDDGEFVEAFRENVIRIFGSYAKDVEPTEYDEAIERLQKEMLQLIERSAREECVDDEFDRVYQEITNQIKILKKERLKAQREKQLAESYEEREAGLDGYVKKVNYLKQEFDDELVRSLLERIAVVSEDKIEIQFRSGIVMTQRIDYYD

SEQ ID NO: 17678 - protein, 536 aa, synthetic construct
MGKKVVKIVTRIEPVSQKLKPHEVPSVRVCAYCRVSTDGADQKNSFESQVDYYTRLIAEKEGWVCVGIYADEARSGTKTIKRDDFNQMLQDCRLGKIDMIITKSVTRFARNTVDSIQAIRELKSMGIAVYFEKERVNTLSEDSEQLITILSSIAQGESESISSNNKWSTVRRFKNGTFILSCPPYGYQKDENGNLILHPEEAAVVRRIFNEYLGGKGSYTIAKELERDGVPTVRNGKAWMDSAVKGILQNCAYEGDLLLQKTFSAEVIPFNRKRNHGELPQYLITDDHEPIITREEAEAVRQIYEYRRQRQCSEDVSVYQSRYAFSGRIVCGECGTNFRRQKIYIGKPYEKVQWCCYQHIQDRRKCSQKAVRQDAIEECFIRLWNRLATNYEEILYPMLAALKTIRSNPQMEQEMKELENRIQELKKQSHMLRKVLTEGGMGSAVFIERRNQLDQELETAWRRQRNLREQRTYEWEIRQTEFLISIFKNRPSIIEQFDEELFRLIIEQVTVYPEKRLEFQLKNGLKLEETDRKEVG

SEQ ID NO: 17679 - protein, 525 aa, synthetic construct
MLDPNGTYFAYLRKSREDRDAELYGAEDTLARHEYIIKDLAGRYHITIAAWYKEVVSGETITDRPEMQRMLSDIEHIRPDGVLAVEVERLSRGNPQDQGRVTDTFKYAGTLIITPMKIYDLQKENDEEWLDFGLMRSRMEYRTIKRRMQNGRTTSAMQGKYIGNIPPYGWVRKKLEHEKGYILEPSPDTGWILKLIYTLMDTGTAETGYIPAGASMTAHTLDSMGIKPPKGDIWDAGSITRIAKNPANIGFVRIGYRKQKKVMENGTLKVSRPVNDDCLLVPARWEGQIPPDVYNRVCHKLNHTKKSSSFPAVQSPLAGLIRCSICGKIMRRRPAGTRNKADTLQCRTYHCPTVGSYYDLVEERLLIILDQWLENYKIKIDPNAPEDWQTAFDSRQRIKQELETYIASLGRQLSKVHTCFENDIYDLDTFQERSQAVKSELEEKEEKLRCIIDELSKIREHIEQKEAFVPFFEHMLDSYRRSKDPVFKNTLLKLLVERVEYTKTERGGRTGEHNDRFELKIHVRI

SEQ ID NO: 17680 - protein, 462 aa, synthetic construct
MKKRIESIMRVASYRRVSSDEQAKHGDSLRDQEERTLEYINNHDNMVLAGIFTDDGISGQKLERDDFQRLMDAVKSDEIDLIIFTKLDRWFRSLRHYLNTQAILEEHNVCWTAIDQPYFDTSTPHGRAFVAQSMMWAELEAQNDGIRIVDVFKNKVKYGEVISGKVPRGYRIENKHLILSEEAPAIYDSILYFLKTQSLNGTIKYMRSQHGITMTLANFKDSILRNTKYTGKFRDNDSFCPRLISDEEWNEIQKILDSNLNIKSSQRYPYIFSGLLVCDECGYKLTGCKINVYTKRKSGKEYRYQYPGYECKRFQAYKECCNGGEIREQKIEDYLLTHIREELQSYIAEYSNQNKNRIDNRARKNAIRKKLDRLKELYVDELISLDEYKVDRAKYLEELESLPDIIESPVDFTKITELLNSDFETVYATFDNEEKRRFWRTIIKEIRITKSTNRQRTFKIFF

SEQ ID NO: 17681 - protein, 525 aa, synthetic construct
MKRIGIYGRKSVFSDKSESIEHQFTLGKEYAYANYDNPEIIYYKDEGESGSYLERPDFQILLNDVINDNLDIVICYKLDRISRDVADFGAVYKLFMAHNTEIIPLRDNIVINENMSPIEKAMMYINTVFSQVERENTIIRVTDNMIELAKDGYWTGGRAPLGFSSKEIIVGGKKHHILSHNPTEIEFYTMVADTFLNGFTLSGLETYFRKNNVKTLRNAYLSSTQIWTILKSPFAAPADEATYDYFSSLGCKMVHDRSKYDGSHGLLVYGRTSGGRKRKHVTNPPDKWLVSIGLHTPIITSDKWLSIQKCFGNNTFCKTRKYKVGILNDILRCSCGSYMKVKHKYDKQYNVHYYHYRCLQRERRGSEYCASQMISVETLDNEVIEILKGIKLDKTLIDNYTTPASFFPLFRKPETINREIENEGKKIQNLTMSLAEASGSSAAKYIIKDIESHDKRIDELKEELKKSRLAMQNVKELQINKEDKYNAVCKIVDCIETATYDEINALLKETLTECVYDGEVLHIKL

SEQ ID NO: 17682 - protein, 633 aa, synthetic construct
MAGIRMENKIYEVGMYCRLSKDDGTDNESASIATQKSILTDYVKKQGWHLAKTYVDDGYSGTNFQRPSFQNMIKDIESGLINCVITKDLSRLGRNYLDCGLYLEVFFPEHNVRYIAVNDGVDTLNKSAMDITPFRNILNEMYSADVSVKIKSAYRARFQQGKFMGTTAPYGYVKDPADHNHLLIDDKVAHVVREIFDLALAGNGIAKIRKHINKQHILRPAAYAAEQGATGYERYFEENEENRYIWSENSVRGILRSPIYAGNLAGYKRIAANMKSKKRPSKLPEEWEVIPDTHEGIVTQEEFDTVQQLITSRRLPENKGGFENIFAGVIKCADCGYAMRAMSANRRKRPDIIDCVQYSCNNYGRYGNIMCTAHSIEARDLFNAVLTDINRFADMAVNDEKAVRAIEKRLTETDQSKAKALEKEQRKLNKRLAELDRLFSSLYEDKVMERITERNFEMMSGKYQKEQLEIEARLKEVTETLSDSYEKTQGVRDFLSLIRNYQGIKELDATIINALIDKILVSEREKLTDGMVRQEIKIYYKFIGFVGELHITPTKRWTALKPKNCTVCGVEYVPRSGISKYCPACAKKIQREKSNESKRRSRERNRQACIELSAKNDRLILNSVRAGFCAKAI

SEQ ID NO: 17683 - protein, 522 aa, synthetic construct
MGNVMVIPARRQVGNTVKQSDQKKLRVAAYCRVSTDSEEQETSYEAQVTHYTEYIQKNPEWELAGIFADDGISGTNTKKRDEFNRMIDECMAGNIDMVITKSISRFARNTLDCLQFIRQLKDKNIPVYFEKEAINTLDAKGEVLITIMASLAQQESQSMSQNIKLGLQYRYQQGKVQVNHNRFLGYTKDDDGHLIIDPEQAEIVKRIYREYLEGSSMDKIADGLMADGILTGAGKTKWHTSTINKILRNEKYMGDALLQKTYTTDFLTKKRIKNNGTVPQYYVEGDHEAIIPKELFMQVQAELVRRRVVHVSPTGKKRSFSCNHCFAQMVFCGDCGELYRRVHWNNHGCKSVVWRCISRLEPTAAEMNCTNRTVNELLLQEITVKAINQILTERDVFLKTLQQNIAKAVVNADTLSPDGIQSRLLELQKELIKKANNKQDYDAIADEIFRLRDQKEQSEVDSHHREETMNRIKELQDFIAGQETAITEFDEALVKKLIEKITVFADHFTVEFKSGITIDIEA

SEQ ID NO: 17684 - protein, 519 aa, synthetic construct
MKKVTKIAETANSKVKLKKIRVAAYCRVSTDSDAQLESLDAQKTHYEKYITSRDDWEFAGLYYDEGITGTKKDKRSELLRLIDDCKAGKVDFVITKSISRFSRNTTDCLELVRKLQALHIPIYFEKENINTGSMESELFLAILSSMAEGESISISENNKWSIQKRFENGTYKVSYPPYGYDWDGEQMVINPEQAAVVKEIFAALLSGKGTHAIADDLNQRGIPTKRNGRWTATTIRGMLSNEKYVGDCLFQKTYSDSRFVRHNNHGEQTQYMVKDHHEAIISRENFEAAHAFIHQRATEKGVVKGSDKYQNRYTFSGKIICGECGDTFKRRIHSCTGYKYAAWCCNTHIKDKDKCHMLFVKDDDLKHAFITMMNKLVYAHRIILKPYVDALKNTSSDDSLRRIQEIQTLLAQNTEKRETLTKLMTQGIIDPILFNKETNELLSQADSFRDEINALKNAVSGDVTKVTAATALLHFTEKGGILQDFDDDLFEEYVNRIIVHSRNEVCFELKCGLKFRERM

SEQ ID NO: 17685 - protein, 576 aa, synthetic construct
MLGIYIRKSVDHDKQKSLREQELLGIELAERLGSSYEIYNEGIVSGADISAERPKFKEMISDIEKGKLKGIFIWETSRAARNTKSWLVFADMLKDNKVVLYDNGMNIDLSDPQTYMFYTQKAAFDEFYAKLTSQKIKTVLKRNAKNGMVQGRPPIGYRKGENGKVEIDPEQSKLIKRIYKDSLNGKGTKVIANELSEEGIPTQRNKKFWASNTVLDIIKNPYYKGVRIQGGVEYEVPAIFDEIYWQKVNDNLKKNRIFSGRGVDHKYLLNKGMIVCGVCGKNYFGRKNSNTKWAYYLCASRKSRLEDCRNRALNLEVFENFVWDNFFRNGEMYQRVKEAFKKGGSEERSKANALKLKENQKSIKNIKKKITSNYQNLIEELVDKENYISTKNSLESKLQMEMELQEALEMEQQLLNDEKRFLTEIKKDIPLPKEWMGDSNDQYYRQYNERLWRDSLANAELKSNKQIIDSSIPFSEKKEIIGKYIKQIKVTYDHARKFFLIEVAFNIPIPNETYIINDLQDFAGNTATKTIFPIKEMIDYSPYPSGQNILKKYHKFRKKFEAVTGGPKIHYDVFRG

SEQ ID NO: 17686 - protein, 566 aa, synthetic construct
MKNAVIYARYSAGPNQTEQSIEGQLRVCTEYAEKNDLRIVGTYIDRKISGKTDNRREFQRMIDDSSKKIFEVVVMYQTDRFARNRYDSAVYKHALRKNGVEIKYAVTSIPDGPEGIILESLMEGLAEYYSAELSQKIKRGMRESALKCHSTGAGHSLGYRTAPDKSIVIEPDGAKAVQIVFDMYIKGRSQVEICDYLNGLGLRTVQGKPFGKNSVNKIIKNQRYIGVYTYDDIVIEDGIPAIISKDTFRLAQLEMERRRTRKRPKTPKAEYLLSGKAFCGHCQKALVGVSGTGKTGNKWYYYYCPDSRAKKGCDKKPVRREWLENFVVQTTVQAVLQPYIIKHVSEKCYEMQLRYREDNSDVLYFENKLAEVKKAIKNTLKAIESGVVTKTLPARLAELENEQESIEAELAIAKATDVVITPEQIEFLLWQFSQPQEGETEDDYRRRIIKCFVYKVFLFDNKLLIYYNVSRDGKTREQSEIELLEEALSAGFDQRSSGSTRTNSGGQGVKALTSAALCYFSCAGHFLSFCKLALAQFTVIIFSYLLCAVQMLTAAAPRMKFSPKKQ

SEQ ID NO: 17687 - protein, 575 aa, synthetic construct
MTKRKIYSYVRWSSDRQSKGTSLERQTAKAKEFAHSHNLELVELLDAGLSAYRGKNTTQGALGGFIQAVESGAIPNDSYLFVENLDRLSRQDILTANKLFSHLLELGLTVVTGMDGRIYTRQSVTANPTDLMLSILLFSRANEESATKQKRVYGNIAALVERHKAGLPTTIKTAGSHVWWVDASGDKHTAVQPHPTLWKAARKAVELFLDGYSAHAVCDYLNEHYDAPPVRVTKSTNNPDNLGKWSYPLLRRMKTSRTLIGERTINAGDITYTLENYYPALCSPTEFALLQDLNENNKLTQGPKKTRITLLSGLGVLKCGHCGGAMTFMIGTKGKIRYMCANGKDRIGNCKAWSIGLDILERTLVPALVRGYMDYTLGGNAKGDDIKESIQSAQEALQAIESQIENITNAITLGGNLAPLVERMGALSKVKDSQLLEVERLNRLALLSESESGAIDKITDFILQIRPNVLTDLNHPLRLQLREAVRAVIESCTIHKREDRGLAIVYTIKGSPFRTVHAFVAANRGHYKETVLNIGSDDQPLPDVGDSQKFDDAITKIVDQMGLPPIDGGLMWARR

SEQ ID NO: 17688 - protein, 539 aa, synthetic construct
MAKNGARVYSYLRFSDPRQSTGSSADRQLQYAQRWAAEKGLVLDASLSMRDEGLSAYHQRHITQGALGLFLVAIEEGRISPGSVLIVEGLDRLSRAEPIQAQAQLAQIINAGITVVTASDGREYNRASLKAQPMDLVYSLLVMIRAHEESDTKSKRVKASIRRQCEGWQAGTYRGCIRNGKDPQWLRWDGAQWELIPERVAAVRRTLELYQQGFGKDKAAKILFEEGFTLTERGVTGLQVYRLVRLQALRGAKTLKVDGEDFVLEEYYPRLISDAEWEELQYLAGQRLRRRGVNEIPGLVTGIGITYCGYCGTAVVGQNMMGRMRADGTLADGHRRLQCVSYSINQGCSAGGSCSVVPIEKAILNFCSDQMNLQRLLQAGDDGKGLRHQLSTARVEVEKIGSQLSKITDALLADESGSAPISFLRKARELESDQAEAELRVSQLEREVAALARTGIPARAERWGELAERANALDPDARQQIRQMVMDTFERIVVYMRGIGAQDRSSKFIDVQLLSRTGQHRVIQINRRTGEWVASEDWD

SEQ ID NO: 17689 - protein, 629 aa, synthetic construct
MSMPELDTPSAFLTAPPPLRTARIEMTEDEATASVAADHPLTPANLPVGTRAVLYLRVSSKGQVETDYDPEGISLPAQRLSCTRKAEQLGLTVVGEYVEPGRTGTEMTKRVEFQRMLERISRQRDVDYVIVHDLSRFARNRIDDAIVMADLKKRGVTLISATESIDATPVGQLMHGLLAAFNEYRSAKDGAEVAMKMGQKAKSGGTLGRAPIGYLNVTDNIEGRKVNTIAIDPERAPFVKLAFELYAKGQMSFQDIADELTDRGLLTRATARWPAGPISDSKIHSLLRDRYYLGEVRYKGEYFEGRHEAIVDTKLFDRVQELLDTRGYANERRRKHDHYLKGTIWCGRCFLESETNRRMILMHVNKGTSTYSYFFCRGTQDHTCDTPYSNIDRVEEAIERHYKSIAFRPEFIQAVRALMEAAVNDQIGAQKMLQEQTRAQLKRLATQEDNLIDLAADGGIDTSRVRAKLRDITRQRKELEDELEAITDDIAPGMDYIDAHLELLTQPHELYRYASDATRRLLNQAIFTRIYVVNEEVVGDELHTPMHELLAAQRGWNAFQDSGDETLAREIAVREAARHSGIDKEKQATVAGGLLDDFISALLSNRAETVGSCSKPYMVRPKGLEPLTF

SEQ ID NO: 17690 - protein, 601 aa, synthetic construct
MNAQSPTVAVRAALYLRVSTARQAEHDVSIPDQRKQGEAYCAARGYQLVEIFVEPGNTATNDRRPEFQRMIEEGTSKPAPFDVVLVHSFSRFFRDAFDMEYYYRKLAKNGVRLVSITQELGDDPIHDMMRRIMALFDEYQSKENGKHVMRALKENARQGFWNGSLPPIGYRVVAAEQRGAKVKKKLEIDPLHAETIRLIYRLALEGEGSSGQMGVKAIVKYLNGKGIFTRDGGRWGIGQVHRVLTRRTYIGEHQFNKRSKSKELKPEEEVITVPVPPLIERETFDAVQKLLQARNPKTELPARVLIGPTLLTGICYCGNCGGAMTIRTGKSGRYRYYACSIKARQGETGCKGRAIPMDKLDNMIVSHIEERLLDPDRLEKLLGSVLGRREDQAERRREHIAELERRATESELRLKRLYDAIEAGVADLNDPALKERIAGLKVIRDQARADADRAQALLDSPGHSAISPAMIEGFARRARERIRGGEGGYRRDHLRALAQRVEVADDAIRIMGSKTELLRTLIAGQGRQSAAIGVPGGGLKWRRERDSNPRYGFPYTRVPGVRLQPLGHLSVCLAVGKPCLTVKTDCKRDTAFRNRRWLIAN

SEQ ID NO: 17691 - protein, 576 aa, synthetic construct
MEETDIRPTAYSYVRMSTQQQLKGDSLRRQLERSREYAAENNLRLDDSLHDIGVSAYTGANVRSGALGQFLQLVQNGQIKRGSYLLVESLDRLSRLQVRNALGPFIELINAGITIVTLADKQVYSDATVDENWTQLMMSLAIMSRAHEESQTKSDRLQRAAEGRRKRALAGETRFSHHMFRWFDQIEIAPDKYEYRLNKHADTVRQIYEWADAGIGQIVITRRLNEAKTPTLTGKGVWQQPTVGLILRNEAVIGTYQPVHRVNGKSQPYSEALRGYLPAVISEELFWRVQKNKRVRNSAGRKGERLTNLIGPLATCAHCQGRMLIKTGGAAKNPQKYIRCDNNYRGGTCTGPSGQFRYDKVEDAILDHVKEFHSFSAFARENNSVGKQQLQEKIARHETTLAGLEKQRKNLMAIAAIADDDATRADVMRELSDRRAREDSTKAELGILRADLITLDSSERNANSLAKRIASEREAWETGSDAEVYESRSKIAQALTQIIDFISFDMDTRRFRVIIGAGIVAYEFDKQGRLTNKFDLATSLFSIGVSPLKVEHFAQGDDWRYEKLSKVMREKQERLL

SEQ ID NO: 17692 - protein, 557 aa, synthetic construct
MPTKAYSYIRFSSPEQAKGDSYRRQRKAAEDYCSRHEIELASSREYTFLDKGRSAYKGRHLDDEGQLRRFLDLVENGTIGRGSYLLVESLDRLSREKVSTALPRFMDLLNSGIRVVTLSDNRLYTEDYNELDLIISIVHMSRAHNESSIKAQRLSSAWDNKKALARTQLKPLGRACPAWLELVDGNYQPIQQRVETIQLIFELAIAGYGQGVIPRMLNGRGTPVFGSRNRNHSGAWGSSSVSKILGNRALLGEYQPTHIVNGVRTSDGEPVTGFFPAVIPEDIFYQAQAVRTERRIHKTGGQTKRFNVVQGLIKCSICDDAMHLVNKGRPPKGATYIQCHSARKGVCKNGYIRIERIEAVLREILTKVDSLSLVQSSEGEARKQMITVTGKLEAVTQRQTQMSEDYFVSPSTNLATMIARLETEQLTLREEQKRLTETLATSQVVSKEDFFEKLDLVTFEGRHAANSLLKRLGVTISVLSEASAEQWYMVKTEARELFAIFHRSDEISTRSLDFRILDLQSLHGEIGEDDRARFEAVAEQMKKEAEKILSKLLAARN

SEQ ID NO: 17693 - protein, 566 aa, synthetic construct
MHRSTPVYAYIRMSTVEQAKGDSERRQLGQIERFLQENNGELVEPVFLDRLSSFNGKNIKKGAIKDFLDRVKKGEIEKGSILVIESFDRISRQGGYIAHSVILDIINNGVDIATLSPYKRYSIDSENQFIENIEIQTLLYRAHEESRTKSDRITRQHQNRREKAKDKKVVYGSLPFWLERTPDWIEFREPEASDVKLCLSLLKTYGMYTATAKINEQRKSSKIFSKETVSHLLNRSAVCGDLQTHKIEYDEHGNKIRVQGEVIHDYYPALISRAEFEELRAEIQNRRTTKSTGRVSGFKNIFRNVMTCTYCFAPMRLAHMKWKSGGKKYLVCTKSETNQCIEKGRLWYDYDDVERVFFNEVNLSILKKSLTQKTKIDDAEIEKLRSNFLKAEDQKSNILKAIEMGTVSKALVNRLEELEKESDEIQKRIDELKAESALKRSQNEAEIFDYEQLDAALNDEEQRAIINKILRTNQADISISKGEEGCDFIIEISIDDRLETEISYHKQDDFINRVEHDLPENQTSDLVIHEDHTDPYADEIEGQIFEVFDSASMPIIEINQHNKKPD

SEQ ID NO: 17694 - protein, 535 aa, synthetic construct
MPSAISYIRFSSSKQSDGNSHQRQMEAAQRWLINNPSYTASTMNFEDLGVSGFHGDHIKDGGGWAKLLLAVEAGHIKAGDVVLVEAMDRTGRLPALQMIEIIRPVLQAGIAIITLDDNNKFDEDSLNGPQIFLLVAKIQAAHGYSKILSERTKESYQIRKEKARKGEKVRRGVPIWLTTDGELKAHLAPYIKEVFDLYISGVGKNTIANRLRASGVPEFKTCSGPTVGSWLQNTTTIGYWDDIPDVYPAVVSKELFLQAQNRWKEVAKSPPSRTSKNFLVGLVKCGICDGNLIFHNKDGKPHSMRCLTNHRLRSNGCSNNKSIPHSVIWYIYTLTASQNFRRALEKIELTATDKRKLTVTAELEKVQAKIVRAVNALISLPDMPEIVSSLKELNAQRDTLQVELQILDRTVDEPGKSSIHFNESLVEDDLLINDPIRLNSLLKGVDYTITTYTDGLIIVAGESYPWLYTGVKRTGNRTLGYKVQYLAMEDVISPEVSFPSCGTQTENESEQMRYVLRRSHKLISVGMPVDAVYLD

SEQ ID NO: 17695 - protein, 568 aa, synthetic construct
MARLISYVRMSTSEQLKGISLERQRSLIADFASKNEFQEVIIYEDVGRSSFAEDENQKELNKFFIELEENKFDKGDVFALENIDRLTRRGAIDALLKVNKIIQKGLKIAIISDKEQRILEEIDIYSIITLSIDASRANKESEVKSQKGLINWEHKRKLAATEKVAMTKRAPSWIDTEIYTVFDEEKKKEIKRRRYVLNEEKAQVVRLIFDLTLKGYGCLKIKTYLNENNIKPFNDKVQYWEPSIIPKILKNPATFGLYQPQKQRSGKRDLVAAGDPIEDYFPPVISKEIFEQCRLIAENNFSERKGRKGEKFTNVFTGLLKCEKCGSPVHLLNCGIDKRNVSQHALIYLICKKAKFTKQCSTKRMRYDAFEASIFKAVNEINLVEVLNENNPLNELIKKQRSIETAVNKKKKLLENYEKSFIENDGEVPAFMISAAKTAEIEIKELEEEKKEILNEISSLNYYNNNLENSIEEIKNNSSYEKRAKINLLFHEIIKSISIDLEEKYSVITFKNDIQRIIDKEGFIINIDRNNALEIIEEDTTTISAEIASNPKLILEYFEKMRRDLTED

SEQ ID NO: 17696 - protein, 541 aa, synthetic construct
MSFSEIQPKVYSYLRFSDPRQSQGNSADRQLQYANRWALEKGLVLDESLSLRDEGLSAYHQHHVKQGALGVFLQAVEGGRIADGSILVVEGLDRLSRAEPIQAQAQLAQIINAGITVVTASDGREYNRAGLKAQPMDLVYSLLVMIRAHEESDTKSKRVKAAIRRQCEGWKAGTYRGLIRNGKDPQWLRLSPVGWELIPERVAAVKRALELYSQGLGAGRAANVMHDEGFKLTEWGISGLQIYRMIKQPALRGVKRLSLDGEDYELEEYYPRVLSDAEWAELQHLASQRFRRRGAGEIPGIITGVGLAFCGYCGTAVVAQNIMNRRRADGTIADGHRRLHCTSYSKNGGCSYGGSCSVVPVERAVLSFCSDQINLTRLMQAGDAGQTLQKQLVVARAAVTKITTQLSKVTDALLADESGAAPLAFVRKARELEAQQTAAEQKIAQLEHEAIATNGAVRPAQAERWVKLAAEVEAGDYSAREKVRQLVMDTFNRIVIYMRGMQTDGRNGPFIDVQLFSRSGQHRLLRINRKNGAWVASEDWE

SEQ ID NO: 17697 - protein, 506 aa, synthetic construct
MRSVITYLRYSSAIQGAEGADSTRRQNDLFKQWLKKNSDAQVVASFSDEGLSGYKGKHLTGQFGDMLARIESGEFTAGTILLVESIDRIGRLEHLETEALMNRILGNGIEIHTLQDGLIYTKDALADDLGISIIQRVKAYIAHQESKQKSFRVSQKWEQRAKLALAGEQRLTKMVPGWIDPDTFKLNEHAETVRLIFKLLLDGESLHNIARHLQSNGIKSFSRRKDANGFSVHSVRTILRSVTTRGTLPASQRNDRPAIPNYYEAAIDAATFNKAQEILDKNRKGRTPASDNPLTINIFKGLFRCQCGASVHPTGTKNKYAGVYRCNNHLDGRCDVPPLKRKPFDKWMIDNFLGMIDVGNDGEAEGKIASLQHEVEIVTARIKKATALLLEMDDIDELKIQIKELNQRRTELQTTIDSMRRKASLTDKELPQLKDIDLTTKAGRVECQLILSKHLKGLTLGKGSVTITLQNDTEITIPTNPLPLNDGSPIFEIADKELLDIDAYQL

SEQ ID NO: 17698 - protein, 549 aa, synthetic construct
MPSAVPYIRFSSARQTTGSSAERQRQMVTQWLTQNPDYILSELTYEDLGRSGYHGEHLNDDNGFAKLLQAVEAGSIKAGDVVLVEAIDRAGRLSPMQMLKRVIIPIIEAGVSIITLDDNVTYDESSVEGGHLFLLVAKIQAAHNYSKQLSDRTKASYAIRREQAKATGKVKRHTPIWLTSEGEVIEHVAVHVRQAFELYVSGVGKTTIANRLRASGVPELATCSGPTVEAWLRNQAAIGNWEYGKDDPDKPSEIIRGVYPAVVSDELFLQAQLRKKAAATKPRERTSKHFLVGLVKCGVCGSNYIIHNKGGKPNNMRCGTYHRLKKAGCTNDETIPYQVAVYIYSETATHWVDKALQQVQLTVNDKRKLVLTTERDALTTSITNLTEKAAALNIPELWKKLEEESNRRKVVEDELAVLERTPDAGGESGFSAALSQDQMMIHDPIQLSALLKQVEYSIVVYPNKLFTVSGEVYPWLYLGPKRKPKSNVTLGYRMLYLGDEIIISPDVPVTLDWGAPTDNPVEQMRYMLRRAYKMVSAPKPYEYNDDVAE

SEQ ID NO: 17699 - protein, 528 aa, synthetic construct
MPIAVPYSRFSSQRQSYGSSFHRQETLIVNWLARHPEYTRYERKFEDLGVSGSSGKHIEAGALGELLAAIEDGHFPAGTVILVEAMDRFSRLEPMDTLNHLRTIVKAGIDLVTLDDGQRYDAKSLKGNSLLYLAMKAQAAHEFAVRLSDFTVGSYEKRAIKAKLRESIKRRNPFWLTSEGELKEVVAAALEQVFTAFTNGAPLRALAIQYAQYFGNRQSLKHALRNPAAIGHWQRTVTVEVDGKKKRVDGELIKGVFKPAVSDELFFQVQKMLDDLADQPVTVARKFPLAGLLQCGDCGANMVLLRQNSRQQTDTVRCYRRMQSSDKCTNQKTIPVPVVAWFYEATRKPHAFKAYQRTKLPENKRQRIKLEGQIDQLKQQQARLRQLVLLDDGDKDALADYSKLVNERKTLEQELAALPVVADTATVGMVEFYGFLQSDPFAVSNLLQQDGYRIVCHSDGVLAVNKLASDEPALLAISYEGYSRKYKMWRVAVPEGSDIFVDRHATQQFPHHTVITTPQQWKEHIGDS

SEQ ID NO: 17700 - protein, 600 aa, synthetic construct
MSYAKEQVNAYIYSRVSKDVQVHGDGIRRQIEGAIRFVEKINQDNIQKGIPTYKIADEFITDKGLSAYKGFNTAANGGLGAFLEAARKGEIKRGSLLVVEAVDRISRMPADESRKTFSLFKQYGIDVAIVKFGIIIKHSESTTLENDLLITAAIHLAYMESQQKSNRINDYFDKKRLREKEGGEKRTSICPLWMKLSEDKKSFELIPDRARVMSRIIDMKLNGIGCHRIASTLNKEGVPYFNGKTWSTTIVTKYCKMIQLYGAFQPVKHVRTDSGTQKKPWGDVLQNYYPAVIDEQTFLRLKNSFKRTGGRQTGAYSNLFSGLLCCPECGSGMSYFKPNRGKQKIRCRKQIDKQGCFQRALDYEEIENRLVKALAGLDYAKINNNSFASLSEELSSLEANIAELRENIEAVSAQLMENSNPRLYDILIEKLTKLDDEICIEQDKFNELSTLQSNYDASIINSLQLDSNEDRARYNHFVKQFVKYIICTDKKQGGPLRVVFKADTVGELPFNFDDEKNDKAVSEVFTANRSISDTETVRLINLDKSSGMYLSTLKDITDVKQPNDLSDSRELIRYMHAVRMAVRRNPNKWKGIAAQAKLRY

SEQ ID NO: 17701 - protein, 559 aa, synthetic construct
MTQRQIYSYQRFSSPEQARGGSIQRQDDYAKRVAKEYGLTLNEDLIITDRGLSAFHAQHKESGAYGAFLEAVKQKRVATGSILIVENFDRLSRENARKAQRDIDDLIDNGITIITAHDNQLYNTESIAKNPYQIFVMVATMIRAHEESLTKQKRSVSFIHQQVKRFNKEGIADIAGAVPFWLDRLADKQGFVFNKHQSTMQLIIDRFLSGTGLMTISRELAELGIKSPSGNDRWGVTTIGSVLDNTALYGRKKFKLTYLKDGIEVVEDHDLQDYYPALISKDEFEQIKLKRKKRKGSRESYGEVVQLLTGYGKGRTVCGVCGYGLGSQTQKQKNRAGAYTKTVRRLHCLRHKERGDCCSSIIQDNLEATVIDQLEVFVDLSLLSGKVTDEAVYQTQLDDIEARIKLMVQNIMMADNAEMMQMLTDKRAELEVQRNELKAIVNSSKSPSVSQSDIDEFQQVVDKAKDLKNTKERRVIKSLLMNSMKQLRVWMQPNKLDCYYVELDFQSGQTLGVNIKQDSYEVLSAYVYQTGLKTEMDIENDYLEAQKAIASAKAELAEK

SEQ ID NO: 17702 - protein, 673 aa, synthetic construct
MIGEETLREEIFQYDKAKFKGICVPYARFSTKGQSKVGKKSLERQLSKAREYAKRNNLFINEDLIFTDKGVSGYSNQGELSKAFKKGQMATMLLLLEEVPPEERDNIYITFHNFDRFSRMSPDAAQAHFNKILNRGFKIVTTIDNQLYDRRDKGMSNMLISIIKMTTAWQESLNKSIYITDALSRKKKVIEYLYNHPSQKGKHKHIGVVQPSIPRWIDQENITYEYIDADGSKRTDTFKKFSLNQYKAEVVRKIFELKIAGLGYTRICQKLNNDGVEVFEQGRFKKAKKWHPYAVQNIITSDKVLGHITLKEMVTEEYHCKETDEIKTKKVKKEVTSKLENYYPAVVDEEVFRLANVLKFQEKKGKPLGRIGERTNIFATFMSCYCGATLQYSRSQINKRSNKAPVYREQLRCNNALVKNGCFDDYINYVELEQAFFKYVHHIDFREVCLVGDKSLETEIKNLQAEITYLNGQKKELKLKNSGLEKTFESAISQGLNADYVLVALNEAKKSADLIETKINDLKVRITKLQLSLDSKESDFLDIVEYSKRIKNSSTETKIMMRKKLNDFLHSKIKWMEVCSSKHSKFVILCFHDDVIRTFAYSENYANDLMFNTIKISYEVEDSQLNYELFLIYIHQIKRSLRGETEVVSNGDLIEALQRLKRKFYAGKGIDYV

SEQ ID NO: 17703 - protein, 653 aa, synthetic construct
MFDYDKSIFDGICIPYARFSTTEQDKVGRKSLERQLEEAKRYASQNNLYISDDLIFTDKGVSGFAKQGQLSKTFEKGQMALLLDVLEDVPFKERENIYLCFHAFDRFSRQHPEVAYEQFSRILKRGFNIVTTIDDCLYSSKEADLESMLISIIKMSSAHYESEVKSVYVSDAHRRRRETLEYLYNHPTQKGKHKHIGLKQSTTPRWIIESEIIYDFVDDNGVARKESFSKFSLDEAKAEIINQIFDWKIQGLGHTKICQLLNQKQIPTFEDGNCRKAEKWHTFAISNLFKNKSTIGTFTLKTVEDEEYFCESERIFKTRSKKVDATSEMENYFPAVVTVEKYEAALKIIAMNNKGEKRSEPEDKTHVFSKVLRCTCGGRLVFKGTRKTGKSEKADWFEYLRCEKAILKDGCDAENIIYKDFEMAFLRFATSSNYTVFSTTQSKLKTKLKRLSIKQSYLNSEKEQLLLEEKGLNKTFESIVTQNLDATLLLDSISKNKSSLNTVQNELVKIDNQVKGVEREYKKSGKPIDKRTIKKELRSEDYSKRLLMRKAVNQQLRQNVVHMEVCSTKLLKFVIVCFDDYVIRTYAYQDEFSSDLMFNFIKINVENLDESEVYDLIIHLFKEVRISLSGENAVITNFDLKVHLSGIKEKYLK

SEQ ID NO: 17704 - protein, 655 aa, synthetic construct
MKPTIITYLRYSSKQQADGLSEFRQSEINRKFVEKFCAEHDVDLNEVISLKDLGVSAYRGLNLTLGSFSQTIKKFKSGEIKKRFNEDGEINTYLIVESLDRITRTGPFKSTQIFTELLEYTNIVVLADGEKKIYSKKSIDSTHGMMDLFMALISLQRSHTESLMKEYRSRKSWEKKREDLLNYFTLPEEDRVGLERPKNATAMCPFWLTAKKDGRGYDFIPENKKVMDFLIEKLLDGNGMTRAVRLLNDEIDAGNLKPKLKKANRKTRHFRAAAYSGLFNSEISTVKGDYLLTESYYPTEDDIEQGKYPEKHLGKRVRKEIAVLKNYYPALMTESQAAYIRKMMDERRSAGTKPNKSIKNLAQGILRCPHCNSTYIKSKDRRNVYLRCNLAREGLCNAKVIKHGVFEHNLLQFCKGLNINKIISNQSSDQVIDSSLKELEQKMMPLKVKKSQLEDDIEQIVKNISSIKIPSLLEKVQDDYLKKENELKKVVQEIDLIETSIMKLQHQIAMSDGDNSLQELIDLTLDEHADDEIRQRFNVELKKVVKSMTVLYRDTEDNPFGYHMISIQFLDGVHRLIPVHEKMTDKIHNILPYQDAVKVDSVDFSETVILPEDYVEGREKGKYPNLDGMAKYYQENPTKYLRLKHKIDQVHEIHA

SEQ ID NO: 17705 - protein, 534 aa, synthetic construct
MSNFNMTPNQPPAKCYSYVRFSTVSQGKEGKDSYIRQTLAAKEYAERMGLEYQDKSFSDLGISGFRSSKKRDGLSSMLEAIQSGAIEPTSTICIDGFDRLSRASFEHTYDTVRLIVGTGVKLHVVQDDMTLDKSSLNDLISIVRLALQSDLAHQESAKKSYLIKQSRLRAREAHRVTGKLPAWIKRDDSTPTGFAFNEMVDCIKELVRLRVEGKSLQSIAKNLNAMGYTTTTGAPWSSAGCRSIIESRALHGSKSYHETDPETGRMLLEPVDIVAGIFPALIDFDVWKSIQQKSKSAPTKVTKVSKKGAYSGLLRCGCCSAGMVMRTTTYTPKESGVPEVRMYRKCIRATEGSCTQTEQVREPETYIDLALSNLKYVTSEKRHVSRVPEIREQIATLEKTEDILLQRGMAEKLADLYMKIDDLKTKLVKAQEEDSKHKVPTETSFAKVIEIKDLEHRNMVLRGLLRGVYFTLLWKYKTQSKWKVTIEQINGLKTTFILSQKHGFGNSHIELLADPLRWTNLVQSDLEPWEVDQN

SEQ ID NO: 17706 - protein, 570 aa, synthetic construct
MEYVAYLRVSSYSQKEKGDSIDGQRNSITEWIENRGNNIIKWYIDDGASAYKGRRNNFELMLHELESDIIKADGLIVYSLSRFSRNLLAQLEATKVLQKKGIHLVSATEALPESYEDSYVMSSILGLMNEHYSMQNGKVVRDRLKDTAMKGYFTGGPIPFGYHSVTVSGVTSKCRRKLQILAEEAELVIEIFNLSEKGINGKPLGVKSIAEMLNKRKCYRRGTKWNRNSVCRILKNRSYIGEFIYNSSDSEPIVVNIPNIITKDQFYNVQAGLKSRDIFSFESRRIRSNCLLTGLLKCGVFGASMVVTSGKSGKSGKYSYYQCSKQVRHAPDSCTSKRIRRDKVELLVKDKFMNELLAEAHLKTIHCQAKQHLKETSKLLSADKTKLSKRISNLETRYSRLITMVADGDLVPDVRINKTITDLSTQLDVLEAEMAKLAVRINLPVKNFGEARLVEVAAAVQKYLQQIDNEALKQLMLATVTSVKVVEATKKLIFEGSNMAVLYLIANAKTGTNFSVPAFITKWRRDRDLNPISLKTYIYQALEFISFLRLSIKCRVDSCESRLVYKNSLT

SEQ ID NO: 17707 - protein, 481 aa, synthetic construct
MITTNKVAIYVRVSTTNQVEEGYSIDEQKDKLSSYCDIKDWNVYKVYTDGGFSGSNTDRPALESLIKDAKKRKFDTVLVYKLDRLSRSQKDTLHLIEDVFIKNGIEFLSLQENFDTSTPFGKAMIGLLSVFAQLEREQIKERMQLGKIGRAKAGKSMMWAKTSYGYDYHRDTGTITINPAQALTIKFIFESYLRGRSITKLRDDLNEKYPKHVPWSYRAVRTILDNPVYCGFNQYKGEIYPGNHEPIISKEEYDKTQSELKIRQRTAAENVNPRPFQAKYILSGIAQCGYCGAPLKIMLGVKRKDGSRLKKYECHQRHPRTLRGVTTYNDNKKCDSGFYYKDKLEAYVLKEISKLQDDADYLDKIFSGDNAETIDRESYKKQIEELSKKLSRLNDLYIDDRITLEELQSKSAEFISMRGTLETELENDPALRKNKRKADMRKLLNAEKVFSMDYENQKVLVRRLINKVKVTAEDIVINWKI

SEQ ID NO: 17708 - protein, 600 aa, synthetic construct
MKKDVKVIKGDTTLKRTASGCVQRSIKRVAAYCRVSTDTEDQINSYNSQVEHYTEFIQKNKEWTLAGIYADEAITGTQVDRRIDFQRLINDCMNGDIDMIITKSISRFARNTLDTLKYVRKLKEFNVAVFFEEENINTLTMDGELLLTILSSVAQQEVENISANVKKGLRMKMERGEMVGFQGCLGYDYDPETKSISINEKEAEIVRYIFRRYIEGVGGMVISRELEEQGYLSPRGNKRWTETTVLGIIKNEKYKGDLMMGKTYTVDPISKRRLDNFGEQDKFYIENHHEPIISEEDFEKAQGIRLRRSKNRNTVANNGGKREKYSRKYAFSSMLECGFCGHNLSRRNWHSSSEYTKVIWQCVNATKNGKKYCPHSKGIEEEAIEKAFMESYRQVCHNNVEITNEFLKTVEEELKDNSLAKDLKKITNQLDKILKKEKDLVELRLNESISMDIYQDKYNEIAISKEKLLAEKRTLEVTLTDEKALKKRLEGFKKLLESNKYLEEFDRAVFESIVDKIIIGGTNDEGEIDPAMITIIYKTGKKDSQDGRLFKSRRKNAKEVNEETDNKLYPHSSDEVNNLYSYPIDNTRRDGSTFVQTRCR

SEQ ID NO: 17709 - protein, 537 aa, synthetic construct
MKQQIYNTALYLRLSRDDELQGESSSITTQRSMLRLYAKEHHLNVIDEYIDDGWSGTNFERPSFQRMIEDIEAGKINCVVTKDLSRLGRNYIMTGQYTELYFPSHNVRYIAIDDGVDSEKGESEIAPFKDIINEWVARDTSRKVKSAFKTKFAEGAYYRAYAPLGYKKHPDIKGKLLVDEETKWIVEKIFSLAYQGYGSAKITKVLREEKVPTASWLNFTRYGTFAHIFEGKPESKRYEWTIAHVKAILKSEVYIGNSVHNMQSTVSFKSKKKVRKPESEWFRVENTHEPIIDKEVFYRVQEQIKSRRRQTKEKATPIFAGLVKCADCGWSMRFATNTANKTPYSYYACSYYGQFGKGTCSMHYIRYDVLYQAVLKRLQYWAKAVQQDEEKVLNKIQKAGNAERIREKKKKASAFKKAENRQNEIDRLFAKMYEDRACEKITERNFVMLSSKYQKEQIELEQQITNLREELSKMEQDMIGAEKWIELIKEYSVPKELTVPLLNAMIEKILIHEAITNEDNERIQEIEIYYRFIGKVD

SEQ ID NO: 17710 - protein, 404 aa, synthetic construct
MDNIKRVALYIRVSTEEQALHGDSIRTQTEALEQYAKENNYIIIDKYIDEGYSATNLNRPNLQRMLTDIKENKIDLILLTKLDRFSRGVKNFYKILDILEKHKCDWKTILEDYDSSTASGRLHINIMLSFAENEASQTSERIKFVFNNKIQKKEVISGKVPFGYRIENKHLVIKEDEAEIVRESFDTYIKFSALTKTIQHINSKFKVSKNKFNIDYIFAGMIVCNSCGRKMSGVYGLNPSGTLYLHYRCSLSHGTKLCNNTARLGEKKVEAFLLENVKTELYNAILKHESNNKKSSNKNDTEKLKNKLKKQIEKLQDLYFDDLISKDNYRFKYKKLNDDLIELEKKENEEKVIINDLKKMKNFLKINFEDDYVNMSSLEKRTLWTSLIDRIEVQKDGNLVIKFL

SEQ ID NO: 17711 - protein, 524 aa, synthetic construct
MAKKVTTIPATITKFSQTPINRVTKRRVAAYARVSTEQEEQQTSYEAQIDYYTNYISGRDDWEFAGMYSDEGISATNTKKRVGFQTMVTDALAGKIDLIVTKSVSRFARNTVDSLTTVRQLKEKGVEIYFEKENIWTLDSKGELLITIMSSLAQEESRSISENVVWGQRKRFADGKVTVPFKRFLGYDMGEDRNLVVNPEQAKLVKRIYGMFLQGKAPHTIARILTEEAETLTPAGKQKWNPSTIKSILTNEKYKGDALLQKSYTVDFLTKEKKANEGEIPQYYVKGNHEAIIQPEIFDMVQKQMALRTKGNNRRRSTSIFSSKLICGDCGNFYGSKVWHSNTKYRRTVWRCNHKYGNDEKCQTPHLTEDEIKEIFIKATNQLVDIKDEVISNYEEMKEMLFGTVELESEQRQLEDELNEVAGLIEDCIKENARVALDQAEYEKRYNGLVERFDKANERLEEIKAQIAERQARGQQIEMFLKDLEKVGVVKEFDDDLFLALVERIEVGREKVVVRFKDGTKVEG

SEQ ID NO: 17712 - protein, 596 aa, synthetic construct
MKVIQKIEPTKPKIAKRKRVAAYARVSVDKGRTMHSLSAQVSYYSKLIQKNPDWEYVGVYSDGGISGRTTESRNEFKRLNKDCEEGKVDIILTKSISRFARNTVDLLETVRKLRAINVEVRFEKENIHSLSGDGELMLSILASFAQEESRSISNNIKWSIQKRFKEGKHNGRFHIYGYRWEGQELVVEPKEAEMVRLMYANYMNGLSAEFTAKQLTKMGVMAMKGGPFKATSVRQILANITYTGNLLLQKEYTADPVTGKSKLNKGELPQYFVENHHEAIIPMDEWQAVQDERQRRRKLGAHANKAINTSCFTSKIKCGNCGISFRRSGKKQPKGKPTYYIWTCRNKSENGVKACDARNIPEKLLKKACAEVLGLEEFEEEVFTDKVELLTPLEGDILRIKMKDSTTVDKQWTGNLRKHYWTPEVRRAWSERNKRKESSIFNGRFAEFTGFVICGRCGVNYRRQSVTYADGTVSRKWHCSNFASECKPGERRNSIEEDILKAMVAEVLHIPAFDEPTMDEHLTRISIIDTEVTFHFKDGHTEVRAYEIPKKKSYAQSDEVRAKQSKARKKWWEEKKCGKESNNDTSNNHEVQSDTD

SEQ ID NO: 17713 - protein, 560 aa, synthetic construct
MNREGKKCVLYPRVSTEMQVDGYSLEGQKNSLKRFADREEMEIVGVYEDAGKSGKSIEGRPAFKKMLSDIKNGLEIDYILVYKLSRFGRNAADILNSLEFVQSYGINLICIEEGIDSSQTSGKLLISVLSAVAEIERENIIEQTMNGRREKARQGGWNGGFAPYGYYLENNQLLIEETEAKAIRIIFEKFGNSDIGLGGVAKYLNLQGIKKIPRQNGKLETWSSHFIRQILDNPVYCGKIAYGRRTREKVKGTKNEYKQVHTDDYILEDGQHEGIVSAELWEKVRAKRIATGIKQPSKVGKDRSHLLTGVLKCPMCGSSMYTNKHAWTNKDGTYKEVYYYICGRNKQERGHHCDYKASLRKTDIEPLVIEAVKELVSDKYFAREIKSRIGIQTDTGNVDKEIANYESKLKEVDLNKARLEREIDNLPADARYRERKIHDMTLRLDGLYDTIVELEERIEDAKLRRSSIEMEAITLENVYKIMKNFGKLYAIMSDEEKKSVISYLIKEIQIYPNGESEMPLKSIEFNFPIYRDGKEVRKVLWERGNTVEPCTNCQGNKCNN

SEQ ID NO: 17714 - protein, 541 aa, synthetic construct
MRIYIYSRKSVYTGKGESVENQIEMCREYISTKIPESDNAEIVVYEDEGFSAKNTDRPQFQQMLRDIKLNKPEYVVCYRLDRISRNVSDFSSLIEDLNSYNISFICIKEEFDTSKPMGKAMMYIASVFAQLERETIAERVRDNMLMLARTGRWLGGTTPTGFTSEKIQEIIIDGKIKTSCKLKDNPEELKAIDCILEKFLELRSISGVSKYLIKQGIKSRTGKMFSLLGIKEILQNPVYCIADEDAWEYFTEHHSDVCFEKTDCSNKYGLLAYNKRDYRKKSAPRQDMDKWIVAIGKHKGRISGKKWVAIQNILKDNIPTGKKPAIMHNDYSLLSGLIFCDKCQSRMFAKQRSGKGGNRELYDYICNNKLRGGLDLCDCQNLNGQQADDIVCEYLMQYTDENSGIYKLLEKLKRDLQGQTQKSPVAVIDDKIKKCNSEIDNLINTLSHGNLGAAFIERVNSRITELDKELASMKEEKARLQKDVNIIADREIQVDMLSTALSSFKDNFHTLTIEEKRTLIKLMVKKIVWDGKDLHIFIDGE

SEQ ID NO: 17715 - protein, 544 aa, synthetic construct
MDTEPRADRQTLEALGFSPEELQELGLWEPPTGAPNDLADVYLRRSKKSDTLSVLREQLRRMVRRVHDHNRQVRHVWFEQRSASKAYVKREEFDKANAAVLSDRASTALYVYKVSRLSRRGAGQVGLLLDSYDEAGAYIYVVSEGLDSRSSRMILTMLSEQAREQVRDLTDFVEIGIAAAKAEGRWTGGVTPYGLRCEPGSGKLSHDPAEYPTARRIAEYLVANRTPGWVKDKLNSEGLTSRSGKPWSTTGIIALAHSVSWAGLVPKRERALINGKYVGKYHRGGEPLIGPDGMPVRCGEGVITPAERQKILANLASRSRPGSPIGDRSRGKRETKALLLGWGTCGRCKGPYRNDGPHYRCRNRKELGATVCIGSSANRQAADDAMAVLWINHITALPPDSPVILAIAREWLSYQNPEASARRADVQAALESAVRRELTLGKERFVIGRMPEAVYETLYAELTAQIESLKRELAELDTEPDLTPLMDPLSVIDLWNDQDVAGKRALIGAALESVEFRPSKGRGYREPMLDRMTPRWKHQGGGAW

SEQ ID NO: 17716 - protein, 531 aa, synthetic construct
MAKKTAEEFRDGSPEELAGKAPEDLVDLYLRRSKKRETVETLKQHARDLRREMDRQGLTVRKVWLEQRSASKQHVRREKLEGAMAAVMDGEIKTLAVWKTDRFDRRGMAAIGTALDEFDRRQARLFVLQERLDSSQPGTRIVFAILAERAREEIKDLTLRVTTGKNAARTAGRWPGGRTPYGVRSPRGSGHIEPDPAEYPHARRIADELLAGKSAMRVAHDLERDGIRTRDGARWDARAITRMVRSTAWAGLLPTKERRFDEHGQPLDIWVPSAEPVRDAEGNPVVIGTGVVSPGERLRILALIEARITKMGGGSRGKRPHTTFLGGIFSCPHCGKGMTGSGSGTARSLMYRCRTRSVYGKDACPGVVVRAPRMDAAVEAMWLSHVSALEHGSPGLDAIVRRWAVFHDVEKEQRRKEVMAGLDAARTRRDKLEHDFYVEGMLSEDRFKTLAAEQSAVIESLDLEAAELAREADLSVFFADGEALADAWAESTLADRRMLLGCVLKSLTIVPARFPGDRTPILGRVVPQWVA

SEQ ID NO: 17717 - protein, 618 aa, synthetic construct
MESASPGLRVLGRLRLSRLTDESTSIERQRETIQRWAESQGHTVVGWAEDADVSGAVDPFDTPQLGQWLNHRVEEYDVIAAWKLDRLGRNAIQLNKLFGWCLDHNKTLVSCSESIDLGSWAGRMLASVIAGLAEGELEAIRERAKGSRVKLRESARFAGGKPPFGYRKKPRPGGGWMLEIDDSDNGDESPAGLVQRIVADVLDGKPVSRVVSKLNDDGYRTPRDYYETIKSGKPSLKLAVGEKRASEWRSTALRNLLTNPALRGYVHHKGQVARGDDGMPLQLADEPLVDADEWEALQAIFDGHRERRSHYRRPDASPLVGLVFCYWCHAPLWHNRNVSRGHEYFYYRCPSIQQHERASMIPAGQAEKAVAESFLDEAGDLPVMERVWVPGDSAEQELKEATTALDDVFAELEAAKSEITRARARKRIAALDERISILEAKPKQEARWEYKQLGGTYRDAWESLGEAERWQLILKSGMTFAFGLTDKGRGPNSVWVSSVYTPEPLRQTLVSGVTQRRTLADADPHRDVNPADHTKHLPERWATMREAGIQGIETREDKTVVVLKTGERVEIPNWLDEIGISEITNDDDVRIVWTQDGRGWHQHSDGEWIEVPLGEPEE

SEQ ID NO: 17718 - protein, 481 aa, synthetic construct
MKTMNKVAIYVRVSTTNQVEEGYSIDEQKDKLSSYCDIKDWNVYKVYTDGGFSGSNTDRPALESLIKDAKKRKFDTVLVYKLDRLSRSQKDTLHLIEDVFIKNGIEFLSLQENFDTSTPFGKAMIGLLSVFAQLEREQIKERMQLGKIGRAKAGKSMMWAKTSYGYDYHRDTGTITINPAQALAIKFIFESYLRGRSITKLRDDLNEKYPKHVPWSYRAVRTILDNPVYCGFNQYKGEIYPGNHEPIISKEEYDKTQSELKIRQRTAAENVNPRPFQAKYILSGIAQCGYCGAPLKIMLGVKRKDGSRLKKYECHQRHPRTLRGVTTYNDNKKCDSGFYYKDKLEASVLKEISKLQDDADYLDKIFSGDNAETIDRESYKKQIEELSKKLSRLNDLYIDDRITLEELQSKSAEFISMRATLETELENDSALRKNKRKADMRKLLNAEKVFSMDYEKQKVLVRGLINKVQVTAEDIVIKWKI

SEQ ID NO: 17719 - protein, 533 aa, synthetic construct
MKRAVIYARYSTDLQNDQSVEDQIRLCEAHAEKLGLNVVGELFDRAKSGASMFGRPGLARLMQKADADEFDVLVAEHPDRISRDIADLAHIHKTLRFRRIEINCVNGGAMDTVQIGMYGVVGQMQREEGAKKVKRGMVGVVRSGRNAGGRAYGYRHVPGRKGELEIVEREADVVRRIFSLYASGIAPRAIAATLNDERVPAPRGKRWNASTLNGNGRRGNGLLLNPIYAGKLIWNRVHMVKDPSTGRRISRINPEIEHEEIEAPHLRIVDDALFEAVQNRKASRGGAQSRSTPKYKRLLSGLLRCGGCGGGMAINGSDRSGPRVICSTHKESGSCGNGARYYVEKIEQQVIDTLRAQFADTRIIDIYVKEYDAERRREAAEKRRNRATFDRELEEAKTAITRIVERLAKGLIEDDDAAAILPGLRANRDRLQRELETVEPPSNVIEIQPRSVRAFRENIERLAEVISKRGETPPVELAQSFREMIAGVIVEPRKAGEPYRIEIKGYVSGLVSPELSSVLMVAEEGFEPPTQGL

SEQ ID NO: 17720 - protein, 562 aa, synthetic construct
MKNIRKKQPSIIEVHKKVAIYIRVSTHHQIDRDSLPFQRQELENYCRYLLNVTDFEIFEDAGYSAKNTDRPKFQEMMTRIRAGEFTHLLVWKLDRISRNLKDFTEMWEELKDYNVTFISKMEQFDTSTAMGEAMLKITLVFAELERKLTGERVFSIMLDRAQKGKWNGARVPLGYDWDNENKQVVINQAEATLVQQVFDKYEEFGSSAKVAIWLKENCKQTKRGGDWYPKGVNDILRNPIYTGTLRWNYRVGGRGTYKPDDEVITVENAVPTFIASEQYERVQLMLDDNFKGQRSNRFKKHIHVLSGLIKCGYCDRPYLCNLATRPHKYDYLPTYYRCAQSLQSRSCTNKAMPGLQIEPFVLGYIRAYMIASQKRKNIDRELLLAFNHEDIMYIDVSQTAHAEVLSAIAETAATTTTQVEDDKLAELKQQKHRTEQAISRLDDAYYFADDMDTMTKGEYLVKRSNFVQRLNQIDKQITSLASMTNKPTVNNIDLTRQFILYQGLFSAENLREALPFIDRELAQKCVQEVISEITVMDGRVTQIQLRNGQVHKFIYKSVIATP

SEQ ID NO: 17721 - protein, 522 aa, synthetic construct
MELLNVCIYLRKSRADQEAEARGEGETLARHERILLDLAKKRGYNVGAIYKEIVSGETISARPVMQQLLREVESGMWDGVLVVEVERLARGDTIDQGVVARSFQYSNTLIITPLKTYDPNNEYDEEYFEFGLFMSRREYKTIRRRLTAGRESSAKEGKYCGSKPPYGYSRVKLVGEKGWTLQPVPDQAEIVKLIFHLYVHGVAGERIGMAKICRKLNDSGIKTMDGGLWTISRVQAILRNPVYEGMIRWNSRKAVKHIKDGQITISRPFAQDYILVKGRHPAIVSRELFQQAQDIVNKNPARPLNSLHVLRNPLAGIVRCGKCDHVMTRKSPNGRQGDLIRCPYSSCSNISSKLPLVEKALLDGIQELVDGYRLNNSVSDQKYSLSISEREKMIQGKLKEIDILKKRKQRQYDLLEQGIYSTEEFLERSRATAAELSACDAVILSLKQEIEHEQELQFQRSSFIPKCEDLLANYWTWDTSTKNRFLRELIEKAVYTKNAKNTWKNGDDISFTLDIYPKIQQK

SEQ ID NO: 17722 - protein, 471 aa, synthetic construct
MTRPAALYIRVSNHLLARDDRYGLARQEAEGRAYAARQGFTIPEGALYTDIITGRSETRKGLEQLKAEAGRYSAIITSEADRLGRTPLAGHKILDELLGLGLQVHNAVDGWYNPEDDSSVLTYDVRMLLAHQELRQIKRRMLGGKLAAAEKGGIIPHHWRCYGYREVFTLEGGRPVRRIEVDEAEAEIVREIFRRLVGGETTGKIADDLNARGVPSPMNAIWHLQRVWYIAQNTAYKGEARMTLRHAKREFIFAVPALVDADTWQLARDSLRRKPKKHTDIFWLNGILRCAECGGAMSGTNTQSNRTSYRHYRCSRAFKHRHYGDTPTCSQRTHYRMNDLHAHAERIVREIAEHPERYMTAAAPPVPDHSRTLREIERLEGQLKRYLADYQRELLTGDEYAGLRDAARQQIEALRAQMAPPPVVTLPNMAATLEAIGRLVREGVPTREVLLRSGTRLSIAPGGVLEVVLRV

SEQ ID NO: 17723 - protein, 463 aa, synthetic construct
MRRKTTAPVEKILLRVAIYIRVSTDKQVKDGDSMRDQLATGQKYIDSHENMILVDTYIDDGISGQKLKRDDFQRLIDDVRAGRIDLIIFTRLDRWFRNLRHYLNTQDILDKHGVSWTAIEQPYFDTSTPHGRAFVNNSMIWAELEAQNDSDRILGVFDDKVDNGEVLSGSTPLGYKIVNKHLVPDDDAPTAVAIFQYYRKTGNLSMTLRYMESEFGLVRSAASLKNMLTNTKYIGEFRDNKEYCPAIIDHDLFYDVQRLLKINIKSGKKHDYIFSGLVVCDDCDHIMSGCQQRARGRVRADGTRITYKYSVYRCRQGVNLHRCPNRKLVFETTLESMLLDRIRPELEKYIAEYEVANLPALRTDAKRRSVEGKMQKLKDLYLNDLITMDEFKLDREKLLMQLEKINAEDSRPVKDLSYLKNFLKMDFESVYDSLSIPERRELWRSIVKEIRVDHDKNIHIIFL

SEQ ID NO: 17724 - protein, 547 aa, synthetic construct
MTLIKVACYCRVSTDSKDQANSFENQQTYFLNVLEHSKDCKLINIYADQGLTGTKLSNRPEFNKMLKDAGIDIIEQFTSKDRRLKKKHILYEITERPPLFTEIWIKNTSRFARNTLSFEIINLLRNKGVHIKFIEQNINTKDISSDFLLKLFQLFDEQESRDKSSKVSFGIREGARKGTINANSRLYGYNYIQAENRLEIIPSEASVIKTIYKLYSQGQGIRRIINYLNDNTIMTREKKPFCKSTIKRILTNEKYAGINARLKYDTGKVFNKYSYPQVKPKDQWIIQESDKIPSIISKELFYSVQTMLQSKINHRNQIGIYKGITDYAGIILCGKCGNPYISNIDRGRRFYNCKTKKLKGTGACNNKNISENKLNTYITSENYRRALYKYKVMYKSVLEDMVLQLQQRINTDSNLQAQQLGQELNKYKAQQSKLLNSYLESIIDESIFKQAAAELKNKITETEYKIKELTKPNNEIMNDIAYIQNTINDIDSLEIKEQYTRDEIIAGIEKIIINDDKVKVYYKVAANIRQLVKKHDLENYFNKLLGE

SEQ ID NO: 17725 - protein, 522 aa, synthetic construct
MEVSKNITVIPARKHRRAEPGEEKPKLRVAAYCRVSTDTEEQATSYETQIDHYTAYINGHPDWTLAGVFADDGISGTNTKKRDEFNRMIDECMAGKIDMIVTKSISRFARNTLDCLKYIRQLKEKNIPVYFEKENINTMDSKGEVLLTIMASLAQQESQSLSQNVKLGLQYRYQQGQIQVNCTRFLGYTKDENKHLVVVPEEAKIVRRIYREYLEGASMLKIARGLEADGILNGAGNSHWHTSNISQILRNEKYIGDALLQKTYTTDFLTKTRVKNQGIVPQYYVENSHEAIIPREIFMQAQEELVRRRLVHKSPNGKNRVFSSSHCLSNIVYCGGCGEFYRRIHWYNRGKKSIVWRCISRLENTGLYCDARTVPESQLEQVLVKAINRTLCDKDDFLKILQRNIETVLSHGNDRALADIEKRLKELQAELLKLAVSNSDYEKVGNEIYRLRDEKQKALMESANRDEAKKRIADMSAFLREQPAALTQYDEPLVRRLIEKVTVYEDKFTVEFKSGVMVDVEE

SEQ ID NO: 17726 - protein, 523 aa, synthetic construct
MKKVTKIDSRAVNPIWENEKPKLRVAAYCRVSTDSDEQKESLETQIRHYESYIKANPAWTFAGVYSDEGVTGTKKEKRPELLRMIADCEDGRIDYIVTKSISRFARNTTDCLELVRKLQKRGIFICFEKENLDTGTMESEFMLSILSGLAAEESASISQNNKWSIQSRFQNGTYKITCPPYGYDSVDGMLVINERQAKVVRFIFSEMLTGKGMPKIAEELNRQRIPAKMGGLWKAASIRGMVVNEKYIGDAVFQKTYTDSNFNHRRNDGEKEKYLIQNHHEPIVSREDFEAVQAVIVQHRREKGINPKQTKYLNRYPFSGKIVCGHCGGTFKRRTHAYGRHKIAWCCGTHIQNIKRCSVKYIPESALECAFVTMMNKLIFANQTVLKPLLFSLRGVNADDGMERIGQLEKSLEENRRQQEMLVSLLSKGYLEPAVYKKSNNELLREAERIQHQKDSISRLLNCDSQYLTEVSELLQYCTKAIMLREFDGELFSRFVERIHVYSRTEIGFELKCGITLKERLVV

SEQ ID NO: 17727 - protein, 531 aa, synthetic construct
MAATARAVTVIQPTVIHRIPFSAENRTARKRVAAYARVSTDNEEQLSSYEAQVDYYTRYIHDNEEWDFVEIYTDEGISATNTKKRDGFKRMIADALAGKIDLILTKSVSRFARNTVDTLTTVRKLKEKGVEVYFEKENIYTLDSKGELLITIMSSLAQEESRSISENVTWGQRKRFSDGKVSLPYKHFLGYEKGEDGLPKIVEAEAQTVRLIYKLFMEGKTPSGIAKHLTKSGVPTPSGKSNWPSSTVESILTNEKYKGDAVLQKTFTVDFLTKKMKVNEGEVPQYYVTNSHPAIISPELFDLVQNEMKRRKSTAGHQSGTGCFSSKIICGECGGVYGSKVWHSTSKYRRTIWQCNNKFKNAEPCKTPHLYESTLKQAFVNAFNSLIQNKSEILDGYDTIIQSLTDNTALDAESAALQEECDVVMELIRKCVDENAHSAIDQSDYQQRYTPLIERYETAKGKFEAVNEQRQERTVKREKMAGFIQTLKKSATLLTEFDEELWYATVDRIIVQSEHEITFQFKDGTELPWII

SEQ ID NO: 17728 - protein, 569 aa, synthetic construct
MKQSNNKKHNMDTAALYCRLSRDDNLDCESNSITNQKAILKKVAKEKGYEDIQFFVDDGISGTTLDRPGFQQMIKAIEAGYISAVLVKDLSRLGRDYLKVGYYTEEFFPAHDVRLIAVSDGVDSDEGDNEFTPFRNIMNEWYAKDISKKRRIVNKLKGNSGVPLSPPPYGYMKDPDNAKRWLVDEEAAVVVHRIYQMALDGYGLSEITAALARDGILNPMSYWQSKGINRGGTKSSVPPTQWGHTTIRKILTMQEYCGDVINFKTYSKSYKMKKRIANDEENRVVFSNVNEAVIDRETWEKVQSLWRGTRRKKPTVSGERSIFSGLLKCPECGGNLNYHFNQGNHDIKFFSCCNHNTGYRKCTSTHYIRLDFLEQVVLQEIHRLTQFADEYEDDFVKEIIGHSAKTAACERSLRQRELDGLLARDKELDVLFECLYEDNVSGKIDDARFSKMAKRYEQEQGENAAKVKALKSELRKAGGQLMTADNFLETIRRYTDARELSQRMVTELIDHIDVYHAEKVGGQTVQRITIFYNCIGAFTVPERESIPEADVRLKTRKGVALSYSQAKAG

SEQ ID NO: 17729 - protein, 484 aa, synthetic construct
MKDTFQERSIALYCRVSTDEQAREGVSLDEQQERLKAYCRAMGWSEEPLLFIDDGYSAKNLDRPELNRLLKEVKKGTISKILVTKLDRLSRRLLDLLKLIDMFQEHNVSFISISESFDTNTPSGRLTLQVLGAVAEFERERIRERVFENMLHAARQGKWLTQSPYGYRLQNKELVIYEPEAQIVRNVYDWYLNKGLGYYAIAKKLNEEGIPSRQKKEWSIRAIKLMLTNPVYKGTLFWNRMDSSKSKRVKKDDADWVVLEDACPAIIDQATWEQVQKRVNKKQMAPRAQTSPHLLGGLLKCGRCGSGMSIGWSGSAKNRYRVYRCSANKNKGTCTSKQYRADDVESWFKHGLLKLADSINSQMIPHLIQKAAENEESTIEQKIRTAKNRYKRKVEAYTAGLIELEDLNEEKKRMEQIIAEVQKTENASSVDVKKLEAMVKEKMNNVIDAIDVLPVPEAKSLIKTIVEKVILLDEKDIEIVLNIQ

SEQ ID NO: 17730 - protein, 483 aa, synthetic construct
MRTALYIRVSTEDQAREGYSISAQKEKLTAYCVSQGWNIVNMYIDDGYSAKDLERPEMKRMIRHIKQGLIDCVLVYRLDRLTRSVSDLYKLLELFEKHNCKFKSATEVYDTTTAMGRMFITVVAALAQWERENLAERVRMGLQEKARQGKWVPNIAPFGYDINRENDTLVINEKEAAVVRKIFELYVSGKGMSKIANELNRLGLLTKAGAIWRDHSVKYVLTNPVYIGTMRYNYRVNQDSYFEIENAVPAIISKELFEKAQQILNRRKFSHPRAATSGFIFSTVAKCARCGSGLAGKWGTTKRGDKIYQTKTYYCTSRKFGACDLPYMAERFMEQQLLAYFENMDVDHDVIDDVLKELPQEQDETERVERIQAELKAIEKRRTKWQYAWANDMISDEDFALRMKEENEKEEALRKELENIKPSEKKPIEEIKEVIKNLRLNWEHLEPTEKKLLLQTFVKEITFDKIGERRADCVKIVDIQFYT

SEQ ID NO: 17731 - protein, 573 aa, synthetic construct
MRSMKKPTAPAPDPRPMAKAYAYIRLSSQAQAAGDGQRRQRDTAQQFAAQHGYEIVDYVQDIGKSAFRSTNSLQGELAEFLKMAQKGAFADGTLLIVESVDRLSRDELQPAVRLLLNIFDYGLLLGIISEEKIFSQINFDDFLQLLNDMSRSNKESAMKSTRSIENWKTKHSKAKVGKPVSKQCPNWMKLKGGKFKLIPERVEIVKRIFDWYSEGKGQGKIADMLAEQGVPAWNKRKPVWHQSYIFKLLHNHAVIGEYHPEVTVSGKRTSAGIIENYYPEIIDKDTFKLIQDKTRLRRENHAGRKGKKYSNLFQGMTRCAVCGARMRYLSHTKDSTRKNGLRPWAIYLACSSSLKKGGCRNKQYYSYLHMENFILSGVMSDIDIVEAAGVHDERQKQHLERVQDLDAQLTREKAILSRYLDAMENQNLSNMPELISKLEKTNTRRTLIEKQLSAARAGAAEAREAAQSAVLFRLVEEAYSEQLPENIDMSDEAIYSRRLRIANQMRAVIEDVAFHEDHLIRIKTRAGTAYELVNREWTRIEKNKRIGAKGTLTARTYVGRATMQLGAEEDEEE

SEQ ID NO: 17732 - protein, 548 aa, synthetic construct
MKSINPTRRKAVAYARYSSELQSARSVEDQIALCQGYAERNGLDLIRSYDDRAKSGSSMIERDGLMRLIADAKTGAFDVVVVEALDRISRDQEDMAAVYKRLKFSGVDIVAVHDGKADVVQIGIRGLIGAVYLEDLKHKTRRGMAGRVRDGLSAGGRAYGYRPVLGKPGELVIEPEEAQVVRRIFRDFAAGKTPREIAWALNREGIAPPRGTVWNASTINGSAQRKNGMIRAPIYAGKIVWNRVRMIRDPDTGKRISRLNPESEWQVAEVEELRIVDAETIEAVAARLEGRKRAVEEYTPRRPRMLSGLLRCGCCGGGMTMDGKTKVGQPRIRCSRAREAGTCDHSKKYALPVIERAVVDGLRDQLADPKAVALYVETYIAERRRLALEASSNRGRIERELEKRRGELERMIDLVIKGVLTAEKLIERKAPLDAEIERLEADLVVAPPIKAVDLHPGAMAAYARDVATLSARLEEAQADPSSALIDPLRRLVAAVIVYPSRPFDPIEIEIKGKLAALLGEEVELPPAGRKVAIGMVAGEGLEPPTPGL

SEQ ID NO: 17733 - protein, 525 aa, synthetic construct
MKNTKIKPQEKARAYVRVSTLKDSQKDSPEHQESFIKEVAARDGVEIEYVYVDRDTGTSIVAREDVQNLIKEAKEGKFNRIYFAALSRFSRDTLDAISLKRILVNALGIRVVSIEDNYDSGIDDNEMLFGIISSVNQKQSENISVASKRGIRQSAMKGNFTGSIAPFGYRKVNIDGRKTLEVLPEQAAIVRLIYDSYVNGGMGEKAVTNHLNEMNVPSQKGGKWGVTSIQRILQNETYTGYVTFSKHENKQVYDDINDLQNRKKRLVVRDKSLWEKTDFQTHEPIITSELFEEAQRVREVRGGGKRGGQRVFVNAFAKMIFCRECGAAMVAMTSVGRNGTRYTYLMCSTRRRQGEAGCKSSTWIPYREFRDDLIAGIVERINKVIDMSSAATQAGKTATYDSADYSKDIKRLEKRVNDNRKLLFELRRLHMLQEMSDSQYNFEKEQYETEIAEAETQLMKLSKLASERQDRDKLIEDAKRALGQITSIEDYDDVERTRLALSKLIDRIEVSAESDVKVYSVLGQI

SEQ ID NO: 17734 - protein, 537 aa, synthetic construct
MLNNLLTSGNYCVYLRKSRKDVELELLGEDETLARHEKMLLSLAKSLKISLKKIFREVVSGETIQERPEMQKVLKEVEDGLWDGVLVMEVERLARGDTSDQGIVAQTFKYSSTKIITPSKIYDPDNEFDEEYFEFGLFMSRREFKTINRRLQNGRLTSVSEGKYVGNIPPYGYRKVKLPKEKGYSLEIIPDEADVVKMIFDLYVNGEINEMGERNELGPSLIAKKLNYLNIPAIKGGRWSPSTINHLIRNPVYMGKIKWGSRPTKKKRVDGKLVKSRPRLSMGKYILVDGRHHAIINEELWHKASKKPNLNPSKPTPNKHRLSNPLAGLIKCANCGRTLIRRPLKKQEDVLMCQNMECNNVSSYLKLVEERIVETLKDWLIDYKTDWENNMHDKQENPDIVFFEKAIKKNEGEIENLKKQLDVTHDLLEQNVYSTEVFIERSKKLSDKISSLNAEKDVLSLRLQEIIGNDKDISKAIPIIEHFFDLYSIDKPATIRNELLKTVISKVVYKKEKRAHWSGSRNDFHIQIYPKLPRSPY

SEQ ID NO: 17735 - protein, 488 aa, synthetic construct
MKYAVYVRVSTDKDEQVASIQNQIDICRYWIEKNGFEWDEDAVYKDEAVSGTEWFKRQAIQLILAKARKRELDTVIFKSIHRLARDLRDALEIKSILLGHGVRLVTIEEGYDSYYEGNNDMKFEMYAMFAAQYPKTMSVSISAAMNAKVRRGEYNGGRVPYGYRVVDQKYVIDDEESENVKELFDLYNQGLGYLKVALYMNDKGLRFIDGKLWRDYHIRHIINNPFYVGDYIAQKYTKVKVDGRRKQTVNPKEKWVVYKNHHPAIIERDLWDKIHSFEKKEKNRTKRRVSVDNELRGLVYCAHCGQPMKAEAVKKTQRDGVIKYVYMRCSKYRRTGGRECVKHVPLYYNQVRELIVEKLKEKEQDLDEQISGGHKNKNKQKISKVNKEIKEWERKKEKLLDLYLDGQNISKEVFTQRDKKIDKIIREKNMELLKLNSLEEQIKEDNATKKAFDLLKNSENLYECFNTLIKRIDITQNGGLDIYYRFEE

SEQ ID NO: 17736 - protein, 520 aa, synthetic construct
MTEKNIMVIPARKRVGSTAAKEKIKKLRVAAYCRVSTETEEQNSSYEVQVAHYTEFIKKNNEWEFAGIFADDGISGTNTKKRDEFNRMIAECMDGNIDMVITKSISRFARNTLDCLQYIRQLKDKNISVYFEKENINTMDAKGEVLLTIMASLAQQESQSLSQNVKLGLQYRYQQGKVQVNHKRFMGYTKDEDGNLIIVPEEAEIIKRIYREYLEGQSLVGIGRALEKDGILTAAGKPRWRPESVKKILQNEKYIGDALLQKTVTVDFLTKKRVKNEGHVPQYYVENSHESIIPKELYLQVQEEIHRRSNIYTGAGKNKRIYSSKYALSAITFCGDCGDIYRRTYWNIHGRKEFVWRCVTRIEQGPEVCKNRTVKEDELYDAVMTAINKLLAGGNNMIKTLEENIHAVIGETTEYQISEINNLLEEKQKELIKLANKGQDYEHLADEIDELRDKRQLLLVEDASLSGENERINELIEFIRKNKFRTLEYDDKLVRKIIQSVTVYEEHFVISFKSGIEIEI

SEQ ID NO: 17737 - protein, 520 aa, synthetic construct
MKKITKIDELPQGQLPNTKLRVAAYARVSTDSDEQLESLKAQREHYERYIKSNPEWEFAGLYYDEGISGTKMEKRTELLRMIRDCKQGRIDFIITKSISRFARNTVDCLELVRKLIDIGVYIYFEKENLNTGDMESELMLSILSGFAAEESASISQNSTWSIQKRFQNGSYVGTPPYGYTNIDGEMVIVPEEAEIIKRIFAECLSGKGGGTIARGLNKDKIPARRGNHWNAGTVIDMLRNEKYMGDVLLQKTYTDSNYNRHSNTGEKDQYYYKDNHEPIISREDFAKAQDLIDERAKMKCKGVKKNVYLNRYALSGKIVCGECGRNFRRKTNYSAGRSYIAWSCIGHIEDKESCSMLFLRDGEIKATFTTMMNKLAFSHKLILEPLFKSISQIDEESDRERMDAIDKRMEQLMEERNTLITLMAKGFLEPALFNQERNVIDSEIKNLTTEKTNLVTNSTSGVLRANDIKDLIDYVSADNFNGDYTEELFEEFVENIIVNSRDELTFNLKCGLSLKEKVVR

SEQ ID NO: 17738 - protein, 524 aa, synthetic construct
MRAVIYARYSSDLQNASSIEDQIRVCEEYAANKGYDIVNHFTDAAISGVSLNRPGIQMLLQSAATFDVVLCEAMDRLSRDQADIALVHKTLNFQNVKIVTLDDGEVSAMHIGLKGTMSALFIQQLSDKTRRGLRGKVENSKSAGGIVYGYDVVKAFDGAGNPIKGEREINQVEANIVVRIFEDYVNLDKSPKAIASELNKEGIPSPTNKEWAASTINGNRRRGTGILNNELYIGRLIWNKLKYIKHPVTGKRQSRINPESEWIIKDVPELRILTDELWQAVKDKQKALDAKSDSYTPKRRATYLLSDLIKCSSCGGGVSLVNSTQYGCSRSRNKGTCDNRKTIRKTIIESAVLNAIKSELLNDEIVQIVVNEYNKHISELANSHRQNADQNKAEVVKLETEKNNLIDAIKKGAPPEIINSELISISERLEKAKLKLVKPKLATIKGYGIADKFKDYLSALDADSLEGEAKLAARSLIEKLELKPSGEADLYLNPWALIKKRPAINSESLPLVAGAGFEPTTFGL

SEQ ID NO: 17739 - protein, 514 aa, synthetic construct
MRQKALIYCRVSSRRQKIGGSGLDSQEHRCRQHALYQGYQVVDVFPDDISGDSNFMEREGMVAMLNHLKANQDTHHIIIFDDLKRLSRNTKYYLILKETLDKLNVSVECPNFRFEDTPEGEWAETMTVANGQLERKQGARQTRQKVIARFETGYWGTNAPLGYKMQTDSNKPRILIRDEPIATYIQHVLEGFANGRFETLVEAKRYLDSCPEFPKTKSKGVHTDVVKKLLTRTVYAGMVEMACWGISLREGHHEGLVDIQTFKKIQDRLEGKSKAPQRKDLNLDFPLRGAVNCGCCDGALTANWSKGRKARHPYYICRNKGCESYGKSIRRDVMHEQFGELLEGMVAPKPVIKTADTMFRLHWDDIDNRKAQDRLNAESELLDLEIEKERIIDKIINVNNLEVTRTLEDRLQKMELDKLALQEKISKCGTQTGNYDKSFRTAMSFLENPHKLWASEQYEHKRAVIQLAFSERLVYDRNQGFRTAAKAEPFRLIEELSMGNTKMVGRAGFEPATN

SEQ ID NO: 17740 - protein, 562 aa, synthetic construct
MANTLKMKAASYNRYSSDAQKETSIEDQIRMNKDAIERQGWQFTLAYSDYAISGATKARSGLQAMMKDAAEGRFDILVVEGTERLSRDQEDLAGIYKRLTYYGVQIYSVTSGSFVNDMHVAFDGLKNSQFLKDLAYKTKRGQFGAIERGKILSNKTYGYDIVRRLDSDGELVKGERKINNEQAAIVRRIFESYAKGLSGREISFELNKENIPSPTGKEWLSSTIAGWQSRGKGILNNELYIGRVIWNRDKYRRNPDTQKRNKQENPKEEWVITEAPHLRIIDQDLWDKVKTRQALLAKNNLPHQKRRANYLLSYLLKCGACGGGYGLVSARHYGCTKSRQSGTCTVRKTIPKDKLEQAVLSALEYQLLNRDLVNEFVTEYNAYVKTSQSSQHAQIKSVHAQLKKLETEKSNLIKAIRDGIPASELTEEFNRNAQKREQLLSLAAQFEQPAKIITTDVASKYTDAITLFSADIQSKTPDRESIDLLRHLIDKIVITPDTEHNKLTAQLHGDLAGLFSDNAEAQALLEQSDTTKTNQQRMNNAGAIAEEPEPKSLLLRITMFFL

SEQ ID NO: 17741 - protein, 518 aa, synthetic construct
MKKITKIEGNQDYIFKPKTRVVAYCRVSTDSDDQLVSLHAQKSHYETYIKANSEWDYAGLYYDEGISGTKKENRSDLLRLLSDCESGMIDLIITKSVSRFARNTTDCLEMVRKLLDLGVHIYFEKENINTGSMESELMLSILSGLAESESVSISENAKWAIQRRFQNGTFKISYPPYGYENIDGQMIVNPEQAEVVRYIFAEVLSGKGTQKIADDLNQRNIPTKRGGHWTSTTIRGILKNEKYTGDIILQKTYTDFQFNKRTNNGEKNKYLIKNHHEAIISYEVFEAAEAALSQRAKEKGVEKSSDKYQMRYPFSGKIICSECGSTFKRRIHSTGAKKYIAWCCSRHLKQVTDCSMQFIRDEDVKTAFVTMINKLIYGRKIILKPLLDTLREMSRSDNLSRIQELDKQIEKKAEQKELLVKLMAKGYLEPALFNRESNELRMELENYIEQKEALIQAVNGELSKVQEVSNLMKFTNKAEMIDSFDDQLFNEYVERIVVFSRTEIGFMLKCEITLRERI

SEQ ID NO: 17742 - protein, 522 aa, synthetic construct
MAVSKNVMIIPAVKRIGNNNNKEDEKPKLRVAAYCRVSTDSDEQASSYEVQIEHYTEFIKKNSEWEFAGIFADDGISGTNTKKRDEFNRMIDECMAGNIDMIITKSISRFARNTLDCLQYIRKLKDKNIAVYFEKENINTLDAKGEIMLTIMASLAQQESQSLSQNVKLGYQYRYQQGEVMVNCSRFLGYTKDENKRLVIVPEEAEIVKRIYREYLEGSSMDKIKKGLEADGIPTGAGKAKWHTSTIRKILSNEKYIGDALLQKTYTVDFLSKKRVVNNGIVPQYYVENSHEAIIPREIFMQVQEELVRRSRGHIATSGKRRVFSSSHAFSQIVFCGDCGEIYRRVHWNNRGKKSIVWRCVSRLENTGLSCRSRTVSEEIICLATVDAINRLLGQKDELLLTLKENIKTVIIETNNSAIEEIDKKLEELQKDLLRLANSKEDYNDIADEIYRLREERHKILAEEAGKKGSKQRLEEMEQFLNDQSCEMEEYDEQLVRRLIEKITVFDDKLTIEFRSGVEVDV

SEQ ID NO: 17743 - protein, 588 aa, synthetic construct
MRIVNKIEAKTPQIPRRKRVAAYARVSMESERLQHSLSAQVSFYSSLIQSNPAWEYVGVYADNGITGTKTEAREEFNRMIADCEAGKIDIVLTKSISRFARNTVDLLNTVRRLKELGVSVQFEKERIDSLTEDGELMLTLLASFAQEEIRSLSDNVKWGTRKRFEKGIPNGRFQIYGYRWEGDHLVIHEEEAKIVRLIYDNYMNGLSAETTEKQLAEMGVKSYKGQHFGNTSIRQILGNITYTGNLLFQKEYVADPISKKSRINRGELPQYFVENTHEAIIPMEVYQAVQAEKARRRELGALANWSINTSCFTSKIKCGRCGKSYQRSNRKGRKDPNANYTIWVCGTRRKTGNAHCQNKDIPEQMLKDACAEVMGLDTFDEIIFSEQIDHIEIPAPNEMIFYFKDGRIVPHHWESTMRKDCWTDERRAAKGRYVQEHQLGPNTSCFTSRVRCDSCGENYRRQRSRHKDGSFDSVWRCASGGKCQSPSIKEDALKNLCADAMGLEEFSETVFREQIVCIHITAPYQLSIRFFDGHTFETAWENKRKMPRHTEERKQHMREVMIQRWREKRGESNNNTGDDKPIHGNADQ

SEQ ID NO: 17744 - protein, 507 aa, synthetic construct
MKRVISYIRFSSEKQAKGDSLRRQSKMVTDWLKAHPEYYLDQDLSFRDLGVSGFTGKHLKGGLGDFLTAIEKGLVKAGDTLLIESLDRLSRQAVDRASELLRNILRSGVDIVTLSDGEHYTSESLKDPLALIKSILIMQRAHEESLRKSERIQAAWDAKKEAAKAGIKVSKRCPAWLRLNDDRKSFSVIPEKVETVKRCFQLRLEGKSIWEIVRTLNAEGHRSMNQYKPGKFGQTSVQDLLKNRSVIGYFTPKGCEEISGYYPAIIDETTFYKVQQLSHSRYGKRSVSDKPLSVNLFKGVIRCSECGHALIITGFSDTRNGIYRCPLRNENRCNAKGLSRKQTDGTLLALLSRLDRFDSDMTNVIDALKLHREHISNNIEKLVQLSLEIEDLSAITIKLKQLKGELSQVDADIEKETQRLKSIDVGCLSDCDLTTKAGRIEAQLIIKSAVKEVVLNAAKRRCKVTFHNSKSITLPITENPSEDVTEAIQSLSEVTERGLIDVDEVII

SEQ ID NO: 17745 - protein, 506 aa, synthetic construct
MRSVITYLRYSSAIQGAEGADSTRRQNDLFKQWLKKNSDAQVVASFSDEGLSGYKGKHLTGQFGDMLARIESGEFSEGTILLVEAIDRIGRLEHLETEALMNRILGNGIEIHTLQDGLIYTKDALADDLGISIIQRVKSYIAHQESKQKSFRVSQKWGQRAKLALAGEQRLTKMVPGWIDPETFEVNEHAETVRLIFKLLLDGESLHNIARHLQANNISSFSRRKDANGFSVHSVRTILRSETTIGTLPASQRNDRPAIPNYYEAAIDAATFNKAQEILDKNRKGRTPASDNPLTINIFKGLFRCQCGASVHPTGTKNKYQGVYRCNNHLDGRCDVPPLKRKPFDRWMIDNFLGMIDVGNDGESERKIAALQHEVEIVTARIKKATALLLEMDDITELKTQVKGLNQKRTELQTTIDNMRRKASLTDKELPQLKDIDLTTKAGRVECQLILSKHLKGLTLGKDSVTVTLQNDTEITIPTNPLPLNDGSPIFEIADKELLDIDAYQL

SEQ ID NO: 17746 - protein, 559 aa, synthetic construct
MKTKLYSYIRFSSMKQADGSSYERQKRTAAEIAAKYDLELVTSYQDFGVSAFKGANSRTGALSRFLDEIGRSVPVGSWLVVENLDRISRQSIIEAQELFLSIIRRGITIVTGMDGKVYSKESVNANPIDLLLSVMLFARANEESQTKRNRTNSSALIKIKAHQENPQNPAVAIEEIGKNMWWTDTTSGYVCPDPVFFPIVQEVVELRRNGRSTAEILDHLNATYTPPPAASHKRHSNWSRAMIERLFHTRALIGIKEISVDGVKYELKDYYPRVLDDAEFYHLKKSIGVRACNYGDKEEAKPIPLLSGVNLLKCEHCGSAMVKVKGTNKRPNQYRYSCDAMRSSRIACVHTNWSFRGDQLEKAVLQLLADKIWIAEDKANPVPALKVQIDEISRKIDNLITLSAMTGATKELADQITTLNSERETLYNQIKMAEEEMYSVDSQGWEKLAEFDLEDVYNEDRIKVRFKIKQALKRIGCSRIDKYKNLFVLEYIDGKTQRVVIENSRGPRKGRIFVDLKTINDRQILESNGLVLHPCLDMLTDKNWKPDEEIPGPLQEFGI

SEQ ID NO: 17747 - protein, 506 aa, synthetic construct
MRSVITYLRYSSAIQGAEGADSTRRQNDLFKQWLKKNSDAQVVASFSDEGLSGYKGKHLTGQFGDMLARIEAGGFSEGTILLVESIDRIGRLEHLETEALMNRILGNGIEIHTLQDGLIYTKDALADDLGISIIQRVKAYIAHQESKQKSFRVSQKWGQRAKLALAGKQRLTKMVPGWIDPETFKLNEHAETVRLIFKLLLDGESLHNIARHLQSNGIRSFSRRKDANGFSVHSVRTILRSETTIGTLPASQRNDRPAIPNYYEAAIDAATFNKAQEILDKNRKGRTPASDNPLTINIFKGLFRCQCGASVHPTGTKNKYAGVYRCNNHLDGRCDVPPLKRKPFDKWMIDNFLGMIDVGNDGEAEGKIASLQHEVEIVTARIKKATALLLEMDDIDELKIQLKELNQKRTELQTMIDNMRRKASLTDKELPQLKDIDLMTKAGRVECQLILSKHLKGLTLGKDSVTVTLQNDTEITIPTNPLPLNDGTSIFEIAEKELLEIDAYQL

SEQ ID NO: 17748 - protein, 559 aa, synthetic construct
MKTKLYSYIRFSSMRQNDGSSYERQIRMAREVAAKYDLELVNDYQDLGVSAFKGANSKTGALSRFLDAIGRSVPVGSWLFIENLDRLSRADIVSAQELFLSIIRRGITIVTGMDNKIYSLDTVTANPMDLMFSILLFIRGNEESQTKRNRTNSSALIKIKAHQENPQNPAVAIEEVGKNMWWTDTTSGYVLPHPTYFPVVQEIVELRKNGRSTAEILDHLNETYAPPPAVSNKKHSKWSRAMVERLFHTRALIGIKEVSVDGVNYELKDYYPRVIDDATFYHLKKNIGARAWNFGDKEEAKPIPLLSGIGLLKCDHCGCAMVKVKGTNKRSDQYRYTCDATRSRRLDCEHPNWSFRGDQLEKAVLQLLADKIWIAEDKANPVPALKVQVDEISRKIDNLIALSAMTGATKELADQITTLNSERETLYNQIKMAEEEMYSVDSQGWEKLAEFDLEDVYNEERLKVRFKIKQALKRIGCSRIDRNKNLFVLEYIDGKTQRVVIENSRGTRKGRIFVDLKTINDRQILESNGLVLHPCLDMLTDKNWKPEEEIPGPLQEFGI

SEQ ID NO: 17749 - protein, 547 aa, synthetic construct
MKLLVTYIRWSTKEQDSGDSLRRQTNLIDAFYAKHKNDYYLLPAHRYVDKGKSGFHQQHKAQGSDFRRMFENVMSGVIPEGSLIVVENFDRFSRADIDTAIDDVRQILRKGVSILTLGDGELYDKSALTDPVKLIKHIIIAERAHQESLVKQKRIAQVWNHKTQLARELKKPMGKQAPGWLELSEDGSHYIVDEDKASLVNIIYDKRLSGMSMFAICKWLNEQGYPTINQRKVRISKTKKPDGNWSALSVKHILTSRSVLGYLPAKISTEDRKTVLREEIEGFYPQIVTDSKFYAVQQLLEETGKGKTSSGEHWLYVNILKGLIRCKCGLVMTPTGIRKPVYQGTYRCNGNKESRCSYGTVSRKLLDTQLCSRLFSKLSQLHDEATDTAKLDELQRRLNTVDGELEKLTETLIQLPNITQIQEALRVKQEEKDELIVQLSREKARVKSVSSLDLSGLDMESVEGRTEAQIIIKRLVKEIVVSGNEKLVDIYLHNGNMIRGFPLDGKDDHTLTLEEATDEMQSLDDMLIFGEPVTRIYPAGDMEEVDA

SEQ ID NO: 17750 - protein, 510 aa, synthetic construct
MALHENSKIAVYSRKSREDRDSEDTLAKHRNELEYLIKRENFKNVQWFEEVVSGETIDERPMFSMLLPRIENGEFDAVCAVAMDRLSRGSQIDSGRILEAFKQSGTLFITPKKIYDLSIEGDEMLSEFESIIARSEYRAIKRRTINGKKNATREGRLHSGSVPYGYKWDKNLKAAVVVEEKKKIYRMMIKWFLEEEYSCTVIAEMLTELKVPSPSGRSIWYGEVVSEILSNDFHRGYVWFGKYKKSKSNNSIVQNKNLDELLIAKGHHETMKTDEEHALILNRIEKLRTYKLAGRRLNMNTHRLSGIVRCPYCHKAQAIEQPKGRRKHVRKCLRKSAERTKECEETKGIHEEVLFQSIMKEIKKYNESLFSPTEQDVNDDSYTAQLIGLREKAVKKAKGRIERIKEMYLDGDISKTEYKEKLKISQETLQKAENDLAELIASTEFQNALSAETKKEKWSHHKVQEMIESTDGMSNSEINLILKMLISHITYTVEDLGDGTKNLNIKVYYN

SEQ ID NO: 17751 - protein, 490 aa, synthetic construct
MKNIAIYIRKSVKGDDNSISLEAQTEVIKHYFKNENKFTIYKDDGFSGGNTNRPAFQKLMHDATQNKFEAVACYKLDRIARNTLDFLTTFNTLKEYGIDLICVEDKYDPSTPAGRLMMTLLASLAEMERENIKQRVTDSMLNLARSGRWTGGTPPFGYKVITIDGGKYLELEDKNNILYIFDEFINGKGILKLSNEFNCDKKKISRLLHNITYLKSSTEANTYLKQTLKYEIVGTPNGCGYLPYGKNKVINGKKIKNVEGLKIAAVSKHKAIIELETFIKAQEKLKTFEGRKAPRISNKSFLAQMVQCTCGSNMLIVLGHKKKDGTRKLYFSCPSKCGNTFGDVKEIEEDTLLTLKDVNFFEKINKNKPTINNKDSSRIKASLLKELENKKKLLDGLVQKLALVDSDLANILIDKMETLNENIKELQSKIDLLEKEEISLSYNKEDLNLKEKNRKHFIKEFENMNMQEKQTSIRKVINKITWTGENIIIS

SEQ ID NO: 17752 - protein, 421 aa, synthetic construct
MQQLIKDADTGLYDAVLVYKLDRLSRSQKDTLYLIEDIFQKNNIHFISLSENFDTSTAFGKAMIGILSVFAQLEREQIKERMSMGRVGRAKSGKIMEFNNPAFGYEIDGDNYKVDPLRAEIVKRIYKMYLSGTSINKIKETLNSEGHIGNKKNWSDTRIRYILSNPTYLGKIRYDGKTYDGKFSPIIDEETFNKTQNELKERQTATYKRFNMKLRPFQSKYMLSGLLRCGYCGATLFVNSYVYNGKRKLRYNCPSTYKSKQKTRTYKIMDPNCPFKLVYAKDLEPAVINEIKNLALNPQSIQKPVKKTPDIDVEAIQKELTKVRKQQQRLIDLYVISDDVNIDNISKKSADLKLQEETLKKQLAPLEEPDNDDKIVAFNEILAQIKDIDSLDYDKQKFIVKKLIKKIDVWNDNKIKIHWNI

SEQ ID NO: 17753 - protein, 509 aa, synthetic construct
MKTCIYLRKSRSDEEAENQGEFETLSRHRSTLLKVAKEQNLNIVEIKEELVSGESIAYRPKMLELLEEVKNGFYGSVLVMDIDRLGRGNMQDQGLILETFKKSNTKIITPRKTYDLNNEWDEEYSEFEAFMARKELKLITRRMQRGRVKSVEEGKFIASKPPYGYKFVFDESGNKSMVIDEDKAEVVRMIFDLYVNKHYGGVKIATHLNSLGLKTTTGRTWYDKGVRDILKNKTYAGYVVWNKVKRGKNSSKTRPIDERIEAKGIHEPIIDESIFLEAQSLFKSNFIPSTKQNSTITNPLAGLVVCSECGHKMIAQQSTYKNKEIVKFVKCLNCGKNRGIRLDILEKDIINELADWVDAYNVSIKDLDSNENKNPNLESYYSIIKSLESEYQTLMKQKENLHNLLEQGIYDVDTYLDRSKILTDKIDLNRSSLSQAKKDLENEKESVFSIADIIPQIKKVLELYYQSNDMQERNELLKEVIDYIDYSREPKKRTSRFNIKIYPRLIKNK

SEQ ID NO: 17754 - protein, 502 aa, synthetic construct
MNKICIYLRKSRADEELEKTLGEGETLSKHRKALLKFAKEKKLNIVEIKEEIVSGESLFFRPKMLELLKEVENKQYTGVLVMDMQRLGRGNMQDQGIILETFKKSNTKIITPMKTYDLSDDFDEEYTEFEAFMSRKELKMINRRMQGGRVRSVEDGNYIATNPPLGYDIHWIKKSRTLKINTHECEIIKLIFKLYTEGNGAGSIAEHLNNLGYKTKFNNNFSRSSVLFILKNPIYIGKVTWKKKEIKKSKNPNKVKDTRTRDKSEWIVVDGKHEPIISMKIWNKAQEILNNKYHIPYQLVNGPANPLAGIVICSKCKFKMVMRKLKGIDRLLCRNNKCDNISNRYDSTEKAIVQALERYLKEYRINISNQNKTSDIKPYERQVNILEKELAALNEQKLKLFDFLERGIYDENTFLERSKNIEERITKTSSGIEKINDIINKEKKVIKEEDIIKFQKLLDGYKNTDDIKLKNELMKKLVNKVEYTKDKRGETFGIDIFPKLKP

SEQ ID NO: 17755 - protein, 528 aa, synthetic construct
MAKVRIIPAQVKQGNRNRQVEEAETKLKVAAYCRVSTLYEDQASSYETQVAHYKEFINKNPKWELAGIYADDGISGTDTKKRNQFNQMIDDAKQGKIDLIVTKSISRFARNTIDCLQYIRELKELHVGVFFEKENISTMDAKGEVLITIMASLAQQESESISRNIKIGLQYRYQRGQVIVNTARFLGYDKDDDGNLVINPEQAKVVKRIFYECLTGKSAIEIARELTKEGIKNGIGRTQWHSSGIIKILRNEKYIGDALLQKTYTVDFLTKKRVKNDGQVPQYYVENNHPAIISRALFYQVQKLLDMRRDGFTTEGGHHHGYTNAYCFSSIVYCGRCKDIYTRCVWYRPRIGEVEKVNVWRCYSRLHWSHKGKRCMGRTITEANLEEASLKAMNELIQQHQLADKQIAANILKVTKGTTGPSLDELDQQLEYQQLLLLSMSTHNKNVAQLTEQVQALRKQREQLIQQEIDHDIKRSNLKNIQSFFQTYQGGLIKFDEKLVRLLIEKITIFKSKIEFTFKDGEVITVKM

SEQ ID NO: 17756 - protein, 515 aa, synthetic construct
MKTAIYLRKSRADLEAEARGEGETLAKHRSTLLKIAKEMNLNILAVREEIVSGESLVKRPEMLALLEEIEDNKYDAVLCMDMDRLGRGGMKEQGIILETFKRSNTKIMTPRKTYDLNDEWDEEYSEFEAFMARKELKIITRRMQRGRIASVEAGNYLGTHAPYGYDIHRLNKRERTLTINSEEASVVRMIFDLYANEDMGANAIRNKLNDLGYKSKLGNEWNPYSILDILKNNVYIGKVTWQKRKEVKRPDAVKRSCARQDKSDWIIADGKHESIISESLFEQVQDKLNSRYHVPYNTNGIKNPLAGIIKCGKCGYSMVQRYPKNRKEAMDCKHRGCENKSSYTELIEKRLLEALKEWYVNYKADFEKHKQDDKLKETQVIQMNEVALRKLEKELLDVQKQKNNLHDLLERGVYTIDMFLERSNVVSDRMNEITETMEKLKKEIKTEIKKEKVKKDTIPQVEHVLDLYFKTDDPKKKNSLLKSVLEKAVYKKEKWQRLDDFELVLYPKLPQDGDI

SEQ ID NO: 17757 - protein, 507 aa, synthetic construct
MFFQENETQEIISYEEYPYAVYARVSSEKDEQVTSIANQIDICHHWIEKNNYEWKDEAIQLDDGISGTVLLDRKAMQLILDKAQKRKLKMVVFKSISRLARDLKDALEIREVLLAHGVRVVTLEEGYDSLYEGKNSMKFEMFSMFAAQYPQTISVAASGALAAKARRGEHSGRVPFGFKKEGKFLVINEEEAKVIRFIFDLHNNHGYGHKRIVLKLNEELALGNIVKPQKTDFWQLSTVQTILKNPIYCGVFIANRHTQVKIGGRKKFIRNPKEKWTVYKDWCPKIISEEEYEKANNKEHKMRKKRFNPRNELRGMMKCGVCGCNMVVLPSYKYNQKREKKEFNYLKCSAYRRGGTALCVNHAPMQYKDLRAFVIKTLKQKGKKLKLDVKSDFEEQKKNRIKRTKIEIENAENKKKRLIELYLEDQLITKAEFQIKRKELEEQLEKLNDKLFMLEREEEETIDISNIKNAFAQLERTDQDLFEAFSALIDKLVVYEDGTVDFHYKFK

SEQ ID NO: 17758 - protein, 507 aa, synthetic construct
MFFKETETQEIIKYEDYPYAVYARVSSEKDEQVTSIANQIDICHHWIEKNNYEWKDEAIQLDDGISGTVLLDRKAMQLILDKAQKRKLKMVVFKSISRLARDLKDALEIREVLLAHGVRVVTLEEGYDSLYEGKNSMKFEMFSMFAAQYPQTISVAASGALAAKARRGEHSGRVPFGFKKEGKFLAINEEEAKVVRFIFDLHNNHGYGHKRIVLKLNEELALGNIVKPQKTEFWQLSTVQTILKNPIYCGVFIANRHTQVKIGGRKKFIRNPKEKWTVYKDWCPKIISEEEYEKANNKEHKMRKKRFNPRNELRGMMKCGVCGCNMVVLPSYKYNQKREKKEFNYLKCSAYRRGGTALCVNHAPMQYKDLRAFVIKTLKQKGKKLKLDVKSDFEEQKKNRIKRTKTEIENAENKKKRLIELYLEDQLITKVEFQAKRKELEEQIEKLNDKLFMLEREEEETIDISNIKNAFAQLERTDQDLFEAFSALIDKLVIYEDGTVDFHYKFK

SEQ ID NO: 17759 - protein, 515 aa, synthetic construct
MKTAIYLRKSRADLEAEARGEGETLAKHRTTLLKIAKEMNLNVLAVREEIVSGESLVKRPEMLALLEEIEDNKYDVVLCMDMDRLGRGGMKEQGIILETFKRSNTKIMTPRKTYDLNDEWDEEYSEFEAFMARKELKIITRRMQRGRIASVEAGNYLGTHAPYGYDIHRLNKRERTLTINSEEASVVRMIFDWYANEDMGANAIRSKLNDLGYKSKLGNEWNPYSILDILKNNVYIGKVTWQKRKEVKRPDAVKRSCARQDKSDWIIADGKHEPIIPVSLFEQVQEKLNSRYHIPYNTNGIKNPLAGIIKCAKCGYSMVQRYPKNRKETMDCKHRGCENKSSYTELIEKRLLEALKEWYINYKADFEKHKQDDKLKETQVIQMNEAALRKLEKELVDVQKQKNNLHDLLERGVYTVDMFLERSNVVSDRITEITSTMENLKKEIKTEIKKEKVKKDTIPQVEHVLDLYFKTDDPKKKNSLLKSVLEKAVYKKEKWQRLDDFELVLYPKLPQDGDI

SEQ ID NO: 17760 - protein, 484 aa, synthetic construct
MKILKYAVYVRVSTDRDEQVSSVQNQVDICRYWLENNGYEWDSNAVYFDDGISGTAWLERHAMQLILEKARRNELDTVVFKSIHRLARDLRDALEIKEILIGHGIRLVTIEENYDSLYEGGNDIKFEMFAMFAAQLPKTLSVSVSAAMQAKARRGEYIGKPGLGYDVIDKKLVINEKEAEVVREIFNLSHKGYGFKKISNILNDKGTYTKLGQLWSHTTVGKILKNQTYKGNLVLNSYKTVKVDGKKKRVYTPKERLTIIEDHYPAIISKELWNAVNSDRTSKKKTKQDTRNEFRGMMFCKHCGEPITAKYSGRYAKGSKKEWVYMKCSNYIRFNRCVNFDPVKYDDIREVILYRLKQQEKELEIHFNPKMHQNRKDKSTEIKKQIKLLKVKKEKLIDLYVEGLIDKEMFSKRDFNFQNEIKEQELALLKLTDQNKRNKEEQQIKKAFSMLDEEKDMHEVFKTLIKKITLSKDKYIEIEYTFSF

SEQ ID NO: 17761 - protein, 515 aa, synthetic construct
MYRPQELDVFIYLRKSRKDLEEEKKAMEHGQHYDTLERHRTQLLELAHKEHHNIIDIFEEVVSGEYISERPMMQKLLREVETGIADAVLVMDLDRLGRGDMVDQGTIYRVFRYSETFIITPTEIIDPNDENQELTFSIKSLIAREELKTIVKRMQRGRRVSAKEGKSISRVPAYGYLRDNNLKLYPNPEKSWVIPKIFELMANGVGRQAIAQELDRLGISPPEGEYWNPSTISSITKNEVYLGHIIWGKMRYTKQNGKYIRKKVPKERWQRHDHAHTPLVSEELFQKANIAHSKRWRPPTIKTKKLSNPLAGILLCKLCGHSMLYQPRKDRPNPQVRCVQPSCKGIQKGASLALVEQRILDGLKQIIESFEIQENMVQKKHSKNNIQLQQKALEKKEEQIKDLQKQKNTLHDLLEKGVYDIDTFLERQKSIMIRLKTIQEEVHQIEKDISHILEKERHLHEFVPKIKNVLEAYHLTKNIEKKNYLLKSVLEKASYLRKKTSKRKDEFIIELHTKI

SEQ ID NO: 17762 - protein, 522 aa, synthetic construct
MKLSHILQPKMKAAFYGRHSTDKQDMDMQLNSVMEVIRKYECIHTHSFLDKAVSARKNKITSRKELENMFEAAKRKEFDFVIVYKSDRLARDPLEHQTIRIVMKTLGVPIIISSTESVYNTDNDLIVQLMEDGFTKYEVDTIIARTQSGLENKAKQGKWLGGKPPFGYTYDKNSGQFIEHPEELCYVKEIFNLYLNGHGFQHIANTFPNGSRRGKDWGKENVKAIVLNPFYCGLLSWRRQTDGKLNARGIWIEAPNHYVKPIISRTIWEACWRIYSEKRSGNIVPKHYKTSFLLQGLLSCEKCQELMKTKNQQTVSSTNKQYGRKIYFCAKCKLRIDTDLLHDKVVNQTLTDVKISGFHNVYHAIEQKIQYEIKELNNNIQKHQHLFENYTLKLHNITEELKQRMKNNDDKRFLKSLAIYRLDVQRKLDGITQQINDFKQQITLKEKVEKSKETWLHTLNEVFQDDVKLQEISDMDKRRFLLPLIQSISIKENKKRNEYDISLQLRTDFSKRDVKNQISLIL

SEQ ID NO: 17763 - protein, 491 aa, synthetic construct
MGLAAIYLRLSRNEEQLNIDEILLNHRNALTKLAKQQKLTYDIYQEISSGVNTERPELNLLLSRLDDYDALLVMDIDRISRDNAHAEEIKKMLIIHDIKILTPQGAIDLSQESNEMLFSFQAMMANFEYKQIRKRLGRGRLAAAEQGKWTMSNRVPLGYKKNEEKRLEVVEEEAKIIRFIFQKTLERVSANEIAKQLDILGWRSRQGKVLTSTHISNMRRNVVYYGVVKAGRKVNGRVVDEVFVEDAHEPIVSKQMFLEVQKILEENTTGNFFNKLKATRKLQNLIYCNCCRRKRYIQCDGNGIDYIKSCIYKVDNNKCRDRGYKYEPIEQFVLQKVKEKKPAFEQELQMLKSLDTTEVEKKLSIQRESLEKQINRFNKRQRNLKEMRMDGEISKAEFYEMRDENEEQIKQVKQQMELIDIKLENLSNTDEEQARLQDAIKKLDKLEELKAESCNTFLKKFIKKIWFSSNTEANHDTTRPKEDATIEIEWL

SEQ ID NO: 17764 - protein, 538 aa, synthetic construct
MYNASDSVDEYCLYLRKSRSDIEAETRGEGETLARHEKQLLDLGKRLKINITYIFREVVSGETIDDRPEIQKLLHQVELGKWKGVLVVEVERLARGDTIDQGVVAQAFKYAGTKIITPVKTYDPNNEYDEEYFEFGLFMSRREFKTINRRLQNGRRTSVSEGKYIGSVPPYGYEKIKLKGSKGYSLKPLEDQANVVRMIYELYTIGQADENGIVKRVGPSLISKKLNTLKVPPAKGSLWTRDSVSSILRNPVYNGKIKWGTRTLKKQRRNGVVKKSRPRNSEQNIVLVDGLHDRLVSEETWNLAKSYLINKASKPIPDRHKVKNPLAGLAECAKCGRKLIRKPGQKHEPLLYCQIPECKNVSSFLSVVEKKVVEALEVWLKSYKTKWRQSEIKTKSSTDLENLQISALKAIEKEITELTKQLSNLHDLLEQGIYSTETFLDRSQKLSQRLAAAQKNKADIKVSITTSSERNVAKEILIPKFEHVIDTYYLTDDPELRNNLLKEVLEKFTYEKNKGTRWHGSPDDFVLKIFPKIPHPDH

SEQ ID NO: 17765 - protein, 500 aa, synthetic construct
MVVRARETNEEIEAIGYIRQSDQRQDKEDISELTQLRKIEQFCEFNNFKLVKVFKDIDYSGFRIKYTKRPGLMDALKCIEDRPRVRKMVFFNLSRLTRLKKDFQELQGILNSHQVDICSASESVDFSTPNGRLVAGFFVDLNEYYSDNLSEIVNDSKETNAKKGRWNGGPAPFGFVKTVDGLGFEEVPERAYYVREIFRMAKLGKGPYLIARWLNEQKVYSLTGKEWTARRVRYMLTNPTYAAMQRWKGECYKLLVCPVLVSWDDFNYIQSTLFGKDKAWKGKERQLLTSVLICPECGSKMHSRYMSHSKQKRKYVCSRKTSMGTISCSSPNHDQESFEAAVINLIANMAEKKYGYESLIPEMKEDSDNNNSFSKLQDELANINNAEQKIFDDYYLHNKIEEHHYELSMRRYGKRKAEILELLDKIPLPQSKSFGDYNDAIQEFSELINELPDDDKRRSIELLVEKITPGSPAVVHFKWGETREIHPRSIEKFKKKLILY

SEQ ID NO: 17766 - protein, 540 aa, synthetic construct
MKTIAIYARKSLFTGKGDSIGAQVDTCKRFIDYKFANENYEIKIFKDEGWSGKTTDRPDFTNMVNLIQSKKIDYVITYKLDRVGRTARDLHNFLYELDNLGIVYLSATEPYDTTTSAGRFMISILAAMAQMERERLAERVKSGMIQIAKKGRWLGGQCPLGFDSKREIYIDDMGKERQMMKLTPNKEEIKIVKLIYDKYLEMGSMSQVRKYCLENNIRGKNGGDFSTNTLKQLLTSPIYVKSSDNIFKHLESQNINVFGTPNGNGMLTFNKTKEIRIERDKSEWIAAVGKHKGIIDDNKWLQIQQQLQQQSEKQIKSSGRQGTTSTGLLSGIIKCEKCGSNLLIKTGHKSKKNPGTTYSYYVCGKKDNSYGHKCDNKNVRTDEADSAVITQLKLYNKELLIKNLKKALVQNKKADTDNIEILESKLKEKEKAVSNLVKKLSLVDDENVSNIILSEVTNINKEINDIKLQLSNETLKINEVTKATLDTEIYIKILENFNKKIDDITDPIEKRNLLKSALESVEWNGDSGEFKINLIGSKKK

SEQ ID NO: 17767 - protein, 571 aa, synthetic construct
MINNYVTMDNSIQELIKRINRVPRIAIYCRVSTTEQAETGYSIDEQERLLIDWCNKNGLEVFNCYSDRGISGKNIKNRPALKALLKDVEDRKVDMVVSWKLNRISRKLADVLKIMDLLEKNNVTFKSYSEPFETTTHVGRMQMQMMAMIGEFERGTISQNVNVSMCAKARAGEWCGNRVLGYDLVPMEGTENNKRRKSRLEINKEEAEIVRIIFNEYASGKGYKAITNKLNKLGCKTKKGNNFSQGSIRDILMNPVYIGKVRYNVRQNWSEKRRRNMNPDPIVAEGIHKAIIDNDTWDKVQVMLQSKSGKPSRVYDGFYPLTGILKCPKCGAGMVISRTTNVLVDGTKKRIAYYCCGAWKNQGTSICNSNTIRVEKANEYVFNKLSSVLSNDEMIKSIVRNINKERINRVDPSKNELERIDKELENIDKKKRKIFEAYEDDIITREEFLTRKDELNQRAKVLQESKEPLLVTLADDVSEEISYEFIKSVLDNFSKLLNSKESREQKKKLLHMIISKITINELREVDSINLIINDKLVDYISKEEGVSIKDAPSSFMLRNIGMSVLNLNIAI

SEQ ID NO: 17768 - protein, 515 aa, synthetic construct
MNKKAKAGIYIRVSTEEQKQGHSLEAQESMLKEFADKKGYEIYDVYNDGGYSGKNFNRPEIQRLLRDLKDDKIDVILVWKVDRLSRNNTDVMSLIDTELTPRKKSLIITSIDMDSSSPTGHMFISLLSTFARYERATIIDRVKAGMQKRAEKGYWNGGSILGYDSVDKKLIINENESKIVREIFQLRAEGKGYKFIVNILNDKGIKTKTGKNFSIPAIKLIVNNYIYSGKMVWKKHQDWSTRRRAGKAEPIIVEGIHDAIIDEGLWERVQKVNELQKNSFSSNRNFNGNFLLTGILKCPKCGAGTVMSKTKKRNSNDYYLYYMCQAYHNKGSSVCSANLIEKAQVEQQVLNVISLLVNENDIINALIDELNSDNNNANGIHIVNIKMFKKQLGKAYDKRKKLDNDYFEGNIESSTYNRLMNELQLEINKLKRNIRESEREIIKNDSIINKEEVIHVLTNFNKLFKIVNDEEKKLLIRSLIREVRMEANRKDIKEITFWFLPDSILPSNKVRRTVS

SEQ ID NO: 17769 - protein, 484 aa, synthetic construct
MRVVGYARLSRATEESTAIVRQRQAIADTARARGWELVGIEEDNDVSATRTRLNRPGLNAARERLARGEADAVLVWKLDRLARSVVDFGLLLDSGLQIISCTESLDTTTAMGRAMAEILQVFAAMEARTIGARVSSARRHLPTVGRFPGGIVPYGYRVVPHPSGVGRALEPDPAEAAAVRLAATHVLGGRSVYAVCKSLNEAGIKPRRAAQWSASSLQRLLRSDAVLGRVRVGTEYAKGPDGKKRKVRSATVLRDEHGMPVQQWEPILSLDEVERLRALTQRTPTPGRAEATAEGRRRKASRVLSGLISCPGCDGTLVAKSRRSAGKPVYACQASAQGRKCERGVVVECDRVEAEVERQFLAVFGRYAVVEQRVRLRETGELARVTEAIRTTSEELQHPGADIRALAERLTKLHAERVRLDAVPSDPTSELVETGKSFAEEWEARDYLGRRELLIGCGAVIGLAYAKQRGKWDPARVSLAFDRR

SEQ ID NO: 17770 - protein, 536 aa, synthetic construct
MRKAISYIRFSSKAQATGDSTKRQSRLITNWLKQHPDYYLDDSLRFQDLGISGFSGANAKTGAFGEILAAIQSGFIEAGSVLLVESLDRVSRQDIDLAGEQLRKILRAGVDVVTLVDNEHYTKESLKDALSMIKALLVMERAHEESVMKSHRLRAVWASKRDKALSDGTIMSKRCVAWLKVSDDRKTFEFVPDNVMAVQRVFQLRLEGLSHIKIARQMNIEGFATLNQYSPKAKNGWSQTSVTELLSNRAVIGVKVPSKSMLAKGTPDIPNYYPAIITPEQFYAVQQLKILSKGRRPSSDNPFATNLFKGVMRCGECGLIMIVSGATADGKRQGLYKCSNKGVGRCNSAGISRLQTDKALVQGLLYNTNRLDLQATSDITPLQEELSELVTRKEKLLKLAELADDVQSVAIRLKELNANITSVNAAIADHHQRLASSHTETLLHLDLSEKKHRVEAQIIIKRIIKSVVMNTAKRTCDITFHNGVKLNNYPLSYIIDGSRFGDMVSLMDDKEFTFTENSRGFTPPHIRPDWVSEYDE

SEQ ID NO: 17771 - protein, 376 aa, synthetic construct
MKTAYSYIRFSSSRQADGDSIRRQTELARSYADKNGLDLQDVSISDFGVSAFRGSNATEGALGAFLRLVDEQKIDSDCHLLVESFDRLSRQAVEDALALLMQVVNRGITLVTLSDSHEYKRGELDMTKLILSIVTMSRANEESEMKSQRTSAAWNKARLDAIEGKKAKNSRLPDWLSWNDDKTDFVVNQSAKEIIQRVFELSAGGSGIEIIARSLNEEGCRTFKKSKEWRSSGVSKLLRNRAVIGEFQFYKKDTQGKRSPIGEPIVDYYPRVITKPLFLAVQQGMDLRNKRGSGNRSGQFTNLFTGLIRCGECGAAVVTSSQTSKTPQGYLKCTLRCESQARMNYKYTEPQVLSALSSLQSVIEKYRSPISDETAR

SEQ ID NO: 17772 - protein, 547 aa, synthetic construct
MKLLVTYIRWSTREQDSGDSLRRQTNLIDAFYAKHKDDYYLLPAHRYVDKGKSGFHQQHKAQGSDFRRMFENVMSGAIPEGSLIVVENFDRFSRADIDTAIDDVRQILRKGVSILTLGDGELYDKSALTDPVKLIKHIIIAERAHQESLVKQKRIAQVWNHKTQLARELKKPMGKQAPGWLELSEDGSHYIVDEDKASLVNIIYDKRLSGMSMFAICKWLNEQGYPTINQRKVRISKTKKPDGNWSALSVKHILTSRSVLGYLPAKISSEDRKTVLREEIEGFYPQIVTDSKFYAVQQLLEETGKGKTSSGEHWLYVNILKGLIRCKCGLVMTPTGIRKPVYQGTYRCNGNKESRCSYGTVSRKLLDTQLCSRLFSKLSQLHDEATDTAKLDELQRRLNTVDGELEKLTETLIQLPNITQIQEALRVKQEEKDELIVQLSREKARVKSVSSLDLSGLDMESVEGRTEAQIIIKRLVKEIVVSGNEKLVDIYLHNGNMIRGFPLDGKDDHTLTLEEATDEMQSLDDMLIFGEPVTRIYPAGDMEEVDA

SEQ ID NO: 17773 - protein, 522 aa, synthetic construct
MHYNNDKVAIYIRVSTDEQANEGFSLQAQEDHLRQYAKAKGYEVYDVYSDEGYSGKDYNRPEIQRLFKDLSQEKFKGILVKSVDRVSRRVSDVTKLIDDVLVPRNSYIVISDANLDSSTTGGIAIIHFLATFAQLERSMIVQRVKDGMSKRAELGYWNGGRVLGYDVKNKELKVNKEEAEIVRKIFHLRTEGKGYKSIAIILNQQGFKTKRGGLFSIGTIKIILENPLYIGYCRWGQRKNWSAERRKGETDEYKFIKGKHEPIVFEDLWKKVQGVNYAHKKSISKNRNLNGEFVLSGILRCPSCGAGMVMCKTKKRDKSGYHLYYMCQAFHSKGKLACKSNLIRKEDIEEKVLQCINKIILIPSIVNNTFERIQEKKERGMERIKHDLLYINEELKRKKQFIKKLNKDYFDEKIRVETYTELSEPLRKEIDELESEKNKLDRKIESAEIPITKEIVIKALENFINLYENATYEQKKSLLRAIIKKIEVQPNRKEIKGITYWFDYNDGQDGALLVSKEGRTVS

SEQ ID NO: 17774 - protein, 523 aa, synthetic construct
MRQVITYLRFSSKPQERGDSIRRQKGLFERWLKDNPDAKVVDEFSDEGASAYHGHHLKGDFGRMLQNIQDGKYLSGQTVLLVESETRLNRQKARNTENLVDLITGKGVDVICLESGKIYTSTNIDDLDTSIQLKIAAHIAHQQSKEKSIKVSAAWEHRAQLALEGKQQLTKNVPGWIDPDTRKLNEHSSTVVTIFDLLLSGESLHNIARYLQANNIKSFSRREKANGFSVHSVRTILRSESTVGTLAASKRNDRPAIPNYYEPAIDVATFNKAQEILSKNRVGRAPASDNPITINLFKGIIRCQCGASVHPTGVKATYQGVYRCNNVPDGRCNVPTIKRKPFDKWMLDNIVGFLERDDGNNTDKRKAEIEYQISLVTSKLKKATTLLLELDDVTELKEQVKELNIQRSNLQSELDELNQRETLSDKPLHHLSEIDLTTKAGRVEAQLILSKFVQSIELQREMIIITLRNGTVIGKSRDLPPVLSQDLMKQVVSSPSPTDIDMFSVITSDEEFRKSGKQVTKRS

SEQ ID NO: 17775 - protein, 523 aa, synthetic construct
MRQVITYLRFSSKPQERGDSIRRQKGLFERWLKDNPDAKVVDEFSDEGASAYHGHHLKGDFGRMLQNIQDGKYLSGQTVLLVESETRLNRQKARNTENLVDLITGKGVDVICLESGKIYTSTNIDDLDTSIQLKIAAHIAHQQSKEKSIKVSAAWEHRAQLALEGKQQLTKNVPGWIDPDTRKLNEHSSTVVTIFDLLLSGESLHNIARYLQANNIKSFSRREKANGFSVHSVRTILRSESTVGTLAASKRNDRPAIPNYYEPAIDVATFNKAQEILSKNRVGRAPASDNPITINLFKGIIRCQCGASVHPTGVKATYQGVYRCNNVPDGRCNVPTIKRKPFDKWMLDNIVGFLERDDGNNTDKRKAEIEYQISLVTSKLKKATTLLLELDDVTELKEQVKELNIQRSNLQSELDELNQRETLSDKPLHHLSEIDLTTKAGRVKAQLILSKFVQSIELQREMIIITLRNGTVIGKSRDLSPVLSQDLMKQVVSSPSPTDIDMFSVITSDEEFRKSGKQVTKRS

SEQ ID NO: 17776 - protein, 518 aa, synthetic construct
MPKAISYIRFSTKIQSVGDSTKRQSKYINDWLKRNPDYYLDESLRFQDLGISGFSGANAKSGAFAEFLAAVDSGYIEAGSVLLVESLDRVSRQDIDTAGEQLRKILRAGVEVVTLVDNEWYTKESLKDSLSMIKAMLVMERAHEESAMKSTRLRSVWAAKRERAAKGEIMSKRCAAWLKVSEDRSHFEFIPENVKAVQRVFQLRLEGLSHVKIAKQMNDEGFSTLNQFKSVTGGWSQSSVTELLSNRSVIGFKVPSKSMAVKGVAEIPNYYPSIITDEQFYAVQQLKQGSGRRPSSEKPLLTNLFKGVLRCSECGFIMVVAGVSAKRSGIYKCSMKSEGRCNSVGFSRLQTDKALVQGLLYNTNRLLLNRDNGSAIGALQSELEQLQKQRERLIKLSMLADDTESMAKDLKALNSQIKDAEKAVSEVHQREQSSQLETISHLDLTVKKDRIEAQIIIKRIVKEIRLNTAAKKCDVFLHNGLRLLNFPLDRVVDGEIFLEVLPVLDCDEFDFDTYRMIE

SEQ ID NO: 17777 - protein, 452 aa, synthetic construct
MKAAIYIRVSTQEQVENYSIQAQTEKLTALCRSKDWDVYDTFIDGGYSGSNMNRPALNEMLSKLHEIDAVVVYRLDRLSRSQKDTITLIEEYFLKNNVEFVSLSETLDTSSPFGRAMIGILSVFAQLERETIRDRMVMGKIKRIEAGLPLTTAKGRTFGYDVIDTKLYINEEEAKQLQMIYDIFEEEKSITTLQKRLKKLGFKVKSYSSYNNWLTNDLYCGYVSYADKVHTNGVHEPIISEEQFYRVQEIFSRMGKNPNMNRDSASLLNNLVVCGKCGLGYVHRRKDTVSRGKKYHYRYYSCKTYKHTHELEKCGNKIWRADKLEELIIDRVNNYSFASRNVDKEDELDSLNEKLKTEHAKKKRLFDLYISGSYEVSELDGMMADIDAQINYYEAQIEANEELKKNKKIQENLADLATVDFDSLEFREKQLYLKSLINKIYIDGEQVTIEWL

SEQ ID NO: 17778 - protein, 521 aa, synthetic construct
MKKITKINELERPLLSKTKLRVAAYARVSTDSDEQLVSLKAQREHYETYIKSNPEWEFVGLYYDEGISGTKKEKRPELLRMIRDCENGKIDFIVTKSISRLARNTMDCLELVRSLMDIGVYIYFEKENLNTGDMESELMLSILSGFAEEESASISQNTSWSINKKFQNGSYIIGSPPYGYANVNGEMVIVPEEAEVIKRIFAECLSGKGGSIIAKGLNRDKIPARRGNHWSPGTVIEMLRNEKYKGDVLFQKTYTDSNFNRHINNGEKDQFYCKNHHEPIISREVFSKAQKLIAERAKNRNKSIAKNTYQNRYVLSGRIICGECGSKFRRKTNYSVGRSYIAWSCIGHIEDKDSCSMLFLRDGEIKATFATMMNKLAFSRKIILKPLYESINKIDEECDLERIDAIDKRMEQLTEERNTLIGLMTKGFLEPALFSKERNALDSEIKNLTTEKTNLVMSFTSGTSQADEVKAILKHVSKDKFDGNYTDEAFEKYVENIIVNSRDELTFKLKCGLSLKERVVR

SEQ ID NO: 17779 - protein, 520 aa, synthetic construct
MAEKNITVIPARKRVGSTAAKEKVKKLRVAAYCRVSTETEEQNSSYEVQVAHYTEFIKKNAEWEFAGIFADDGISGTNTKKREEFNRMIDECMEGNIDLVITKSISRFARNTLDCLKYIRQLKDKNISVFFEKENINTMDAKGEVLLTIMASLAQQESQSLSQNVKLGLQYRYQQGKVQVNHNRFMGYTKDEDGNLIIVPEEAEIIKRIYREYLEGQSLVGIGRGLEKDGIFTAAGKPRWRPESVKKILQNEKYIGDALLQKTVTVDFLTKKRVKNEGHVPQYYVENSHEAIIPKELYLQVQEEIHRRSNIYTGASKNKRIYSSKYALSAITFCGDCGDIYRRTYWNIHGRKEFVWRCVTRIEQGPEVCKNRTVKEDELYDAVMTAINKLLAGGNNMIKTLEENIHAVIGETTEYQISEINNLLEEKQKELIKLANKGQDYEHLADEIDELRDKRQFLLVEDASLSSENERINELIEFIRKNKFRTLEYDDKLVRKIIQSVTVYEDRFIISFKSGIEIEI

SEQ ID NO: 17780 - protein, 452 aa, synthetic construct
MKAAIYIRVSTQEQVENYSIQAQTEKLTALCRSKDWDVYDTFIDGGYSGSNMNRPALNEMLSKLHEIDAVVVYRLDRLSRSQKDTITLIEEYFLKNNVEFVSLSETLDTSSPFGRAMIGILSVFAQLERETIRDRMVMGKIKRIEAGLPLTTAKGRTFGYDVIDTKLYINEEEAKQLRLIYDIFEEEQSITFLQKRLKKLGFKVRTYNRYNNWLTNDLYCGYVSYKDKVHVKGIHEPIISEEQFYRVQEIFSRMGKNPNMNKESASLLNNLVVCSKCGLGFVHRRKDTVSRGKKYHYRYYSCKTYKHTHELEKCGNKIWRADKLEELIIDRVNNYSFASRNVDKEDELDYLNEKLKIEHAKKKRLFDLYINGSYEVSELDAMMADIDAQINYYEAQIEANEELKKNKKIQENLADLATVDFNSLEFREKQLYLKSLINKIYIDGEQVTIEWL

SEQ ID NO: 17781 - protein, 538 aa, synthetic construct
MTNQSTNNLKITALYVRLSNDDEREGESNSIVNQKKMLSKYASDHNLRKTTFYIDDGVSGTTFNRKGFQAMITDIEAGIVGTVVVKDMSRFGRDYLQVGMYTDIMFPEHDIHFIAINDGVDSEQGDNEFTPFRNIINEWYAKDTSKKIRAVFKAKGLSGVPLTANPPYGYIKDPNNQTQWLVDDYSAMVVRRMFQLTMEGYGPTQIAKKFQAEKILVPTHYAISQGRKTNTVPSQSPYYWSDRTIAKLLEKPEYLGHTVNFRTTRKSYKDKRKIERDKKDWVIFENTHEAIIEQSVFDTVQELRKHKRRLTKQKELPLFSGLLFCADCGGKLYFCRGKGVTRNQENYICSSYRRRTTECTSHYIRSVVLEEVVTNNLRKTMAYIQANGKSFFGDVLKGDQQAKKKEAQNQQKQLHDAQKRITELDAIFPQLYEDMVSGRINSERFDKLSSNYEEEQVLLKQQVVDISKEIQTELDVNVYIRELRKFVHKHVNFDSLTPELLHEMIDKIIVHTGKKIEVHYKFGLGELGNLVDEHIIKK

SEQ ID NO: 17782 - protein, 452 aa, synthetic construct
MKAAIYIRVSTQEQIENYSIQAQTEKLTALCRSKDWDVYDIFIDGGYSGSNMNRPALNEMLSKLHEIDAVVVYRLDRLSRSQKDTITLIEEYFLKNNVEFVSLSETLDTSSPFGRAMIGILSVFAQLERETIRDRMVMGQIKRVESGLPLTTAKGRTFGYDVVDTKLYINEEEAKHLQLIYDIFEEEKSITFLQKRLKELGFKVKSYSSYNKWLMNDLYIGYVSYSDKVHVKGIHEPIISEDQFYRVQEIFSRMGKNPNMNKESSSLLNNLIVCEKCGLGYVHRAKDTVSRGKKYHYRYYSCKTYKHTHELEKCGNKIWRADKLEEIIISRVKNYSFATRNLDKEDELDSITEKLKTEHSKKKRLFDLYINGTYEVAELDKMMADIDAQINYYNSQIEANKELKRNKKVQESLAELATVDFDSLEFREKQIYLKSIINKIYIDGEQVTIEWI

SEQ ID NO: 17783 - protein, 452 aa, synthetic construct
MKAAIYIRVSTQEQVENYSIQAQTEKLTALCRSKDWDVYDTFIDGGYSGSNMNRPALNEMLSKLHEIDAVVVYRLDRLSRSQKDTITLIEEYFLKNNVEFVSLSETLDTSSPFGRAMIGILSVFAQLERETIRDRMVMGKIKRIEAGLPLTTAKGRTFGYDVIDTKLYINEEEAKQLQLIYDIFEEEQSITFLQKRLKKLGFKVRTYNRYNNWLTNDLYCGYVSYKDKVHVKGIHEPIISEEQFYRVQEIFARMGKNPNMNRDSASLLNNLVVCGKCGLGFVHRRKDTVSRGKKYHYRYYSCKTYKHTHELEKCGNKIWRADKLEELIIDRVNNYSFASRNVDKEDELDSLNEKLKTEHTKKKRLFDLYISGSYEVSELDAMMSDIDAQINYYEAQIEANEELKKNKKIQENLADLATVDFDSLEFREKQLYLKSLINKIYIDGEQVTIEWL

SEQ ID NO: 17784 - protein, 452 aa, synthetic construct
MKAAIYIRVSTQEQVENYSIQAQTEKLTALCRSKDWDVYDTFIDGGYSGSNMNRPALNEMLSKLHEIDAVVVYRLDRLSRSQKDTITLIEEYFLKNNVEFVSLSETLDTSSPFGRAMIGILSVFAQLERETIRDRMVMGKIKRIEAGLPLTTAKGRTFGYDVIDTKLYINEEEAKQLQMIYDIFEEEKSITSLQKRLKKLGFKVKSYSSYNNWLTNDLYCGYVSYADKVHTKGVHEPIISEEQFYRVQEIFSRMGKNPNMNRDSASLLNNLVVCGKCGLGFVHRRKDTVSRGKKYHYRYYSCKTYKHTHELEKCGNKIWRADKLEKLIIDRVNNYSFASRNVDKEDELDNLNEKLKTEHTKKKRLFDLYISGSYEVSELDAMMADIDAQINYYEAQIEANEELKKNKKIQENLADLATVDFDSLEFREKQLYLKSLINKIYIDGEQVTIEWL

SEQ ID NO: 17785 - protein, 547 aa, synthetic construct
MKLLVTYIRWSTREQDSGDSLRRQTNLIDAFYSKHKNDYYLLPAHRYVDKGKSGFHQQHKAQGSDFRRMFENVMSGVIPEGSLIVVENFDRFSRADIDTAIDDVRQILRKGVSILTLGDGELYDKSALTDPVKLIKHIIIAERAHQESLVKQKRIAQVWNHKTQLARELKKPMGKQAPGWLELSEDGSHYIVDEDKASLVNIIYDKRLSGMSMFAICKWLNEQGYPTINQRKVRISKTKKPDGNWSALSVKHILTSRSVLGYLPAKISTEDRKTVLREEIESFYPQIVTDSKFYAVQQLLEETGKGKTSSGEHWLYVNILKGLIRCKCGLVMTPTGIRKPVYQGTYRCNGNKESRCSYGTVSRKLLDTQLCSRLFSKLSQLHDEATDTAKLDELQRRLNTVDSELEKLTETLIQLPNITQIQEALRVKQEEKDELIVQLSREKARVKSVSSLDLSGLDMESVEGRTEAQIIIKRLVKEIVVSGNEKLVDIYLHNGNMIRGFPLDGKDDHTLTLEEATDEMQSLDDMLIFGEPVTRIYPAGDMEEVDA

SEQ ID NO: 17786 - protein, 515 aa, synthetic construct
MKTAIYLRKSRADLEAEARGEGETLAKHRTTLLKIAKEMNLNVLSVREEIVSGESLVKRPEMLALLEEIEDNKYDVVLCMDMDRLGRGGMKEQGIILETFKRSNTKIMTPRKTYDLNDEWDEEYSEFEAFMARKELKIITRRMQRGRVASVEAGNYLGTHAPFGYDIHRLNKRERTLTINSEEASVVRMIFDWYANEDMGANAIRSKLNNLGYKSKLGNDWNPYSILDILKNNVYIGKVTWQKRKEVKQPDAVKRSCARQDKSDWIIADGKHEPIIPESLFEQVQEKLNSRYHVPYNTNGIKNPLAGIIKCSKCGYSMVQRYPKNRKETMDCKHRGCENKSSYTELIEKRLLEALKEWYINYKADFEKHKQDDKLKETQVIQMNEAALRKLEKELVDVQKQKNNLHDLLERGVYTVDMFLERSNVVSDRITEITSTMENLKKEIKTEIKKEKVKKDTIPQVEHVLDLYFKTDDPKKKNSLLKSVLEKAVYKKEKWQRLDDFELVLYPKLPQDGDI

SEQ ID NO: 17787 - protein, 551 aa, synthetic construct
MATKARVYSYLRFSDPKQAAGSSADRQLEYAKRWAAEHGMALDAALSMQDEGLSAYHQRHVTKGALGVFLAAIDEGRIPAGSVLIVEGLDRLSRAEPIQAQAQLAQIINAGITVVTASDGREYNRAGLKAQPMDLVYSLLVMIRAHEESDTKSKRVRAAIHRQCKGWQDGTWRGVIRNGKDPSWTRLDPETKAFQLVPERAEAVKLAIRMFRDGHGAVRIMRTLAEEGLQLTNGGNPAGQLYRILRNRALIGEKVLEIDGEEYRLAGYYPSLLSAEQFADLQQATEQRAKQKGTGEIPGLITGLRISYCGYCGSAMVAQNLMNRGRREDGGPQHGHRRLICVGNSQGMGCAVAGSCSVVPIEHAIMSYCADQMNLARLFEGGDRSEALAGKLAIARARVADTTAKVERITDAMLADDAGDAPAAFMRRARELETSLVEQQAEVDALEHELAAVASSPTPAVAKAWADLQEGVKALDYDARTKARQLVADTFERISIYHRGTEPEQTRSWKGTIDLVLVAKRGSARILHVDRQTGEWRGGEEVRDLPDDPIQ

SEQ ID NO: 17788 - protein, 567 aa, synthetic construct
MSSSPTAFSYLRFSNPTQAAGDSRRRQTTAAAEYAAAHGLILDDTMRDEGVSAFRGRHREDGALGAFLAKIDADEIAPGSYLLIDSFDRLTRERVTRAIHLLTGIMTRGVVVVTLNDGRRYEDASAGLMELMYALMELSRSHEESREKGRKVGAARARERHRAREDLTPFTPVGPHWLRLEPLRDDAGRRAGGRWVKIPERVAVVQEIFDAKEEGLGYAAICRRLNSRGETTPRPRRDAEGRPTSIWTEATVGELIASRTVLGEYAPHVGHRRAGPRIPDGAPIAGFYPQIITPEQFDRVHTAIALRQNPNAKPRSSEFRNLLIGHVRCRCGGVVGYLASGRLRDGQRSAALRCPNVYRGTCDNRSRLNYGRVEAELLPFLAGLPATESSAPTDAAVALAVAETALIDLERRIGLLVDHLESGQDQRDKSESVGERLRQREGERAALVDRITILKAEAARERAIAAAPDWRARLAQIEAQMQAAEGSALYELRSRLNVLIGQAVPGGFTLDEGYLTARFSTTDPKGGKRKPLYYGAEGGLIRWEMTAGAPDFGQVRVAPGNLVAVQG

SEQ ID NO: 17789 - protein, 505 aa, synthetic construct
MTLAFSYARFSTKSQSTGTSLERQLNASRLFCSERGLTLSPKGYHDLGVSGFKQVKRPELEQMLQAIQSGDIPSGSYILIEAIDRLSRKGISHTQDVLKQILQYKVKVAFVGEDAKTLAGQVLDENSLNDLSSVILVALAADLAHKESVRKSKLVKVAKSIIRKKATEGHKVRGHTMFWIDWSDKKQDFVLNDRVKDVHKIIQLRREGQGPRKIAKTLNELNIPSPRGNPWNHMTVTVVLRSPVLYGAYQTHQIIDGQKVPDVLLENHYPAVITQEEFVTIQADSSKSNKGRPSKANPFSGVLRCECGQAMLFSKRTNLNKDGEPLEYEYHFCLGYAEGRCKNNKRIRDLVPLLVQLMDKLVINQAPKKNLNVELIKQKEQKIEQLNKMLIELDSPPLSVLKTIQTLEAELDILLNTHVEEPVQADVQTLSSITDAQEYNQHLKRLVKKIVVYQKNGPKNLRIKVHKTDGHYQNFLVKDGKVLFKSDTKALKELIDGFNKERREG

SEQ ID NO: 17790 - protein, 566 aa, synthetic construct
MKKVRMLLRVSSNQQLELDGDLSVQREIVKDYVKKHEEWQLDSKEYFEGSNSGYKNSVADRNVLQNALQDAQAKEYDILVAYKDDRIGRLMWEIGAYVMALKKCGVDIYTVKDGCISPETDDTMGQMMLALRYGNAQKQSADTGMRVKDTAQKLVQKGKFMGGKAPYGYKLELSGEISKHGRALHHLVIVPEQAEVVSYIYDLSLNKEYGSSKIASVLNRHETYKNLAPNDTWKGGTITSILTNPIYAGHTAYKRRERINGQYHRLDSENWITSIDANESIMIIDGDTWNKTQERRKRRGDKYIKALEHKDVNVIRKNDGMLALIDVLYCGYCGSKMTNGSKYNYWTIKGTGEKRASKIAIYKCQNAWQGVTHVKTKQIRADMIEPIVFESIAQYIGKLQENESIFNEIENNQNQEKKRKQAELKKEKQNLENIQDKIRIMEENIPNAMTGDYPLSLEELVAIIKKHKEQAQQQQDIVTLKELELKSTSVSINEWEDIKNKIPTWQDVFLNADVATKRVLVNKLVERIDVKKTEVVIRFKINLNDFIPQPRICGDSHTILCTRDSK

SEQ ID NO: 17791 - protein, 521 aa, synthetic construct
MKKITKIDGVQKNTAINSKLRVAAYCRVSTGSDVQLESLEAQKSHYEQYINSREDWLFAGLYFDEGITGTKAEKRPELLRLITDCEARRIDFVITKSISRFSRNTTDCLALVRKLQSLEIPIYFEKENINTGSMESELFLAILSSMAEGESASISENAKWSVKRRFQNGTYKLGYTPYGYDWDGKNMIINPDQAAVVKRIFADILSGKSTNAIADELNAEKVPSKKNANWTSSTIRGIIANEKYTGDVIFQKTYTDENFNRHTNYGEVDQYMAPDHHEAIISHSDFDAANALVNQRAAEKGIEKGSDKYQQRYAFSGKIICGECGDTFKRRIHSCTTYKYVAWACNTHLKNKESCHMKYVRDDEIKAAFITMLNKLIYGYRLILTPYLKVLENSSGDEAIHRIQHLEQLIAQNSEQREALTKLMAQGYIDQILYNQETNALLLQAETYRSDIEAITIGMTGDAAKVTETNLLLHFVSHTDMLTAYSEELFENYADHIEVMSRNEIRFVMKCGLTFTERIGD

SEQ ID NO: 17792 - protein, 522 aa, synthetic construct
MGNVMLIPARRQVGSNARKQEEEKPKLRVAAYCRVSTDSDEQATSYEAQVEHYTEYIQKNPDWEFAGIYADDGISGTNTKKREEFNRMIDDCKAGNIDMIITKSISRFARNTLDCLKYIRQLKDMNIPVLFEKESINTMDAKGEVLITIMASLAQQESQSLSQNVKMGLQYRYQQGKVQINHNRFLGYTKDADGNLVIDPEQAETVKRIYREYLEGLSMDKIAAGLERDGILTGAGGKKWHTSTINKILRNEKYIGDALLQKTYTTDFLNKTRVKNNGLVPQYYVEGDHEAIIPKDIYLQVQEELVRRRVVKTSANGKKRSYSCNHCFSQIVICGECGEMFRRLHWNNRGVKSIVWRCISRLESTGLECHARTINELVLQDAVVKAINQMLGDKSNYQTQLQLNIAAVIRASQATAIDSIDEKLMAFQQELIQKANSKEDYDEIADEIFRLRELRQKTTVDTAARDEQIKRINDLQDYISQQTTYLTEFDDSLVRRWIKQITIWDDHTTVELKSGVSIDVDA

SEQ ID NO: 17793 - protein, 568 aa, synthetic construct
MTLRAVIYARYSSDNQRDASIEDQLRLCKERLAREGWELVQVYRDAALSGASTLRPGYQALLESAREAAFDVVVAEALDRLSRDQEDVAGLFKRLKFAGIRLVTLAEGEISELHVGLKGTMNALFLKDLADKTRRGLRGRVAAGRSAGGLCYGYDIARQLDPNGEPVRGARSINEAEAAIVRRIFTLFAGGASPIAIAKTLNAEGVPGPEGRAWRDTTIRGHAGRGTGILRNELYIGRLVWNRMRFLKDPATGKRVSRPNPRAEWVIETVPELRIIDQETWERAAERLGAIRAASRADTLPPGFWARRRPRHVLTGKIFCGGCGGAFGAIGRDYLGCTAAHRQGVCANHGTVRRDALEDLILAALREQLMAPELVAEFVAEFAAEWNRLQAAAGAEAANLRKELAAVERKLAGLIDAIAEGFRAPGLQQQLDDLEARKAGLARQLAQATPAVPRLHPNLGEIYRAKVAALAEALTGPDGQEALEMVRGLVARVEVLPPAAAGEAPEIVLTGEIAAMVGLGLGQAPTRPGAGATPGAVAGAGSDLFTSSVKVVAGACNLRQLTLLPVAC

SEQ ID NO: 17794 - protein, 594 aa, synthetic construct
MTLRAVIYARYSSDNQRDASIEDQLEVCRRYIARQGWTLTTTYEDRAQSGASRFRPDFQRLLADAEARRFDVVVAEAIDRLGRKLADVADFFDRLTFYGVKLHVTNSGEVTPMHVGVMGMMAQMYLSDLRDKTRRGQLGRARAGRVPGGIAYGYAVVPGDASGAGARRINEAEAAIVRRIFRDYAAGKSARTIAHELNAEAVPGPEGRPWGDTTIRGQLDRGTGILNNTLYIGELSWNRCSYVKDPRTGKRLARVNPREQWEVVAVPELRIIDQPLWDAVRARQQAARYAVCHDEGSGNALNRAHRREFLLSGVLVCGCCGGGYTIIGKDRYGCAARRSKGTCDNAVTITRQRLEARVLGGLREHMLTPALVAEFVTAFTESLAELQRDDAMRERRVKDALAAIERKLDGVVRAIEDGEWNDTLRRRLGTLEAEKASLTAELAALSKPAPPARLHPQAAEIYRRKVAVLEQCLNEPDIRHEAGEALRQMIEKVVLTPDATAPDGLAAALHGDLAVILTQAMAPERERRPLPNGAQTPPGTAVSGSLLSVVAGERCHLYRTRLRLTARPQNKTAIRPRKNGGLVAFPASVARPAG

SEQ ID NO: 17795 - protein, 568 aa, synthetic construct
MTLRAVIYTRYSSDNQREASIEDQLRLCKERLVREGWELVQVYRDAALSGASTLRPGYQALLESAREAAFDVVVAEALDRLSRDQEDVAGLFKRLKFAGIRLVTLAEGEISELHVGLKGTMNALFLKDLADKTRRGLRGRVAAGRSAGGLCYGYDIARQLDPNGEPVRGARRINEAEAAIVRRIFTLFAGGASPIAIAKTLNAEGVPGPEGRAWRDTTIRGHAGRGTGILRNELYIGRLVWNRMRFLKDPATGKRVSRPNPRAEWVIETVPELRIVDQETWERAAERLGAIRAASRADTLPPGFWARRRPRHVLTGKIFCGSCGGAFGAIGRDYLGCTAAHRQGVCANHGTVRRDALEDLILGALREQLMAPELVAEFVAEFAAEWNRLQAAAGAEAANLRKELAAVERKLAGLIDAIAEGFRAPGLQQQLDDLEARKAGLARQLAQATPAVPRLHPNLGEIYRAKVAALAEALTGPDGQEALEMVRGLVARVEVLPPAAAGEAPEIVLTGEIAAMVGLGLGQAPTRPGAGATPGAVAGAGSDLFTSSVKVVAGACNLRQLTLLPVAC

SEQ ID NO: 17796 - protein, 564 aa, synthetic construct
MTLRAVIYARYSSDNQREASIEDQLRLCKERLVREGWELVQVYRDAALSGASTLRPGYQALLESAREAAFDVVVAEALDRLSRDQEDVAGLFKRLKFAGIRLVTLAEGEISELHVGLKGTMNALFLKDLADKTRRGLRGRVAAGRSAGGLCYGYDIARQLDPNGEPVRGARSINEAEASVVRRIFTLFAGGASPIAIAKTLNAEGVPGPEGRAWRDTTIRGHAGRGTGILRNELYIGRLVWNRMRFLKDPATGKRVSRPNPRAEWVIETVPELRIIDQETWERAAERLGAIRAASRADTLPPGFWARRRPRHVLTGKIFCGDCGGAFGAIGRDYLGCTAAHRQGVCANHGTVRRDALEDLILGALREQLMAPELVAEFVAEFAAEWNRLQAEAGVEAANLRKELAAVERKLAGLIDAIAEGFRAPGLQQQLDDLEARKAGLARQLAQATPAMPRLHPNLGEIYRAKVAALAEALTGPDGQEALEMVRGLVARVEVLPPAAAGEAPEIVLTGEIAAMVGLGLGQAPTRPGAGATPGAVAGAGSDLFTSSVKVVAGARFERATFRL

SEQ ID NO: 17797 - protein, 585 aa, synthetic construct
MGRIMAAFYARVSSEGQARGNTIASQVAALHERAAADDAAVGPEHAYVDEGRSGATLARPALERLRDAVAGGEIDRVYVHAPDRLARRYAYQVLLVDEFRRGGVEVVFLNRPIGGSAEDDLLLQVQGVIAEYERARILERNRRGRRHAARSGAVSAMCAAPFGYRYVSRHFGGGTAQFEVVEDEARVVRQLFTWVGIERISLREACRRLQSMGCATRTGLTQWDTTTICGMLRNPAYQGTAMFGRTRSTASAQVRLRPIRGHPLPPRQASSSHTAVPREEWIAIPVPALVDTDLFDTVQAQVDENRRRKRDGRRRPGWLLQGLVVCRQCGYAFYGKMARGTVGGRQPADYGYYRCTGTDAYKFGGQALCGNRSVRSDKLEQAVWRQVEMVLDDPQRVAIEHERRAAEARDGKAHENVDAIDRQIARMQRGIDRLIDSYTEQIIEEDEFKPRIAGLKQRVARIQAERDAAVATYEAERSLQLVIGRLSEFVGRVRTGLDQLDWHGRREVIRALVRRIEIDHDQVEVVFRIPGGPSPSGGGVNIETGRGTTGNPPVIWQHCGRSHRPLVGEDADDIGATLHLLVQPF

SEQ ID NO: 17798 - protein, 545 aa, synthetic construct
MKRAKLNNDKITALYCRLSKDDGTNNESMSISTQKTMLKDYAKRNGFLNCQFYVDDGYSGTNYDRPAFRQLIEDIQDGEVSTLITKDLSRLGRNYLETGTYIEVFFPNHNVRYIAINDGVDSIDNAQMDITPFRNIINEMYAKDTSRKIKSALHARKMQGKYMATTAPFGYQKDEKDHNHLVIDEVTAPIVELIFSIAEEGVGLHTICNRLRKAKVIKPSFYKKEMFERYTDEEKMYDWDTAYVSKILHDPVYAGNLTVAERPTKTMRSKKRQYIPYAEREVIYGTHEPIIEQSRWNTVQKILESRPPVIGESSSGYDNIFRGVIKCADCGSAMLAKVEQKRKRNNVLDKTFYCCTKYRKFGKEGCSSHIIEARTVHEVVLADIQKHAGQALTDRKAMVTDIAERLNLQMSADREQQKKELRQCKQRVSEIENLYAKLYEDLTRELLTEKRFQMLSARFDSEQEELTAKIKELEKSAIADKEQLSSIEQFAEQISGYAGITELNFKIINQLIEKILVSEPVEIDGQKTQRLTIHYKFIGALETLE

SEQ ID NO: 17799 - protein, 593 aa, synthetic construct
MRGLVLKKNAGALRGRDGKERMQMRIRKVAIYARVSTEHEAQLSALENQVQYYDDLIDRHPDWVLYRRYIDEGITGTSISKRKNFVRMMEDAKDGHFDLIVTREVSRFARNTVDTLQQTRLLKRMGIEVYFTEDGIWTMNDEDGELRLTIMATLAQNESKKTSMRVKAGQMVSFQNGVVYGTGNVLGYDKVGPEYVINEEQAETVRRIFDLYLAGNGYHKIMKQLEKEGRRTAMGKTMWHYATVGHILKNRLYCGELEYRKEYVPDYLEQKRAKNKGELERVIVEGKHQPIVTKEEFERVQKMMAEKDAQMGQRRKNKGVHSDDLWRRKMRCQCGHAFAKTKWHTKTDFITYTYKCYDQTRTGTIAARLKNGLGIENVCRSPLVQDWKMYTMAQKVLHVVFDDPEGTLLDAAAVLGCGIAGVEQSEVLRDKEIIEEQLKKERGRYETLLDMRMNNEIPKEVFSRKQQEVGEKIAELEQRMAQYGDVEPATEADVSGKLENLQKLMGQFSMPEDGEFSEEEMDRYVSGVRVYEDRFEWLLNLSPDAGGGLDDAGSPVYFKKITVTPDDERAWFRKHPQWSKSNRYAELEAWIFI

SEQ ID NO: 17800 - protein, 518 aa, synthetic construct
MPKAISYIRFSTKIQSVGDSTKRQSKYINDWLKRNPDYYLDESLRFQDLGISGFSGANAKSGAFGEFLAAVESGYIEAGSVLLVESLDRVSRQDIDTAGEQLRKILRSGVEVVTLVDNEWYTKESLKDSLSMIKAMLVMERAHEESAMKSTRLRSMWAAKRERAANGEIMSKRCAAWLKVSEDRSHFEFIPENVKAVQRVFQLRLEGLSHVKIAKQMNDEGFSTLNQFKSVTGGWSQSSVTELLSNRSVIGFKVPSKSMAVKGVSEIPNYYPSIITDEQFYAVQQLKQGSGRKPSSDLPLLTNLFKGVLRCSECGFIMVVAGVSAKRSGIYKCSMKSEGRCNSVGFSRLQTDRALVQGLLYNTNRLSLNRDNGSAIGSLQSDLEKLHKQRERLIKLAMLADDTESMAKDLKALNSQIKDAEKAVSEVHQREQSSQLETISHLDLTVKKDRIEAQIIIKRIVKEIRLNTARKKCDVFLHNGLRLLNFPLDRVVDGEIFLEVLPVLEADEFDFDTYRMIE

SEQ ID NO: 17801 - protein, 521 aa, synthetic construct
MKKITKIEGNLANSFLKPKTRVVAYCRVSTDSNEQLVSLQAQKAHYESYIKANPEWEYVGLYYDEGISGTKKENRSGLLKMLSDCETGKIDLIITKSISRFARNTTDCLEMVRKLIDLGVHIYFEKENINTGSMESELMLSILSGLAESESISISENTKWAIQRRFQNGTFKISYPPYGYDNIDGQMVINPKQAEVVKYIFAEVLSGKGTQKIADDLNQKGIPSKRGGRWTATTIRGILTNEKYTGDVILQKTYTDRHFNRHTNYGEKNMYLVENHHEAIISHEDFEAVDAILTQRAKEKGIEKRNNKYQNRYSFSSKIICSECGSTFKRRIHSSGIRKYIAWCCSKHISQITECSMQFIRDDDIKTAFVTMMNKLIFGQKFILRPLLDGLRNQNSAASFLRIEELETKIENNMEQSQMLTGLLAKGYLEPALFNKEKNALEAERERLLAEKDQLTRSVNGNFAKVDEVDRLLKFATKSKMLTAYEDELFEDYVERIIVFSREEVGFELKCGITLKERLVN

SEQ ID NO: 17802 - protein, 471 aa, synthetic construct
MKRVALYIRVSSDEQAKFGDSIREQQETLTEYVERHDDMKIVSTYIDDGISGQKLNRDEFAQLITDVQGDQIDLIIFTKLDRWFRSLKHYLNTQDILEAHNVYWFAVSQPYYDTRTAQGRAFIAQSMTWAELEAQQTSERTIAINISKVKNGEVITGSTPFGYSIKDKHLFPDDNAPIALAIFEYFDQTSSIAGTAKYLKETFGISRTRPGIRNMLKNRMYIGKYRQNNNYCPAIIPEALFASVQRKLPLNVKSNNKNDYIFQGLMMCGCCGRKMSAGQATRYGRPRKDGTKKHYPSVSVYKCRYHISDKRDCPNKKTIKETVLEEYLLDHIKEMIQFEIVAIENKKKQVIDTKARRRKIEEKLDRLKAAYLDDVIGLDEYKKDRQELQETLATFKNKPSADISNKKSDLEELLYSGLFDHYPVLTKLEKKEFWRSFIDSITMDGERNITVKFLESTYVLTDTDGRASFRR

SEQ ID NO: 17803 - protein, 586 aa, synthetic construct
MSKSDYDFLAPSHVKVTSLPQYHSHESTTGLKGIPVGGIVRVSTAKESQKSSIENQDKILRLWAEQLGYIYVDTYLDVKSGKFIKLRSDIQRLENDVKEGKVKGVLTKDVSRTSRDVIDMLTLKRKFDDLGVFFMSMKEGYDSRQDGDEFLLTIHAGLAQREGRNIGARIRATQLLKAKEGKTNVGQPAFGYKLSKSKDKLEIDPIKGPLYQEVVELYFKGWGREKIAQYLNERILPDGTKLRTNFGKPFSGSTINVILRNPVYMGVTMFNCTTQRRNAKGDKVVLVRPKEEWIIRWGTHDALITKERWEELQRLLEERSKRRTYSNAKHLLTGLLYCGKCGKKMYFDPINKNRRSVASYRIDYYNCRKGAGEPCDAPYVHAKWLEAYIIKDVFDKLSDQEEIRASIERQKHLLVSDYHELKIEREKIEHTLTDLERRENLLMEDREEGIISKEQYKNRMQELSRRKEESLKRLRKIDTKLKKCTDFESEVEGVIKLVQNLAVEVAEISGRSLSEVAVALEGEYVPRSYEQQDNIYNNEVKSLQREILLCLIKKVVVYPTGKKEVQGVQNHNPEVKIFYVWDEETD

SEQ ID NO: 17804 - protein, 554 aa, synthetic construct
MKAAIYSRKSKFTGKGESIENQIQLCKEYAFNHFSINENDVLIYEDEGFSGGTTDRPQFQLMLKDAKNKKFSTLICYRLDRLSRSVVDFSSTMEELQQYNISFVSIREQFDTSTPMGRAMMYIASVFAQLERETAAERIRDNMLQLAKTGRWLGGITPTGFESEPVVYIDPAGKERKMYRLSPIAEEFEMVKLIFDKYLELKSLTKLEQFCIMNNFKSKNDVDFKRYSLRFMLSNPVYAIADKEMYNFLLENSYEVYCDENEFTGEFGVMAYNKTQQDKKNPSCRYRDVSEWIVAVGAHKGIIPSATWIKAQKLLLQNKSKSYRKVRNSSCLLSGLLKCRNCGSYMRPKVSRPNKDGEITYYYMCEMKERSKRTRCDVKNVQGNNLDKAVVQEIKKLSMSDSELYTTIQNDKFTIQAAQNTVENEIALIDGKIKANEQAINNLVTSLSQGQNSTASKYIITQIEELDKQTAELKGRLLKLKEVEENNQSKEQNLDVMKSILSAFSKNIDTVDIDAKRMFIKSIVENIVWDGENVEMNLFGANSEKKQLPPTETI

SEQ ID NO: 17805 - protein, 522 aa, synthetic construct
MKLSHILQPNMKAAFYGRHSTDKQDMDMQLNSIMEVIHKYDCIHTHSFLDKAVSARKNKITNRKELENMFEAAKRKEFDFVIVYKSDRLARDPLEHQTIRIVMKTLDIPIIISSTESVYNTDIDLIVQLMEDGFTKYEVETIIARTRSGLENKAKQGKWLGGKPPFGYTYDKDSEQFIEHTEELYYVKEIFNLYANGHGFQYIANTLPNGSRRGKDWGKENVKAIVLNPFYCGLLSWRRQTDGKQNARDIWIEAPNHYVKPIISRTTWESCWRIYSEKRNGNMVPKHYKTSFLLQGLLSCEKCQELMKTKNQQTVSSTNKQYGGKIYFCTNCKLRIDADLLHDKVVNQTLTDVKISGFHNVYHAIEQKIQYEIQELNNNIQKHQRLFENYTIKLHNIKEELKQRMKNNDDKRFLKSLAIYRLDVQRKLDGVTQQINDFKQQITLKEKVEKSKETWLHTLNEVFQDDVKLQEISDMDKRRFLLPLIQSVSIKESKKRNEYDISLQLRTDFSKRDVKNQISLIL

SEQ ID NO: 17806 - protein, 515 aa, synthetic construct
MYRPQELDVFIYLRKSRKDLEEEKKAMEHGQHYDTLERHRTQLLELAHKEHHNIIDIFEEVVSGEYISERPMMQKLLREVESGIADAVLVMDLDRLGRGDMVDQGTIYRVFRYSETFIITPTEIIDPNDENQELTFSIKSLIAREELKTIVKRMQRGRRASAKEGKSISRVPAYGYLRDNNLKLYPDPEKNWIIPRIFELMANGMGRQAIAQELDRLGISPPEGEYWNPSTISSITKNEVYLGHIIWGKIRYTKQNGKYIRKKVPKERWQRHNHAHPPLVSEDLFQKANMAHSKRWRPPTIKTKKLSNPLAGILLCELCGHSMLYQPRKDRPNPQVRCVQPSCKGIQKGASLALVEQRILDGLKQIIESFEIQENMVQKKKSKNNILLQQKALEKKEQQINDLQKQKNKLHDLLEKGVYDVETFLERQKSIVIRLKTTQEEIEQLEYEIKHVLEREQHIHDFVPKIKTVLEAYYATEDIEKKNRLLKSVLEKVTYLRKKSWQRKDEFVVELYTKI

SEQ ID NO: 17807 - protein, 517 aa, synthetic construct
MKKSKSPPMDAKRCAVYTRKSTAVGLEMEFNSLDAQREACLAYAQRQPGWALVDERYDDGGFTGANMERPAFQRLLQDVDARRVDVVVVYKVDRLSRSLLDFAKVMERLNMAGASFVSVTQNFSTADAMGRLTLNMLMSFAEFEREMISERTRDKVAAARCKGKWTGGRAPLGYDVKDKRLVVNESEAVVVREAFELYLQHQQASTVARLLNEKGRRTKRYEARSGATREARAWTTQDVLRLLRSSLYAGFTPYGAEAHPGEHRAIVERSTFHQVQDMLEGRSPGLQYHGRNPDYVLRGLLRCGLCGEAMTPGSTRKGAREYRYYRCTTRDKRGKEACRAAPLPAPALEDFVVARLREVSVGGGLAGDVHARLTARLEEKHKALLAERAQLPKALARHAAEATKWVDSLSTLEGAAKRLVEEKLTAAEVEATGLKKRLAEVELALDAMKGEQLEAAWVAQALADLDAVWNALTATNRGRLLRALVGRVVVNEATGRVDVHLVHSGEAAATRREEVAA

SEQ ID NO: 17808 - protein, 517 aa, synthetic construct
MRKSKPAPSDAKRCAVYTRKSTAAGLEMEFNSLDAQRESCVSYVQRQPGWVLVDESYDDGGFTGANMERPAFQRLMQDVDSGRVDVVVVYKVDRLSRSLLDFAKVMERFNAAGASFVSVTQNFSTADAMGRLTLNMLMSFAEFEREMISERTRDKVAAARRKGKWTGGRAPLGYEVKDKRLVVNEYEAVVVREAFELYLQHQQASVVSRLLNETGRKTKRYEAQSGATRAARKWTTQDVLRLLRSPLYAGFVPYGDEAHPGEHSPIVDRATFHQVQDILEGRGPGIQYHGRNPDYVLRGLLRCGMCGEAMTPGSTRKGTREYRYYRCVTRDKQGKEGCRASPLPAAALEDFVVARLREVSVGGGFATQVHARLTSRLEEKHKALRAERIQLPKDLAKRAGESAKWVDSLAKLEGPARRLLEEKLTAAEEESAGMRRRLTEVEHALDAMEREKLEAAWVAQALADFDAVWDALTAANRGRLLQALVGRVVVDEETDRVDVHLAQAGEPAASEGEEVAA

SEQ ID NO: 17809 - protein, 517 aa, synthetic construct
MRKSKPAPSDAKRCAVYTRKSTAAGLEMKFNSLDAQRDSCVSYVQRQPGWVLLDESYDDGGFTGANMERPAFQRLLQDVDAKRVDVVVVYKVDRLSRSLLDFAKVMERFNAAGASFVSVTQNFSTADAMGRLTLNMLMSFAEFEREMISERTRDKVAAARRKGKWTGGRAPLGYEVKDKRLVVNEYEAVVVREAFELYLQHHQASVVSRLLNETGRKTKRYEAQSGATRAARKWTTQDVLRLLRSPLYAGFVPYGDEMHPGEHPAIVDRATFHQVQDILEGRGPGIQYHGRNPDYVLRGLLRCGMCGEAMTPGSTRKGTREYRYYRCVTRDKQGKEGCRASPLPAAALEDFVVARLREVSVGGGFATQVHARLTSRLEEKHKALRAERVQLPKDLARRAGESVKWVDSLSKLEGPSRRLLEEKLTAAGEESAGMKRRLAEVERALDAMEGEKLEAAWVAQALADFDAVWDALTAANRGRLLQALVGRVVVDEETDRVDVHLAHAGESATPVREEVAA

SEQ ID NO: 17810 - protein, 586 aa, synthetic construct
MPKIWPYIRFSSEEQKRGDSLRRQKELIARFAARPEIVAEGAQIDESLNLNDLGVSGYTGKNLLKGRFKAFLDAVDSEVVKAGDYLAVEALNRITRLNPLESLPIILRLVQEKDVRIAITSSSQIYRRGDDISALYIAIGELQRGYKESQEKGMRVKEAWNSKKRRAADFGEIATSRVPLWLSVDSIKLGSGDIKRVIKEIDARVAVVKEIFRLSDSNIGAVATARILTERGVPTFTRENARKNSNYGDFWQVTYVRKILSNRAVLGNYQPMQWLEVGGKRTRVNHGREIEGYFPQIITRELFDRVQIKKDARKIEGQGNKGLRFSNLFTKIAFCSACGAVAHHVNKGKDTKKGGRYLVCYRAKYGSCTYKSWKYEKVEAMILSYLAEADIKSIMRDEDKVELLVNERYKVESEQVAIGEMLDNFKRDFKELKGRVSNVERELAIENEARLADIKSQLHALDARILEAIEQQKADLKNEVRALQELDGVADENKVFEIRSKINARLKLIVESIILNFDLQVAEVRFKSGIVRHVHERGVFANILPPATTEQSAEDMREIEEWASLSNEEKKAKWANDEFKIVPLKI

SEQ ID NO: 17811 - protein, 508 aa, synthetic construct
MIAKWLLDHEDYELSKLNYSDLGKSGFHGEHVKEGGNFGKLLKAVMDGYIKRDDVVLVEAIDRTGRLPALQMLSDVIAPILRAGVSIITLDDNTTYTEASVGGPHLFMLVAKIQAAHEYSRTLSRRVEDSYKKRRKDAKEKGVAPKRMTPVWLNSDGTVREDVAPWIKTAFELYISGVGKSTIAKRLRESGVERLAKASGPGVEGWLRNKAVIGKWETLIGTPEHHVIDDVYPLIIEPSLFYKAQVHAEKMKTQRPVKTANHFLVGLVRCGECEKNYIVQNLHGKPHSMRCRTRQSQNDCTNSHCVPKPILDAIYRYTSVTAAVEAVQQQQMGVNEKEIVTREAELLTLAKRVEGLAEAVKQAGPMPELIEALKQSRIAREAAENALVILRSTVICPAGTGWNEMGKVWKLEADDAQRLAAMLRMVGYHITVQTTGEITSSHSDVLYRYIGVDRALDKYKLLVNGKLTLIPKGYVDDYPYHEPFQEVVGEATMDEADRENLLLQYQGS

SEQ ID NO: 17812 - protein, 507 aa, synthetic construct
MKRAISYIRFSSEKQSRGDSLRRQAKMVTDWLKAHPEYYLDESLTFRDLGVSGFTGKHLQGGLGDFLTAIEKGLVKAGDTLLIESLDRLSRQDVDQASELLRNILRSGVDVVTLSDGEHYTKESLKDPLALIKSILIMQRAHEESLRKAERIQAAWDAKKEAAKAGIKISRRCPAWLKLNDDRKTFSVIPEKVATVKRCFQLRLEGKSIWEIVRTLNAEGHQTLNQYKAGSFGQSSVQDLLKNRSVIGYFTPKGCEEISGYYPEVIDETTFYKVQQLSYSRYGRKPASDKPLSVNLFKGVIRCSECGHALIITGFSDTRSGIYRCPLRNENRCSAKGLSRKQTDGTLLALLSRLDRFDSDTTNTIDTLKLHREHISSNIEKLVQLSLEIEDLSAITIKLKQLKGELSQVDADIEKETQRLKSIDVGCLSDCDLTTKAGRIEAQLIIKSAVKEVVLNTAKRRCKVTFHNGKSITLPITETPSEDVTEAIQSLSEVTERGLIDVDVVAI

SEQ ID NO: 17813 - protein, 644 aa, synthetic construct
MLRPICYERVSSIQQIEGGGGLDDQRSALEGYLDRNSDKFNNERVFIQDRGVSAFKNSNISSESQLGIFLQDVQNRKYGEGDALIVMSLDRISRRSSWAEDTIRFIVNSGIEVHDISASTVLRKDDPHSKLIMELIQMRSHNESLMKSVRAKAAWDRKIIEAVQNGTVISNKMPMWLKNVDNRYQVIQEKADLIIRCFEWYRDGFSTGEIVKRIADPKWQMVTVSRLVRDRRLLGEHKRYNDEVIHNVYPKVIDDDLFLTANRMMDRVMLEKNKPAEDLLLESEVVQEIFQLYESGLGSGAIVKRLPKGWSTVNVLRVLRDKKVVTQKIIDNLTFERVNQKLSMNGVANRIRKDITIAQDDYITNLFPKILKCGYCGGNIAIHYNHVRTKYVICRNREERKICDAKSIQYIRIEKNILKCVKNVDFQKLMIESTGSETSVLDGLREELSSLRREESSYNDKINERKLAGKRVGIHLNDGLTEVQDRIEEIEKEIISAQTVREIPQFDFDMDEVLDPMNIELRAKVRKQLRLVLKVVKYWMFDKRIFVQLEYFNDVLSHMLVIDNKRGGGDVIYEMSIEERKGERIYTVHENGHAVFIASVTIGTDLWSLALSRTRTIDSISNYLSLLAREGFEILVNEDQIDWF

SEQ ID NO: 17814 - protein, 506 aa, synthetic construct
MRTVITYLRFSSATQGAEGADSTRRQNELFKQWLRKNSDAQVVASFSDEGLSGYKGKHLTGQFGDMLARIESGEFSEGTVLLVEAIDRIGRLEHLETEALMNRIIAHGIEIHTLQDGLIYTRDALSDDLGISIIQRVKSYVAHQESKQKSFRVSQKWKQRAKLALAGEQRLTRNVPGWIDPDTFKCNEHAETVRLIFKLLLDGESLHNIARHLQSNDIKSFSRRKDANGFSVHSVRTVLRSESVIGTLPASQRNDRPAIPNYYEAAIDAATFNKAQEILDKNRKGRTPASDNPLTINIFKGLFRCQCGASVHPTGTKRTYQGVYRCNNHLDGRCDVPPLKRKPFDKWMIDNFLGMIDVGNDGEAEGKIAALQHEVEIVTARIKKATALLLEMDDITELKAQVKGLNQKRTEIQTTIDTLKRKTSLTDKELPQLKDIDLTTKAGRVECQLILSKHLKGLTLGKDSVTVTLQNDTEITIPTNPLPLNDGSPIFEIADKELLDIDAYQL

SEQ ID NO: 17815 - protein, 506 aa, synthetic construct
MRTVITYLRFSSATQGAEGADSTRRQNELFKQWLRKNSDAQVVASFSDEGLSGYKGKHLTGQFGDMLARIESGEFSEGTVLLVEAIDRIGRLEHLETEALMNRIIAHGIEIHTLQDGLIYTRDALSDDLGISIIQRVKSYVAHQESKQKSFRVSQKWKQRAKLALAGEQRLTKMVPGWIDPDTLKLNEHAETVRLIFKLLLDGESLHNIARHLQANNISSFSRRKDANGFSVHSVRTVLRSESVIGTLPASQRNDRPAIPNYYEAAIDAATFNKAQEILDKNRKGRTPASDNPLTINIFKGLFRCQCGASVHPTGTKNKYQGVYRCNNHLDGRCDVPPLKRKPFDRWMIDNFLGMIDVGNDGESERKIAALQHEVEIVTARIKKATALLLEMDDITELKTQVKGLNQKRTELQTTIDNMRRKASLTDKELPQLKDIDLTTKAGRVECQLILSKHLKGLTLGKDSVTVTLQNDTEITIPTNPLPLNDGSPIFEIADKELLDIDAYQL

SEQ ID NO: 17816 - protein, 507 aa, synthetic construct
MKRVISYIRFSSEKQAKGDSLRRQSKMVNDWLKAHPEYYLDQDLSFRDLGVSGFTGKHLKGGLGDFLTAIEKGLVKAGDTLLIESLDRLSRQDIDIASELLRRILRAGVDVVTLSDGEHYTSESLKDPLSLIKSILIMQRAHEESLRKAERIQAAWDAKKEAAKAGIKVSKRCPAWLRLNDDRKSFSVIPEKVETVKRCFQLRLEGKSIWEIVRTLNDEGHQSMSQYKAGKFGQTSVQDLLKNRSVIGYFTPKGCEEISGYFPPIIPETDFYKVQQLSYSRYGRKPASDKPLSVNLFKGVIRCSECGHALIITGFSDTRNGIYRCPLRNENRCSAKGLSRKQTDGTLLALLSRIDRFDSDMTNTIDTLKLHREHISSNIEKLVQLSLEIEDLSAITSKLKQLKGELSQVNADIEKETQRLKSIDVGCLSDCDLTTKAGRIEAQLIIKSAVKEVILNTAKRRCKVTFHNGKVIDLPITENPSEDVTEAIQSLSEVTERGLIDVDVVEI

SEQ ID NO: 17817 - protein, 505 aa, synthetic construct
MTLAFSYVRFSTKHQASGTSLERQVNASKLFCSQNGLTLSNQSYHDLGISGFKNVRRPELEQMLEAIQTGDIPSGSYILIEAIDRLSRKGISHTQDILKKILQYDVKVAFVGEDAKTLQGHILNKDSLNDLSSVILVALAADLAHKESLRKSKLVKASKAIARDKAADGEILPGKSVFYLDYDKKNKKYVFNKRVDLARKIIQMRLEGKGPRKIARLLNEENIPGPTGKQWYQMSVKRLLKSPVLYGAYQTHQIIEEKYIPVSLIENYYPALIDYQTFSQIQFDDKRVSKGRPSRHKFSGVLYCECGAVLCRKVNTYETKQGPKEYQYFNCFGAFEGRCKNNKAIKDLHIPLEKAIDKLQIKTRSVKNIKNEQIIAKREKIDQLNKMLLELEMPPVSVLKTISTLEKELQELLEQPDIQPPKSADVKTLVAIKDAEQYNLYLKRLVKRITIFQLNGPKNIRIKIEKTDGHYQSFIVNNGKIMFNADTKALQEHLRKLKEGTSDED

SEQ ID NO: 17818 - protein, 539 aa, synthetic construct
MLRQATQNLITALYPRLSHEDELQGESNSISNQKRILEAFAKQNGFTNLRWYTDDGYSGANFQRPGFQAMLADIEAGKVGTVIVKDMSRLGRNYLQVGFYTEMLFPQKGVRFIAVNDNVDSANGGMDNDFTPLRNLFNEWLVRDTSKKIKAVKRAKGMSGKPVTSKPVYGYLMDEDENYIVDEETAPVVRQIYQLCLAGNGPTKIARMLTEQQIPTPGTLEYRRTGSTRRYHPGYECKWATNTVVHLLENREYTGCLVNFKTEKPSYKTKHSVENPIEKQAIFENHHEPIIDRETWERVQELRKQRKRPNRYDEVGLFSGMLFCADCGHVMYQQRYQNKTRKQDCYICGSYKKRTRDCTAHFIRTDLLTAGVLSNLRQVTEYAAKHESRFVKLLIQQNEIGGKRKTAAATKQLEQAQERISEVSRIIKRLYEDNVNGKISDERFMELSADYEQEQRELKDRAAALQEELSKSQAATVNAEKFMGIVRKHLAFEELTPTLLREMIEKIVVHECSYDENGTRRQDIEIYYSFVGKIDLPEA

SEQ ID NO: 17819 - protein, 627 aa, synthetic construct
MAGIRTENKIYEVGIYCRLSKDDGTDNESASIATQKSILTDYVKRQGWHLAKTYVDDGYSGTNFQRPSFQNMIKDIESGLINCVITKDLSRLGRNYLDCGLYLEVFFPEHNVRYIAVNDGVDTLNKSAMDITPFRNILNEMYAADISVKIKSAYRARFQQGKFMGTTAPYGYIKDPADHNHLLIDDKVAHVVKEIFDLALKGNGVAKICRHLNKQHILRPAAYAAERGETGFERHFEGNEDKRYIWSGNSVRSILRSPIYAGNLVGYKRIAANMKSKKRPSKLPEEWEVIPNTHEGIVTQEEFDIVQQLITSRRLPQNKGGFVNIFAGVIKCVDCGCALRAMNVHRRKRPEIIDCVQYSCNNYARNGRSECSAHNIEARDLFNAVLADINCFADMAVNDEKAVRAIEKRLTETDQSRAKSLEKEKKKLNKRLAELDRLFSSLYEDKVMERITERNFEMMSGKYQKEQLEIEARLKEVTETLNDSYEKSQGVRDFLSLIRNYQGLKELDATIINALIDKILVSEREKLADGTVRQEIKIYYKFIGFVGELHITPTKRWTALKPKNCTVCGVEYVPSSGISKYCPACAKRIQREKSNESKRRSRERNRRACIELSAKNDRLTLSSEMDD

SEQ ID NO: 17820 - protein, 542 aa, synthetic construct
MQQLKQKRVAIYVRVSTEIQSTEGYSITGQINQIEEYCQFNNFKVVDVYADRGISGKSMNRPELQRMLKDANEGHIDCVMVYKTNRLARNTSDLLKIVEDLHKQNVEFFSLSERMEVNTSSGKLMLQILASFSEFERNNIVENVFMGQTRRAQEGYYQGNLPLGYDKIPDSKHELMINQHEANIVKYIFESYAKGHGYRKIANTLNHKGYVTKKGKPFSISSITYILSNPFYMGKIQFAKYKDWNEKRRKGLNDKPIIAEGKHAPIISQALWDKVQARKKQVSQKPQVHGKGTNLLTGIVHCPQCGAPMAASNTTNTLKDGTKKRIRYYSCSNFRNKGSKVCSANSVRADVIEKYVMDQILEIVKSDKVLKQVIERVNQDNQVDVAALNHDIAYKQQQFDEINTKLKNLVQTIEDNPDLTSALKPTIHQYETQLNDITNQMNQLKHQQNQEKPSYDTKQIAALLQRIFQNIEFMDKSQLKALYLTVIDRIDIRKDENHKKQFYVTLKLNNEIIKQLFNNNNLDEVLLSTSSLFLPQTLYFQI

SEQ ID NO: 17821 - protein, 449 aa, synthetic construct
MKQAIGYLRQSTTKQQSLAAQKQTIKALAEKHNIQHITFYSDKQSGRTDKRNGYQQITELIQQGQCDVLCCYRLNRLHRNLKNALKLMKLCQTYHVHILSVHDGYFDMDKAFDRLKLNIFISLAELESDNIGEQVKNGIKEKARQGKLITTHAPFGYHYHNGTFTIDTVKSPTVKAVFNYYLQGYGYKKIAQYLEADDNFINRKPYQVRNIILNPNYCGRVINQYGQYENMFPAIVSTTIYEEAQVTRTQKQVKRKPSENQLKQKIKCPYCHSTLTNMTVRKSDHSLRYYVCPQNMNNARFVCEFKGINAQELETSVLATCQDFFQNQQLYSKINHTIQQRLKRQRDIETKTTLNHEQLIEKLAQGKIDADTFREQSQSFRQQSNPITSINAHQIRKVFQNIIQQRFTLNMLYPYIDEIHITKNKTLTGIYFKNEPLNIVNQTAQSSIA

SEQ ID NO: 17822 - protein, 479 aa, synthetic construct
MNKVAIYVRVSTKGQAEEGYSIDEQIALLTSYCSIHKWKIHDTYVDAGISGATIERPELSRLSRDAQKKKFNTMIVYDLKRLGRSQRNNISFIEDVLEKNGIGFISLTENFDTSTPLGKAMVGILSAFGQLDRDTIRERMMMGKIGRAKSGKPMMTSTIAFGYTYDKVTSSLNINPAEAIIVKNIYNEYLSGRSLTKLRDYLNENDLLRNGKPWNYQGVSRVLRNPVYMGMVRFRGEVYQGNHDPIIDSETFEAVQKELKKRQLETYEFNKNTRPFRAKYMLSGIIKCGYCGSPMGVTLGTKRKDGTRNIRYQCVNRFPRTTKGITVYNNGQKCNSGFYEKDDIEIYVLGQVRLLQLNKAKLNKMFETPEIINVEEIENQINSLNNKMKRLNDLYLNDMISLDELKTQTYTFLKQKDLLENELNNNPAIHQEENRKQFQKLLGTKDITQLSYEEQSFAIKNLIDKVFVKPGIIDINWRI

SEQ ID NO: 17823 - protein, 481 aa, synthetic construct
MKTMNKVAIYVRVSTTNQVEEGYSIDEQKDKLSSYCDIKDWNVYKVYTDGGFSGSNTDRPALESLIKDAKKRKFDTVLVYKLDRLSRSQKDTLHLIEDVFIKNGIEFLSLQENFDTSTPFGKAMIGLLSVFAQLEREQIKERMQLGKIGRAKAGKSMMWAKTSYGYDYHRDTGTITINPAQALAIKFIFESYLRGRSITKLRDDLNEKYPKHVPWSYRAVRTILDNPVYCGFNQYKGEIYPGNHEPIISKEEYDKTQSELKIRQRTAAENVNPRPFQAKYILSGIAQCGYCGAPLKIMLGVKRKDGSRLKKYECHQRHPRTLRGVTTYNDNKKCDSGFYYKDKLEAYVLKEISKLQDDADYLDKIFSGDNAETIDRESYKKQIEELSKKLSRLNDLYIDDRITLEELQSKSAEFISMRGTLETELENDPALRKNKRKADMRKLLNAEKVFSMDYESQKVLVRRLINKVKVTAEDIVINWKI

SEQ ID NO: 17824 - protein, 481 aa, synthetic construct
MITTNKVAIYVRVSTTNQVEEGYSIDEQKAKLSSYCDIKDWSVYKIYTDGGFSGSNTDRPALESLIKDAKKRKFDTVLVYKLDRLSRSQKDTLHLIEDVFIKNGIEFLSLQENFDTSTPFGKAMIGLLSVFAQLEREQIKERMQLGKIGRAKAGKSMMWAKTSYGYDYHRETGTITINPAQALAIKFIFESYLRGRSITKLRDDLNEKYPKHVPWSYRAVRTILDNPVYCGFNQYKGEIYPGNHEPIISKEEYDKTQSELKIRQRTAAENVNPRPFQAKYILSGIAQCGYCGAPLKIMLGVKRKDGSRLKKYECHQRHPRTLRGVTTYNDNKKCDSGFYYKDKLEASVLKEISKLQDDADYLDKIFSGDNAETIDRESYKKQIEELSKKLSRLNDLYIDDRITLEELQSKSAEFISMRGTLETELENDPALRKNKRKADMRKLLNAEKVFSMDYESQKVLVRRLINKVKVTAEDIVINWKI

SEQ ID NO: 17825 - protein, 494 aa, synthetic construct
MRCAIYARVSTKYDSQKTSIDNQIDFFRHYAAQKNWEVTKIYTDVQSVTKRSGSGLKDLIEDAKAGLFDVIVAKELARFARNGRLSYELRDTCILNNIDIVCLDDSIDTTKGDMDKFGLYVWMYETEAANTSRRNKQAKQAKARRGLFVGSTPLYGYYSENGVLKVREDETPNVVRRIFNCYLEGTGMDSIAKSLTAEKVPTPSQIAKKSNASNLWHASTIKNILKNRHYCGDLVQNRTETIAVTTTKRRTLDEDGLIIQQDTHEPIISRDVFKTVQKMLQSRTRTSTAPKKHFFTNMLYCEDCKRGLWYKANQKAYRCGGNLKYGDSYCLNKKIVREKELKNVILSDLQELFQSFHNDSLMENLSSKANRKHEQMQQERINIEHKIKELRKKKLNYVNLYTEQLITKEELIEYKELVDQELKELDINRTQLAQNLTEGQDENYTADLLKKLKAAFLVKDLAPQTLHSLVKNITCTTEGTIQIHYNFSNELIES

SEQ ID NO: 17826 - protein, 569 aa, synthetic construct
MSKKTAVYTRVSSTKQVEFGTSLNYQQEVCINKAKVMGANDEDIIVYREEGVSGEDIDRPQMNRLREDIKQHKINKIIILHPDRLSRNMVDRLIVCSEFEKYEVGLFFVDSEYKDTEEGKLFFNIQSSIAQYELELIKKRTKRGTISAVKEGKVMPMRFTTYGYDYEDKMLKINEEEAKFVKLIYQWYVYDKLTMREIGEKLYIMGAKTKRNGSRNWSASTIQRILKNETYIGNYYYNRRKSKKVKGEKTASGRKKMEYEYRDKEEWILVKVPPIIDPVTFYLAEDQRAENGKNSGNVKHEYLLKQKIRCGHCGCKYSSYTATSMSRSVRTGEVTSKRQYRKYRCVNATHRKYGEGIERCRAKIIDAQLIEDYIWNNLVMEIVKNGDSILEDIKNTHSKPSQDIQDMYDTLRLRIERLQEEKRRIVQLFKKGYIDEIEMDRDMESVNKGIKEQEKELSKYEKQIFKLGKNETNVKMLGELFIKIKSLVTKKENITFEDKRKVIDLLIDEIIVTWDDNKKDKFRITCTGEIGDWINPEKRSESSTQEEIFRLASREDSPYAIERSFAQAA

SEQ ID NO: 17827 - protein, 523 aa, synthetic construct
MAVSRNVTVIPAIKRVGNNKNSESKPKIRVAAYCRVSTDSEEQASSYEIQIEHYTNYIKKNKEWELAGIFADDGITGTNTKKREEFNRMIEECMAGKIDLIITKSISRFARNTLDCLKYIRQLKDKNIAVFFEKENINTMDSKGEVLLTIMASLAQQESQSLSQNVKLGIQYRYQQGEVQVNHKRFLGYTKDENKQLVIDPEGAEVVKRIYREYLEGASLLQIARGLEADGILTAAGKSKWRPETLKKILQNEKYIGDALLQKTYTIDFLSKRRVKNNGIVPQYYVENSHEPIIPRELFMQVQEEMVRRANLRGGKGGKKRVYSSKYALSSIVYCGQCGNIYRRVHWNNRGYKSIVWRCVSRLEEKGSECTAPTINEEILQTAVVKAINELLANKEPFLSTLQKNIAAILNEGNDNATDDIDSKLEELQQQLLIQAKSKNDYEDVADKIYRLRELKQNALVESAEREGKRQRIAEMTDFLNEQSCELEEYDEQLVRWLIEKVTIHANRVEVEFKAGISIDVKN

SEQ ID NO: 17828 - protein, 521 aa, synthetic construct
MKRITKIEGNMANSFIKQKTRVVAYCRVSTDSNEQLVSLQAQNAHYETYIKANPEWEYAGLYYDEGISGTKKENRSDLLRMLSDCETGRIDLIITKSISRFARNTTDCLEMVRKLIDLGVHIYFEKENINTGSMESELMLSILSGLAESESISISENTKWAIQRRFQNGTFKISYPPYGYQNIDGQMIVNLKQAEVVKYIFAEVLSGKGTQKVANDLNQKGIPSKRGGRWTATTIRGILTNEKYTGDVILQKTYTDSHFNRHTNYGEENMYLVENHHEAIISHEDFEAVDAILNQRAKEKGIEKRNSKYLNRYSFSGKIICSECGSTFKRRIHSSGPRKYIAWCCSKHISNITECSMQFIRDEDIKTAFVTMMNKLIFGQKFILRPLLQGLRNQNNAASFRRIEELETKIVNNMEQSQVLTGLMAKGYLEPALFNKEKNSLEAERERLLAEKDLLTRSVNGNFAKVEEVDRLLKFATKSKMLTAYEDELFESYAEKIIVFSREEVGFELKCGITLKERLVN

SEQ ID NO: 17829 - protein, 482 aa, synthetic construct
MSSVKCVIYARYSSTKQDEISIEAQVRACKEYAANRDYIVLKVYTDEAISGKGTKTQSRKQYQALLRDSKQGSFDVVLVHRYDRIARNVGEHVNLELKLSENNISLVAVSQDFGQSKEAKIMKTMMWALSEYYIENLADETKKGHREVALKGLHNGGCPPFGYDIKNQQYIINEKEAYFVKKIFNCALKKEGFKEIVSEINKSGMVGKRGKPIRYTQVYEILRNEKYTGVYKYSLNEESNRSLRRAKPNAIRIEGALPQIINKALFLEVQKIMDERKQTGKKSNYLCSGLVYCGNCGSKMYGTITRRKGHEYKIFYCHNKCGTGTVSMDEIDKTVQEYITQLLSPGTILSISNTLKEYASNEKKRVNEFNSSIKLQIDEKQKQINNYMISLGSGVLPAEVISDIGNQIVSLKNEIKVLAEMPVPKDYTTKEINAWLNNLRKSTNERDTVLLLVERIDATKTAINVKSTLTTVLCENGCGSRT

SEQ ID NO: 17830 - protein, 511 aa, synthetic construct
MTEIRTSYKRIRVAAYCRVSTEKDEQLLSLKAQKEFFEEYADKMGFELVALYADEGISGTKLKNRKQFNKMMQDAERGLFERVYVKDVSRLARNVVDFLQSIRKLKSLNIDCQFITANMSANDGELTLTILAAVAQEESSNLSKRVKFGKKKNAEMGKVPNLVFGYDKTVGDYFNLKINVREAEIVKRIFDMYINKGFGTNKISQILNKECIKTKRNCNWSQNAICRILSNELYTGKVINCKERVEDFLTGKRVKVEESGQSIVDKPEIAIISRSEFEQAQSLLGQRVDTFKIKKERHSNKYALSTLIKCGCCDRSFRRIYRKRENSEYIKWGCSTRNSDGATQCSNTTLVDEVELLDEIKEYLNTVVSSKEKLLEKTINEFKKKYKLGHGETNESDLTSELERLKKLKLKQTKMYEADIISIEELKERTADINEAIRKAEAELSILQGNTSTFDRLEAIVKKYCGSINDVLNTDTIDNSMLKKVIDKIVVNTDGGIKVYLKLFKDLELVN

SEQ ID NO: 17831 - protein, 469 aa, synthetic construct
MDEERKVIVIEPTKRKAGGELAEARKKRRVAAYARVSTDEEEQLTSYQNQMEYYTRYIQANPDWEFVGMYSDEGISGLNTKKREGFRQMVEDAMNGKIDLILTKSISRFARNTVDSLVTIRQLKANGVEIYFEKENIYTFDSKGELMITIMSSIAQEESRSISENVTWSLRKNMEKGKVTMAYSQFLGYRKGPDGKPEIVPEEAEVVRRIYSLYLKGCTVREICRILKEDGIPTPRGKNCNWSVSTAVSILRNEKYKGDALLQKVYTSDFLNKKSKKNNGELRQFYVKDSHPAIIDEATFDLVQEEMARRGKEAGRGGTSPLSRKVFCGECGHLYGPKLWHADSSRRIYVWRCTHKYAKEPNCSTPNVREEDLKTAFVIALNRILESKEEYIDLLMREMETVKPARMALIRDYLDGLKKQPKIVTSFRGNAFNAVAEKITVMPDGSMVVRFKDGREVSVEKPKNNQERR

SEQ ID NO: 17832 - protein, 430 aa, synthetic construct
MKIEELGSRMESISRKKLRVAAYARVSLDDDVMLNSLNNQVQTYTEYIKANPDWEFVSVYEDRGISGTKEKRPQFQQMLSDCRAGKIDLILTKSFTRFARNTVVLLKTLRELKDLGIEVWFEKDNIRSLHESGELLITLLAAFAQAEAQSASENQLWRIKKNFEEGRPMWARTYGFRQENREYKIIPEEAKIVRMIYDDFLSGMTYSEIARKLNKGHVPSCMGTLWNQRSVSNILKNEKYAGHLLLQKTFTEDYITKKQIKNTGERKQYYVENAHEAIIPQDIFDAAQAERKHRHPGRKKEKPPDSPLSDIVICGSCCSRCICLTAVTGRGLKIRTWLCPSCFAAGRGECMCLPIPETVLIKRTANLLGERRLRKSVRTKLKYVVLLDPGFLLYHFKDGSETVSAWNASCWKNLYGAAYPDNEIKEEEVI

SEQ ID NO: 17833 - protein, 481 aa, synthetic construct
MITTNKVAIYVRVSTTNQVEEGYSIDEQKDKLSSYCDIKDWNVYKVYTDGGFSGSNTDRPALESLIKDAKKRKFDTVLVYKLDRLSRSQKDTLHLIEDVFIKNGIEFLSLQENFDTSTPFGKAMIGLLSVFAQLEREQIKERMQLGKLGRAKSGKSMMWAKTSYGYDYHKETGTVTINPAQALTIKFIFENYLRGRSITKLRDDLNEKYPKHVPWSYRAVRTILDNPVYCGFNQYKGEIYPGNHEPIISKEEYDKTQSELKIRQRTAAENVNPRPFQAKYILSGIAQCGYCGAPLKIMLGVKRKDGSRLKKYECHQRHPRTLRGVTTYNDNKKCDSGFYYKDKLEASVLKEISKLQDDADYLDKIFSGDNAETIDRESYKKQIEELSKKLSRLNDLYIDDRITLEELQSKSAEFISMRGTLETELENDPALRKNKRKADMRKLLNAEKVFSMDYENQKVLVRRLINKVKVTAEDIVINWKI

SEQ ID NO: 17834 - protein, 538 aa, synthetic construct
MTNQSTNNLKITALYVRLSNDDEREGESNSIMNQKKMLSKYASDHNLRKTTFYIDDGVSGTTFNRKGFQAMITDIEAGIVGTVVVKDMSRFGRDYLQVGMYTDIMFPEHNIHFIAINDGVDSEQGDNEFTPFRNIINEWYAKDTSKKIRAVFKAKGMTGAPLTTNPPYGYIKAPDNPTQWLVDDYSATIVRRMFQLTMEGYGPTQIAKKFQAEKILVPTHYAVSQGRKTNIVPSQSPYYWSDRTIAKLLEKPEYLGHTVNFRTTRKSYKDKRKIERDKKDWVIFENTHEAIIEQSVFDTVQELRKHKRRLTKQNELPLFSGLLFCADCGGKLYFCRGKSIARNQENYICSSYRRRTTECTSHYIRSVVLEEVVTNNLRKTMAYIQANGKSFFCDVLKGDQQAKKKEAQNQQKQLHDAQKRITELDAIFPQLYEDMVSGRINSERFDKLSSSYEEEQVLLKQQVVDISKEIQTELDVNVYIRELRKFVHKHVNFDSLTPELLHEMIDKIIVHTGKKIEVHYKFGLGELGNLVDEHIIKK

SEQ ID NO: 17835 - protein, 561 aa, synthetic construct
MEEVEYKNVEETLKLPVVAYCRVSTNKQEQESSYENQHRFFKERATKTKNEVLVKIYADKGISATSLKKREEFKQMLYDAGINEYRGRDEFTYEIDHKRKPKFRKIYVRNTSRFTRDASIITILRALLKNGVHVHFLDIDLIYDDTSKEFMLNMFINFAQQESIDRSKKVKDGNVVMASVGSIRVGGYGIYGYEYSPFTKKLSIIKEEADVVCKIYELYLKGYGVRRILNYLQDNGIKPRSGKERFSINSVRRILTNEKYYGCNVRNKYDSGGVFTKHYPKLKNKEEWIYHEGVIPAIIRKDTFLKAQEIGNNKVHKISQKGVYKGISEFAGLITCSVCSASYTRNVDKGRVFYNCSTKKSKGVHACDNINISEDKINEGIKILLETGVKKKFDKYKETMTQLLKDMVRSKILAQIDKDNEAEVKVIQEQIDKLTRQKNRLIELYLDENMDKAFLDEKADSINNELEIMNKKINELSKSNQEIYDELHEFDCMIDEINQIQISEVSNREELLQLIHIKIERHSENSKKPIAKIFFKYDEPIKKLSSKYKILEGISSVIIHT

SEQ ID NO: 17836 - protein, 519 aa, synthetic construct
MRIALYVRVSTEEQESSIINQKEYIKSLYPDDEVFVYQDFGISGTKISNRNGFIRMMKDAGLKQHFITKKKFVFVADETREPLFDKIVTKSVTRFARNTDVLSIWKELSQKGVTVFFQDINKDTASTEDSLILNLLLTLSQEESKNISERTKFGNRATAKANKIRNNSLYGYIFDKETNSLIIKEDEAVVVRKMFDLCIQGYGYVKISQILAEEGIYNPKGKPFAMSTIKNMIHNKKYCGYNVRNQWESRNLFSENHSHCRTKKENWIIQKNDKIEPIISEETWNLAQEQIKLRLLHQNTGGTVERRDTSDKIICNCCGKNFYICHSRKIGSGINSYPYYICSTKKKQGKNVCDNDNVQVKKVDAFIDGLAKNYYKNIRLSNKAKLIKLQGELKKAKNRSVTEINNECEAIKSENMYHEQKLSKLIDNFLDCSDVMKAVIDKKINDLELTIKNNNNKILELERSRTNIDADKMSIEKKIKELKKELSKIDTIELTREELMDKIRYIKVDKGNKFIVEYV

SEQ ID NO: 17837 - protein, 521 aa, synthetic construct
MKKITKIEGNLANSFLKPKTRVVAYCRVSTDSNEQLVSLQAQKAHYESYIKANPEWEYAGLYYDEGISGTKKENRSGLLKMLSDCETGKIDLIITKSISRFARNTTDCLEMVRKLIDLGVHIYFEKENINTGSMESELMLSILSGLAESESISISENTKWAIQRRFQNGTFKISYPPYGYDNIDGQMVINPKQAEVVKYIFAEVLSGKGTQKIADDLNQKGIPSKRGGRWTATTIRGILTNEKYTGDVILQKTYTDRHFNRHTNYGEKNMYLVENHHEAIISHEDFEAVDAILTQRAKEKGIEKRNNKYQNRYSFSSKIICSECGSTFKRRIHSSGTRKYIAWCCSKHISQITECSMQFIRDDDIKTAFVTMMNKLIFGQKFILKPLLDGLRNQNSAASFLRIEELETKIENNMEQSQMLTGLLAKGYLEPALFNKEKISLEAERERLLAEKDQLTRSINGNFAKVDEVDRLLKFTTKSKMLKTYEDELFENYAEKIIVYSREIVGFELKCGITLKERLVN

SEQ ID NO: 17838 - protein, 523 aa, synthetic construct
MAVSRNVTVIPAIKRVGNNKNSESKPKIRVAAYCRVSTDSEEQASSYDIQIEHYTNYIKKNKEWELAGIFADDGITGTNTKKRDEFNRMIEECMAGNIDMIITKSISRFARNTLDCLKYIRQLKDKNIAVFFEKENINTMDSKGEVLLTIMASLAQQESQSLSQNVKLGIQYRYQQGEVQVNHKRFLGYTKDENKQLVIDPEGAEVVKRIYREYLEGASLLQIARGLEADGVLTAAGKAKWRPETLKKILQNEKYIGDALLQKTYTVDFLSKKRVKNNGIVPQYYVENSHEPIIPRDLFMQVQEEMVRRANLRGGKGGKKRVYSSKYALSSIVYCGQCGDIYRRVHWNNRGYKSIVWRCVSRLEEKGSECTAPTINEETLQTAVVRAINELLANKEPFLSTLQKNIATVLNEKNDNATDDIDRKLEELQQQLLIQAKSKNDYEDVADEIYRLRELKQNALVENAEREGKRQRIAEMTDFFNEQSCELEEYDEQLVRRLIEKVTIHDGRVEVEFKSGISIDIEN

SEQ ID NO: 17839 - protein, 452 aa, synthetic construct
MKAAIYIRVSTQEQIENYSIQAQTEKLTALCRSKDWDVYDTFIDGGYSGSNMNRPALNEMLSKLHEIDAVVVYRLDRLSRSQRDTITLIEEYFLKNNVEFVSLSETLDTSSPFGRAMIGILSVFAQLERETIRDRMVMGKIKRVESGLPLTTAKGRTYGYDVVDTKLYINEEEAQHLQLIYDIFEEEKSITFLQKRLKKLGFKVKSYSSYNKWLMNDLYIGYVSYSDKVHAKGIHEPIISEDQFYRVKEIFSRMGKNPNMNKESSSLLNNLIVCEKCGLGYVHRAKDTVSRGKKYHYRYYSCKTYKHTHELEKCGNKIWRADKLEEIIISRVKNYSFATRNLDKEDELDSITEKLKTEHSKKKRLFDLYINGSYEVAELDKMMADIDAQINYYDSQIEANKELKRNKKVQESLAELATVDFDSLEFREKQIYLKSIINKIYIDGEQVTIEWI

SEQ ID NO: 17840 - protein, 590 aa, synthetic construct
MVMDGVKKRVATLYRVSTKGQLDGDDIPMQRNACRSFIEKQGNWELVKEYIEKGVSGFKVSASKRDAIQRAKEDAEKGLFDVLLVFMFDRLGRRDDETPFIVEWFINNGIEVWSVKEGQQKLEDHADRLINYIRFWQSSGESRKTSIRVNEKHSQMVEDGIYRGGLVPYGYKTVNSGVFNKKGKELLKVVIDEEEAEIVKKMYDLVLEEGYGQSRIAQYLNEKGIPSKTGKKWTSGAVNNVLRNPMYKGYMVYARGTEKEVVSKEKLEELVIIDEEKWNKVQSIREKRNPENVKNRGEESIITTTKSSLLLVGLVRCGHCGNPLCTTYNKKKYVRKDGTEYVKREAKYRCSGKAQKKVDCDGQTLYSPKKIEGVVLDELYDYLDQLETIDLTSKIQEFKQHNTDKEVKTLKKLQSEFDKVNSALVKLRDEALKIIMGESFFDAKVVNDLINQKENELRELEESINKAKLDLESKKVELSEMEKLQRYIPVWREVFEKASVEKKKMMLSTVIDKIVVFRDRVEITFKISLNRFLVNKGSHSNNDALPTELMPQTIWIICPCSIIYSLSAVCNPFFISRFQYRHGRRRRWSE

SEQ ID NO: 17841 - protein, 584 aa, synthetic construct
MKEVEVIKARSSSSNSARGKMIEQLRVAAYCRVSTDSEDQLNSYNSQKEYYTDLIQKNAEWIFAGIYADEAITGTQVTKREDFQRMINDCMNGEIDMLITKSISRFARNTLDTLKYVRMLKEKNIAVYFEDEKINTLTMDGELLLVVLSSVAQQEVENISANVKKGLKMKMKRGELVGFQGCLGYDYHPEDKSITVNEEEAEIVRYIFNRYIEGAGGSVIGQELENLGYLTKYGNSTWVPTTVLGIIKNEKYKGDILLGKTFTVDPISKRRLENLGEEDQFYIRNHHEPIISEEVFDKAQEILNRRSKNRGKIGDGNSKREKYSRKYAFSCLLECGFCGGTLTRRRWHSGTEYNKVIWQCVTSTKKGKKHCPHSKGIPETAIEEAFIESYRLLCDNNKDVLEEFLNRIDETLSSSSVNKKLLKVDKEIEAIEKKKSKLVDMRLEDTIDSDTYESKFSSMTSKQEDLLKERLQLQETARNEKDIKRRLRDFKKTLEQNEVLNEFDRYVFESIVEKVIVGGYDEDGNIDPAQLVFVYKTGFKNSLDGNRFKPERKNARGNRKSKDLCSHANDENQSLCSDTKADTY

SEQ ID NO: 17842 - protein, 452 aa, synthetic construct
MKAAIYIRVSTQEQIENYSIQAQTEKLTALCLSKDWDVYDIFIDGGYSGSNMNRPALNEMLSKLHEIDAVVVYRLDRLSRSQRDTITLIEEYFLKNNVEFVSLSETLDTSSPFGRAMIGILSVFAQLERETIRDRMVMGKIKRVESGLPLTTAKGRTYGYDVVDTKLYINEEEAQHLQLIYDIFEEEKSITFLQKRLKKLGFKVKSYSSYNKWLMNDLYIGYVSYSDKVHAKGIHEPIISEDQFYRVQEIFSRMGKNPNMNKESSSLLNNLIVCEKCGLGYVHRAKDTVSRGKKYHYRYYSCKTYKHTHELEKCGNKIWRADKLEEIIISRVKNYSFATRNLDKEDELDSITEKLKTEHSKKKRLFDLYINGSYEVAELDKMMADIDAQINYYDSQIEANKELKRNKKVQESLAELATVDFDSLEFREKQIYLKSIINKIYIDGEQVTIEWI

SEQ ID NO: 17843 - protein, 517 aa, synthetic construct
MKTIHKLARPQLPEPPKLKVAAYARASTSSNEQLASLQTQITHYENHIQNNDQWEYVGVYYDEGTSGTKVEKRDGLHRLIKDAELGKIDLILTKSISRFSRNTVDCLNLVRKLTDIGVTIFFEKENINTGDMESELLLSILSSLAESESYSHSENMKWANRKRMAKGIFKTVPPYGYQRKGAGFYLIPDEAKVIEQIFKWALEGVSAYQVAKRLNEKNIFTRKGSKWQDSGINNILHNIVYTGTMIHQRYFNDDQFRKKKNNGELPMYRIDNNHPPIISWEDYERVQELITLRANAKGTSKGSQKYSQRYVFTKRIICDKCGCNYKRVHIAGKGNTKVVKWSCTGHLKNKDGCDALPITDESLKTAYLTMLNKLILGHTIVLEPLINTPVEGKASKQELEKLSIEITKIDEKLEVLASLNASGVVSTKTALEEQGRLQMELNKLQEKQHKIMESVNGTSTQRIQLEQLHQFTKRSEMLTEWDEDLFLRFAELIVVYSRQEVSFELKCGLLLKERLEA

SEQ ID NO: 17844 - protein, 547 aa, synthetic construct
MKLLVTYIRWSTKEQDSGDSLRRQTNLIDAFYSKHKNDYYLLPAHRYVDKGKSGFHQQHKNQGSDFRRMFENVMSGVIPEGSLIVVENFDRFSRADIDTAIDDVRQILRKGVSILTLGDGELYDKSALTDPVKLIKHIIIAERAHQESLVKQKRIAQVWNHKTQLARELKKPMGKQAPGWLELSDDGSHYIVDEDKASLVNIIYDKRLSGMSMFAICKWLNEQGYPTINQRKVRISKTKKPDGNWSALSVKHILTSRSVLGFLPAKLSSEDRKTVLREEIEGFYPQIVTDSKFYAVQQLLEETGKGKTSSGDHWLYVNILKGIIRCRCGLVMTPTGIRKPVYQGTYRCNGNKESRCSYGTVSRKLLDTQLCSRLFSKLSQLHDEATDTAKLDELQRRLNTVDSELEKLTETLIQLPNITQIQEALRVKQGEKDELIVQLSREKARVKSVSSLDLSGLDMESVEGRTEAQIIIKRLVKEIVVSGNEKLVDIYLHNGNMIRGFPLDGKDDHTLTLEEATDEMQSLDDMLIFGEPVTRIYPAGDMEEVDA

SEQ ID NO: 17845 - protein, 522 aa, synthetic construct
MRKVTRIDGNNALQAFKPKVRVAAYCRVSTDSDEQMASLEAQKDHYESYIKANPDWEFAGIYYDEGISGTKKENRTGLLRLLADCENKKIDFIITKSVSRFARNTTDCIEMVRKLTDLGVFIYFEKENINTQRMEGELVLTILSSLAENESLSIAENSKWSIRRRFQNGTYKISYPPYGYDYVDGKLFINKEQAEIIKRIFSEALVGKGTQKIADGLNLDKIPTKRGSHWTATTIRGILSNEKYTGDVLLQKTYTDENFKRHYNRGEKDQYMIKDHHEAIISHEEFEAVKEILKQRGKEKGVIKGSSKYQNRYPFSGKIKCAECGSSFKRRIHGSGNHKYIAWCCTKHIKDASACSMKFVREDGIHQAFVVMMNKLIFGHKFILRPLLQSLKKTNYSDNITKIQELETKIKENTERVQVIMGLMAKGYLEPALFNTQKNELSKEAALLKEQKEAINRAINGSQTILVEVEKLLKFATKAEKQIDAFDSKIFEDFIEEIIVFSQEEISFKMKCGLNLRERLVK

SEQ ID NO: 17846 - protein, 541 aa, synthetic construct
MNEMKKKRIGAYIRVSTERQVEGYSIEGQITQIEQYCQFNGYELVDIYADRGISGKSMNRPELQRMLKDAKNGKLDCVMVYKTNRLARNTSDLLTIVEELHRQNVEFFSLSERMEVKNSTGKLMLQILASFSEFERNTILENIYTGQHQRALEGYYQGNLPLGYNNIPDNKKELMINQHEANIVKYIFESYAKGHGYRKIANALNHKGYVTKKGNPFSISAVTYILSNPFYIGKIQFAKYKDWNDKRRKGLNDKPVIAEGKHAPIIGKNLWDKVQARKKQVSEKPQVHGKGTNLLTGIIHCPQCGAPMAASNTTNTLKDGTKKRIRYYSCSNFRNKGSKVCSANSVRADVIEKYVMDQILEIVKSDKVLKQVVERVNQDSQIDIAALNHDIAYKQQQFDEINTKLKNLIQTIEDNPDLTSALKPTIHQYETQLNDITNQMNQLKHQQNQEKPSYDTKQIAALLQRIFQNIESMDKSQLKALYLTVIDRIDIRKDENHKKQFYVTLKLNNEIIKQLFNDTPLDEVLLSTSSLFLPQTLYFQI

SEQ ID NO: 17847 - protein, 523 aa, synthetic construct
MEEKMTVTLLPARKQAGFAKRDEENPKLRVAAYCRVSTDSDEQETSYEAQITHYTAYINSHPDWELAGIYADDGISGTNTKKREEFNRMIDDCMAGNIDKVITKSISRFARNTVDCLHYIRKLKDKNIPVYFEKENIDSMDSKGEIMLTIMASLAQQESQSLSQNVKLGLQYRYQQGEIQINCARFLGYSKNEKKKLIIVPEEAEVVKRIYREYLEGASMLKIARGLESDGILNGAGREKWHTSNINQILRNEKYIGDALLQKTYTTDFLTKTRVKNHGLVPQYYVENSHEAIIPREFFMQVQEELIRRRIVHTSPNGKNRTFSSTHSFSNMIICGGCGEFFRRIHWNNRGKKSIVWRCISRLENTGQFCDARTVLESTIEQVLVTAINQALCDKDSFLSILRSNIENVLIHENDTTLADIDKRLEELQTELVKLANSKAEYDKVGDEIYRLRDEKQKVQLDIIGRDELKKRIDDMGDFLKGQPTALIEYDEALIRRLIEKVIVYEDKFTVEFKSVVTVDVEG

SEQ ID NO: 17848 - protein, 520 aa, synthetic construct
MKKITKIAENTTDFTERPKLRVAAYCRVSTDSDDQLVSLDTQIKHYDSYIKSNPEWEFAGLYYDEGITGTKKEKRLELLRMITDCENKKIDFIVTKSISRFARNTTDCLELVRKLLGLGIFIYFEKENINTGSMESELMLSILSGLAESESVSIAENSKWSVKRRFQNGTFKISYPPYGYDTVDGKLIVNEVQAYIVRLVFSEILSGKGTGKIASELNCRGVPSKKGGRWTATTIRGMVGNEKYTGDAIFQKTYTDTHFNRHYNYGEKDQYLIKNHHDAIINHEDFEAAQSIIEQRGKEKGLEKQNKKYQNRYPFSGKIICGQCGGKLKRRIHSTGRHTIAWCCTNHIEDTEKCSLKYIPEPDFEYAFVTMMNKLIFGHQAVLRPLLMGLRGINSEDSVARLHDLDKKLEENAEQRKVLTGLMTKGYLEPAVFNKGNNELLQDAERIQRQKESISRFINSDNINLHEVSELLQYATKSEMLNDFDGELFTRFVDRILVYSRTEIGVELKCGITLKERLVR

SEQ ID NO: 17849 - protein, 604 aa, synthetic construct
MKKVFVYHRVSSDQQLDGSGIARQAELLEGYLERTGICAEMDDPAPVVLSDQGVSAFKGLNISEGELGAWMEQVRNGMWDSSILVVESIDRFRRQNPFDVMGYINALMAHNVAIHDVMANIVISRSNSKDLPFVMMNAQRAYDESKYKSDRIRKGWAKKREQAFNKGTIVTNKRPQWIEVENDKYVLNHKAAVVKEIFALYQTGMGCPTIAKKLQTKEGEQYKFNRPWTGELVHKILTNRRVTGKIFISEIIRNHDDIENPVTQKKYDMDVYPVVINEEEFELVQELLKSRRPNAGRVTVKKDGQEEVLIKSNLFSGIARCTECGGPMYHNVVRAKRTPKKGDPKIEEYRYIRCLNERDGLCENKAMTYETVERFVVEHLLGMDLNTVIKEQEFNPEIEVIRIQIDQVKDQITNYENGIERRKSAGKAVSFEMREELDDAKLELEQLLARQASLATVQVDLPVLQDVNVTELYNVNNVDIRTRYENELNKIVSNIRLKRNGNFYTIDIIYKQNELKRHVLFIENKKKEQKLISEVIIENVDGAKFYYTPSFVISVKDGEIRFQQTKEDLTIIDYSLLLNYVDAVDRCDAVGVWMRNNMSFLFTK

SEQ ID NO: 17850 - protein, 459 aa, synthetic construct
MRNRFENIAGLRVGAYIRVSHDEQVKHGYSLDAQRKNLQNFIKENHLQLVDFYEDEGITARKNLKNRKAFKRMLEDIEAHKMDLIIFIKLDRWFRNIQDYYITQQVLDKNNVQWIATTEEYDTTTASGRLNLNIRLSIAQDEADRTSERIKFVFDEKKRRREALTRSVPIGYKISDNHYVIDDEKAPLVRDYFKFYLETQSIVKAVDMIRDKYNFPLKYSRARGMLTMDAYIGTFHNIPNYAPPLLDLELYEAAKALSHKRSFRQNQTGNIYIFSGMIACRHCGKTMVGFHRVMYSQRRGERDYYGYRCENYWRDHNCTNNHTFGEFRIEEFLLNNLRDLADHCIRDYTIEKKREENTPQPNPQKLKNKIDKLRRLYMDDLIDLDSYKREYAAYQEQLKKMEPQKEDLNKTKQVDALRQLLNSDFETCYQSMSREELEPRAQIKKPGGNKTWQQQPAKI

SEQ ID NO: 17851 - protein, 461 aa, synthetic construct
MRNRFENIAGLRVGAYIRVSHDEQVKHGYSLDAQRKNLQNFIKENHLQLVDFYEDEGITARKNLKNRKAFKRMLEDIEAHKMDLIIFIKLDRWFRNIQDYYITQQVLDKNNVQWIATTEEYDTTTASGRLNLNIRLSIAQDEADRTSERIKFVFDEKKRRREALTRSVPIGYKISDNHYVIDDEKAPLVRDYFKFYLETQSIVKAVDMIRDKYNFPLKYSRARGMLTMDAYIGTFHNIPNYAPPLLDLELYEAAKALSHKRSFRQNQTGNIYIFSGMIACRHCGKTMVGFHRVMYSQRRGERDYYGYRCENYWRDHNCTNNHTFGEFRIEEFLLNNLRDLADHCIRDYTIEKKREENTPQPNPQKLKNKIDKLRRLYMDDLIDLDSYKREYAAYQEQLKKMEPQKEDLNKTKQVDALRQLLNSDFETCYQSMSREERRSFWSRVVHRIYWSQEEGFSVDFF

SEQ ID NO: 17852 - protein, 461 aa, synthetic construct
MVNRSRFEHIAGLRTGAYIRVSHEEQVKHGYSLDAQRENLEQFIKENRLKLVDFYMDEGISARKNPQKRKEFKRMITDVEAGNLDLIIFIKLDRWFRNIQEYYIAQQILEKNNVQWVATMEDYDTTTASGRLNLNIRLSIAQDEADRTSERIKFVFENKLKNKEVITGACPLGYKIENKHYVIDEETAPIARAVFDEYNDRQSKRKTLDAIYARFGMKLCARTVDRIIKNRLYIGEYKGIPDFAPALIDKNFFDEVNALFEKRSIRLNRTGRIFIFSGLIVCKECGRRLQASSTKYFNQQGQQCILIYRCAKHFVDNSCNNNRTVNEKKLEAYLLENVRPLLEQHVKYLVSKTKEAPAVNDGAKIKRRMEKLKELYVADLINIDDYRKDYEECQEALDHIEAQKNKAMAPDKIKAAEKFLSMDFETIYASLTREEQQQFWRKVIDKIIFDPETRDFSIIFL

SEQ ID NO: 17853 - protein, 491 aa, synthetic construct
MGLAAIYLRLSRNEEQLNIDEILLNHRNALTKIAKQQKLTYDIYQEISSGVNTERPELNLLLSRLDDYDALLVMDIDRISRDNAHAEEIKKMLIIHDIKILTPQGAIDLSQESNEMLFSFQAMMANFEYKQIRKRLGRGRLAAAEQGKWTMSNRVPLGYKKNEEKRLEVVEDEAKIIRFIFQKTLERVSANEIAKQLDILGWRSRQGKVLTSTHISNMRRNVVYYGVVKAGRKVNGRVVDEVFVEDAHEPIVSNQMFLEVQKILEENTTGNFFNKLKATRKLQNLIYCNCCKRKRYIQCDGNGIDYIKSCIYKVDNNKCRDRGYKYEPIEQFVLQKVKEKKSAFEQELQMLKSLDTTEVEKKLLIQRESLEKQINRFNKRQRNLKEMRMDGEISKAEFYEMRDENEEQIKQVKQQMELIDIKLENLSNTDEEQDRLQYAIKTLDKLEELKAESCNTFLKKFIKKIWFSSNTEANHDTTRPKEDATIEIEWL

SEQ ID NO: 17854 - protein, 690 aa, synthetic construct
MNKINPEHLARGAYVYVRQSTADQLRHNHESRRRQYALADRARALGWTEVVVIDDDLGVSAGGVARPGFERLLAAICSGQVGAVVSIEASRLARNGRDWHTLLEFCALVGSLIVDEDGIYDPRSVNDRLLLGMKGTMSEMELSLLRQRSVEALKLKAARGDLHTTVAIGYVRSEGDRIERDADLRIREAIAAVFRRFAQAGSVRQALLWFRQERIDLPSAVYENGRRCVIWRLPVYNAVLKILTNPVYAGAYAFGRTETRVRIEAGRKRVVHGHRRAQEHWQVLIQEHHEGYIDWPTYEHNQRVIADNTNMRGSMARGAPRRGEALLAGLLRCAHCGRKLHVAYSGSDGTIARYHCKGAAINHGAVPGCISFGSLRVDEAVSGEVLSVLLPLGVQAALRAIEHHANDEHATRRQLELALEQARFEAARAQRQFDAVDPGNRLVAAELERRWNERLSEVTRREAEIKTLQTVTEWSLTPQQRDDLMALGTDLPRVWSHPSASNAVRKRILRCVIREIVARVDEARIELVMHWQGGDHTELSVVKNRTGQHRWTTDVGVQVLIVQLARQLGDAGIASLLNRLGHRTGKGHTWTEMRVRSFRGDHHIAVYQNGEREARGELTLEQAAEALGTSKMTVLRMISVATLPATQACKGAPWAIKAADLQRPEVRASVSSPGVRPLPDDPRQISLELQ

SEQ ID NO: 17855 - protein, 615 aa, synthetic construct
MTLRPAIIYARFSTPSQERGDSLNRQLGDCRAFCEQHGLTIVDEIFDLGRSAYKGDHLTIGNLGKLTQSIMAGEIPAGTTIVVEKMDRLSRQKPRVVQRWIEDICDRGLRVAVRDPERFIDAKYLDEGSNTVALLDILMQGHANNIFSKNLSDRLSKAWSSKRTKAANEGKVLTSVIPAWLYVDDAGEIQVDQERGALVRRMYEMTAEGIGAWTIANTFNDEGIDPWGPNRNQKAAKIRGWNHTYVRNVILSPAVDGDHYFTVPHKKGRKRSGEVLRGYFPMIEGVDADLIARARSVVQQKGSRSGGRFAAYGRNLFSTIALCSHCGSRMVLTGRGVHSPKPAYLQCDGAKKHKGCDRKGTFNYKALEPAILSKILTIALDDRFFKTDDEDILRLTNAVAETQKRLTDADELRRGYSGLLAKRPDDTRLNADYDAAVQECDRIEAELEAARHALATAKGATSPAEHARRVLEVSEAMKSDDEEVMAAARRRVHASLKEVIYRMECKQEFVEGQSKPVKTVSIAINEGLIVYTFDNEGNVLFAHEGHKDPAIVNAMTTGAVSHNAPAVAKTLHRAKSEQVQRRAPNHSPILVEKVYGPQQRRTVDPSEQQWKYGTK

SEQ ID NO: 17856 - protein, 658 aa, synthetic construct
MRIYGCTNQRDLVELPNTHLEKIYNIVLPNSSSNKRIIGYARLSSREQHLEGYSLEAQMMRLINAGCNEIIFDIQSGRQYKERDRKGFQELLRLIELGQVDELVVDRIDRLGRSVLSIRKAIDFLSAKGQKLRSLREQIDTDTASGKLMLNMHASLAEYYSDALSEAVKNGHRGMRERNSAYFPIFGYKVENQKYVPDYTEVLCLIDGRQTLTKVDIAKDLIKTYLEFRSFRAARIAIAKKYGINHIPDTACGRGSNQQGRVKMPITSAGFSSWLNNPILRGHTCYGRSGKQRTRHSSKWDIRVNTHEGIMSESEYQEVSQLLQWNVDHHVRHNGKTKPIHPLSGLIKCAECGGTHRVYYTMGREKVYMYGCSNYANYRSCTQKQVIQYRLVEPLVLKILSERAVNLAQLANTVNPVPEIPKLRELRSQLLGLENLGNNPALEAAKRDLQRQIELIQFEQKSNELNAKSVHSLTAEVFANPLYWSTLDQQNKQDIFRALIKEILVRGQYVLGVTLRDGHAVQFPDLKVPKELKGHKIVVGTKVIVCSRWGDRKEGEVTQITYRSNTESTKRLTVNCEKETIYFDRRTGREVPPSGKVDRYVVTRWIEIETKDKPSIHCPVCNSDRLRKNGHNHATGRQQFVCKDCSKHFLLKPIDEND

SEQ ID NO: 17857 - protein, 515 aa, synthetic construct
MYRPQELDVFIYLRKSRKDLEEEKKAREQGQHYDTLERHRTQLLELAHKEHHNIIDILEEVVSGEYISERPLMQRLLREVESGIADAVLVMDLDRLGRGDMVDQGTIYRVFRYSETFIITPTEIIDPNDENQELTFSIKSLIAREELKTIVKRMQRGRRASAKEGKSISRVPPYGYLRDNNLKLYPDPEKNWVIPKIFELMANGMGRQAIAQELDRLGISPPEGEYWNPSTISSIIKNEVYLGHIIWGKIRYIKQNGKYIRKKVPKERWQRHNLAHLPLVSEELFQKANIAHSKRWRPPTIKTKNLSNPLAGILLCELCGHSMLYQPRKDRPNPQVRCVQPSCKGIQKGASLTLVEQRILDGLKQIIESFEIQENMVQKKKSSNNIHLQQKALEKKEQQINDLQKQKSNLHDFLEKGVYDVDTFLERQKSITVRLKATQEAIEELKHEIKKILEKEKHIHEFVPRIKNVLEAYYATNDIEKKNHLLKSVLEKVTYLRKKEWKRKDEFIVELYTKI

SEQ ID NO: 17858 - protein, 515 aa, synthetic construct
MKTAIYLRKSRADLEAEARGEGETLAKHRATLLKIAKEKNLNVLTVREEIVSGESLVKRPEMLALLEEIEDNKYDVVLCMDMDRLGRGGMKEQGIILETFKRSNTKIMTSRKTYDLNDEWDEEYSEFEAFMARKELKIITRRMQRGRIASVEAGNYLGTHAPYGYDIHRLNKRERTLTINLEEASVVRMIFEWYANEDMGANAIMRKLNELGYKSKLGNDWNPYSILDMLKNNVYIGKVTWQKRKEVKRPDATKRSCTRQDKSEWIIADGKHDPIIPESLFEKAQEKLNTRYHVPYNTNGLKNPLAGIIRCGKCGYSMVQRYPKNRKHTMDCKHRGCENKSSYTELIEKRLLEALKEWYINYKADFEKNKQDESTKETQIIQMNEAALRKLEKELVDVQKQKNNLHDLLERGVYTVDMFLERSNVVSNRINEITETMENLRKEIKTEITKEKVKKDTIPQVEHVLDLYFKTDDPQKKNSLLKSVLEKAVYTKEKWQRLDDFKLVLYPKLPQDDDK

SEQ ID NO: 17859 - protein, 543 aa, synthetic construct
METVGQSHRPKVYSYLRFSDPKQAVGNSADRQLHYAQRWAVQKGLVLDETLSLRDEGLSAYHQHHVKQGALGVFLQAVEDGRIVDGSILIVEGLDRLSRAEPIQAQAQLAQIINAGITVVTASDGREYNRAGLKAQPMDLVYSLLVMIRAHEESDTKSKRVKAAIRRQCEGWNAGTYRGLIRNGKDPQWLRLSPEGWELIPDRVAAVKRALELYSQGLGAGRAANVMHDEGFKLTEWGISGLQIYRMIKQPALRGIKRLSLDGEDYELEEYYPRVLSDIEWAELQHLASQRFRRRGAGEIPGIITGVGLAYCGYCGTAVVAQNIMSRRRADGTIADGHRRLHCTSYSKNGGCSYGGSCSVVPVERAVLSFCSDQINLARLLQAGDAGQTVQKRLVAARAAVAKITNQLTKVTDALLADESGAAPLAFVRKARELEQQQAVAEQTVTQLEHEAAATAGAVRPAQAERWSELAALVKEGDYSAREQVRQLVMDTFNRIVIFMRGMETDGRNGPFIDVQLFSRSGQHRLLRINRKNGEWVASEDWE

SEQ ID NO: 17860 - protein, 482 aa, synthetic construct
MTEWLEANPDYLLDELTYKDLGISAYHGTHATRGAFSDFMVAVEGGYIEYGTVLLVESLDRLSREKIGEATERLKSILKAGIDVVTLSDHTHYTKDSLDDPYSLIKAILIAQRANEESEIKSRRMKSAWKKKREEAEASGKIITRSCPRWLKVSQSGDSFELIPEHARTIKEIFRLRLKGQSLNGIVKILNDKKVITLTGEIGVWNPSTIEKLLVNKALIGINVPSYRTIANGIQEIPGYFPRVISDTTFYAVREFRKPPFGKDKHTDNPYLINLFRSVMKCKACGHSIILNSIDGKGMGYYVCPMRRLHRCNTPSIRRDIADVNLITTVVIHADKFQTNSTSRESTRSLQDRNIEVLKSIDKLIEALQIAPEVTALAEKVKVLHKEFKSNEATIRAVKNKQRLAVSEDVTTLDLTLKEDREKCRRFIFKTFKEIVLDTENKTCDICFSNGFKLINFPLLKSISSEQLISALTYTDDSTLIL

SEQ ID NO: 17861 - protein, 517 aa, synthetic construct
MDNVILYVRVSTDEQAGRGYSLRDQEQKLMTYCQTNNLNIIAIYREDYSAKTFKRPEFKKLLDFCKKNKKSVNQVIFIKWDRFSRNTAESYQMIATFNALAIRVNAIEQPLDLTIPEQGLMLAVYLSIPEVENHRRSLNVTSGMRRALKEGRYMGSAPLGYDNGRDSAKKPLLIPNKDAVLIQEAFELMATGIYNQKEVLIKLKTKGLKSSKTPFSNLLKNPIYYGGIFIKAYKDEKETIINGLHEPIITKSLFDKVQDILNNRRQKHHTKHKKLNDKFPLKGFLLCPVCNNPLTASTSKGRTKHYSYYHCISPCNGRYVLEEVSQWFNDFLDSISLNGPIKKLFEEVVKEQLSEKAESNKLGPKHFEQIKKIEQKLERLQDMYVDGEIEKSDYQTTKIRYENIVTELKEKEKNDFDEKVLFDLYQKAINKMESIEKQYNNADIEGKRLLLGSIFPNKIHFENKKVRTADVNPILNEISSINKAYRGIKKWDKSKKLDMSHRVTAKGFEPPTLRAEI

SEQ ID NO: 17862 - protein, 551 aa, synthetic construct
MKNAKVYSYLRFSDPKQSAGSSIDRQMQYAARWATEHKLTLDDSLTLRDEGLSAYHQRHVKHGALGVFLQAIDDGRIAPGSVLIVEGLDRLSRAEPIQAQAQLAQIINAGITVVTASDNKEYNRERLKANPMDLVYSLLVMIRAHEESETKSKRVKAAFRHQAEEWLAGNFRGRIATGHNPEWLKWSNGTWVEIAERCEALRFALRLYKQGHSGSAILVMMSEKGMSLNNKGLPRSTNFYRMLLNPALYGTRNLEIDGQKYQLENYYPSIISHAEWLELQAMISDRTKRGRKSEIQPVISGMGILRCGYCGGSLAGQFVGGKRKRKEDGTPHDGHRRLLCGHHSMRACPVHGSCSSVPVENAIIDFCSDQLNLTSLTSNRDLTKPVHQQLLIEKNKAKDTQAQLNNLTEALLSATTDAPRTFIQKANQLESILNEINSRIAELEAKLAEATKIEASPSLSAEWAALAEGVKTLDNEARLKAKQLVYQTFERIIVYSNGLLPKSGRKKGKSAPPIDLILIPKGGKPRTLRINRKTGEWIAGEDILIEKQIQI

SEQ ID NO: 17863 - protein, 536 aa, synthetic construct
MSPMSRPAVIYCRVSSLKQTTRGDGLNSQETRCREYARYKGLEVVQVFVDDMSGSLTARPGMTAMLAFLRSRRRDSHVVIIDDISRLARGLEAHLKLRADIARAGGKLESPSIEFGEDSDSVLVENLLASVSQHQRQKNGEQTLNRMRARTLNGYWCFQAPVGYRYQRMQGHGNLLVRDEPRASILAEALEGFASGRFESQVEVKRFLEAQPDFPHDLPDGQIRNQRITEYLTRILYAGHIEVPGWNVSRREARHEGLISFQTWLKIQERLHGPRKAPERADLAEAFPLRGFVTCGDCGRPLTANWSRSKTGKRHPYYLCFNRACASRGKSIPRDALEGDFETLLQTLQPAPSLVRVAQAMFRDLWDDRLARAEQATTYAKAETDRIERQTAQLLDRIVEADNPTVIAAYERRIARLETEKLLLQEKALAAGQPKRGFGEMFELSMRFLANPWKLWASGHLELRRLVLRLGFRDRLAYVRGEGFRTPKFSSPFKALEAFSMARSEMAHPTGFEPVTSAFGGQRSIQLSYGCFEGGV

SEQ ID NO: 17864 - protein, 495 aa, synthetic construct
MKTAYLYVRVSTDEQKRKGYSLPEQEDRLLKYCKYNNIEVKGIYREDYSAKNFNRPEWKELFSEIKKKSSEDKNILFIKWDRFSRNVEYAYEMIGKLRKYKTTAMAIDQPIDFSVPESTVMLAVYLAVPEAENTRRAQNTSNGIRRAKLMGRYPNKAPIGFINVTLIDGKKAIVPKEPEAEIIKWAFSQAVQNHHKISEISKIANEKGLICSRSYFFRILRNPIYCGIISVKLNSNERQMIKGLHEPLISEALFDQVQSVINTKRKMTAKRDDLKEMFFLRGFLTCPVCGRKLTGSFSKGKQNRYPYYHCDNRCKIRIGAVLLNDSYQNKLQELILADNTMELFKNILENQNIKTQKASYLYAQQLVDRKIKEEKLTLSRGRKLFIAGILKIDDYNELKQESQINTKNLKKEERDITLNLRVIDKMNQMENKTFREIFQKFVKFDTSDKKYLVNLIPPVDIDYKTGDLSLELKPAFSKILSKKSNRKNNRKNEFH

SEQ ID NO: 17865 - protein, 552 aa, synthetic construct
MKAAIYSRKSKFTGKGESIENQVQMCKDYAQNQLKDKNITEFLIYEDEGFSGGNTNRPEFQRLMEDAMIKKFDVLICYRLDRISRNVADFSSTLEILQKYDIDFVSIREQFDTSTPMGRAMMYVASVFAQLERETIAERVRDNMLELAKTGRWLGGVTPIGYKSNPVTYYDTEMNEKKMVKLTQVPEELKTVKLIYNKYLEFKSLSKVETYCLQNNIKTKRGSDFNKANIRLVLNNPVYVKATDEILEYLESKGITCCGIPDGEHGLLTYNKQKTIYGDNGKVVRVNRDTKEWIAAVSSQKGIIEASDWLKVQKILTENKDKVPNLGKTHNALLTGVLRCAKCGSTMQINHGHQSRKTGETIYYYACSMKKYSKSVRCNNKNAKVAELDLVVKNYLKKLAMNKKVLLAKLSEQNRKSKEFNNSMNREETLKKSIAEKEKQIENLINKLAIDDEISDLIINKIKSIKNEISELKKELVNIDTIKSQFNETEVNLSFISMLLDRCSIIDTLTDDEIKQLIYALIDKITWDGEKYEIEINFIGSNKENDEEYKKK

SEQ ID NO: 17866 - protein, 429 aa, synthetic construct
MRVRIIEPVKKQENKRKRVCAYARVSTGSEAQGESLENQIQYYENLISNNPDYEYAGVFADRGITGTTDNRPEFQRMLNLAKEGKIDLIITKSISRFARNTAIMLQVVRELKDIGVEIIFEKENIRTLSGDGELMLTVLSSFAQEESKNISDNLKWRVKKKFERGELIINTTRFLGYDKDEYGDLVINPKEAEIVKRIFEDYLKGKGTFTIAKELNSENIPTVAGGRWHESTILNILKNEKYKGDAILQKYYTPDHLRKVSVRNEGVIDSYHIEDNHSPIVSREMWEQVQIEIEKRAKAKGNKAEDRKKYTNRYPLTGMLYCGKCGSSLRRRTRNSRHSCKKIVWQCSNYIRNGKDACTGTSIDDEVINRLNIEEPIIVREEVKDGKKYYSYTCKSKQEQFSRANTAAEKENGNLLQSVNRPIRTVIKL

SEQ ID NO: 17867 - protein, 437 aa, synthetic construct
MSTDQLEQLSSYEAQVNYYTNYINGHPDYECAGIYADEGISGTNTKKREQFNKMIEDCRAGKIDMIITKSISRFARNTLDTLNYVRQLKELGIGVIFEKENINTLDSKGEVLLTILSSLAQDESRSISENSTWGIRRRFEQGKLHINHTKFLGYDKDEEGNLVINEKQAKIVRRIYKDYLDGKGPNRIARELEAEGVPNWNGKPKWYESSIRKILSNEKYKGDALLQKTYTVDFLTKKRAVNNGEVPMYYVEESHPAIIDKEMHTAVQLEMERRRAFAEKYNISKLDYATVENPFAGRVICGHCGSAFGRKVWNSTDERLRRVVWRCNKKYKIKGKKSCENKHIDDKVLYHAFVNTFNVMVENKNYFMEKWKEELNNENVLVRYRAKQFMGILKDAEKVDDFDIDMYFRLVEKMTVFYGEKIIISLLDGTEVEVVVE

SEQ ID NO: 17868 - protein, 576 aa, synthetic construct
MKAIVYARWSSLEQAKEGRTTLARQLSLCGSFAERNGYTVVERITDEGRSAWTGDNIRTGNLGKLKERLERNGGHDLTIIVEKLDRLSRQSPLVVMNFLQSLCATGATIVSADGRHKITGDDLHRNMMGVLSVVFETFRGFDESQAKSERVGEAWRIKRERGGAMTKICPAWLRLKADRSGYELIPDRAAVVRRIFADIDAGVGKFTIANSLNAEGVEPWGTGKKKGNGWHASYIHKIITNMACVGDYQPHRKAKADVRRTPDGEIIRGYFPAVIDEATFARVNDRRTVRLMAQQRPGRSLVNLFGGLGKCSCGAIMTMRSRGVSVRADGTKVREDYLYCDSAIRKRGCENRAGWNYEAIERGVLDKLLHLALDPSHFRKADVVAPLEAELATLKRRLADDEKRMAKAYALALEDDEDDNAQAGYRRIKQTVKDAKAAISALEERLAAASGAVSPEQHLKRVDEVRALMNSDDPDERYQARAKVKLALNDLVAKMTFGLKDRVSVLLVDQARLFSIKRDGSIGEDLDLRAMFPGELVNGRFGPSTTRFEGGTTVNNELSPEQEAGLAGYLRRQRAA

SEQ ID NO: 17869 - protein, 496 aa, synthetic construct
MKTAYLYIRVSTDEQKRKGYSLPEQEDRLLKYCKFNNIEVKGIYREDYSAKNFNRPGWKELFSEIKKESSGEHKNILFIKWDRFSRNVEYAYDMIGKLRKYKTTAVAIDQPIDFSVPESTVMLAVYLAVPEAENTRKAQNTSNGIRRAKLMGRYPNKAPIGFINVTLVDGKKVIVPKEPEAEIIKWVFNQVAQNDHKISKIRKIAVDKGLICSRSHFFRVLRNPIYCGVISVKLDSNEEQMIKGIHEPLISESLFYRVQSVVNTKRKTTSKRDDLRAMFFLRGFLTCSVCNRKLGGSFSKGRSKKYPYYHCYNRCKTRINASFLNDCYQNKLQQLVLSDSVIELFKNILEDQNIKTQKASYLYAKKLIERKIKKEKLILSRGRKLFIAGVLKIDDYNELKEENQINIKNLKREECDIIFKLEAIDKKNQIEDKALVEIFQKFSEFDTSDKKHIVNLIPPVNIDYKTGSLSLDLNETFSKILSKKSHRKTNKKNEFH

SEQ ID NO: 17870 - protein, 547 aa, synthetic construct
MKLLVTYIRWSTKEQDSGDSLRRQTNLIDAFYSKHKEEYYLLPAHRYVDKGKSGFHQQHKAQGSDFRRMFENVMSGAIPEGSLIVVENFDRFSRADIDTAIDDVRQILRKGVSILTLGDGELYDKSALTDPVKLIKHIIIAERAHQESLVKQKRIAQVWNHKTQLARELKKPMGKQAPGWLELSEDGSHYIVDEDKASLVNIIYDKRLSGMSMFAICKWLNEQGYPTINQRKVRISKTKKPDGNWSALSVKHILTSRSVLGYLPAKISTEDRKTVLREEIEGFYPQIVTDSKFYAVQQLLEETGKGKTSSGDHWLYVNMLKGLIRCKCGLVMTPTGIRKPVYQGTYRCNGNKESRCSYGTVSRKLLDTQLCSRLFSKLSQLHDEATDTAKLDELQRRLNTVDSELEKLTETLIQLPNITQIQEALRVKQEEKDELIVQLSREKARVKSVSSLDLSGLDMESVEGRTEAQIIIKRLVKEIVVSGNEKLVDIYLHNGNMIRGFPLDGKDDHTLTLEEATDEMQSLDDMLIFGEPVTRIYPAGDMEEVDA

SEQ ID NO: 17871 - protein, 507 aa, synthetic construct
MKRVISYIRFSSEKQAKGDSLRRQSKMVTDWLKAHPEYYLDQDLSFRDLGVSGFTGKHLKGGLGDFLTAIEKGLVKAGDTLLIESLDRLSRQDVDQASELLRNILRSGVDVVTLSDGEHYTKESLRDPLSLIKSILIMQRSHEESLRKSERIQAAWNRKKELISEGIKISKRCPAWLRLNDDRKSFSVIPEKVETVKRCFQLRLEGKSIWEIVRTLNAEGHQSMSQYKPGKFGQTSVQDLLKNRSVIGYFTPKGCEEISGYYPAIIDETTFYKVQQLSYARHGRKPASAKPLSVNLFKGVIRCSECGHALIITGFSDTRNGIYRCPLRNENRCSAKGLSRKQTDGTLLALLSRLDRFDSDTTNIIDTLKLHREHISSNIEKLVQLSLEIEDLSAITSKLKQLKGELSQVDADIEKETQRLKSIDVGCLSDCDLTTKAGRIEAQLIIKSAVKEVVLNTAKRRCKVTFHNGKSITLPITENPSDNVTEAIQSLSEVTERGLIDVDVVEI

SEQ ID NO: 17872 - protein, 547 aa, synthetic construct
MKLLATYIRWSTKEQDSGDSLRRQTNLIDAFYSKHKNDYYLLPAHRYVDKGKSGFHQQHKAQGSDFRRMFENVMSGVIPEGSLIVVENFDRFSRADIDTAIDDVRQILRKGVSILTLGDGELYDKSALTDPVKLIKHIIIAERAHQESLVKQKRIAQVWNHKTQLARELKKPMGKQAPGWLELSEDGSHYIVDEDKASLVNIIYDKRLSGMSMFAICKWLNEQGYPTINQRKVRISKTKKPDGNWSALSVKHILTSRSVLGYLPAKISSEDRKTVLREEIESFYPRIVTDSKFYAVQQLLEETGKGKTSSGEHWLYVNILKGLIRCKCGLVMTPTGIRKPVYQGTYRCNGNKESRCSYGTVSRKLLDTQLCSRLFSKLSQLHDEATDTAKLDELQRRLNTVDSELEKLTETLIQLPNITQIQEALRVKQEEKDELIVQLSREKARVKSVSSLDLSGLDMESVEGRTEAQIIIKRLVKEIVVSGNEKLVDIYLHNGNMIRGFPLDGKDDHTLTLEEATDEMQSLDDMLIFGEPVTRIYPAGDMEEVDA

SEQ ID NO: 17873 - protein, 506 aa, synthetic construct
MRSVITYLRFSSATQGAEGADSTRRQNELFKQWLRKNSDAQVVASFSDEGLSGYKGKHLTGQFGDMLARIEAGEFPAGAILLVESIDRIGRLEHLETEALMNRIIAHGIEIHTLQDGLIYTRDALSDDLGISIIQRVKSYLAHQESKQKSFRVSEKWKQRAKLALAGEQHLTRNVPGWIDPDTFKCNEHAETVRLIFKLLLDGESLHNIARHLQSNDIKSFSRRKDANGFSVHSVRTVLRSESVIGTLPASQRNDRPAIPNYYEAAIDAATFNKAQEILDKNRKGRTPASDNPLTINIFKGLFRCQCGASVHPTGTKNKYAGVYRCNNHLDGRCDVPPLKRKPFDKWMIDNFLGMIDVGNDGEAEGKIASLQHEVEIVTARIKKATALLLEMDDIDELKIQLKELNQRRTELQTTIDSMRRKTSLSDKGLPQLKDIDLMTKAGRVECQLILSKHLKGLTLGKDSVTVTLQNDTEITIPTNPLPLNDGTSIFEIAEKNLLNIDTFQL

SEQ ID NO: 17874 - protein, 514 aa, synthetic construct
MRKVYSYIRFSSTKQAFGDSHRRQSKAIQDWLASHPDHILDESLSFEDLGRSAFHGDHLKEGGALRAFLEAVKQGLIPPDSVLLVESLDRVSRQSISHAQETIRAILEQGITVVTLSDGETYNRQSLDDSLALIRMIILQERSHNESVIKSDRIKKVWSHKRQQFEQDGTKITGNCPGWLKLNSDGKSFSLIPHHVETIHRIFDEKLSGKSLHAIARDLNLENIPTITNKKVDTGWTPTRVRDLLLKESLIGVAYGVSDYFPSAISKEKFHAVQMIRGQGKGKKPTSRQPSSIDILKGICKCAECGSTLRQRNTKKTPEGRYPRGYLECRNRQLGRCNSKAFNRSLIEDILIQKVFPTLQYLSLKSNGDNISVTTLKADITSLEKGINNLISLAERGLGDLDTLAQRITNNRVELESKKKDLRQAEAIQSLRSDNDIQDSDRKTVEGRIKLQLAIKSFIKEMIFDYYKQEITIRLLNGKSFSGISVARENKDFDHSSVFEVLQKSLLDIDEVHL

SEQ ID NO: 17875 - protein, 506 aa, synthetic construct
MRHVITYLRYSSAIQGAEGADSTRRQNELFKQWLRKNSDAQVVASFSDEGLSGYKGKHLTGQFGDMLARIEAGEFPASTILLVESIDRIGRLEHLETEALMNRILGNGIEIHTLQDGLIYTKDALADDLGISIIQRVKAYIAHQESKQKSFRVSQKWEQRAKLALAGEQRLTKMVPGWIDPDTFKCNEHAETVRLIFKLLLDGESLHNIARHLQANNISSFSRRKDANGFSVHSVRTILRSETTIGTLPASQRNDRPAIPNYYEAAIDVSTFNKAQEILDKNRKGRTPASDNPLTINIFKGLFRCQCGASVHPTGTKNKYQGVYRCNNHLDGRCDVPPLKRKPFDKWMIDNFLGMIDVGNDGEAEGKIASLQHEVEIVTTRIKKATALLLEMDDITELKAQVKELNQKRTELQTTIDSMRRKTSLSDKGLPQLKDIDLMTKAGRVECQLILSKHLKGLTLGKDSVTVTLQNDTEITIPTNPLPLNDGTSIFEIAEKELLEIDAYQL

SEQ ID NO: 17876 - protein, 507 aa, synthetic construct
MKRVISYIRFSSEKQAKGDSLRRQSKMVTDWLKAHPEYYLDQDLSFRDLGVSGFTGKHLKGGLGDFLTAIEKGLVKAGDTLLIESLDRLSRQAVDRASELLRNILRSGVDVVTLSDGEHYTKESLRDPLSLIKSILIMQRAHEESLRKAERIQAAWDAKKEAAKAGIKISRRCPAWLKLNDDRKSFSVIPEKVETVKRCFQLRLEGKSIWEIVRTLNAEGHQTLNQYKAGKFGQTSVQDLLKNRSVIGYFTPKGCEEISGYYPAIIDETTFYKVQQLSYARYGRKPASDKPMAVNLFKGVIRCSECGHALIITGFSDTRNGIYRCPLRNENRCSAKGLSRKQTDGTLLALLSRLDRFDSDMTNVIDTLKLHREHISSNIEKLVQLSLEIEDLSAITSKLRQLKNELSQVDADIEKETQRLKSIDAGCLSDCDLTTKAGRIEAQLIIKSAVKEVVLNTAKRRCKVTFHNGKIIDLPITENPSEDVTEAIQSLSEVTERGLIDVDVVEI

SEQ ID NO: 17877 - protein, 508 aa, synthetic construct
MKKAIAYMRFSSPGQMSGDSLNRQRRLIAEWLKVNSDCYLDTITYEDLGLSAFKGKHAQSGAFSEFLDAIEHGYILPGTTLLVESLDRLSREKVGEAIERLKLILNHGIDVITLCDNTVYNIDSLNEPYSLIKAILIAQRANEESEIKSSRVKLSWKKKRQDALESGTIMTASCPRWLSLDDKRTAFVPDPDRVKTIELIFKLRMERRSLNAIAKYLNDHAVKNFSGKKSAWGPSVIEKLLANKALIGICVPSYRARGKGISEIAGYYPRVISDDLFYAVQEIRLAPFGISNSSKNPMLINLLRTVMKCEACGNTMIVHAVSGSLHGYYVCPMRRLHRCDRPSIKRDLVDYNIINELLFNCSKIQPVENKKDANETLELKIIELQMKINNLIVALSVAPEVTAIAEKIRLLDKELRRALVSLKTLKSKGVNSFSDFYAIDLTSKNGRELCRTLAYKIFEKIIINTDNKTCDIYFMNGIVFKHYPLMKVISAQQAISALKYMVDGEVYF

SEQ ID NO: 17878 - protein, 547 aa, synthetic construct
MKLLVTYIRWSTKEQDSGDSLRRQTNLIDAFYAKHKEEYYLLPAHRYVDKGKSGFHQQHKNQGSDFRRMFENVMSGVIPEGSLIVVENFDRFSRADIDTAIDDVRQILRKGVSILTLGDGELYDKSALTDPVKLIKHIIIAERAHQESLVKQKRIAQVWNHKTQLARELKKPMGKQAPGWLELSEDGSHYIVDEDKASLVNIIYDKRLSGMSMFAICKWLNEQGYPTINQRKVRISKTKKPDGNWSALSVKHILTSRSVLGYLPAKISTEDRKTVLREEIEGFYPQIVTDSKFYAVQQLLEETGKGKTSSGEHWLYVNILKGLIRCKCGLVMTPTGIRKPVYQGTYRCNGNKESRCSYGTVSRKLLDTQLCSRLFSKLSQLHDEATDTAKLDELQRRLNTVDSELEKLTETLIQLPNITQIQEALRVKQEEKDELIVQLSREKARVKSVSSLDLSGLDMESVEGRTEAQIIIKRLVKEIVVSGNEKLVDIYLHNGNMIRGFPLDGKDDHTLTLEEATDEMQSLDDMLIFGEPVTRIYPAGDMEEVDA

SEQ ID NO: 17879 - protein, 506 aa, synthetic construct
MRSVITYLRFSSAIQGAEGADSTRRQNDLFKQWLKKNSDAQVVASFSDEGLSGYKGKHLTGQFGDMLARIESGEFSEGTVLLVEAIDRIGRLEHLETEALMNRIIAHGIEIHTLQDGLIYTRDALSDDLGISIIQRVKSYVAHQESKQKSFRVSQKWKQRAKLALAGEQRLTRNVPGWIDPDTFKCNEHAETVRLIFKLLLDGESLHNIARHLQSNDIKSFSRRKDANGFSVHSVRTILRSETTIGTLPASQRNDRPAIPNYYEAAIDASTFNKAQEILDKNRKGRTPASDNPLTINIFKGLFRCQCGASVHPTGTKNKYQGVYRCNNHLDGRCDVPPLKRKPFDKWMIDNFLGMIDVGNDGEAEGKIAALQHEVEIVTARIKKATALLLEMDDITELKAQVKGLNQKRTEIQTTIDTLKRKTSLTDKELPQLKDIDLTTKAGRVECQLILSKHLKGLTLGKDSVTVTLQNDTEITIPTDPLPLNDGTSIFEIADKELLDIDAYRL

SEQ ID NO: 17880 - protein, 559 aa, synthetic construct
MKTKLYSYIRFSSMRQNDGSSYERQIRMAREIAAKYDLELVNDYQDLGVSAFKGANSKTGALSRFLDAIGRSVPVGSWLFIENLDRLSRADIVSAQELFLSIIRRGITIVTGMDNKIYSLDTVTANPMDLMFSILLFIRGNEESQTKRNRTNSSALIKIKSHQENPQNPAVAIEEVGKNMWWTDTTSGYVLPHPVYFPVVQEIVELRKNGRSTAEILDHLNETYAPPPAVSNKKHSKWSRAMVERLFHTRALIGIKEISVDGVNYELKDYYPRVIDDPTFYHLKKNIGARAWNFGDKEEVKPIPLLSGIGLLKCDHCGCAMVKVKGTNKRSDQYRYTCDATRSRRLDCEHPNWSFRGDQLEKAVLQLLADKIWIAEDKANPVPALKVQVDEISRKIDNLIALSAMTGATKELADQITTLNSERETLYNQIKMAEEEMYSVDSQGWEKLAEFDLEDVYNEERLKVRFKIKQALKRIGCSRIDRNKNLFVLEYIDGKTQRVVIENSRGTRKGRIFIDLKTINDRQILESNGLVLHPCLDMLTDKNWKPEEEIPGPLQEFGI

SEQ ID NO: 17881 - protein, 545 aa, synthetic construct
MNKYHLYQRVSKQIQAEEGQGIQRQEQACEHWISDYNKRLLSEGKSAYSKGLIYEDRGKSAYTAANFKRGELGALINDIENGKIEKGDLIVIELIDRFSRANVDFVRSQFQRIIDAGVKIAITKWNLVFEENMESVSSVTGRILLEIGMYLAYQESSQKSSRIKASRKLLEDSGRKSIAKPPFWLARNSDLKSYTIIEENAEIIRKIFDLKLNFNYGPQKIIKSLGDLDIYRYSFDENGNLIKTTKNSPLSESSINAYIRNTNVIGKLDGKDYYPRIIDDRTFYAVQKRTRENTGGVGEIFRNVFVGVGKCGCLIRKENENGCGSLAKCGYIMAFSSRKVKNPTKGMYLKCNRKRKSTKCDSENINYYLAQNKIYNVLKSLKFDIDQSVDISHLEEKINTIDKSMSKIREYMTQYSDDEEWENQYKIKRMEREKIENEIKASKSRITGKLSNLDIDFSKEKDRVLFNQFLKDNRITVYFTKERMEIIIGSLNNFSIKCGYDDSNRDIDHIIESYSKNGLVGIEEKSGKSEGKGLLRFNLPTVPGS

SEQ ID NO: 17882 - protein, 639 aa, synthetic construct
MALIPYARVSSGKQLDGLSMSLQGDANLLKNTAVSDHIYNDEGVSSYKGKNVTDGELGRLIADIKKGTIKKGDIIVMRALDRLSRQKPTDSENLYNSIVGSGVHILTTIDNHLYKRDCVMSSVLKTLAFKTANEESAKKSFLTSSYASHRIEQFLSGEVPENGTAYDVGVGRHPFWIQVKDRVIQKHEHFALARIMFEKAMKGHGVARLQKFAKSQGLDLSYSAVGKMFRSHSVFGDLHITHQGKKYTLKGYYPALATETEYYKVRAIKDKLTKESNSQRKRVSILAGMQKLYCGCCGSSIGIARNTKQDIDYYGCTNKLDKCYQQLRQDIIDNIVLNAIDTHVFNVDTNDTSVLDGLELEFREKKKLHDNAVERFMILGDSAGDKAIETIHRLKSEVDEISKKIEIEKDKTASHTIDYEAISSYRDAMADYQAQQQKISAYVHGNSELKQEIKDILKLILKRITIDHRHMITIELLDGSKTYLYLLRRKDGKRLHDRYYVPIKIHDKDTINQIRESTPELVNWITEDERDTLDIYFEDVTNPFLAIERNRHQRDYESEFFDLLQGNVHEWKRADIMKLGATSTQWQEFKNADVSKYGFTKDVCTITTKHYTKQHKTIIYRNFDEQEIIEYLDCKKVEF

SEQ ID NO: 17883 - protein, 557 aa, synthetic construct
MKQPLAYSYVRFSSPEQAKGDSFRRQTEAARKYCNKHGLELADLRFHDLGISGYRGNHFTQGALGDFVEAIEQGKVRGGSYLIVESLDRLSREEVDIAFSRFASILRADIKIVTLQDGKVFSRASLKNTTDILVSILVMLRAFEESESKANRIREARDEKHRQARENKKPTGYRPPDWVRTVKDADSGKPKYELIPERAEVIKRIYHLNNSGMGAIVIARLLNEEQIPPWGRSKTGWQTSYIKKILKARTVLGEYQPHIVTNRVRKAVGEPVFGFYPAVIDPNTFKLAQMTMTARDKRSGGVRKDKVNNLFTGLAKCKHCGNTMHFVDKGKPPKGNQYLLCSLAKTGAVHNGVSCKRASIRYQETEDAILTVAATLDLKVKSSPNKGEVERLQSQLSGVHSDLGTIEEAIVRITNAIAELPNSSGLILKLTELEEHKRGKTSEYKAIEKRIDKLTLTPAASNVWNDLQQTLKLLKTEASDRSNVKLRTKINNQLLNSVDRIEFDNHAKIVFIHIDGERTLEIRFQDKMRGYVIKPSWELREQLPYTYLIKQKLKEES

SEQ ID NO: 17884 - protein, 598 aa, synthetic construct
MDEKPRIAHIYSRVSKGTQVKGDGLRRQIEIASKFIEDVNISNSRDGLPVYTLADSPIYDRGLSAYFGLNTDENAGLGAFLKAAENGQVEKGTLLIVEAIDRISRLPVDDARALFARFKKYGIDVAICRFNLIIYHDKSSDLGQDLLITTAIHLAHLESEQKSKRIRARFTHKRLLEKEGGERRTSMSPSWIELSKDKTHFVLIPERARIVRKMVDLKLQGWGAHRITVYLNEQGFPCWNRSNTWYTKIVEKYLKMIQLVGDFQPVEHVHGEKGVRKEPVGDVIKGYYPALITEEEWIRLKASFKRSGGRQTGAFSNLFSYMLYCPTCGSCMSYFKPNRGRIKVRCRKQIDKQGCDQRALNYEEIEPRLIKALAGLDYAKINNNSFASLQKELNTLEAQVAELEASADDIKTQMLEESDPRIISVYVNKLKAIYTEQDKAKARFEKLSTQTSDYDVNTLEQLQLERNEDRERYNGFVRSFVKYVIASDSKLGKPLRIVFKSEAVGEVPVFFNDDKNNKAISDIFTAQKDVNEAAPIRLINMSRVHGNLGKLAAIDTVPVPDDLGDALERIKYLFAVRQAVLQNPEKWQAIADDARLFE

SEQ ID NO: 17885 - protein, 516 aa, synthetic construct
MSNNKALAFLYIRFSTKKQEQGDSIRRQIDAAEAWCKEKDIELSAQTFEDLGVSAFKEGGKRPALEDMLFAIEQGRIPRNSYLLLEDHDRLSRRGWLHTQTLVHKVVKLGVKIVMLRSRTVYDQSNINNISDNIMLMFSADRAFQESERKSQLIKASRNNARNNREVTGKLPAWIARNGDEFIFNDKLTTIQDLIDCKLSGKSHQATAKHLNSLGMTTGSGSVWSASGVRAIIQNHALYGAKAYFDTGADGRMNAKPIEIVSDIFPQLISFQQYQSLNVKKASGRTSKRGAFTQLLKCGRCGSAMTTRSSNYKGQPRTYKMCVRATEGSCSQVERVREPERYLNDVLRKLTYQISKGAYVSRTGEYEKQLETLNETKDKLISLGLTDALTDVYVDMNRVRELIEDSKIADQANIEPDVDFAYVCDIENIEERNTELRKLLSKIVFYCISKRGQTSQWKVVIHQVNGFTISFLLDQQYGFGNTNVKFVADKQQYIKDTQVDMYAWEDEYAEATLGNV

SEQ ID NO: 17886 - protein, 530 aa, synthetic construct
MRQAYSYVRLSSKKQILGYGQERQWEAIQSAALAHNWELSDKTFSDLGVSGWKGVNIDTGALSQFLRCVEDGYIEQGSVLIVENVDRLSRAGVNRAVTLLMQLLDNGISIYTLTDSKLYEPDSPNPLMDLMGWALSAQRAFEESERKSQMILNAKAKAREEARLTGKIITRRCPSWLRVNDDKTAFELLPERVETVQKIFDLYTSGYGTPRIGRLLTEEGRKPLNGRAWYARSLSRIIQYRAVLGEYQPTLNGKPEGEPVKEYYPAIVNEDQFNEAQAIMKAGGAGKGRRGEDMRNYFAGLLRCSCGEGMHITSSKVKGKRYYQLRCLQYRISCTNATWNFNKTSTFILFGLRRLPILEVMGADNNKDIKELNDSIRDLTAQLDSSKQQLENTTNAIAELGLSDQLKNKFRELTVLVEDTERQLAEAKSALDKSHGETAIKKQDTEMLSGRFLELIENTKEVDDRIKLNQVLRRYLSKIVLDADKEKDNRFIEIYRKDGELLVTAKLDHKLDGGLFDSSEASEAIELKRA

SEQ ID NO: 17887 - protein, 461 aa, synthetic construct
MITTNKVAIYVRVSTTNQVEEGYSIDEQKDKLSSYCDIKDWNVYKVYTDGGFSGSNTDRPALESLIKDAKKRKFDTVLVYKLDRLSRSQKDTLHLIEDVFIKNGIEFLSLQENFDTSTPFGKAMIGLLSVFAQLEREQIKERMQLGKIGRAKAGKSMMWAKTSYGYDYHRETGTITINPAQALAIKFIFESYLRGRSITKLRDDLNEKYPKHVPWSYRAVRTILDNPVYCGFNQYKGEIYPGNHESIISKEEYDKTQSELKIRQRTAAENVNPRPFQAKYILSGIAQCGYCGAPLKIMLGVKRKDGSRLKKYECHQRHPRTLRGVTTYNDNKKCDSGFYYKDKLEAYVLTEISKLQDNAGYLDKIFSGDNAETIDRESYKKQIEELSKKLSRLNDLYIDDRITLEELQSKSAEFISMRGTLETELENDPALRKNKRKADMRKLLNAEKIFSMDYGRSKGTC

SEQ ID NO: 17888 - protein, 481 aa, synthetic construct
MKTMNKVAIYVRVSTTNQVEEGYSIDEQKDKLSSYCDIKDWNVYKVYTDGGFSGSNTDRPALESLIKDAKKRKFDTVLVYKLDRLSRSQKDTLHLIEDVFIKNGIEFLSLQENFDTSTPFGKAMIGLLSVFAQLEREQIKERMQLGKIGRAKAGKSMMWAKTSYGYDYHRETGTITINPAQALAIKFIFESYLRGRSITKLRDDLNEKYPKHVPWSYRAVRTILDNPVYCGFNQYKGEIYPGNHEPIISKEEYDKTQSELKIRQRTAAENVNPRPFQAKYILSGIAQCGYCGAPLKIMLGVKRKDGSRLKKYECHQRHPRTLRGVTTYNDNKKCDSGFYYKDKLEAYVLKEISKLQDDADYLDKIFSGDNAETIDRESYKKQIEELSKKLSRLNDLYIDDRITLEELQSKSAEFISMRATLETELENDPALRKNKRKADMRKLLNAEKVFSMDYEGQKVLVRGLINKVKVTAEDIVINWKI

SEQ ID NO: 17889 - protein, 537 aa, synthetic construct
MREQQNYRAAIYCRLSSEDGADHESMSIGNQRALLAEYVQKQGWEIVDTYIDDGFSGTNFDRPGFQRMIADIEKGRINLVITKDLSRLGRNYIMCGQYTEIYFPERHVRYIALNDGVDTLNQTSSMDITPFKHILNDMYAKDISTKIKSTLHTKAKRGEYLGALDPYGYLRHPDDKHKLIINEETAPVVRRMFEMCAAGIGSKSIATTLNREGILSPTEYTRFRKHNPERDGEFERRSFWTRTYVQFMLKNEIYVGSMVQGRQYTPSYRSKKREPIPKKDWIVVPNMHEPIVSRELFDEAQKRMGARKKTIKAKDEPDLFAGLFFCEACGTSMVPKVSQQKYFYYTCGRSHAIGNLACSAHYINRDTFHQAVLEDIRRNARLFSEDTEKAAQKLMELKCADQQKQTAAMKRDLASAKKRLADLDVKLKRTYEDNMSGKLPDHIFAMFIADYDTERETLKAKVAELEKALEKVRDAKADIDRFAALIQKYTSFEKLDRFMLHELIDRITIYETPGMGRCRKGKEKRITIYYKFVGTIQ

SEQ ID NO: 17890 - protein, 481 aa, synthetic construct
MITTNKVAIYVRVSTTNQVEEGYSIDEQKDKLSSYCDIKDWNVYKVYTDGGFSGSNTDRPALESLIKDAKKRKFDTVLVYKLDRLSRSQKDTLHLIEDVFIKNGIEFLSLQENFDTSTPFGKAMIGLLSVFAQLEREQIKERMQLGKLGRAKSGKSMMWAKTSYGYDYHKETGTVTINPAQALTIKFIFESYLRGRSITKLRDDLNEKYPKHVPWSYRAVRTILDNPVYCGFNQYKGEIYPGNHEPIISKEEYDKTQSELKIRQRTAAENVNPRPFQAKYILSGIAQCGYCGAPLKIMLGVKRKDGSRLKKYECHQRHPRTLRGVTTYNDNKKCDSGFYYKDKLETYVLKEISKLQDDADYLDNIFLGDNAETIDRESYKKQIEELSKKLSRLNDLYIDDRITLEELQSKSAEFISMRGTLETELENDPALRKNKRKADMRKLLNAEKVFSMDYENQKVLVRRLINKVKVTAEDIVINWKI

SEQ ID NO: 17891 - protein, 544 aa, synthetic construct
MEMIQTKRVALYIRVSTQEQALEGHSIQAQEQNGRQFAERMGYEVVEVYADEGISGKSTKNRFAYQRMMNDARNHRFDLLVIWKLTRLGRNMLDVLQTVEELLRYDVGLHSISEQFDVTTSTGKLMLQLLGSFGEFERNQIAENVQMSMQSLVKDKKRYAGGRRLGYVSGIDTNGQKQLVIEPEEAKIVRLIYAKYLGGAGYRAIANFLNRQGYQTVKKNAFSTTAVKDILRNKIYAGYLEYARYINWETKRRKGKNPRPILVKGTHEPIISEEDYQKVQERLALEGKQPKWNHTGENVLTGLLRCPECGAPMAASNVTNTLKDGTKKRIRYYSCSVFRNKGASVCHANSIRAEQAETFVADRLKEIVQLPEVLPRLVAALNEEIVRQSQPLEQELVVLLERKEELKTKIEKWEAALEDSPELFPMLKDRLDELTEKRRQLHIRENEILGIFQQGEPIQVKDVQRILTSLDRFLAQSEKKQIKALYRTFIEKITFDPNHKEMLEITMKFTHAVVQQLNEQYQIAVSKTKDTAIFVLKTPFTLTI

SEQ ID NO: 17892 - protein, 457 aa, synthetic construct
MRVACYDRTSVYEEAKISNDAQYDAVKEYVLEKYEQIPQRFSDKGESGEKAERPAFRQLRAWVCASEEEGVIYVWRYDRLARQAKIALEFIELCQQHQVQVYSISEPLPASFSHASTNKLFVQLLFTFAEQQRNVIIENVRAGLSYKKQQRQYLSSAVPYGYRLVNGKIQQEVHEARIVRYIFQLYLTKKYGYKKLCQRLTQQKLFFRERPFQPYHIYSILKNPLYYGEIKGGSLGKYLGTFEPILSKATFLQAQEIRQSRCTAKKDTYLYLLRQKIRCPFCGRHLSSKYQWNTKKTKTLHYYHCTDRSCQGIFLRAERVESEVLEKIQAFFQYEGVYQALIAQLTQQLAEKRKDEKRKVIQQKKQEAQWIKAFEEGNCSLEELKQQLQALQKPMSTSSFLSLQQCEAKVKEWLQLKDLSSRQLLCDYVCRIEVTKDKTVCGIYFRQLTQNILERNE

SEQ ID NO: 17893 - protein, 481 aa, synthetic construct
MITTNKVAIYVRVSTTSQVEEGYSIDEQKAKLSSYCDIKDWSVYKIYTDGGFSGSNTDRPALEGLIKDAKKRKFDTVLVYKLDRLSRSQKDTLYLIEDIFIKNNIAFLSLQENFDTSTPFGKAMIGLLSVFAQLEREQIKERMQLGKIGRAKAGKSMMWAKTSYGYDYHRETGTITINPAQALAVKFIFESYLRGRSITKLRDDLNEKYPKHVPWSYRAVRTILDNPVYCGFNQYKGEIYPGNHEPIISKEEYDKTQSELKIRQRTAAENVNPRPFQAKYILSGIAQCGYCGAPLKIMLGVKRKDGSRLKKYECHQRHPRTLRGVTTYNDNKKCDSGFYYKDKLEAYVLKEISKLQDDADYLDKIFSGDNAETIDRESYKKQIEELSKKLSRLNDLYIDDRITLEELQSKSAEFISMRGTLETELENDPALRKNKRKADMRKLLNAEKVFSMDYENQKVLVRRLINKVKVTAEDIVINWKI

SEQ ID NO: 17894 - protein, 448 aa, synthetic construct
MRTGLYVRVSTAEQEKHGYSIKVQLEKLRAFASAKDYAVVKEYVDAAQSGAKLERPGLKQLIKDVQNDVLDCVLVYRLDRLSRSQKDTMYLIEDVFLKNNVAFVSLQESFDTTSSFGRAMVGMLSVFAQLERDNITERLLSGRVHRAKRGFHHGGGIIPFGYRYDVESGELKRFKNEFEEVKTMFEMIASGKSVSSVAKEFNTYDTTIRRRIVNPVYIGKIQFDGETFDGQHEPIVSEELFKKANAKMNARVSSLPFKRIYLLSGLIYCGKCNERCSAYESRSKHNGKEYRRAYYRCNARTWKYKQKHGRTCEQPHIRVDELEQAVMEQVKRLPLKRKVKKRAFDFKPIENKIATIDKQKERLLDLYLNEHLDSEMFNKKSKELDKTREKLTKQLESLRIQSAEAVESYQWLDEVNWDNLDKDTLREILERVIQKIVIRDGDIAVHLK

SEQ ID NO: 17895 - protein, 457 aa, synthetic construct
MRVACYDRTSVYEEAKISNDAQYDAVKEYILEKYEQFPQRFSDKGESGGKADRPAFRQLRAWVCASEEEGVIYVWRYDRLARQAKIALEFIELCQQHQVQVYSISEPLPASFSHASTNKLFVQLLFTFAEQQRNVIIENVRAGLAYKKQQRQYLSSAVPYGYRLANGKIQQEAHEAKVVHHIFQLYLTKKYGYKKLCQRLTQQKLFFRERPFQPYHIYSILKNPLYYGEIKGGSLGKYLGTFEPILSKTIFLQAQEIRQSRCTAKKDTYPYLLRQKIRCPFCGRHLSSKYQWNTKKTKTLHYYHCTDRSCQGIFLRAERVESEVLEKIQAFFQYEGVYQALIAQLMQQLAEKRKDEKRKVIQQKKQEAQWIKAFEEGNCSLEELKQQLQALQKPMSTSSFLSLQQCEAKVKEWLQLKDLSSRQLLCDHVCRIEVTKEKTVCGIYFRQLTQNILEGNE

SEQ ID NO: 17896 - protein, 545 aa, synthetic construct
METTQTKRVALYIRVSTQEQALEGHSIQAQEQNGRQFAERMGYEVVEVYADEGISGKSTKNRFAYQRMMNDARNHRFDLLVIWKLTRLGRNMLDVLQTVEELLRYDVGLHSISEQFDVTTSTGKLMLQLLGSFGEFERNQIAENVQMSMQSLVKDKKRYAGGRRLGYVSGIDANGQKQLVIEPEEAKIVRLIYAKYLGGAGYRAIANFLNRQGYQTVKKNAFSTTAVKDILRNKIYAGYLEYARYINWETKRRKGKNPKPILVKGTHEPIISEEDYQKVQERLVLEGKQPKWNHTGENVLTGLLRCPECGAPMAASNVTNTLKDGTKKRIRYYSCSVFRNKGASVCHANSIRAEQAETFVADRLKEIVQLPEVLPRLVAALNEEIVRQSQPLEQELVVLLERKEELKTKIEKWEAALEDSPELFPMLKDRLDELTEKRRQLHIRENEILGIFQQQGEPIQVKDVQRILTSLDRFLAQSEKKQIKALYRTFIEKITFDPNHKEILEITMKFTPAVVQQLNEQYQIAVSKTKDTAIFVLKTPFTLII

SEQ ID NO: 17897 - protein, 538 aa, synthetic construct
MSRKKQVYEKITALYCRISLDDGGDNESMSISNQKLMLRDFAEKHGMFQYEYYVDDGYTGRNFNRPSFQRMIADIEAGKIGCVITKDLSRLGRNYIEAGSYIEIFFPKHNVRYIAVTDGVDSLTRQEMDITPFKNILNDMYSRDISKKVLAGRMTRSRQGKFCGGQPPLGLMRDPEDKGHLILDPETAPVIRKIYDMALDGWGCMRIAKQLMDDKIPITRVKSNTECDVNYYSWGSARISHILRNPFYKGAHLVCRTHQKGIRSNTYDIIPREDWEVIEGCHEAIVTPEEWEQVQDIIDRRPTIMKGNACPFYNLFHGLVYCATCGKSMQVRYEKVGRTGKNRFTGEMREPIDRAYYICQTYNRLGKNACTSHKIEARDLYNLVLKDIQELAAQAMKDADAFYQRLSSRMERRYLVDASQTEKERKRLEDRNQEIDGMFLSLYTDKAKGVLTEQRFMKLTAALEQEQEANQKRLHDLAVMQSRADAQESEVRTFIKEIRRYAAIAELDESVLNRLISKILIGEVKKVDGQKVQEENCL

SEQ ID NO: 17898 - protein, 532 aa, synthetic construct
MKAAIYSRKSRFTGKGDSIENQIQLCIDYAKSIGVKDFLIYEDEGFSGSNIDRPQFKKMMQDAKDKKFSYLVCYRLDRISRNVSDFSTLIEKLNELSISFISIKEQFDTSTPMGRAMMFISSVFAQLERETIAERIKDNMYELARSGRWLGGNTPHGFNSEKITFLDENLKERSMYKLQVNDEQMEIVKLIYNKYLELRSLSKLYKYVYNNGIRGPRGGKFDPSSLSRILRNPAYVKANDEILDYLKNSGMDVVGTPDRKCGILTYAKNTSNSIAAIAKHHGVIEPEIWLEVQNQLDKNRDKTPRISTGKTALLSGLIKCGKCGSNMRITYKGKKTDKDLKYYYICGTKKTLGSDSCNCKNLNGPLVESLVIDKIKNCKEESIISAFNSNNIKTDNVFNIFKSETNLLKNQILDKERLIKNLVIELAKNTGSTASDYIVSQIESLNNEISILKDKINILESSNINISSDSINIDIIVSNLKRFNDEVDNASLDDKRLLLSTIINSIVWDSSLGNLNIVYMGAEVDNSVSLSN

SEQ ID NO: 17899 - protein, 548 aa, synthetic construct
MTKKVAIYCRVSTVEQAEEGYSIDEQRRRNIEYCEKEGHEVFKVYEDRGISGKNISGRPGLKELLQDANSGKFDLVIVWKLNRISRKLIDILNIVDTLDKNKIAFRSLTESFETETPAGKLQLNIMGAIGEFERGTIAENVKMGMMERAREGKWNGGKVLGYDIVEIPSEGKKRKDTKLVINEKEAMTVRRIFELYSEGHGYKATVNRVNKEGHRSKKGNAFATATIKEILKNQVYIGKIRYNLRQDWNEKRRKNINPDPILVDGEHDAIIDTETWERVQIILKDRSKTHNRVYDSELILSGLLKCPVCGASMTVSRSTRKRKDGTKAVNEYYSCGNWKNKGTAVCNSNSVKAEVADEVVINKLIETVNNELLLKKVINNINKNKSSKLKPKLDEMNLVNKEIDKLNGKKNSSIELFEDGILAKSELAERVKKLNEEIDTLKFRLDEIKQEVMLAEGEPIPFELVSQVMKKFGEVFKESSTRQQRKQLLNLLVSKVTIDKSRKIDTIELQINEDVIRYLVKEGSSEEDEDPSFFHVSMFNCTTLKFVI

SEQ ID NO: 17900 - protein, 540 aa, synthetic construct
MKQPYNTTIYNTALYMRLSRDDELQGESGSIQTQRMMLRQYAAEHGLNVIDEYIDDGWSGTNFDRPDFQRMIDDIEDGKINCVVTKDLSRLGRNYILTGQYTEIYFPSKGVRYIAVNDNVDTINGENELAPFLNILNEMHARQTSKKVKAAMRTRFANGAHYGAYAPLGYVKDPDKKGHLLIDPETRWIIEKIFDLAVHGRGAASITRILVEEKVPTPGWLNFQRYGTFANIYAGAPEEKAYAWTIAQVKSILKEETYIGHSVHNKQTNISFKNKKKVRKPKEEWYRVENTHEAIISEDVFRQVQEQICNRRRRQKNGTTQIFSGLVKCADCGWSLAYGMNSQNKNPYAHYHCSKYGQGLHQCSMHYIRYDVLYAYVLSRLQYWSVLAQQDGDKLLKRLLNASDKERNTARKRQTAELKKAEKRKAEVDTLFAKMYEDWSAGRITEYNFNMLSEKYQGEQRELDAKIERLHEAMEAAAQTAVDAEKWIGLMKQYVNPTELTAELLNTLIEKIVVHEAVKSEDGSREQEVEIFYRFIGKIE

SEQ ID NO: 17901 - protein, 452 aa, synthetic construct
MKAAIYIRVSTQEQIENYSIQAQTEKLTALCRSKDWDVYDIFIDGGYSGSNMNRPALNEMLSKLHEIDAVVVYRLDRLSRSQRDTITLIEEYFLKNNVEFVSLSETLDTSSPFGRAMIGILSVFAQLERETIRDRMVMGKIKRIEAGLPLTTAKGRTFGYDVIDTKLYINEEEAKQLQMIYDIFEEEKSITTLQKRLKKIGFKVKSYSSYNNWLTNDLYCGYVSYADKVHTKGVHEPIISEEQFYRVQEIFSRMGKNPNMNRDSASLLNNLVVCGKCGLGFVHRRKDTVSRGKKYHYRYYSCKTYKHTHELEKCGNKIWRADKLEELIIDRVNNYSFASRNVDKEDELDSLNEKLKIEHTKKKRLFDLYISGSYEVSELDAMMADIDAQINYYEAQIEANEELKKNKKIQENLADLATVDFDSLEFREKQLYLKSLINKIYIDGEQVTIEWL

SEQ ID NO: 17902 - protein, 586 aa, synthetic construct
MQEVEVIKAKNVLSRQARGKAIERLRVAAYCRVSTDSEDQLNSYKSQVQYYTDMIKKNKEWVLADIYADEAITGTQVTKREDFQRMINDCMNGEIDMVFTKSISRFARNTLDTLKYVRMLKERNIAVYFEDEKINTLTMDGELLLVVLSSVAQQEVENISANVKKGLKMKMKRGELVGFQGCIGYDYHPEDKTITVNQEEAEIVRYIFNRYVDGAGGSVIGQELESLGYKTKYGSSTWAPSTVIGIIKNEKYKGDILLGKTFTVDPISKRRLENMGEEDKFYMKDHHEPIISEEVFEKAQEILNRRNKNRTTVGSGKREKYSRKYAFSCMLECGFCGGTLTRRNWHSGSQYSKVIWQCVTATKKGKKFCKHSKGIPETAIEEAFVESYRLLCDDNKDVLEEFLQRMDDTLSSSVVSKQLAKAEKEIDALEKKKSKLVDMRLEEIIDKETYESKYADLVSKQEQLVEERQKLQETSDNEKDIKKRLKEFKKTLEQNEVLDKFDRYVFESIVEKVIVGGLDENGNVDPAQLTFVYKTGLKNSVDGAKFKPQRKNARGRHRTNELCSHDSNEVDKMCSDSSNDTCGNCS

SEQ ID NO: 17903 - protein, 654 aa, synthetic construct
MAGIKEEKKIYSVGIYCRLSKDDGTENESASIATQKSILTDYVKKQGWHLAKTYVDDGYSGTNFQRPSFQNMIKDIENGLINCVITKDLSRLGRNYLDCGLYLEVFFPENNVRYIAVNDGVDTLNKSAMDITPFRNILNEMYSADVSVKIKSAYRARFQQGKFMGTYAPYGYIKDPADHNHLLIDDKVAHVVREIFDLALAGNGLAKIRKHINSQHILRPAAYAAEQGAAGYERYFEGNEENRYIWSENSVRGILRSPIYAGNLAGYKRIAANMKSKKRPSKLPEEWEVIPDTHEGIVTQEEFDIVQQLMTSRRREKNKGGFENIFSGVIKCADCGYALRAMSANRRKRPDIIDCIQYTCNNYGRYGNVMCTAHAIEARDLFNAVLADINRFADMAVNDERAVRAIEKRLTETDQSKAKAMEKERKKLNKRLAELDRLFSSLYEDKVMERITERNFEMMSGKYQKEQLEIEARLKEVTETLNESYEKSQGIRDFLSLIRNYQGLKELDATVVNALIDKILVSEREKSADGTVKQEIKIYYKFIGFVGELHITPTKRWTALPAKHCTVCGIEYVPGSGISKYCPACAKKIQREKSNESKRRSREQKRMACIELSAKNDRLIWCRKRDTYLSLHRERGYDFETIRLPKDDTVSVGL

SEQ ID NO: 17904 - protein, 560 aa, synthetic construct
MSKEKIKVYLYTRVSTSIQIDGYSLEAQKSRMKAFALYNDYEIVGEYEDAGKSGKSIEGRVQFTRMMEDIKSGKDGVSFVLVFKLSRFARNAADVLSTLQIMQDFGVNLICVEDGIDSSKDAGKLMISVLSAVAEIERENIRVQTMEGRIQKAKEGKWNGGFAPYGYQLIDGKLIINEEEAIAIRTIFDQYVNTSIGANGLSKYLENHGIRKIPRQNGKNPLFDAGLIRKILKNPVYNGKIAFGRRTLEKVHGTRNEYRQVEQDDYLVAEGIHEAIIPDELWQAAQVKLKAQAKKYEHVNKGKNMRTHLLSGIVKCPICGAGMFGNKSIKYKKDGTKYKDFYYYGCKHRLMNRGHKCTYNKQIREELLDDAVAEVIIKLVSNPKFASMIQEKINMKVDTSAIENEIDNYQNELRKSHSTKYKLIEEIDNLDVEDKHYKRRKNDLDDRLYRMYDKIEELESQLIEAKAKKETIEVEKLTGDNIYKVLIYFDKLYKVMNDVERRQLIEALISEIQIYEEKQPNGQWLKSITFKLPIIDEDLNISLENDEQVETCVLLQRRTM

SEQ ID NO: 17905 - protein, 452 aa, synthetic construct
MKAAIYIRVSTQEQVENYSIQAQTEKLTALCRSKDWDVYDTFIDGGYSGSNMNRPALNEMLSKLHEIDAVVVYRLDRLSRSQKDTITLIEEYFLKNNVEFVSLSETLDTSSPFGRAMIGILSVFAQLERETIRDRMVMGKIKRIEAGLPLTTAKGRTFGYDVIDTKLYINEEEAKQLRLIYDIFEEEQSITFLQKRLKKLGFKVRTYNRYNNWLTNDLYCGYVSYKDKVHVKGIHEPIISEEQFYRVQEIFSRMGKNPNMNKESASLLNNLVVCSKCGLGFVHRRKDTVSRGKKYHYRYYSCKTYKHTHELEKCGNKIWRADKLEELIIDRVNNYSFASRNVDKEDELDYLNEKLKIEHAKKKRLFDLYINGSYEVSELDSMMNDIDAQINYYESQIEANEELKKNKKIQENLADLATVDFDSLEFREKQLYLKSLINKIYIDGEQVTIEWL

SEQ ID NO: 17906 - protein, 540 aa, synthetic construct
MKQPYNTTIYNTALYMRLSRDDELQGESGSIQTQRMMLRQYAAEHSLNVIDEYIDDGWSGTNFDRPDFQRMIDDIEDGKINCVVTKDLSRLGRNYILTGQYTEIYFPSKGVRYIAVNDNVDTINGENELAPFLNILNEMHARQTSKKVKAAMRTRFANGAHYGAYAPLGYVKDPDKKGHLLIDPETRWIIEKIFDLAVHGRGAASITRILVEEKVPTPGWLNFQRYGTFANIYAGAPEEKAYAWTIAQVKSILKEETYIGHSVHNKQTNISFKNKKKVRKPKEEWYRVENTHEAIISEDVFRQVQEQICNRRRRQKNGTTQIFSGLVKCADCGWSLAYGMNSQNKNPYAHYHCSKYGQGLHQCSMHYIRYDVLYAYVLSRLQYWSVLAQQDGDKLLKRLLNASDKERNTARKRQTAELKKAEKRKAEVDTLFAKMYEDWSAGRITEYNFNMLSEKYQGEQRELDAKIERLHEAMEVAAQTAVDAEKWIGLMKQYVNPTELTAELLNTLIEKILVHEAVKSEDGSREQEVEIFYRFIGKIE

SEQ ID NO: 17907 - protein, 586 aa, synthetic construct
MHEVEVIKAKNVLSRQARGKAIERLRVAAYCRVSTDSEDQLNSYKSQVQYYTDMIKKNKEWVLADIYADEAITGTQVTKREDFQRMINDCMNGEIDMVFTKSISRFARNTLDTLKYVRMLKERNIAVYFEDEKINTLTMDGELLLVVLSSVAQQEVENISANVKKGLKMKMKRGELVGFQGCIGYDYHPEDKTITVNQEEAEIVRYIFNRYVDGAGGSVIGQELESLGYKTKYGSSTWAPSTVIGIIKNEKYKGDILLGKTFTVDPISKRRLENMGEEDKFYMKDHHEPIISEEVFEKAQEILNRRNKNRITVGSGKREKYSRKYAFSCMLECGFCGGTLTRRNWHSGSKYSKVIWQCVTATKKGKKFCKHSKGIPETAIEEAFVESYRLLCDDNKDVLEEFLQRMDDTLSSSVVSKQLAKAEKEIDALEKKKSKLVDMRLEEIIDKETYESKYADLVSKQEQLVEERQKLQETSDNEKDIKKRLKEFKKTLEQNEVLDKFDRYVFESIVEKVIVGGLDENGNVDPAQLTFVYKTGLKNSVDGAKFKTQRKNARGRHRTNELCSHDSNEVDKMCSDSSNDTCGNCS

SEQ ID NO: 17908 - protein, 706 aa, synthetic construct
MSRTSKITALYERLSRDDDLNGESNSITNQKKYLEDYARRNGFTNIRHFTDDGFSGVNFNRPSFQELIKEVEAGNVATIIVKDMSRLGRNYLQVGFYTEVLFPQKDVRFLAINNSIDSNNASDNDFAPFLNIMNEWYAKDTSNKIKAVFDARMKDGKRCSGSIPYGYNRLATDKQTLVVDPVASEVVKRIFLLANEGKSPRAIAELLTEEKVLIPAAHAKEYHPEQYNGTKFSDPYTWGMSTIRAILSRQEYLGHTVLRKSVSTNFKLHKRKNTDEDEQYVFYNTHEPIISQELWDSVQKRKKRANRTAARGTHSNRLSGYLFCADCGRRMTLQTHYSKKDRSLQYSYRCGGYASRVNSCTAHSISADNVEALILSTVKRLSRFVLNDEEAFAKELQVLWNEKQTEKPKHNKSELQRFQKRYDELSKLIRGLYENLVSGLLPERQYKQLMKQYDDEQAELETKIEEMQKELTEEKANTVDIKHFISLIRKCKEPTEISDLMFAELIDKIVVYEAEGVGKARTQKVDIYFNYVGQVDIAYTEEELAEIKAQEEQIEMERLAKQREREKVYREKRKAKKLAENGGEIVKAKVCPHCQKEFVPTSNRQIFCSKDCCYQARQDQKKADREAEKGNHYYRQRVCAVCGSTYWPTHSQQKFCSEECQKQNHNEKSLEFYHKKQKEKSKCKDLLQTKEPVSSTNSSEIITIPA

SEQ ID NO: 17909 - protein, 540 aa, synthetic construct
MKQPYNTTIYNTALYMRLSRDDENYGDSVSIETQRTILQQYAKEQGLHVVGEYVDDGWSGTNFERPDFQRMMDDVEAGKVNCIVTKDLSRFGREHVMMDYYLEFLFPEKRVRYIAVAENEDTEKGLSDFVPFKNLFNEWFAKDTSRKVKAAFKAKFATGQRIGAYAPIGYRKHPEIKNKLIIDEETRWIVEKIFDLAIHGRGAASITRILIEEKVPTPGFINFQRDGTFANIYAGAPEEKSYAWTIAQVKSIMKDETYIGHTIHYRETNISFKNKRRVRKPQSEWVRVENTQEPIISEQVFRQVQEQIANRRRKCKDGTTQIFSGLVKCADCGWSLSYGENRQNSKPYGHYHCSKYGQGTRQCSMHYIRYDVLYAYVLSRLQYWSGLVQHDEERLLKRLLNATDKGQAAARKKQAAELKKAEKRKAEVDTLFARMYEDWAAGCITEYNFSMLSGKYQSEQAELDTKIEQLQSAIATESQNAADAEKWIALMKECVNPTELTAELLNTLIEKIVVHEAVKGEDGSREQEVEIFYRFIGKID

SEQ ID NO: 17910 - protein, 537 aa, synthetic construct
MKQQIYNTALYLRLSRDDELQGESSSIITQRSMLRLYAKEHHLNVIDEYIDDGWSGTNFDRPSFQRMIEDIEAGKINCVVTKDLSRLGRNYIMTGQYTELYFPSHNVRYIAIDDGVDSEKGESEIAPFKNIINEWVARDTSRKVKSAFKTKFAEGAHYGAYAPLGYKKHPDIKGKLLIDDETKWIIEKIFSLAYQGYGSAKITKQLRAEKVPTASWLNFTRYGTFAHIFEGNPESKRYEWTIAHVKAILKSEVYIGNSVHNMQSTVSFKSKKKVRKPESEWFRVENTHEPIIDKEVFYRVQEQIKSRRRQTKEKATPIFAGLVKCVDCGWSMRFGTNKANKTPYSYYACSYYGQFGKGNCSMHYIRYDVLYQAVLERLQYWAKAVQQDEEKALNKIQKVGNAERIREKKKKASTLKKAENRQSEIDRLFAKMYEDRACEKITERNFVMLSSKYQKEQIELEQQITSLREELSKMEQDMIGAEKWIELIKEYSIPKELTAPLLNAMIEKILIHEATTNEDNERIQEIEIYYRFIGKVE

SEQ ID NO: 17911 - protein, 452 aa, synthetic construct
MKAAIYIRVSTQEQVENYSIQAQTEKLTALCRSKDWDVYDTFIDGGYSGSNMNRPALNEMLSKLHEIDAVVVYRLDRLSRSQRDTITLIEEYFLKNNVEFVSLSETLDTSSPFGRAMIGILSVFAQLERETIRDRMVMGKIKRIEAGLPLTTAKGRTFGYDVIDTKLYINEEEAKQLQMIYDIFEEEKSITTLQKRLKKIGFKVKSYSSYNNWLTNDLYCGYVSYADKVHTKGVHEPIISEEQFYRVQEIFSRMGKNPNMNRDSASLLNNLVVCGKCGLGFVHRRKDTVSRGKKYHYRYYSCKTYKHTHELEKCGNKIWRADKLEEMITDRVKNYSFATRNLDKEDELDSLNAKLQVEHSKKKRLFDLYINGSYEVAELDKMMADIDAQINYYNSQIEANEELKRDKKVQESLAELATVDFDALEFREKQIYLKSIINKIYIDGEQVTIEWI

SEQ ID NO: 17912 - protein, 537 aa, synthetic construct
MKQQIYNTALYLRLSRDDELQGESSSITTQRSMLRLYAKEHHLNVIDEYIDDGWSGTNFERPSFQRMIEDIEAGKINCVVTKDLSRLGRNYIMTGQYTELYFPSHNVRYIAIDDGVDSEKGESEIAPFKNIINEWVARDTSRKVKSAFKTKFAEGAYYGAYAPLGYKKHPDIKGKLLVDEETKWIVEKIFSLAYQGYGSAKITKVLREEKVPTASWLNFTRYGTFAHIFEGKPDSKRYEWTIAHVKAILKSEVYIGNSVHNRQSTVSFKSKKKVRKPESEWFRVENTHEPIIDKEVFYRVQEQIKSRRRQTKEKATPIFAGLVKCADCGWSMRFATNKANKTPYSYYACSYYGQFGKGTCSMHYIRYDVLYQAVLERLQYWAKAVQQDEEKVLNKIQKAGNAERIREKKKKASALKKAENRQNEIDRLFAKMYEDRACEKITERNFIMLSGKYQKEQIELEQQITNLREELSKMEQDMIGAEKWIELIKEYSVPKELTAPLLNAMIEKILIHEATTNEDNERIQEIEIYYRFIGKVD

SEQ ID NO: 17913 - protein, 540 aa, synthetic construct
MTRQTTQQLITALYPRLSHEDELSGESNSISNQKRILENYAKQNGFRNLKWYTDDGFSGANFQRPGFQAMLADIEAGLVGTVIVKDMSRLGRNYLQVGMYTEMIFPQKNVRFIAINDGVDSAQGDNDFAPLRNIFNEWLVRDTSKKIRAVKRSKGMSGKPVTSKPVYGYLMDEDENFIIDTEAAPVVKQIYSLCLAGNGPTKIARVLTEQQTPTPGTLEYRRTGSTRRYHPGYECKWATNTVAHILENREYTGCLVNFKTEKVSYKVKQSKENPAEKQVIFENHHEPIIDRETWERVQELRKQRKRPNRYDEVGLFSGIVFCADCGSVMYQQRYQTDKRRQDCYICGSYKKRTRDCTAHFIRTDLLTEGVTENLRKITQYAAKHEARFMKHLIEQNEDGGKRLNAAKRKELEAAEKRIAELSAIFKRLYEDSVTGRISDERFTELSADYEAEQKELKEKAAVLQGELSRTLEATANAEKFMKVVRKYTSFEELTPTLLREFVEKIVVHESEALDGKRRGKLRRQEIEIYYSFVGKVELPD

SEQ ID NO: 17914 - protein, 507 aa, synthetic construct
MGKVYSYIRFSKKEQGAGSSTARQLKYAEEYAKKHGLVLDSTLVDDGLSAYHAKHLSKGALGLFLAAVESGDVEPDSTLIIERLDRLSRQKPRQAQALLSQIIDYGITVVTASDGAVYNEKTIDNDPMKLVYSLLIAIRANEESETKAQRSKAAIQHNINQFQKHKIRSLGGAVPAWFDRFNAAQGWEYKLNEKAGTVRRIVELSLNGTGAKTIARIINSEGHTTFGKSENWGMTSVVSVLKNPALFGRRVVNSNGSIMLDDYYPAVVSRKDFDAVQYRLNKRKNTKGSEKFVNLITGLGKGFCTCGYCGSAIATQNQIFKTKSGERIVRRMHCTATKESGQCHSSKRIEKVEEAVLMFMMERNLDTLKTGDTQSYEIEIDTIDKKIKKMVSLQLALETSELPDDFLDSLAQLRARKAELSDKAAKGGIDIELNEQFKALGEKAIKLENSEARTTVRQIIRDSVASIRIWTCGIELVNEPDIAIEFKNGTRGLISIRGQEIIAQQLS

SEQ ID NO: 17915 - protein, 527 aa, synthetic construct
MLSDNQINVYAYKRLSDVQQGKNNRSGIFRQSKCINEYIEGITKNGYSINLVELENDIGRSAYHGKHITKNANFGAFLEEIKKGNIPHGSWLLVEDVDRLTRQHFMTAVETTINPILAAGIEIHVLSTEQVFKGELNLSQQVDLLVKVDSANLYTKRLSKRTKGHWDKTFSDIRDGKRVNIQSRPLWLSWDKEKGEFFLNEKAPCIGHIFEMYIAGTGYRGIADALNRSGVPSLKNRTWQIAPIKRILKDPSTYGRLEYINRGLFVDEYFPAVVPKETFDTVQVLMQKKGSSRVRTSLLEKDNTLQGLAYCECGSPMYHKINSPKKHPRGGHYIQTVTSFRLCCTGKNNGNGCNKRDLYYPIVKEVLITSSDTFNTNKAKHHEIIDHTPEIERLEKQNQQILELTLSISNEQLLKSYIEKQEQNLEQIAELRMQESKPILDDLIPNIPLSDLTEMEINNYLRLIIKRVDVYSEGTGEKRLLLEGSENMPVLVIEYYDGHKQTIVMRDMRSAIVTKAWSSTRQGNLLN

SEQ ID NO: 17916 - protein, 556 aa, synthetic construct
MAMMNEMEYRTIGSALAGGYRAAVYCRLSKDDDLQGESASIANQRDMLEKYCEKQGWEVVAVYQDDGFTGLNMERPDLQRMLRAIERRQINLVITKDLSRLGRNYLQTGHLIEDFFPRNGVRYIAMNDGIDTLRDNNDIAPFKNILNEMYSKDISKKVHSSYLLKAQKGQFTGCLAPFGYRKDPEDKNHLLIDEETAPIVRLIFGYALNGHGPNYIRRRLEEEKIPCPTWWNRERGLRNTRTKWEKKDPENGRYMWDFSVIKDLLMNPVYTGAIASQKKDYRFKIGTIGEKKPEDWIVVEGQHEPLIDRMSFDIVQNKLKSRQRPGQTNEISLFAGLIKCGECGKSLTIRYTNAKHPQQIYSCKTYNAFGKNHCTQHRIDYDTLYSHVLRKIRECARAALMDGEAVADRLTNTCEAEQREQREAMERSLTRDEERIEVLDKMVMRLYEDMIAGRISEQNFNTMLEKTQTEQAELKAKVSEGRKRLSDEVQLANDAKQWVEAIQEYANITELDAATLNRLIKEIVVHERIDEDKTRHISIEIHFNLKPIPEVEQVTA

SEQ ID NO: 17917 - protein, 626 aa, synthetic construct
MTNVVVPTEPTALNLAVSYLRVSSKRQLDTARDIDPDGNSIATQREYVGRKADALAAHVVREFFDPGISAQTIDKRREFQELIDYLKEHPDVRYVIVYARSRAFRNYIDAAITKRLLDKLGVKLVSAREDFGEGIFAEAMEAMTDIFNDVQNKLSGEDIRLKMRNKAIKGGTIGVAKLGYRNARVEIEGRQVNTIELDEERAPLVLRAFELYATGDYSIDRLEATMADSGLTSRRTSRHPGERPVAASTLHKMLTDPYYLGYVVYKGEKYPGRHPAIVGQELFERVQDVFNARSAEGQRDRILLHYLKGALFCARCADKGRTSRFIYVEAKGRTGKRYGYFLCRGRQEKVCDIPHLPVDLVEQAIIDHYRTLELPPDFVDSIHQRLEEAVSNEQAATHTMHASLRNRLKDIDKQENRLLDLAADGAMPQAKIRAKLLDLTAERERVETGLSSTTRELGTGATALRHALHLVADPHSLYQGVTDDARRHLNQTFFRKIFLDDTTVTHDEKTPIFQEITEARYVYRSRSAAGANDDKSDYKRSPRSARASGASALTDPPTLARVYTVSGSSRPVMVGMTGFEPATLRSQSGCATKLRYIPFPSSGCAGTSRWTGSGGRGLPKSPHRSG

SEQ ID NO: 17918 - protein, 462 aa, synthetic construct
MKLRAGIYLRVSTFEQVKEGYSLQAQEERLTNFALAKDYNLVAKYIDPGHSGAKLDRPGLQSMIEDIKNNKLDIILVYKLDRLSRSQKHTLYLIEDVFLKNNVNFVSMSESFDTTSSFGRAMIGILSVFAQLERDTITERLTMGRVERAKTGLYHGGGNFTPLGYDYIDHMLIVNEFEAMVVKEIYSLYLQKKGVRQIVMELHDKYPEQVTTRTKIKGVLSNPLYIGKVTFAGEIHDGQHESIVDEETFNAAQKIRDSRILYNYSGHEQKGLLNGKLYCGKCGAKYYRQVTGSKKYRYIKYACSSKNWSSPKLIKDRKCDNNRYNVEQLENRVIERLKKLTLKDLTVPEKNGDIEKRSTIKKEIKSIDNQIEKLIELFQFGSITPEKINGRIEKLNVQKINLDLLLNEIDYKKDEKVIQESLKNLNDFNWEEENTLAKIKIMDTFVDTITVNGEQLDIVWNL

SEQ ID NO: 17919 - protein, 519 aa, synthetic construct
MFDNLKSVAIYARVSTEEQAEEGYSIQAQLDTLRQYAKQNRYIVSKEYKDEGISGKSIQNRPQLQQLLRDAKQGLFQEVIVWKINRISRNQLDLLTIVDELQKHGVSFRSYTENFETETPMGRFALQMMGSVAELERNTIVDNVKMGMKQRARQGKWNGGKVLGYESVEVEGSTFRKRKETRLVIVESEAALVRMIFEKYASGKGIKAIANELNHLGYKTKWGKPFSVVAVKDILNNPLYVGKIRFNKQENWTVKRRKGTNASPILADGEHEPIISEELWNTVQAMYKTKSEKPAQVFHGSFPFTGVMRCPMCGHGMVAQRATRKNKNGEIKYTLYYQCGQFANKGSAVCRANSVRADYAEEEILARIEKIVSQPQITEDVARELGQRQEVDKEPLVQELKHLDKELADIKRKMGKYMGLYENDMLEVEILKARFQELKEQEQRLSARKAEIECQLQSGEAAPIPFEVLKGMLREFRNVFKRADHAKRKQLVHALIKEITVTKDRKIDSIEWQFDSMLN

SEQ ID NO: 17920 - protein, 532 aa, synthetic construct
MKIADLYIRVSTDEQADKGYSQRDQEERLRKYCELNSFQVRKVIIEDHSAKTFNRPSWKKLLSELRTRRGHSDLVLFTKWDRFSRNAGDAYQMISTLRRLGVEPQAVEQPLDLTIPENKMMLAFYLAAPEVENDRRALNVLHGMRRAKKEGRVMGIAPIGYSNKISEDGKKYIAIKESEASIMRWVFKELAKGKINTQEIWGLAIDKGLKCSKNAFWGSVRNPVYCGKVFVPKYKEEESQLVKGQHEPLISESLFYDVQDVLDSRKKKRKTTVTVDPALLLRGHLICPKCGRLLTGSASKGRNQHYHYYHCRLGCTFREKAPEVNAIVADEIRKYVRPLPFLELYKEVIVSVFKNKTKHERSDVNRLKEELEGANERLTKARNLLIVGDLDPNDYRIIKIETEEKINRLEAKLTTGIKGTANVEPLLNKAISHISQLATLYEEGTTARKRKIIGSIFPEKLTFDGIECRTTRINEALRVMLLFYKGLDGKKKGTNQLFSDLSQDVTMEGFEPSRPCEHHPLKMASLPFLHMA

SEQ ID NO: 17921 - protein, 594 aa, synthetic construct
MSPTNLDPFDAMSQALIPKRAISYIRVSTREQAARAGAAEGFSIPAQREANKRKAATLGALIVKEFVDRGESARSANRPQLQKMLTYIQETGDIDYCIVHKLDRLARNRADDVDINRVLDQAGVRLISTTENIDQTPGGILLHGIMSSIAEFYSRNLANEVVKGLTQKAKSGGTISRAPLGYLNKQGHDEQGREDRWVEVDPERGPLMALAFTEYATGQWTLSTLTDHLTARGLTTLATPSRPSHPLDHNKLLDLLRNPYYRGVVTYQGVEYPGKHQALVDDATWHQVQTVLNQHRYGERQRVHNHHLKTTVRCGQCGGRLIIHKCKSRSGQIYPYFVCSHRQRHRDACSFKAVLIDEVDARVTEIYERIHISAQDRRTIERYLTEELHRIYAHQHDHAKDLHDQQTKLQAEQTKLLHAHYADAIPLDLLKAEQARIARQLAVIDKDLRSLTADQDKVKEHLSQALDLLEDCHHLYTHAPDNLKKLLNMVFFDHIDIHPADDETSEPHRSATPHPAAPFDQLASPELLASANMATIRQTKTPSAYAEGATQDNLFDTGSCKSLMVELRGFEPLTFSLRTRRATNCAIAPSTRPA

SEQ ID NO: 17922 - protein, 602 aa, synthetic construct
MSRAVGYVRVSTEEQAQHGYSLEAQAEAIRNYCKALGWELVRIYRDEGYSASSLDRPDLQQLIQDIPLHSFDTVVFWKLDRLTRSAKDTIYLLEDVFEKNNITYVSIQEPFVNTKDPTAKMFTTIISAFAQHEREMITERMRMGKYQKARMGQFPGGHVLYGYSKNPVTGEFEVNEEEARIVKLIYHWYVYGDESGQPLGMETIADKLTQMGILPPSAVRGVRVGVRGKRGQKGEVIKHWSNATVRQILTHQAYIGKNFFGRDGKNAEPEYTKDDWIPIPFPQLIDDHLYQLAQERRKRAKFWQRTHEMPLLVGIIHCGICGLQFRGAYDHGTKPVYSCYGRLKRYHRDGSPMCGSPRLPANLLDEQVTQKVLEALREPAKMKEAIEAHLESWERRKRELELLVGPSTRQVKQLQDELGNLNYLFRKGRIPVGEYEKEASALEKQIADLREQHKHQSEELRRLQKLEQDLDFIRRALEKGYWQVGYQAIQQEVQMTWDAAATIDAATGQLVNTKPRQEKKIQVDFSQAVEGGDARDELFNLAMHGSGKVMLRQLFDRLHITVHVYHDRVEVRGLVPVGNINISSFRRYRGFRLYRGWRTRCP

SEQ ID NO: 17923 - protein, 521 aa, synthetic construct
MIKATTTKATKTKGKPRAKAYSYLRFSSPEQQKGDSFARQTRMALEYAARHGLELDESLTFQDLGVSAYRGLNAEAGRLADFLEAVREGLVPRGSYLLVEALDRLSRLTPRKAMRVLEDIVEEGITLVTLNDGREYTVETLNDDPTSLLIAIVLFMRANEESATKSRRLTSAWEGKRARISDKALTSRTPAWIRLNKETGALELIPERAEIVRRIFDLYAKGVGHNLIAGTLNREGVPCFGSAAHWHRTYIKKILNNESVVGTIIPHRYIYQDGRNVRVPLEPVTGYYPPVIDGATFADAQKRGESPAKQRTGSLANVLAGLAKCPQCGHTMTRVQKGDPNKGGVPKMVCTRAKAGAGCVYKSVPYHQVEDAIYANTSYLVGTAPSGKPGLDDELSQLETHLEVTRAAIDNLLTDLATAPSRIISQRVRELEVSMDQTQARRDELLDELLAASGPVLMKRLRELEAALEVNPRDTARANAALRLVISSVVIDYDRGQLDFTWKHGGESSIVYAMPAQEAAE

SEQ ID NO: 17924 - protein, 555 aa, synthetic construct
MPTAYSYIRFSSDQQQHGASLARQEDMVGKWLVAHPEYQRSTQRFEDLGISGFKGKHLDNAFGRLRAAVESGVIKPGDCILIEAIDRAGRLAPSLMLNLLTEIVNVGVSLVSLDDGIIYDSNPANSNNLFLLVAKVQQAHQYSDALSRRVKDAYARKRENASKGEFTERRTPLWLENTGTEVRLVEDVAPFIVQIFQDYADGIGERRILARIRGRHPLLETLNPTTIKKWLKNPTAIGRWQPWPVDGVEQAPIEDVYPAVVSRELWYRVQKRLAAGAKIKSASKVYLLSGLVKCGRCGKNFGVVNTKRSPAVMLCMGRHRLGEAGCTNSRSIPYAVLDFIRSQTMQSAMLRATASQKLTVGERRQIEIDGELTELRKQESNAVALLVKYGEVASITAELEKVMGSIKALEQERALLNVAPSQDTLSDMVDLEHILMDDDPQRLNALLQGAGYFIVCEGATITVGEEHLLTGGTHQVYEYKGSHRPTETYRLIENSYIEYHLDMPNSKRLAAEYAAFLEQEACYESGELMRQHLQWNGEAFIDVATGLIVDGVTGS

SEQ ID NO: 17925 - protein, 515 aa, synthetic construct
MVVDLYIRVSTDDQADKGYSQRDQNERLRKYCELKNFTIDQVIYEDHSAKNFERPEWIKYLIHLRKRSTKTNRVLFTKWDRFSRNAGDAYQMIAYLGKLGVEPQAIEQPLDLSIPENKLMLALYLSTPEVENDRRALNTSNGMRRAMKEGRWMGKAPYGYINKSREDGSKYVAIVEPEGSNMKWAFNEIAKGTMAISQVRERMNEREGKRLEKTAFYIGLRNPMYCGKIFIKKNKEEEAHFVRAQHEPLISEELFEKVQSVLKGKRAKTATNTKFLSDENLPLRGFLLCPVCGGNITGSASSGRRQKYYYYHCQPPCRFRHRADAANLIFSNGLKDLEIKESLREYIKKKFLENYKASLINPVEEKKKIGKEIDELSNKVSFAREKWLSKIIDDDEYVEIKKECKEQIEKLEEKLSKDEGALKNINVDTILEKAFHGLISIGFLYDSGDIETKREIIGLIFPDKLKFDGKKYRINKMDILARNIFQIKSDLDKNKNRKSNLFACFSCYDTVRNLV

SEQ ID NO: 17926 - protein, 521 aa, synthetic construct
MDTYCIYLRKSRADFDAEARGEGETLKKHRTTLFALAKKMKIQVTDVYSEIVSGERVADRPQMQRLLNDVGDGRWTGVLVMEVERLARGDTMDQGLVAQAFKYSSTKIITPVKVYDPSNEFDEEYFEFGLFMSRREYKTINRRQQAGRLASAIEGNYIGNIPPYGYQRTILPDKSHSLVPDVDQAPVVKMVYDMFTKQNMSMGSIRAKLNKLGIPSARNTFWSVSTISKMLQNSVYVGEIVWKRRPQKKSQKDGVLISTRPLMPEDQWIKAKGKHEPLVTLEIWEKAQEILNNRKPVPAPTGIITNPLAGLVRCEICGHLMVRRTYSADKPAQIVCTTPSCPNISSNFTLVEQRLLTGLRTWINQYHAEWELNKPEKDMPVDELIQAKKSIITGLEKKLSELSQQSGKLHDLLERGIYTEDVFLERSQNITERVVETKSALNVAISELETEANRKKATVEVIPKVENVLDLYVKTEEAALKNELLKSVLEVAVYNKTVRGHWRKPEVMSHFEIKLFPKLPK

SEQ ID NO: 17927 - protein, 480 aa, synthetic construct
MKKIALYIRVSTDEQALKGNSLNEQEERLRAYCHAMELEGEIETFIDDGYSAGSMKRPALTRMLKMAREKKLSMVVITKIDRLCRNLKDLLLLVDELDEIQCGFASAGERFDTSTAAGRMVLQILGAFAEFERGRNRERVRENMLSIVTNTDKAVSRPCFGYNVVDSKYVINQEEAEVVRKMVEWMLQGEGAHRVMRRLNDMGVKTKDGKSFTQLSVGKLMRRETIAGMFVYNRGYSLRGKSLIRPEEEWIVIEEHHEPIIDRETFKRLQIAITARKTSGKQADNERWLLTGLVHCTHCGRPMFGRYRKKPSGKEYFHYVCSSYMKRAECFHHFIDRDLLENTVFDYLMDAKNYSGRTEEITTKDSQNEVDAAQLKAGLKKLDIKMQRQIELFEDADISKEDFRIARDRIHKERMAIEERLHEAETGTRVALENEFIKRLGSMNNELHSKNRGEQKNALRQLIKVVEVTNASIINVDVRL

SEQ ID NO: 17928 - protein, 523 aa, synthetic construct
MTTAIPKIAHSYKRFSSIKQRKSSSLKRQSDALDKYVSEHQLTLSDTTFEDLGVSAYRSTNAKEDKGLGQFLHALRSGAISTPCTLIVESLDRLSRAKIKVAMRQLMDITDMGVAVVTLVDGRVYTEDMEFEDFIMAGVIMQRANEESLTKSQRLKSKWEERRQKGFVNANCPFWLVLKADRSGYAPNEYASTVEMIFALTLQGLGSRLVAQSLNDSGIPAPKGGKWSTGTISKVLNNVAVYGALQPHTREYDDKTGKRTDKKTPSLIANFYPAILPESLFNETLAVRRSRNKTFNRNSTNSHLNLIKEVGHCGGCGGNVRLKKQQDLYYLQCSVECGKCSPVSLRYLQDWLKEIWLTADYAPVSLASVPEAKQLNALKDDLNAFNRKSSKLNELYAITEDENTYNQLLIIGKEIKVTKAKIEDLETELSPYSQTQAARKERTALVSKAFESGDALEVLAARGKLASLLTQLKDFVIHKDKKSQLVTFEVKTAQNETKIYVAAKNPYHAKSSHTGAIWKAIEK

SEQ ID NO: 17929 - protein, 547 aa, synthetic construct
MSTTRDQNAMTNVSPEETGPDDLELRGRPAGLAPPEELALLHPDTPFLIAYSRISDDWRKNNSQKAAKSAWSAGKGVANQHRRNDRNAARHDAVIVHRYTDNDLSASKRDVVRPDFQAMLRDLKRGHTPEGYPVHGVICVDQDRVQRTDRDWEDFVEAITLDPSRRFYTPSGPMDLTEESEIIKTGIMAVVNKAESMKKKRRIRDWHQDRILDGLPHSGPRPFGWEEDRETLRLVESDFLAWAIDERLKGKAVKTLCDESKRRGLTGTRGHDLVPQTLTQMMTAPRVCGYRANRGDLARDDDGEPVVGVWETVTTPEKWEAVCATFGAGSTYLARGSGTPRITGIPKTIKYLGSTLLRCQYRIEEEKDGAVTARVCNEPMGGSKAASKRSPYVYTCATCSRNAVSGPMVDQQLQRLVLAKLKKAEATFIPVKVAWPDEKKLQQKADKLAELERQWQDDEVPDAMFYRLAPPLERQVKKLRSERAKFELAAATHNEAPDVVAKRWVAGEYDLSQKRQVLFEMFAAVQVLPGQKGNKIPNPKRLIPVWK

SEQ ID NO: 17930 - protein, 525 aa, synthetic construct
MTSSDLAISAATLLATGRPKPVRVLISLRISDLTDESTSLERQLFDARQFIADRAHLGWTEAGVARDAHVSASKQSPFERAELGHWLKERAPEFDLILFWKLDRIIRKVLDMQELLRWAVDHGNKDFASVTEPIFDMTGPFRHVIIALFSALAEMEAKNTSIRVKSFRDSVRELTRWAGGMPAYGFEVYKEDGAAYLRQNPHQVNVLREIVNRLLAGKESHAAIADDLNARHEPTARGTRPSKRIQDAGRTYKWTASGLRKMLKNEALMGWKMETRPVPGKKYFETIPVIDRNGHKVKVADAIFSEEEWKKLQEYLSGRTFKMSPPTNVTPFPTVWCCGYCKGNIRLHVARREKEDGKVTEYPKFRCATPREVDGRTKYGCEEQVSWDPGRLLATFEHHLMEEFGDLEAEERIYVVGEDNAGRMAEIEELVVHLMADMEPGRRYGTALTRPTAEATIDKLNAEYETLSGRPSGDRWEYRSLGKTWRELWMSSNVAVLEAITQRNGIRLICYQEAFELVVPKRMKL

SEQ ID NO: 17931 - protein, 551 aa, synthetic construct
MKSLQMNLHKDGIHENSRAALYLRVSTGRQAENDLSIPDQRRQAREYCAARGWTVVNEFVDAGMSGMDDKRPELQRLLDLAKDGDAPFDVVVVHSFSRLMRDHFQLEFYVRQLRRHGVRLVSITQELGEDPMSVMVRQVFALFDEYQSKENAKHVLRAMKENARQGFWNGAAAPYGYAIVAAEQRGAKTKKRLAIDPVEAEIVRQMFRLVSEGSGTGGPMGVKAATCWLNDHGHRTRGGARWGIGQLHKLLTSATYKGDYLFNRKVWKTKEDKPETEQILVPVEPIIAPALFDCVQRRLASRNPKAMPPRVVTGPILLTGLATCATCGGGMTLRTGKSGKYRYYTCAAAAQKGKSSCPGRSIPMDKLDSLVTARLRETLFTPDRVRAILGSLFERQASRSDDHATRITALQNKAAEAEGRLSRLYQAIETGLADMTDPTLKERLAALKTDRDSAKAAIERAYSELRPETRLTEEKIDAFAALMRENIATGPVPFRRAYLRAVIDQVEVDDEEIRIHGRKSELERLVMTNSVITAAVPSFVRKWRTRQDSNL

SEQ ID NO: 17932 - protein, 517 aa, synthetic construct
MERVAMYLRKSRADIEAENRGEEETLAKHKRALFKLAKDMSLNIIKVRQEVVSGESLLHRPEMMELLKEVENKLYDAVLVMDMDRLGRGNMREQGLILETFQKSETRIITPRKTYDLQDEFDEEYSEFEAFMARKELKLITRRMQSGIKRAVMEGNYLGTHAPYGYQIVKDKKQRTLVPDPEKSLVVKMIFDWYTSDIPENRIGSRRIAHKLNELGYLSYTGRTWDPACVLVILKNAVYTGRIQWKKQIRKKSADPNRKYEQSLQPKDKWIDVEGLHEPIISTEIYEKAQGILKNRVHVPYKSNKKITNPLAGLIRCKKCNNSMVKRAQGRGARDRLCCREITCKCRSSVFEFVEQRLLDSLQQWLDEYKVSLSEHDLNSIGKDDTSSIRLLETSITTLQQELRSLETQKGNLHDFLERGIYDEQTYLERSINIAERTKHIQESLRKAIQELDVENTRLKAKVKIIPSVEHVLYQYPRLEDPKEKNMLLKKVIDYCSYEKEPHQKLDKFTLVVYPRL

SEQ ID NO: 17933 - protein, 536 aa, synthetic construct
MPQKVVMEIPANPMLGDLRKRKRKLRVAAYCRVSTEEEEQQNSFEVQVDYYTEKITHHDGWQLAGIFADDGISGVRTKKRDQFNEMIELCRKKKIDLILTKSISRFARNTLDCIKHVRILKSWGIPVIFEKENIDTSNMNSEMILTCLSSFAQAESESISGNVTKGIRMGYKQGRFAFRYTGFAFQKGPDGEPEIIPKDAQTIRMIAQEFLNGDSLKGIKEKLEKASIPSPAGEPKWTTQTIQRILQNEKYAGDVLLQKTYTADFLEGRVKKNNGELPQYYIKDNHQAIIPREMFFQIQEELARRRSKKPANTKKAKTNRGRFTSKYALSERLVCGDCGCYFRRVTWNIHGRKQIVWRCINRLEFGPKSCGNSPSLEEAALHTAILEAICSLVQGQQEEMAAALQDTLIHCLAGEKEEASPIVIENKIKELETEFDRLLVLAIDENDIIDHKLKQISETILKLKQQKKRIEYTAERSKVMESKAKEVMGLISAEDLDLTEYSDALVYRIIERITVLSKEEIRIRFIGGFEITQPLH

SEQ ID NO: 17934 - protein, 512 aa, synthetic construct
MPQVKVIQPIAEQAKKLRVAAYARVSSDSADQLNSFATQVDYYTGYIQSKDEWEFAGLYADEAVSGTTADKRDDFQRLLADCRAGKIDRILVKSISRFARNTIDCLQTVRELKQLGVAVEFEKEGLDTGNMGSEMLLSILGAAAQEESLSISKNLKWSYRRRMKSGDFITCSAPIGYILKNKTLIPNPQEVPIVEYIFNSYLAGKGIVEIASELTEMEMRNKDGDTKRWRSVTILNILKNEKYIGDSLVQKRFTTEELPFQRKQNNGELPQYYIKNSHQGIIPIEVFEAVQRLLKQRSLSYAPKSEIQQFPLSKAVKCGLCGSTFYRKPKNQFIKWICYQHLKDKELCPNKAISQDEIYQAFLRVYNKLLDNKDSILKAMLNQLLELQAKTAFERPDLIAINEKISELVKQNHSLTRLQTKGCIDSAIFIERSNRNNQKIEELRREVRQLQGPDEVSRIVDNTKLLLELLEEAQPMLEFEPSVFKSIVQKIVVYPERFCFYLTNGLVLDEGR

SEQ ID NO: 17935 - protein, 583 aa, synthetic construct
MTASQTTAPTIDDIDGGVKAVLYLRVSSKKQMDTAVDIDPDGNSIATQREVAIRKANNLGAEVIREFVEPGVSASTIEKRGAFQDMLTFLRETPGVRYVVVYARSRAFRNYIDAAITKRLLDKLNVKLVSAREDFGDGVYADMMEAVTDIFNDVQNKLSGEDIRIKLRHKAINGGTIGRARLGYLNTRVEIEGRMVNTVGLDPERAPLVLKAWELYATGDYSIERLTVTMADLGLTSRPSPRWPQIRPVSDTKMHQMLRDPYYTGFVVYKGSIFPGRHEAIVSHELFDRVQDILNFRSQRGQRDRILTHYLKGALFCQRCDDAGRTARLIYTEATGKTGQRYGYFLCRARQDGLCDLPHLRAERVEEAVVQHYATLRLAGNFAATVRQQLEQAVADDQEGVRHMHAALTRRLRDLDDKEARLIDLAADAALPQAKIRAKLHEVQRDRERTQAGLTNTGEQLAVGVSVLRDALHLVEDPQTLYRNVGDSVRRHLNETFYERLYLDDLEVTGDQKTPLIAELHEAATTYRRRALRLHKQKSPREAEAFSDTSTDLLTLADLFSVKVSSKAVMVGRAGLEPATNGL

SEQ ID NO: 17936 - protein, 537 aa, synthetic construct
MKQKNKESSDVMKIAAYCRVSTEKEAQIDSLEKQIEFFNEFTKKNGYELYKLYADEGISGKQIKHRKQFQQMMIDAKAKKFDKVVVKDVSRFARNTVDLLQSVRELKSYGVQVDFLNNGEVMEGGSEFILTILGAMAQQESANMSKRVKFGKDITAKKGRVPNLVFGYDKIPDERYTLKINEEEAKIVKEIFESYVYKGIGTTKIAWNLNDRGIRTKKTKSKWVQTSIVRMLKNPIYTGRVTNKKSEVTDFITGTRKELPEEEWIVVERPEMRIISDELFNRAQELLEQRSNEFKLNNKREKTEYVFSTLIYCKHCGYSFRRIKRKYTADGPEYIRWVCSGRNSMGVNHCPNTTVIDEEELLNAIKIYLKSIIKNKKDFMKAVEKEFEKITKLRENNERSEESLLKKIEKVTVKKQKYMEMFQNEIINIQELKKYTNPLNEDIARLERELKLITSEIKEKDVLEKELSKTINTVDDILNNQTITNAMLKTIIDVIEVDSDSNVEVRLKLLNEIGSTPAVITNFNDINPTVTKSNVST

SEQ ID NO: 17937 - protein, 410 aa, synthetic construct
MSKKRAVAYIRVSTEKDAQLHSYDFQEQYWRGVFDDDPETELVGIYADKGISGHSVQKRPQFLVMMQDARDHKFDRIYTKSVSRFARNTTQLLEAVRELRDIGIEVVFEKENIHTFEPTSEVFLTIAATIAENDLDVDSERMRWSVRHRFENGWISIGSGLYGLRLTAENELEIVPEEAAVIRYIFDAYVNGGLGSKRIADALNETGVKTRSNGEWNAKHIVSLLRNEKYKGDVIMGKSVSHFGVHRDNTNGEFAPRYYMEDTHEAIVDKQTWEAAQQILAERGRNIPRQVPTHTFTSMIQCGCCGTNFVHKVNNSSFKWRTDIWACGRSLAKGIKVCDNSRIKDAVLKEKFVDAYNEFIKQRPQGDSLIALQEVLEDLRQQERDLAELMMQHLISKAAYDTQRNQRPDR

SEQ ID NO: 17938 - protein, 540 aa, synthetic construct
MATATRRVVRTMPQMFIETVDVDQGKLKVAAYARVSTEKEEQEDSFERQVEHYKQLIASKPEWKYVDIYADPGISGTRAEKRPDFLRMIEDCRAGKIQKILVKSISRFARNTVDALNYIRELKDLGISVYFESENIDTLTPGGEVLLTILAAMAEQESRTISSNIRWAYQRKFQNGDIVLNTGLMLGYRKVGKDEDGHDVFEINEEEAEIVRRIYREFIAGYSITQIAKRLAADGIKTKLGKDKWQHNVIVSILTNEKYTGNALLGKTWKPDVLTKYRQKNDGKKAPIYYVEDTHPAIIEKDMFELAKKEMERRRGSKEQVVGGGRFTSKYPFSGLIECGTCGGRLRRHVRTMGTGKKVASWGCATRITNGRQACDTHHINETVLEATYLAALRDLLDNASDVVEAVKEGAELALEPENRAAIERVEAEIVGIQEAVLELHRAKQRMELGAAEYTAKVKEYSELMKAKEAERDALQDTAVKYTEVKTWLDTFMDQIMQSTSLTKVDGTTMKMLVEKIIARDTGIEVIFKCGVSVEHEYVK

SEQ ID NO: 17939 - protein, 495 aa, synthetic construct
MNAVIYARFSSHNQTEQSIEGQLKTCYEFAQKNGYTIVGEYIDRAISGTTDNRPDFLRMIEDSAKKGFQYVLVYQLDRFARNRYDSATYKAKLKKNGVRVLSARENITDDASGILVEGLLESMAEYYSAELAQKIRRGMAINAEKCLANGSNPGLGFKVAPDKHYIIDEETAPIVVRIFEEYAAGKTVTEICESLNNQGVRTSRGAMFNKNSLRKMLQNKRYIGYYLYKDIETPGGMPRIISDELFYKVQEIMSKNKKAPAHTKAKQEYLLTTKLFCGKCRDMMTGIKGTSHTGAAYYYYKCNNAKKKQCDKKAVQKDYIEDLVIAECRKQLTPANIDKIAHEVVALCEREKDNSNLKRIEKLMRENERKQRNLMNAVAECEIESVRKSLYAEISRLNTELDTLKNEYAIEQAGAVSLTITEVKFFLSQLRKGKADDLSYRKTLINVFVNAIYLYDDKLVIFFNSGDKPVTIDDELLSQMEQSDGFVFGALGSTR

SEQ ID NO: 17940 - protein, 591 aa, synthetic construct
MSESRRGAEPATNTTRAVIYLRVSDKQQVERDDTEEGYSLPAQREASVQLIREQGWSLVDEYCDRGESASKDDDARPQFNAMLQRIFEQGDVDVVVVHKRDRFARNAARHLALRAALRKRGVRLESVVNKLEETAAGWLAEGIEALVNEYHSANLSAEVKKGMRQKAQMGGWIHRAPLGYLNRKEWEGGRRMAYVIPDPERAPLVVEAFQLYASGDYTVEQLATEMEARGLRMRAWRDRPERPLSINGLRWVLGNKFYVGVVEHNGVEYHGRHEPLVDAQTFEKAQSILASRGGDGTRELCHSHYLKGLLVCGVCGRRLSIQFSKGKYVYFYCLGQKDRRRPTGCREAYVPVTNLEQQVEALYARIQLRPEMAERLRGWLEVELISREERNVAEREFQAKRLEKLNAQRRKLLDAYYAAAIDVAMLREEQDRLRRETADVEERLREVDATLAQWQEILGIALRFAESCGAAYRVAKERTRALYNRAVFERLIVRNGRVAEPHYAAPFDLVFGVGEFEQGSLERETGLEPATSSLEGTRCYLNSPFHQRLPGAPYSLFCRRTATPLQPRWRPQRRACAGQHFGCDSLRLGVR

SEQ ID NO: 17941 - protein, 583 aa, synthetic construct
MTKPKPQPVRAYSYIRMSTDTQLHGDSRRRQLELSERYAEKHRLKLVEEFRLEDIGVSAFRGANLSIDSSLGRFLQMVRKGEVPAGSYLLLESLDRLSRQDVFTSLSLFTDIIKAGIKIVTLADDQVYTSEKTDFSQLVVSLAIMSRAHEESQTKSRRLAEAWTSKRRTVSESKLTAISPLWLDLSADRKSFALDEERSAIVRSMFQDAAAGLGTFSIARRLNQAGVPPFGRSRGWQMSYVSKILTNRAVIGEYQPHTKSGGRRVPIGEPIKDYFPAVVDEQLFLRVQAARAQRRVGGAGRKGKFVSNLFSGLARCAYCGSRMHFVNKGLSPKSGGTYLMCDSARRKLGCVTNAWRYGDFEASFLTFVEEIDLQPLMHGDAETANRARLDQAIQVLQGRLARLEEERGRTFRLLMDQDTASDFIKKEFARYQREIEAASAERASLVAERRLFESNVARFHESGNEIQDLVAQLRSSAEDDTYRLRAKVAARLKALVDHVNVAALGIRATEPDNLMLFPTGGQGDFQRAKIGGSSPRQFEVMFQDGMQRVVQPDKTDPAAGSSQLYRWLEPRSGSRLAAPPADS

SEQ ID NO: 17942 - protein, 565 aa, synthetic construct
MTRIALYARYSSESQRDSSIEDQFRICREQAKREGWKVVACYKDAGISGSSMILRPGIQMLLQDAQEGQFDLVLAEALDRVSRDQADVATLFKHLKFAGVPIITRAEGEITELHVGLKGTMNALFLKDLAAKTHRGLRGRVEDGKSGGGLCYGYKVVKKLDHRGELVRGDREIDVYEAEVVRRIFREFAAGIGPRTIAKTLNDEGFAGPAGKPWIDTTIRGHQKRGSGIVNNELYIGRLIWNRLRYVKDPSTGRRVSRVNPDSDRIVTEVPELRIVDDQLWQAVRARQSEIVEKYAKVTEAVREHHRKNKLNGARRPKSLLSGLIFCGCCGGRYSLRGAGRFACSSHIANKSCSNSRTIPREELENRVVAGLKDRMMSPEIAAEAMRTHAEETNRLNRERRSNGDRWRVELEKTGRELEKAINAILAGVPPLTLKEKIEKLETRKAELSALLADVPEDAPVLLPSASAIYAKKVAKLTETLNRPDGRAEAAEALRTLIEKIVLRPGPNRGEIEAMLYGELGTILNWVEPQAVGKTAKKNTPAENAAGVSVSVVAGTGFEPVTFRL

SEQ ID NO: 17943 - protein, 506 aa, synthetic construct
MFESKEGLKYDDYPYLVYARVSTDSDEQKDSLANQVDICRYWLEQHDFEWDDRAILQDAGKSGTMFLERSAMQLVLKKARNREIKMVVFKSLHRLARDLKDALEIKEVMLGHGVRVITIEEGYDSELEGKNDMKFEMFSMFAAQYPKTQSVSISAALAAKVRRGDHIGKTPYGYEKIDQKLLIKEGEAAIIHQIFKWYNEEKIGMKSITNKLNKGVAEGTILPPRNGGAWQLTTIQRIIRNRTFCGDFILNQYTKIKVDGRKKQIRNPESKWIVFKDHHPAIVSREAFDLANDKKVLNKKKKISPYNEFRGLLKCAHCGCSMIINQAGKRKKDGTHWRYLKCSNYRRSGQCVSHVPMTYENLRITILKDLISESEKVNFHLEKSLNDNKNQKMKKLNNTIAATEQKKNRLLDLYLDEMINKYEYEAKRERLEHEINRMNDELFLLNSEEENEVNITHIKQAIRALNDTEKDLFHVFQALIDFGVVYQNGQIDLKYTFQANEEEEKA

SEQ ID NO: 17944 - protein, 503 aa, synthetic construct
MEENKSIGIWIRVSTEDQAKGDSPEHHEERARMYCKLKGWDVVTVYHLEAISGKSVMDQPEAQRMLKDVREGRIKALVFSKLARLARNTKELLTFADYFQDHKADLVSLQESIDTSTPAGRLFYTIIAAMAQWEREEIASRVAASVPIRAKLGKPLGGAAPYGYTWGDDPLKKQLEIDENEAPVRKLMYEIFLRTKRKKTTAKELNDLGYRTRKGEMFSDTTIDRLLRDPMAKGVRRANYTKSRGNKKHWDLKPSDEWVLIECPSLISEDLWNQCNSILDQQYKKRNKSGRQSNFLLAGILKCKCDNKMYVYHGVDTFHCKNCGNKISVKDIDFIYEEQLKNFLFTNLEIDTYRQETKALIEEKTSLVEVTEMEIGELRNKTHELLQMRMKKEISQEDFAYYYQPEKNRLEELQHQLAELQGEIDVLTIHLASSDTILTDAKDLYSRWADLELHEKRSIVETITDEIVVGEDDIHLKLAYLPKHTFFDDSGKRQHNVRGSWRR

SEQ ID NO: 17945 - protein, 514 aa, synthetic construct
MPTEYALYLRKSRADLEAEAHGEGDTLARHEHILMELAKSRALPIGAIYREIVSGERIANRPVMQQLLSEVEDGRWKGVLVTETSRLARGDTIDQGIVAQAFKFSGTLIVTPAKTYDPTQEADEEWMEFGLFMSRQEYRMIRRRQLAGTRASKKEGHYVPGRPPYGYERYKLDGRGWSLRPVEPQAGVIRTIYDMYLSGKGFSEIANELNAMKIRTPLDKKWVPATTRAILQNPHYAGFIPSAMKVNTKIVQKGKLITKRPVNKNCELYEGIHEAIIPRDVWNSVQQRMKDTVTPRVPRKYQQMNPLAGLVYCDQCGKLMSRHPYRREDKVRFGCENPSCSTVSSLFEDVESLVLQSLREFLHKIELSSPALLDTKSEEIALQNIEKQLTDINHRLQRTYELLEDGVYSKETFLQRQSAISQDQTALLNTKHEIERKLHNKQTDIEAQKNSAPLIRHVLDVYPTLEDPKEQNLLLKQVIRRIDYHKTVRVYGKAKSDLHLTIHPKIAIPQTSNI

SEQ ID NO: 17946 - protein, 626 aa, synthetic construct
MRNEKITPLYERLSRDDELQGESNSISNQKQMLEDFARRNGLPNPTHFTDDGISGTRFDRPGFLAMMEEVEAGRVEAIVIKDMSRLGRDYLKVGQVMEVLRQRGVRLIAINDGVDSLKGDDDFTPFRNIMNEFYARDTSRKIRSVFKSKGMSGKHLTGTVIYGYLWDEKREHWLVDEEASEVVRRIFSLTLEGYGPYQIACKLSTDRIEIPVVHLARFNEGVNRSKPVKDPYGWGSSTIVNILKKREYLGHTINFKTRKHFKDKKSHYVSEDEWTIFENTHEAIIDQQTFDLAQKIRSNVRRYPNGWGEAAPLTGLLYCADCGGKMYVHRTNNGKRVSQYTCSNYTKVPCGTLCPTQHRINESAVLTLVSDTLRAIAEYSKNDRTEFIHTVQETQVAQQSADIAKKRRRLAAAQKRSGELEKLICKIYEDNTLGKLPDARYRALDAQYAKEQDALEIEITELEKAVTGYEQSQKSAEKFIALIDKYENFDTLTNTMLNEFVEKILVHERARKGSQDTTQEIEIYFNFLGRYIPPSLQPVPLTPEEQEELRKKEERKDRLHQNYLKRKASGAQKRYENKIKAKKKAEMDAKKALIRAEDMKKGVFSTVGQLPKEEPRKGGIAASAAV

SEQ ID NO: 17947 - protein, 538 aa, synthetic construct
MKDVTEKIAVIYCRVSSLKQAVQGDGLTSQETRCREYAKYKGYDVVNVFKDDMSGGLIDRPGMKSMLGYLHKNRSLPHVVIIDDISRLARGLEAHLQLRSAISSVGASLESPSIEFGEDSDSILVENLLASVSQHQRQKNGEQTKNRMRSRLINGYWVFQAPVGYRYARSTGNGKVLVRNEPCASIVQEALEGFASGRFQIQAEVKRFLESFPEFPRTNHGYVRNQQVTDILTNPVYAGYVEAPNWSVSLRQGHHEPLITFQTFKKIEERLNSKAKAPARKNINEDFPLRGSVLCGDCRSALTSCWSSGRHSRYPYYLCHKRGCESYGKSIKRDVLESEFEALLRAVQPTPGLFKIAQKMFEELWNHRLAMSEARVRNLKSEMAKIERQVGQFLDRITDTDMPSVIRTYEDRIRKLEEQRIVIGEQIARCGRPVRSFDQTLRTAFDFLGNPCKLWASERFEDKRTVLKLVFLDRLAYVRGSGFRTADLSLPFKTLSDFSKGNLKMAQRTGLEPATPGVTGRYSNRLNYRCASAGQDAR

SEQ ID NO: 17948 - protein, 557 aa, synthetic construct
MNMHSPTVTTRAALYLRVSTARQAEHDISIPDQKRQGEAYCEQRGFQLVETYVEPGATATNDKRPEFQRMIEAGTSKPAPFDIVVVHSFSRFFRDHFEMEFYVRKLAKNGVKLVSITQEMGDDPMHQMMRQIMALFDEYQSKENAKHVLRAMNENARQGFWNGARPPIGYRIVAAEQRGSKTKKKLEIDPLHADTVRLIYRLFLEGDGTRGAMGVKAIATYLNERRFFTRDGGRWGLAQIHAILTRTTYIGEHRFNTRSHKDREKKPESEIAIMAVPPLIEREIYDAVQARLKSRNPMVTPARVSSGPTLLTGICFCAKCGGAMTLRTGQGSTGATYRYYTCSTKARQGKTGCKGRTIPMDKLDHLVADHIGDRLLQPKRLETVLASVIDRRQERAERRREHLAELNRRITEADQRLGRLFDAIEAGMVDKDDAMAKERMVSLKALRDQAAADAERTQLALDSSGNQGVSPDMLKGFARKARERIRLDDGGYRRDHLRALAQRVEVADDEVRIMGSKSELLRTLVAASSVETAAFGVQSSVLKWRTQEDSNLRPLGS

SEQ ID NO: 17949 - protein, 536 aa, synthetic construct
MMAGKVYSYLRFSDPRQAAGSSADRQLQYAQRWAAERGFVLDESLSLRDEGLSAYHQQHVKQGALGAFLKAVDEGRIPSGSVLIVEGLDRLSRAEPIQAQAQLAQIINAGITVVTASDGREYNRAGLKAQPMDLVYSLLVMIRAHEESDTKSKRVKASIRRLCEGWQADTYRGLIRNGRDPQWLRWDGQAWQLLPERVEAVRYALELYKKGEGATRVVRKMEERGYVLSDWGLGGQQIYRLIKLPALRGAKRVSIDGEDFLLEGYYPPLLSDDEYHELQAVTDKRHGRRGASDIVGIVTGIGITWCGYCGTAVTAQNQISRAREDGTLNDGHRRLHCSSYSSSTGCKAASCSVVPVEKAVLAYCADQMNLTRLLEPTDDGQQVRQRLQACLRKQGEVERQLARVTEALLADDGGAAPLAFVRKARELEAELQQLHVEAERLELEQAVQGKVQTPAAAEQWAQLAADSQDIYSPAREQLRQLVLDTFSRIVVYMRGVVLDPKSKTIAVMLVSRAGQRVMLEVDRRSGAWKASRDRSA

SEQ ID NO: 17950 - protein, 415 aa, synthetic construct
MMHEKIGPHHLERKAILYVRQSSAHQVLHNRESSALQYAMRDRLAALGWSHIETVDDDLGRSAAGGVTRAGFDRMVAEVCLGKVGAVAAREVSRFARNSRDWQQLIEMCRVVDTVLVDQEAVYAPRQGNDRLLLGLKGSLNEYELDLLRQRSLSARYEKARRGELVVTVPAGFVKAGDRIEKDPDRRIQEAIALVFNKVTELGSARQALLWFLEQGVDLPVRCANGDVIWRRPNYATIHRMIANPIYGGAYAYGKSRSVPGYDGRSGIRRKARDEWLALIPNAHEGYISWERAEEIRKMVSDNVPASRHHGAPKHGDALLAGLFRCKRCGRKLTVRYTGANHNIPRYSCWRGLLDNGEPRCIAFGGLRVDDAIQEALLGVVEPGAIAAAVEAERNMASQRDVLKNQLARVVLHQT

SEQ ID NO: 17951 - protein, 686 aa, synthetic construct
MMHEKIGPHHLERKAILYVRQSSAHQVLHNRESSTLQYAMRDRLTALGWSRIETVDDDLGRSAAGGVTRAGFDRMVAEVCLGKVGAVAAREVSRFARNSRDWQQLIEMCRVVDTVLIDQEAVYAPRQGNDRLLLGLKGSLNEYELDLLRQRSLSARYEKARRGELVVTVPVGFLKVGDRIEKDPDRRIQDAIALVFNKVAELGSARQALLWFLEHGLDLPVRRADGDVIWRRPNYATIHRMIANPIYGGAYAYGKSRSVPGYGGRSGIRRKARDEWLALIPDAHEGYISWERAEEIRKMVSDNVPASRHHGAPKHGDALLAGLFRCKRCGRKLTVRYTGANDNIPRYSCWRGLLDNGEPRCIAFGGLRVDDAIEEAVLGVVEPGAIAAAIEAERRMASQRDQVQDALLRDLEAARYAADRAFRQYDAADPENRLVTSELEARWNTALARAGEIEAKIAKHRTVAPQPIPMSASQVAALAGNLRAVWTAPTTDARLKKRIVRTLINEVVADLDDGTSEIVLVIHWVGGVHTELRLPKRRRGQRNATPDDIVDAVRQLVLIANDDVIAGVLNRNGLTTGNGNRWTRERVTALRSYRKIPVFRPRVDGEPWLNLGGAAKLLGITPKTLRLAAEAGQIEGAHPLPDGPWIFSRSKFATPQAHQILDRARQNPRHPTGSHPDQENLFPSTT

SEQ ID NO: 17952 - protein, 481 aa, synthetic construct
MIATNKVAIYVRVSTTNQVEEGYSIDEQKDKLSSYCDIKDWNVYKVYTDGGFSGSNTDRPALESLIKDAKKRKFDTVLVYKLDRLSRSQKDTLHLIEDVFIKNGIEFLSLQENFDTSTPFGKAMIGLLSVFAQLEREQIKERMQLGKLGRAKSGKSMMWAKTSYGYDYHKETGTVTINPAQALTIKFIFESYLRGRSITKLRDDLNEKYPKHVPWSYRAVRTILDNPVYCGFNQYKGEIYPGNHEPIISKEEYDKTQSELKIRQRTAAENVNPRPFQAKYILSGIAQCGYCGAPLKIMLGVKRKDGSRLKKYECHQRHPRTLRGVTTYNDNKKCDSGFYYKDKLEAYVLKEISKLQDDADYLDKIFSGDNAETIDRESYKKQIEELSKKLSRLNDLYIDDRITLEELQSKSAEFISMRGTLETELENDPTLRKNKRKADMRKLLNAEKVFSMDYENQKVLVRRLINKVKVTAEDIVINWKI

SEQ ID NO: 17953 - protein, 600 aa, synthetic construct
MKKDVKVIKGDTTLKRTASGCVERSIKRVAAYCRVSTDTEDQINSYNSQVEHYTEFIQKNNEWTLAGIYADEAITGTQVDRRIDFQRLINDCINGDIDMIITKSISRFARNTLDTLKYVRKLKEFNVAVFFEEENINTLTMDGELLLTILSSVAQQEVENISANVKKGLRMKMERGEMVGFQGCLGYDYDPETKSISINEKEAEIVRYIFRRYIEGVGGMVISRELEEQGYLSPRGNKRWTETTVLGIIKNEKYKGDLMMGKTYTVDPISKRRLDNYGEQDKFYIENHHEPIISEEDFEKAQGIRLRRSKNRNTVANNGGKREKYSRKYAFSSMLECGFCGHNLSRRNWHSSSEYTKVIWQCVNATKNGKKYCPHSKGIEEEAIEKAFMESYRQVCHNNVEITNEFLKTVEEELKDNSLAKDLKKINNQLDKILKKEKDLVELRLNESISMDIYQDKYNEIAISKEKLLAEKRTLEVTLTDEKALKKRLEGFKKLLESNKYLEEFDRAVFESIVDKIIIGGTNDEGEIDPAMITIIYKTGKKDSQDGRLFKSRRKNAKEVDEKTDNKLYPQSSDEVNNLCSYPMDNTRRDGSTFVQTRCR

SEQ ID NO: 17954 - protein, 481 aa, synthetic construct
MKTMNKVAIYVRVSTTSQVEEGYSIDEQKAKLSSYCDIKDWNVYKIYTDGGFSGSNTDRPALESLIKDAKKRKFDTVLVYKLDRLSRSQKDTLHLIEDVFIKNGIEFLSLQENFDTSTPFGKAMIGLLSVFAQLEREQIKERMQLGKIGRAKAGKSMMWAKTSYGYDYHRDTGTITINPAQALAIKFIFESYLRGRSITKLRDDLNEKYPKHVPWSYRAVRTILDNPVYCGFNQYKGEIYPGNHEPIISKEEYDKTQSELKIRQRTAAENVNPRPFQAKYILSGIAQCGYCGAPLKIMLGVKRKDGSRLKKYECHQRHPRTLRGVTTYNDNKKCDSGFYYKDKLEAYVLKEISKLQDDADYLDKIFSGDNAETIDRESYKKQIEELSKKLSRLNDLYIDDRITLEELQSKSAEFISMRGTLETELENDPALRKNKRKADMRKLLNAEKVFSMDYENQKVLVRRLINKVKVTAEDIVINWKI

SEQ ID NO: 17955 - protein, 479 aa, synthetic construct
MNKVAIYVRVSTKGQAEEGYSIDEQIALLTSYCSIHKWKIFDTYVDAGISGATIERPELSRLSRDAQKKKFNTMIVYDLKRLGRSQRNNIAFIEDVLEKNGIGFISLTENFDTSTPLGKAMVGILSAFGQLDRDTIRERMMMGKIGRAKSGKPMMTSTIAFGYTYDKVTSSLNINPAEAIIVKTIFNEYLSGRSLTKLRDYLNENDFLRNGKPWNYQGVSRILRNPVYMGMVRFRGEVYQGNHDPIIDSETFEAVQKELKKRQLETYEFNKNTRPFRAKYMLSGIIKCGYCGSPMGVTLGTKRKDGTRNIRYQCVNRFPRTTKGITVYNNGQKCNSGFYEKDDIEIYVLGQVRLLQLNKAKLNKMFETPEIINVEEIENQINSLNNKMKRLNDLYLNDMISLDELKTQTYTFLKQKDLLENELNNNPAIHQEENRKQFQKLLGTKDITQLSYEEQSFAIKNLIDKVFVKPGIIDINWRI

SEQ ID NO: 17956 - protein, 559 aa, synthetic construct
MSKEKIKVYLYTRVSTSIQIEGYSLEAQKSRMKAFAIYNDYEIVGEYEDAGKSGKSIEGRIQFNRMMEDIKSGKDGVSFVLVFKLSRFARNAADVLSTLQIMQDYGVNLICVEDGIDSSKDAGKLMISVLSAVAEIERENIRIQTMEGCIQKAREGKWNGGFAPYGYKLEDGKLFINEEEAVAIRTIFDQYVNTTIGANGISKYLENHGIRKIPRQNGKNPLFDAGLIRKILKNPVYNGKIAFGRRTLEKVHGTRNEYKQVEQDEYLISEGIHEAIVSDEVWQAAQVKLKSQAKRYEHVNKGKDTRTHLLSGIVKCPICGVGMFGNKCIKKKKDGTKYKDFYYYGCKHRQMIRGHKCTFSKQIREELLDDAVAEVIVKIVSNPKFASMMQEKINMKVDTSEIEKEIDNYQKELRKSHSTKFKLIEEIDNLDVEDKHYKRRKQDLDDRLYRMYDKIDELESSLIDAKAKKQTIEAEKLTGDNIYKVLIYFDKLYKAMNDVERRQLISALISEIQVYEEKQSNGQWLKSITFKLPIIEENLNIGLDNDEQVECVSLLEKRS

SEQ ID NO: 17957 - protein, 550 aa, synthetic construct
MGAKARVYSYLRFSDPKQATGSSVDRQVEYAHRWAAERGMLLDDSLSLRDEGLSAYHQRHVTQGALGVFLRAVEDGRIPAGSVLIVEGLDRLSRAEPIQAQAQLAQIINAGITVVTASDRREYNRARLKAQPMDLVYSLLVMIRAHEESDTKSKRVKAAIRRQCQGWIAGTWRQPIRVGKDPQWIREVGNQFELIPERAAAIRLIVAMYKQGHGAVRIVRELFERGLSVSDTGRTSSSHIYKILANRMLIGEKTVELDGEEYRLEGYYPAVISSAEFAELRHFTEQRFRRKGKGEIPGVVTGLGLTYCGYCGTAVTAQNIMGRHRDTEGRPQPGHRRLSCFAYRTGSGCPVNGSVSVAPIERALMHYCADQINLSRLLEGDSNSATLSAHLAQTRQRVTDIEAQIQRVTDALLSEADAPPAAVLRRIRELEAQLQRDRHEINSLEGRLAAESSSTPAVAQAWAKLVEGVEGLDYDARMQARQLVADTFSRIVIYHRGFTPRANSNTIGLLVVGKRGVTRLIKIDRKSGKWKAAEEIRLPWVAANELPLPA

SEQ ID NO: 17958 - protein, 558 aa, synthetic construct
MTKLYSYIRFSSMRQSDGSSYERQIRMAKEIADRYNLELVNDYQDLGVSAFKGANSKTGALSRFLDEIGRSIPVGSWLFIENLDRLSRQDIISAQELFLSIIRRGITIVTGMDNKIYSIETVTANPMDLMFSILLFIRGNEESQTKRNRTNSSALLKIKAHQQNPQNPAVAIEEIGKNMWWTDTTSGRVLPHPVYFPVLQKIVQLRQEGHSAGVILDYLNEHHEPPAPTSNKKHGKWSRAMVSRLFATKALIGVKTVNVDGVEYELRDYYPRVLSDSEFYFLRKNIVKKAWDYSHDKEKVIPLLSGIGVLRCVHCGATMVKQTAANGKREQYRYCCDGRKSGRTDCPYPNWGFRAVTLEGAVLQLLADKIWIAEDKTNPIPEIQVKIDEISRKIDNLINLSAMMGATKELANQITDLNSQREALHEEIRLFEREMYSVDSQGWDKLAQFDLSDVQNEERLKVRMKIKGALHEIECSRIDSKKNLFVLVYLDGLRQRLVIENNRGLKKGQIFVDLKTINDRQILESAGMVLHPCIEMIIDSDWKAPEEIPGLLSEEFGI

SEQ ID NO: 17959 - protein, 565 aa, synthetic construct
MKKVRILLRVSSNQQLEADGDLGVQRQLVKEYVAKQADWVLDDKEYFEGSNSGYKNTVAERSVLQDALQDAERKEYDILVAYKDDRIGRRMWEIGAYVMALKSYGTDIYTVKDGCISPETDDIMGQMMLALRYGNAQKSSSDTGMRVKDTAQKLVQKGKFMGGAAPYGYRLELSGEISKHGRALKHLVIIPEYAEVVKYIYDLSLKKEYGSTKIAKALNEHDKYKNLAPKDSWKSGTITSILTNPIYAGHTAYKRRERVNGKYHRLNSEDWITSFEANENIMIIDGDTWDRVQEKRKQRGDKYIKTLEHKNVKVIRRNDGMLALIDVLYCGYCGRKMTNGSKYNYWTIKGTNEKRTSKIAIYKCQDAWQGVPHDKPKQIRADKIEPIVFNAIAQYIGKLQENENIFQQIENNQEKEKKSKEKELKKEKESLEKIQKKIMIMEEHIPDAMTGEYPLSLQELVTIINKYKEQLQEQQKLVSKKEIEWKAASVSVNDWEDIKSKLPSWQDIFLNTDTATKRVLVNKLIERIDVKKDEIIVRFKVNLNDFFVQPRTSDGFGVQSARVQL

SEQ ID NO: 17960 - protein, 430 aa, synthetic construct
MANSRITQIEFAPRVPFEGKRVAAYARVSSGKDAMLQSLASQVSYYSDRIQKHCGWEYVGVYADEAKTGTKDSRESFQRLLADCRAWKIDMVITKSISRFARNTVTLLSTVRELKTLGIDVFFEEQNIHSISADGELMLTILASYAQEESLSVSENQKWRVRKNFEEGKPWDCTMLGYRVKDGVFQIVPEEAKTVCLVFSLFLEGYGKQAIANRLNEMGIPTRMNKSWCQATISKMLRNEKYAGDLLLQKTFRTDHLSKQTKINRGELPQYFVQEAHEPIIDRATFEAVQEELSRRATAVIVKPGSETAFTGKIRCGICGKNYRRKTTPTGFVWICATFNTKGKKHCASKQIPEETLKAECAAMLGTDGFDAAVFSERIALITAQQNNQLEFHFKDGTAATTRWQDRSRRESWTEDKRQKAREKATRRNG

SEQ ID NO: 17961 - protein, 525 aa, synthetic construct
MARTITMIPATVTSRFSNLAVSVPKRRRVAGYARVSTEKEEQQSSYEAQVDYYTKYIKERPDWDFVFVYTDEGISATNTKKRDGFNQMIKDALDGKIDLIITKSVSRFARNTVDSLTAVRKLKAANIEIYFEKENIWTFDAKGELLITIMSSLAQEESRSISENVTWGWRKRIADGKVSMSYGQFLGYEKGADGTPQIVPEEAKIVQLIYAMFLQGKTPTGIAKHLTAQGIPTPGGKERWQCNVVESILTNEKYKGDALLQKTFTTDFLTKKMKPNEGEVPQFYVTDSHDGIIDAEDFDMVQAEFARRKALGRSYNCKSCFSAKLVCSDCGGFYGSKVWHSTDKYRRVIWQCNNKFKKGEKCATPHLTEDEIKERFIRAWNDMQDITDEVISECRLALADLFDSAAIDDELAARNAEAEVLIEMNRKHIAENASAAQDQKAYKKRQEDLVSKYNAVVNRIDELKAEMEKRKIQRTVLTAFIDTMEQQHGILAEFDEHLWLAVVEKATVHADGRLVFTLMDGSEIE

SEQ ID NO: 17962 - protein, 523 aa, synthetic construct
MAKSVTTIPATISKYTAKPINSKKKRRVAGYARVSTDMEDQQTSYAAQCDYYTNYIQSREDWEFVSLYSDEGISATSTTHRDGFNRMIADALAGKIDLIITKSVSRFARNTVDSLSTIRKLKENGTECYFEKENIWTFDSKGELLITIMSSLAQEESRSISENCTWGMRKRFADGKVSVPFGRFLGYDRGENGNLVVNEEQAKIVRKIYGLFLQGKSPYVIAKHLTAEGIPTPGGKKVWGKAVVQSILTNEKYKGDALLQKVYTTDFLTKKKKPNEGEVPQYYVEGNHEAIIEPSVFDTVQVMMQSRVPGKNRASSVSIFSSRIKCGCCGSWYGSKVWHSNDKYRKVIWQCNHKFKDGCNTPHFDENTIKEMFIKAMNILAGQRDGIIGAYEEIEQTAFDTTNLESRQKELQAEMNVVVELIEHSIADNARVAQNQDDYENHYNSLTERFDTAKGELEKIGQSILEKQAQREMMKKFITEVKAMPDIISIFDEDSWCALVDYVTINSTTDVVFTMKNGLEIRI

SEQ ID NO: 17963 - protein, 407 aa, synthetic construct
MAKIRKIEPQMPLVKKRQRVAAYARVSRDTERLMHSVSAQISYYSNLIQHHPDWEYAGVYADTGISGTGIKERDEFQRMLADCENGKIDIILTKSISRFARNTVDLLATVRHLKAIGVEVRFEKEQINSFSGDGELMLSILASFAQEESRSISENCKWGIRKRFQSGEIGAANKHILGYQYDEDLKQYVVIPEEAEIVKRMFRLYLEKVSLRAICDELNDMGYRTINGMLFQEAAINSLLHNEIYAGDIRRQKCYIADPINKTKVKNQGELSQYYMADCHEAIIDRETYALVLQEFERRTAMLNPTYCFTGKIVCGMCGSPYTRKKSKVKGKTYVHWICRAKKEVGRTCKNHNFSEINLKKISVEILELEEFDEDIFTQQIEKITVLADGSLAFKFYEGRTKVWQKA

SEQ ID NO: 17964 - protein, 461 aa, synthetic construct
MTVGIYIRVSTEEQAKEGFSISAQREKLQAYCIAQGWDEFKFYVDEGLSAKNMERPLLKALLKHIETGLIDTVLVYKLDRLTRSVVDLHNMLNFFDKYDCSFKSATEVYDTSSAMGRFFITIISSVAQFERENTSERVSFGMEERARQGKYIPLAPFGYKKGEDGVLVIYEEEATLVLELLDRLQKGYSIRQCCTYLDNLGVKTRRSNTVWKNTTLRRILENHALYGATNWSGKIFKNTHPGILTEEEFFELQNILKARTGHVSSRKRALTHVFAGKIVCPNCGYRMSCTRTKYQDRYNNDYRCPNCKIYYTHTSVSERKILKAFDKYIESFQLKSFDIKKETKQENNTRKIERQIVNLSKKREKYQKGWALDLIDDNEFSKLMKETQSELDQLESELPKQSPTSEKTFDAIAIKNIVKNLKDNWTELTLEERKDFVNMFIQDIHYVKNDGIVTITKIDFY

SEQ ID NO: 17965 - protein, 520 aa, synthetic construct
MIITDFIKPGMKGAFYGRHSTDKQEMDSQESACEEFVKRYELSLMGSYLDSAVSARKKELNERPELKRLLDDAQKRVFDFVLVWAEDRLARNTREHREIRKKFLEYKIPVYVLHNNTRYDEGELLSQTIRDSFSQYQGDKIAGDTQRAMRTLNREGQWTGGTAPYGYRYLKDTKKFETIPDEIEHVENIFSLYKQGNLGFRAIAGMLPKESRRGRDWKWNHIKEIITNPFYAGVLTLNRRNSISHLTVNKEITEWLQGTNTSIEPVVTLEEWKTTWFIYKNRRDYYDGEESLKNAGLKFAQFYVTKNVLNGLLYCADCNERLKCKDMTSENKDSGKVYGDIFYICKECNYKVGSEKLLPIIKAIWRKTQRSVDVTRISEVVYVRFQNEVASIQHRTEIYEKQIQEFSNNKVHYESWIEEYGKMKSEDRDVYEAFSLANAYNEKNLLAAKKMYARYTHKLDFLKQDKEMVIQETEKLMNIIKSDHEGLPVHDVKQLLQFALAYLTIDQNGKIEYAIKSELL

SEQ ID NO: 17966 - protein, 525 aa, synthetic construct
MINPNVTAIYVRVSTTKDSQKDSPEHQRGLCEEKARILDLDVQYSYEDRDTGTSIVAREEIQKLIRDAKAKYFGTIIFASLSRFSRDTLDSLNLKRILVDALGIRLISIEEGFDSLKDNDELKFQIISAVNQKLSEQISLSSKRGIRQSALKGNFTGSVAPFGYKKIVNGDKKTLVPDENDRYIVELIYHLYVSRKMGEKAIVKYLNEEMEIPSPKGGVWGITTIQRILTNEVYTGQNVFGKYEVKKVYNDINNMSDRSRKQVQRDKTKWERSTEPTHEAIIDKETFELAQEIRLKRGGGRRGGVRNRVNVFAGMIFCKHCGSSLVSCKGKSRKKGPVYRYLICSTRRRQGEMGCVNNAWIPYNNFRDTIINEVSKKLKQVINVDTTTSESKDRLLKRKSSNEMDKDLKKLEKAIQGNRKLLFELRKQNMLGEIDEEQYLFEKQQYEQEIASLQSELAKASQNKEEQINMEKVYNEIREALESLVELDFDRLDEMRLVLSKLIDKLVVSVDGEVEIYTPLGQLGT

SEQ ID NO: 17967 - protein, 517 aa, synthetic construct
MTLGLQEKLQNKKGVFYGRVSSQEQDLQMQIDSCKGFSERHNCDVTIDLQKYVEKISATRVPLTKREALMKVIKAVKNKEYDFIVVYNHDRLARDPLEHLRLRKWFADLQVSVYLSSSNQVYSNKDILSNAIRDNYSKIEADNIRVRMKDSIYSRVVFHGKWTGGKTPFGVRYQYDDVLKMKVLNFETDKKQIIKDIFKQYKGGLGFSSIAAYLNIHHPLSGQQWSKERTKSIITNPIYCGYLSIHKRKKGSRNSTTNRDEWIMEKSKELEPIIELVEWEYCYDLYMKRKTREITNPKYFSTPYLFKDIIQCRQCGKFLLTKNQVSGQSGDQIYCCGRTSDCHIRIVSKELDDYLLNYIKKSEMLTTNIEQRYLIIDRIKEFYINQKQDLEIEKNCLYQKLQELRHDYDAAQNQLHPLLVTQSDRVAIEVLQTLSSILTNDITDTQQNLKRNYDAIKRLENLELESNHWDHFLGDTLPVNKKQSHQVRKLLLLLFEKIEIDNDGGIYITNKIDLNKR

SEQ ID NO: 17968 - protein, 531 aa, synthetic construct
MSELGLRAIVGSRVSVKRENRRHKSSAKVSHLAQKEIGYQKATSLGATVVDTFEDLDVSAQVSPFDRPDLKDWLNMEERGHEWDMIVWSNLDRGFRDPRDAIALADWCAKNQKIMVLAEQGIVLDYRPDADPMARMLAEMFLLIGSMFAKWELTQHKTRALNAHSILREMDRWPGGPAPEGFKIVAHPSGKGKAITTDVDRKRMIFLAACRLLGADDVDLTAWTIGPSNEAKKDSFNGITVWLTGQRYVTNVDRHRNPDDRRGTEWNVSDTIKFLTSPATQGIKMSGEQPVIGSNGMPLQIAEPTFDDHTWVRIQEAVAERRRGEPNRIHGANPLLGVSYCGKCGSSATHFVTTRTRKRDGVENVYRYYRCARRPRPCPLVGMKSEDVESILEQEFLTLCGDLPVLQRTFVPGEDHTEELNKVKASIARLERESDLGFIRTEEDEKRYFERMQSLVNSKASLGALPQRAAGWEYCLTGETYAQAWRETSEDIVARRKLLVDAGVRFVIHDKDVWEVQVPEDVKERLAKAAQ

SEQ ID NO: 17969 - protein, 577 aa, synthetic construct
MYIPSELLQLKYDVYIRRSSDDADHQVASLESQKEVLLKLVKDNKLKVERIVEESMSAKQPGRPIFNEELQRVEDGIIQGLVVWDLSRCSRNPVDSGTLSWFLQKEKLKVIVTPHRIYQSQDNVLLLNIEFGQANQFLRDLSKNVKRGLNTKLTKGWRPGIAPEGYLNDKSEEKGNRKIITDSVRFSLVRKAWDLLLTGNYTVPQILKIMNEEWEYTTVKRKKLGGAEMSRAGLYRIFTNSFYYGWYEYPIGSGNWYEGKHDKMIEQAEYDKVQIILGRKGKQRAKAREFSFTGMVRCGECDSRVTAEELWQVICTKCKNKFSSKNTNNCTQCNTSIANMANPSILHYIFYRCTKKNKTIKCKQKYVRLEALEEQIDFLLSRIEIPEAFKDWAISHLNYLHDQEAREQDAIAESINTKYRDCLERINNLIKLKISPMNSDGSVLSDEDFKKQITPLQKEKINLEQEQKTLAKRADEWLELSQRTFNFACYARLKFKHGSHHEKKEILATIGSNLILKDKILSLAVPKPFIAIREAKIETDRIVARFKPEEKVDITAQMMYLYQENLTLRRGWDLNPR

SEQ ID NO: 17970 - protein, 559 aa, synthetic construct
MKTKLYSYIRFSSMRQNDGSSYERQIRMAREVAAKYDLELVNDYQDLGVSAFKGANSKTGALSRFLDAIGRSVPVGSWLFIENLDRLSRADIVSAQELFLSIIRRGITIVTGMDNKIYSLDTVTANPMDLMFSILLFIRGNEESQTKRNRTNSSALIKIKAHQENPQNPAVAIEEVGKNMWWTDTTSGYVLPHPVFFPVVQEIVELRKNGRSTAEILDHLNETYAPPPAVSNKKHSKWSRAMVERLFHTRALIGIKEISVDGVNYELKDYYPRVIDDPTFYHLKKNIGARAWNFGDKEEVKPIPLLSGIGLLKCDHCGCAMVKVKGTNKRSDQYRYTCDATRSRRLDCEHPNWSFRGDQLEKAVLQLLADKIWIAEDKANPVPALKVQIDEISRKIDNLIALSAMTGATKELADQITALNSERETLYNQIKMAEEEMYSVDSQGWEKLAEFDLEDVYNEERIKVRFKIKQALKRIGCRRIDRNKNLFVLEYVDGKTQRVVIENSRGTRKGRIFIDLKTINDRQILESNGLVLHPCLDMLTDKNWKPEEEIPGPLQEFGI

SEQ ID NO: 17971 - protein, 506 aa, synthetic construct
MRSVITYLRFSSATQGAEGADSTRRQNELFKQWLRKNSDAQVVASFNDEGLSGYKGKHLSGQFGDMLSRIESGEFPEGTILLVEAIDRIGRLEHLETEALMNRIIAHGIEIHTLQDGLIYTRDALSDDLGISIIQRVKSYLAHQESKQKSFRVSEKWKQRAKLALAGKQRLTKMVPGWIDHDTFKINEHAETVRLIFKLLLDGESLHNIARHLQSNGIKSFSRRKDANGFSVHSVRTVLRSESVIGTLPASQRNDRPAIPNYYEAAIDVSTFNKAQEILDKNRKGRTPASDNPLTINIFKGLFRCQCGASVHPTGTKNKYQGVYRCNNHLDGRCDVQPLKRKPFDRWMIDNFLGMIDVGNDGESERKIAALQHEVEIVTARIKKATALLLEMDDIDELKIQLKELNQKRTELQTTIDNMRRKASLTDKELPQLKDIDLTTKAGRVECQLILSKHLKGLTLGKDSVTVTLQNDTEITIPTNPLPLNDGTSIFEIADKELLDIDAYQL

SEQ ID NO: 17972 - protein, 547 aa, synthetic construct
MKLLATYIRWSTKEQDSGDSLRRQTNLIDAFYAKHKDDYYLLPAHRYVDKGKSGFHQQHKAQGSDFRRMFENVMSGVIPEGSLIVVENFDRFSRADIDTAIDDVRQILRKGVSILTLGDGELYDKSALTDPVKLIKHIIIAERAHQESLVKQKRIAQVWNHKTQLARELKKPMGKQAPGWLELSEDGSHYIVDEDKASLVNIIYDKRLSGMSMFAICKWLNEQGYPTINQRKVRISKTKKPDGNWSALSVKHILTSRSVLGYLPAKISTEDRKTVLREEIEGFYPQIVTDSKFYAVQQLLEETGKGKTSSGEHWLYVNILKGLIRCKCGLVMTPTGIRKPVYQGTYRCNGNKESRCSYGTVSRKLLDTQLCSRLFSKLSQLHDEATDTAKLDELQRRLNTVDSELEKLTETLIQLPNITQIQEALRIKQEEKDELIVQLSREKARVKSVSSLDLSGLDMESVEGRTEAQIIIKRLVKEIVVSGNEKLVDIYLHNGNMIRGFPLDGKDDHTLTLEEATDEMQPLDDMLIFGEPVTRIYPAGDMEEVDA

SEQ ID NO: 17973 - protein, 509 aa, synthetic construct
MRRAISYIRFSSERQLKGDSVRRQSKLVTDWLDKNPEFYLDSSLSFKDLGKSAFSGKHLKGGLGDFLTAIEKGLVKAGDTLLIESLDRLSRQDIDIASELLRRILRAGVDIVTLSDGEHYTRESLKDPLALIKSILIMQRAHEESLRKSERVQAAWNRKKELISEGIKVSRRCPAWLRLNDDRRTFTIIPDKVEVVKRAFDMRLQGLSFWAITRTLNDEGHLSLNQYTPKQKGWSDTAVKKLLRNRAVIGCFTPAGREEVQGYYPAIISESLFYRVQQLNTGQYGRASVSSNPLSVNLFRGIIKCSECGATIVLGGYALKRFGMYRCPNRSANRCSAKAISRKQTDATILYMLALCDRFETENTDTIDSLRLQREDLQRKISKMAELAIELDDMTIITEKLRDMKNALSKLNHDIEEETQRIKAITTGSLKDIDRTTKEGMIETQLLIKGVLKEIVIDAAKRRCKVTFHNGRAITLPITENPSEDVTEAIQSLSEVTERGLIDVDVVEI

SEQ ID NO: 17974 - protein, 509 aa, synthetic construct
MRRAISYIRFSSERQLKGDSVRRQSKLVTDWLDKNPEFYLDSSLSFKDLGKSAFSGKHLKGGLGDFLTAIEKGLVKAGDTLLIESLDRLSRQDIDIASELLRRILRAGVDVVTLSDGEHYTKESLKDPLSLIKSILIMQRAHEESLRKSERVQAAWNRKKELISEGIKISKRCPAWLRLNDDRRTFTIIPDKVEVVKRAFDLRLQGLSFWAITRTLNDEGHLSLNQYTPKQKGWSDTAVKKLLRNRAVIGCFTPAGREEVQGYYPAIISESLFYRVQQLNTGQYGRASVSSNPLSVNLFRGIIKCSECGATIVLGGYALKRFGMYRCPNRSANRCSAKAISRKQTDATILYMLALCDRFETENTDIIDSLKLQREDLQRKISKMAELAIELDDMTIITEKLRDMKNALSKLNHDIEEETKRIKAITTGSLKDIDRTTKEGMIETQLLIKGVLKEIVIDAAKRRCKVTFHNGRAITLPITEDPSEDVTEAIQSLSEVTERGLIDVDEVII

SEQ ID NO: 17975 - protein, 481 aa, synthetic construct
MITTNKVAIYVRVSTTNQVEEGYSIDEQKDKLSSYCDIKDWNVYKVYTDGGFSGSNTDRPALESLIKDAKKRKFDTVLVYKLDRLSRSQKDTLHLIEDVFIKNGIEFLSLQENFDTSTPFGKAMIGLLSVFAQLEREQIKERMQLGKIGRAKAGKSMMWAKTSYGYDYHRETGTITINPAQALAIKFIFESYLRGRSITKLRDDLNEKYPKHVPWSYRAVRTILDNPVYCGFNQYKGEIYPGNHEPIISKEEYDKTQSELKIRQRTAAENVNPRPFQAKYILSGIAQCGYCGAPLKIMLGVKRKDGSRLKKYECHQRHPRTLRGVTTYNDNKKCDSGFYYKDKLEASVLKEISKLQDDADYLDKIFSGDNAETIDRESYKKQIEELSKKLSRLNDLYIDDRITLEELQSKSAEFISMRGTLETELENDPALRKNKRKAEMRKLLNAEKVFSMDYENQKVLVRRLINKVKVTAEDIVINWKI

SEQ ID NO: 17976 - protein, 481 aa, synthetic construct
MKTMNKVAIYVRVSTTNQVEEGYSIDEQKAKLSSYCDIKDWNVYKVYTDGGFSGSNTDRPALESLIKDAKKRKFDTVLVYKLDRLSRSQKDTLHLIEDVFIKNGIEFLSLQENFDTSTPFGKAMIGLLSVFAQLEREQIKERMQLGKLGRAKSGKSMMWAKTSYGYDYHKETGTVTINPAQALTIKFIFESYLRGRSITKLRDDLNEKYPKHVPWSYRAVRTILDNPVYCGFNQYKGEIYPGNHEPIISKEEYDKTQSELKIRQRTAAENVNPRPFQAKYILSGIAQCGYCGAPLKIMLGVKRKDGSRLKKYECHQRHPRTLRGVTTYNDNKKCDSGFYYKDKLEASVLKEISKLQDDADYLDKIFSGDNAETIDRESYKKQIEELSKKLSRLNDLYIDDRITLEELQSKSAEFISMRGTLETELENDPALRKNKRKADMRKLLNAEKVFSMDYESQKVLVRRLINKVKVTAEDIVINWKI

SEQ ID NO: 17977 - protein, 518 aa, synthetic construct
MPKAISYIRFSTKIQSVGDSTKRQSKYINDWLKRNPDYYLDESLRFQDLGISGFSGANAKSGAFGEFLAAVESGYIESGSVLLVESLDRVSRQDIDTAGEQLRKILRAGVEVVTLVDNEWYTKESLKDSLSMIKAMLVMERAHEESAMKSTRLRSVWAAKRERAANGEIMSKRCAAWLKVSEDRSHFEFIPENVKAVQRVFQLRLEGLSHIKIAKQMNDEGFYTLNQHKSVKGGWSQSSVTELLSNRSVIGFKVPSKSMAVKGVSEIPNYYPAIITDEQFYAVQQLKQGSGRKPSSDLPLLTNLFKGVLRCSECGFIVVVAGVSAKRSGIYKCSMKSEGRCNSVGFSRLQTDKALVQGLLYNTNRLSLNRDSGSAIGTLQSELEQLQKQRERLIKLAMLADDTESMAKDLKALNSRIKDAEKAVSEVHQREQSSQLETISHLDLTVKKDRIEAQIIIKRIVKEIRLNTAGKKCDVFLHNGLKLLNFPLDRVVDGEIFLEVLPVLEADEFDFDTYRMIE

SEQ ID NO: 17978 - protein, 558 aa, synthetic construct
MTKLYSYIRFSSMRQSDGSSYERQIRMAKEIADRYNLELVNDYQDLGVSAFKGANSKTGALSRFLDEIGRSIPVGSWLFIENLDRLSRQDIISAQELFLSIIRRGITIVTGMDNKIYSIETVTANPMDLMFSILLFIRGNEESQTKRNRTNSSALLKIKAHQQNPQSPAVAIEEIGKNMWWTDTTSGRVLPHPVYFPVLQKIVQLRQEGHSAGVILDYLNEHHEPPAPTSNKKHGKWSRAMVSRLFATKALIGVKTVNVDGVEYELRDYYPRVLSDSEFYFLRKNIVKKAWDYSHDKEKVIPLLSGIGVLRCVHCGATMVKQTAANGKREQYRYCCDGRKSGRTDCPYPNWGFRAVTLEGAVLQLLADKIWIAEDKTNPIPEIQVKIDEISRKIDNLINLSAMTGATKELANQITDLNSQREALHEEIRLFEREMYSVDSQGWDKLAQFDLSDVQNEERLKVRMKIKGALHEIECSRIDSKKNLFVLVYLDGLRQRLVIENNRGLKKGQIFVDLKTINDRQILESAGMVLHPCIEMIIDADWKAPEEIPGLLSEEFGI

SEQ ID NO: 17979 - protein, 550 aa, synthetic construct
MLKQIRCAVYTRKSCEDGLNQEFNSLDAQRVSGESYIKSQQLKGWVAIEKKYDDGGFSGGNLERPGLKELFKDIERRRIDLVVVYKMDRLSRSLLDFAKVVDLLKKHEVAFVSVTESFNTADPVGELMLNIIMSFAQYERELASMRIRDKIAESRKQGLWMGSRVPLGYDAKDKKLIINEKEAELVKHIFERFADLKSIVKVTKELNEQGYQTKELKNKGGEEFKKATVKGILTNPTYIGFVSHKGTLYKGKHEAIIDQELWNKVKENFSTREQISTKRAAVLLKGLMRCYGCDTSMQPTYARKKNKEYRYYVCGKHLKARECKAKDQTIAAGEIEQVIMQQVPLIMSNSELIEKAFKKGEKIALGTLEEISKIWENIFPIEQENIIHILIKTIWLKEDGIKIEISKEGLKDLVSKYGNTEKEIEVSREEIVTFVKLKLKKSSGKSMILVPQGGEIKEKKNDKLLKALVRAHLWQSQIDSGEYANIKEICHANKISCPKYVGSILKLNFLASEIKEAILEGKQPPHIRLNNFMGSKMDLLWERQLERFYR

SEQ ID NO: 17980 - protein, 566 aa, synthetic construct
MSKIIYPYIRFSSDKQAAGSSFQRQMERITDYANENGYIVNNSLKLQDLGLSAFTAKHIEKGALGAFLEGIKAGKIEQDGSAYLCIEQLDRLSRENVDDAYQVFRKILKSKVNIITLMDNKIYTKESLTDLMSIMYSLMLMAQANQESAKKSYRVLRAFDKKLDKLNDGKTVQYVGMFPGWIDNKGTKEETNFVINKKSEIVQRAFSLYINGTSMGDIARIFNDERVPQVAKKRQKNYTNSWSSAKINHLLKNRCVLGELLIRKTGDIFENYYPAIISVDDWDVVQSMMKTKKIAKSSGRRSINIFTGKMFCACCGQKYYFETDDKNTKTGKKLYYMLKCSGRRSFGCKSKSIKYDDFLDSTPNLFGMITQSKKDNSKEIDEIKLKIKEINEITKKLRDKLITLENLNDSNKLDFTIYLKESSKIQKQVRENDARVASFKLKISRLSSDNKLDYFDKTDPNSVVKAKKFISDNFAAFVISSDSRFCIALYNDGQALQFKIKNSKIEKKESQVKNIDNFESFNEFYKLKEQVLETYKNGTMDGKFIEILSATNFWGIVTSEKDYSLD

SEQ ID NO: 17981 - protein, 446 aa, synthetic construct
MTTYYELLNYKLIYAYLRTSGDINPKDSIFVQEMQVREFAEEHSLEIQDFLADEKKTGLNQNRQAFQRLDYLVLSGLTDCVLVPYFDRLGRENFELALFLLKLKEKGIECISIAQGKRLSLMDESDIIKEANAAYEENLNRTNRIMQKKKASLKEGHYIFNEPFGYKKDTNRRLKIVKEEAIIIQKMFELFRALKSTSKIAKLFNEESMGGKENWTASTIYQYLTNKKYTGKNYKKERDDEGNFTYTLISEVNFEPIVSEQQFEEVNQLLREINPNRKKRKNKLFHMFRKVLSCPNCGKTLSGNKTYYHCSNRSCKFRHRKDKVESKLLSYLKQLDESTIDPEAVKEEAAKEIEKLREKEEKIEEQFAIGQISKSRFLEKRFQVEQQVKKVQEGLKDYLFKNPSYERLIKDENWDHLNQVMQEEKLKLCFTFNDDDEIFITHRYDK

SEQ ID NO: 17982 - protein, 558 aa, synthetic construct
MTKLYSYIRFSSMRQSDGSSYERQIRMAKEIADRYNLELVNDYQDLGVSAFKGANSKTGALSRFLDEIGRSIPVGSWLFIENLDRLSRQDIISAQELFLSIIRRGITIVTGMDNKIYSIETVTANPMDLMFSILLFIRGNEESQTKRNRTNSSALLKIKAHQQNPQSPAVAIEEIGKNMWWTDTTSGRVLPHPVYFPVLQKIVQLRQEGHSAGVILDYLNEHHEPPAPTSNKKHGKWSRAMVSRLFATKALIGVKTVNVDGVEYELRDYYPRVLSDSEFYFLRKNIIKKAWDYSHDKEKVIPLLSGIGVLRCVHCGATMVKQTAANGKREQYRYCCDGRKSGRTDCPYPNWGFRAVTLEGAVLQLLADKIWIAEDKTNPIPEIQVKIDEISRKIDNLINLSAMMGATKELANQITDLNSQREALHEEIRLFEREMYSVDSQGWDKLAQFDLSDVQNEERLKVRMKIKGALHEIECSRIDSKKNLFVLVYLDGLRQRLVIENNRGLKKGQIFVDLKTINDRQILESAGMVLHPCIEMIIDADWKAPEEIPGLLSKEFGI

SEQ ID NO: 17983 - protein, 706 aa, synthetic construct
MTKPRKGSGPSSSGREKAKPAKDSTRKPAAAKIRVSDAMSPLQVLFDDVLSRQAKREGIVERRQRQAAIIGGPTLEMTAPTRAALYVRVSNDRSVRSDLSMPDQEVQLRSYCDQQGWEVVSIYYEPGRSAQSTARKEFRKMINDASCEGEAPFDKILIHSTSRFARSTKDYMIIEALLHQKNIDVLAVTQIFSKDAGGMVALRLTNLMDEFHSIRSSVDSMRARLHMVDKGYWPGGVPPHGYKCVPCVQNPQRSVLDIDENERALVEKVYSLAVHGDGKCPPLGVKALVRWLNECGYRTRNNSPWSIQGIHRMLTHSIYYGDYYWGVNQYEHQFQERQAARLLKVKAIISRADFDKVQEMLERRNPKMAGAKLVSSPLLLSGIARCACGASMTLGTGTGKLGKVYRYYRCSSDNRGTNIATLGSVSEKTCSRPKVAEDVLDAVVLEQVKEQVLSQDRLNALLASLRERELLAKAQESGQVPILLARINAAEKALSGLFAIAKQVPSISEQRPYQEDVTAVSIELKSANQMLSDLLRRTSDHSDDITPERIDLFRSEMLDLLFGENRAVAKIYLSTIVAAVIVGNNRIDIQGHISDLVAGVNRAAQSTVESPSSGVRTYERRWRKRWDSNPRYAFTHAGFQDRCLKPLGHSSKRLKRLRNPPSVEFSKTAFATDLLPNHSTAGFLAALIAASTCSAAFACMPGITWL

SEQ ID NO: 17984 - protein, 430 aa, synthetic construct
MEQLSSYEAQVNYYKNYINSHSEYVFAGIYADEGISGTNTKKREQFNKMIEDCKVGKIDIIITKSISRFARNTLDCLNYVRMLKELGIEIIFEKENIRTLDSKGEVLLTILSSLAQDESRSISENSTWGIRRRYEQGKVSVNFTKFLGYEKGKDGNLVINEQQAKIVRRIYREYLNGKSANRIARELERDGICGWNGKAKWYETTITKMLQNEKHKGEALLQKSYTVDFLTKKKAINKGEVPQYYVEGSHPAIIDKDTWEAAQIERQRRKEYAAKHGLQKIDYGIRGNPLAGKIICGECGKYMGRRTRIYKGKKLVWICANRYEEKGVRGCNSKHVNDEELNEVFTIAFNEIIENKDYYTSLWKEKAKSENILIAYKAKQFIKEIKEHNETIEYYGVDLFYKWVANIKVKNPKEFIVTLLEGTNIKVLID

SEQ ID NO: 17985 - protein, 474 aa, synthetic construct
MIADKTVRVFLYIRVSTQEQAREGYSIGAQEERLRAYAKAKGYTVVKVYIDPGLTGSNLERPALQEMIRQIDQGSVDLVLVYKLDRLSRSQKDTLFLIEEVFLKNHVDFVSMNESFDTSTPFGRAMIGILSVFAQLEREQIRERSMMGKEARAKEGKWHGGGGVERLATGYSYSEGALTVNEYEAELVRTVFADYNKGHGANKIFRKVANQYPGVIASETSIRNILRNLLYIGKIKYKEEIFEGLHEPIVDEKVFHRTQDLLKKRTVTAVPFRKSYVFSGLLYCGLCGARMFGRSGGRLKNGNSMRYYVCYSRQGNRDHMITDRDCKKKSERKEKLEEAIFVELRKVNMRFVEGRRADDAGEASRALVLEKEIASVEKQIAKLVDLYSLDSIPLDIMSEKMESLKSKRDSIRRHLSELQVEEAVESDEDLKEIISSLSAFDWDNEEIEKKRLIAAKLINKISVYEDRIDIEWAF

SEQ ID NO: 17986 - protein, 551 aa, synthetic construct
MEKDSALLRIALYARYSSENQRDASIEDQLRQCRERAAREGWTVVETYSDRAISGSSMFRAGIRSLLADAQAGRFDMVLSEALDRISRDQEDVAAVFKRLRFAGVSIVTLSEGEINELHVGLKGTMNALFIKDLAIKTHRGQRGRVEAGKAGSGKAAYGYRVVHQLDANGEPIRGERAIVEEEAEIVRRIFREYASGRSPKEIAFQLNREGVPGPKKRPWIDAMIRGNPVAATGILNNELYAGVLAWNRQRFIKNPETGTRISRVNPESEWIRTEVPHLRIVDDALWQAVRERQRGISAMFGPNLGTTREARAKRLHLTNRPVTLLSGLLTCGCCGGRISMVMTDRYACRNHLRKGICDNARTIRRDEIEARVLAGLKEKLVSSEAVAEAVRAYAKETNRLNRDRRAQAEADQKALQKIDKAVAGIMAAIEDGLYQPSMKARMAELERDKAEIIARMALAPADVPDVHPNIASVYRRNVERFTEALNDPDGGRQAAEALRSLIGEIVLTPGPKRGEVHAELRGELMGILAFATDQKPKQNIRFMPPVASCA

SEQ ID NO: 17987 - protein, 590 aa, synthetic construct
MKPVAYAYVRYSSVAQATGGSVERQVDALKAFTEQTGVEIKEIVQDNGVSSFKGRNVNRGQFKKILDRIDSGVIKKGDYIVVESIDRITRQRVLDGVALLQDILRSGIRIYTTSDRICYSRDNEADDLNTIIMIALIAKRANEESATKSWRRTISWDKAKKLAFEGVRKINIKNAPYGLMYDSSLGEFVLNESEAKEVRRIFELLKYMGVSKTVREMNKESKRRWAGRHVAHMIASQYPVGVLRSQKRDGEGRKEFVEYIEGYYPEIVSQTAFNEAVSAMKGRRDRKDYGSRSSDEINIFRGVVKCAKCGASLLFEKQKNQKGVPYFYLHCYSRKELKRGCDQRFRFDLAFGMFLMFVRLALSSNKPAEYVEKSSGDGGFFYKVSIGSPALINAKIGLLRNGVELSEEMDREKSNFDFALRETQGELVELFSSPTSGDIELENEFVKVKDELEKVQAKYGRLEKSIENSDGSVSKLMMKQIKEVEDRIDEKLTELEELGRKISDAKINIPIHGVQDVIDMFKVKAGRLDLNRFLVSKKIKFEFEYQGELRRLRMNVSRDGVTLLELPCQFPLHNPLKLFGLPNLAEFCDV

SEQ ID NO: 17988 - protein, 592 aa, synthetic construct
MSAIQKPRAYSYIRFSNATQAAGDSYRRQREAAEKYCAEHGLELVDAKEYSFFDQGKSAYKARHLDDTGELARFLSYVQDGTIPKGSTLLVESLDRLSRERVKDALPRFLDLLNQGINVVTLADGRLYTSQYNELDLIISIVQMSRAHEESATKGKRVSAAWRRKQAIARTESVPIGKLRPLWLDYTPDGYVPIPERVEVVQRIYKLAQDGYGHRAIAAQLNQSGVPSFSADRKNASGLWANSSIARMLCNRSVLGEYQPHQFIEGKRVPVGAPIPGFYPPIITEDEFYAAQQAVSSRRQSQATKPGKRFNVWQGVSQCGICAGPMHISKRGNSRILRCFRNIQGLCPAKPVLLPRSEEVFREILAKVDSLSLVQSNQGKLQHQIAVCDGKIAETRERLESLQAQILNLSGSLPASIITVMQRLEDDLSQHQQEREALREDIAREQIIDKEEFFSRLDLVSYEGRARANSLLKSLGVQVAIERVGEARGKKAPVHYSIVVAEKYGFAFTDYSGQLEFLPLSSPTLELALQQGEAIPSAVRAHVLAREHLIAQEEQERTRLTALTKIHSFKEIAELEGISVREVKRRIEGRRG

SEQ ID NO: 17989 - protein, 542 aa, synthetic construct
MTRVALYARYSSERQNERSISDQLNVLIQHAAGKCWAVVGTYTDAAISGSAMANRPGLLAALAAADRGEFDLLLAEDEDRLARNLEHLAHVANRLADIGAGIATLSTDRVQDMHVAFKGLIAQDFIRNLSLKTKRGMASNAEKGLATGSRLYGYRSQPGGAVEIVPEQAEVIRRIFAMYVHDRLSSREIAERLNRDKIPSPAGREWNASSIQGSRQRANGILHSEIYAGVKVYNRVEMRKDRQTGRKITICNPPSEHKRVDVPHLAIIDRDIWNAARQRLDSRQTADPSQRASLRRRPGLLSGLTKCGCCGASYTSLSQGRLVCAAYREKGASACDNNRHVSRAEIEQRVLEGLRTRLLAPEAVAAYVRAYHAAWAEQASQAEDRRRPLTRRLAEVERAIERGAEALLSGATAAAVIGKKLEALEIEQAQIKATLEQLDSEDAPPVQLHPRAAENYARKIEQLQSRLAEAADSTEGADRDLIASVRDLIQRVDIEPVNKSRGAPVRVTLHGDLARFVLPQHPPASGCALVVGGGIEPPTCGL

SEQ ID NO: 17990 - protein, 636 aa, synthetic construct
MDDTTPLPARKILYKYIRFSSIQQAKGSSFARQNARLEKYAEDNNFEIDDSLDLRDFAKSGFHGINKEIDQGLGRFIAAIEKGLIPTDGSAYLAVEQFDRISREDIDKAQDLFKSILRKNVNIITLMDGRIYTKKSLSNFMEVLYSLFLMEQAHQESLKKSDRIKGSYVIKLKKLKELAAEQKEILEDWEKTKSGKKPELEPLINQIQFSSQVPCWIDQKIEIISGRKFRKFVVNEEKAKIVRYALSLLNDDNGYLNVSAQLNKENIPRLDFNTNRKRSTRKDIWTNRAVNEFVNSDSIFGELAVHNNFFVDKEFDYEGIKASKKVMTRTHLENIANYYPAIVDKKLIMGLRARANAKKKGRVAGRTTTNNLFQNMLFCGKCGDSMHLRQSKRETKKGTYQRFYVTCYAAAHKACDAKMFPYTQLEEQLVKYLINPVNTAELNEEGKVIEEKRKEKLLVLKGEIQDIQSRIDEFTQEITKNRSIKPSIALSIISEFENDKALKQSKISELEMQTEKLHDALQVGDISNFDLVGDDGRNGFKVAIKQRYAGFIIYTNEQILFAIEKTGATTIFKLQNKSRWGTVLKAEKGDIFEKQVQAIKFLRDRAADYKEGKLYELIQTFKATNIDIFEGQYIED

SEQ ID NO: 17991 - protein, 532 aa, synthetic construct
MKQAISYVRFSSDRQRHGSSVERQEGMIADWLKRHPDYEMSDLKFSDLGKSGYHGEHIKEAGGFGKLLKALEDGFIRAGDVVLVEAIDRTGRLEPMDMLTLVINPILKAGVSIITLDDNTTYSKESVNTAQIFLLVAKIQAAHGYSAALSTRVADSYKKRRKDAAKYGIVPRRITPVWLNPDGTVREDVAPWIKTAFELYVSGVGKSTIAKRMRESGVERLAKASGPGVEGWLRNKAVIGKWETLEGTPDHQIIDDIYPAIIEPSLFYKAQVHAEKMKTQRPIKTASHFLVGLVRCGECGKNYIVQNLHGKPHSMRCRTRQSQNECTNSHCVPKPVLDAIYRYTSVTAAIEAVQQQQMGVNDKEIVTREAELLAITKRVDGLVQALTQTGPIPEVIEALKQSRIEREAAESALVILRSTVVPSAGTHWQEMGKVWKLEAADAQRLAAMLKLVDYHITVAPTGEITASHSEVLYRYIGVDRALDKYKLLANGKLMLIPKGYVDDFPYHEPFQEMQSENTWDEADYDNLRQQHQ

SEQ ID NO: 17992 - protein, 553 aa, synthetic construct
MPQAVSYIRFSSSRQQGGSSVKRQQQMVDKWLIAHPEYIRSNLIYEDLGRSGYHGEHITEGGNFAKLLTAVKAGLIQAGDCVLVEAIDRTGRLPSLQMLNKVISPIIEAGVNIITLEDNVVYDQSSVEGGHLFLLVAKIQAAYGYSKQLSRRTKASYDLRAEKAHEKQVKRHTPLWLTTEGQVIESIAKHVRHAFELYVSGVGKQTIANRMRATGVEELAKCSGPTVEGWLRNYATIGSWEYGKKDAKLKGKDADNPVKIIPNVYPPIVSDSLFMLAQQRKKVVATKALSRTSKHLLVGLVKCGECGSNYVIHNKDGKPNNMRCGLHHRLGANGCTNNQTIPYQVLNYVYQQTAIHHLQAALNTTQLSANDRRKLELNTERDKLSGSITRLAKMMAVVDDPEVLAEVQTHSLRRKEIDEQLEILDRNPKVVGGHPASVNTMFDLLKIEEQMMTDPQQLNCLYRQGGYNIKVVGKQMVVDGQSFTYIGVKRKPKSTSTLAYRVLHGDKEVLVSPEMSIAVQTVSENMTEGEKINYLHSRGNPLNPIMVEDYEYV

SEQ ID NO: 17993 - protein, 481 aa, synthetic construct
MITTNKVAIYVRVSTTNQVEEGYSIDEQKDKLSSYCDIKDWNVYKVYTDGGFSGSNTDRPALESLIKDAKKRKFDTVLVYKLDRLSRSQKDTLHLIEDVFIKNGIEFLSLQENFDTSTPFGKAMIGLLSVFAQLEREQIKERMQLGKIGRAKAGKSMMWAKTSYGYDYHRDTGTITINPAQALAIKFIFESYLRGRSITKLRDDLNEKYPKHVPWSYRAVRTILDNPVYCGFNQYKGEIYPGNHEPIISKEEYDKTQSELKIRQRTAAENVNPRPFQAKYILSGIAQCGYCGAPLKIMLGVKRKDGSRLKKYECHQRHPRTLRGVTTYNDNKKCDSGFYYKDKLEASVLKEISKLQDDADYLDKIFSGDNAETIDRESYKKQIEELSKKLSRLNDLYIDDRITLEELQSKSAEFISMRGTLETELENDPALRKNKRKADMRKLLNAEKVFSMDYENQKVLVRRLINKVKVTAEDIVINWKI

SEQ ID NO: 17994 - protein, 617 aa, synthetic construct
MRNFEKITALYERLSRDDELEGESNSIVNQKKILEEYASKNNLTNIIHFTDDGISGTQFDRPGFMDMMNGVNTGNIGCIIVKDMSRLGRDYLKVGQCMEILRQKGVRLIAINDNVDSFYREDDFTPFRNIMNEWYARDTSRKIQSTFRSKGESGKHTASTPPYGYIKDEKDKDKWIVDEKAAQIVRRIFNLTMDGAGPYKIAKILEADKIDIPAYHQQKMGYGLHQSKNFEYPYRWCSSTIASILKKKEYLGHTVNFKTRKHFKDKKSKYVSEDKWLIFENTHEAIIDQETFDNVQRIRGNVKRYPDGWGEYHPLTGLMYCADCGSKMYVHRTNNYKNIPYYVCSNYKKVPCGTLCPSAHRIKAEVVLNLIQETLKDIKNYLDEDNEAFLHSIQNEMEETEKMEMEKKKTRLTDSKNRLQELERLMCRIYEDMILEKIPNTRYEILNNQYETEQRELSKEIDGLEKAIKRYEKETDRAKKFIRLIERYDNFDELTPTIINEFVEKILVHERDRKGSQTANQKVEIYFNFIGNYEPPKEELSEEEMQKLTEEEEKERARKDRLHQNYLKRKANGKQKEYEERYKARREEKKTGEAKGFEKTMKKHKITRLKSIDNLSV

SEQ ID NO: 17995 - protein, 481 aa, synthetic construct
MITTNKVAIYVRVSTTSQVEEGYSIDEQKAKLSSYCDIKDWSVYKIYTDGGFSGSNTDRPALEGLIKDAKKRKFDTVLVYKLDRLSRSQKDTLYLIEDIFIKNNIAFLSLQENFDTSTPFGKAMIGLLSVFAQLEREQIKERMQLGKIGRAKAGKSMMWAKTSYGYNYHKETGTVTINPAQALTIKFIFESYLRGRSITKLRDDLNEKYPKHVPWSYRAVRTILDNPVYCGFNQYKGEIYPGNHEPIISKEEYDKTQSELKIRQRTAAENVNPRPFQAKYILSGIAQCGYCGAPLKIMLGVKRKDGSRLKKYECHQRHPRTLRGVTTYNDNKKCDSGFYYKDKLEASVLKEISKLQDNAGYLDKIFSGDNAETIDRESYKKQIEELSKKLSRLNDLYIDDRITLEELQSKSAEFISMRGTLETELENDPALRKNKRKADMRKLLNAEKIFSMDYEGQKVLVRGLINKVQVTAEDIVINWKI

SEQ ID NO: 17996 - protein, 520 aa, synthetic construct
MKKITKIDELPQMQPSNTKLRVAAYARVSTDSDEQLESLKAQREHYERYIKSNPEWVFAGLYYDEGISGTKMEKRTELLRMIRDCKQGRIDFIITKSISRFARNTVDCLELVRKLIDIGVYIYFEKENLNTGDMESELMLSILSGFAAEESASISQNSTWSIQKRFQNGSYVGTPPYGYTNTDGEMVIVPEEAEIIKRIFAECLSGKGGGTIARGLNKDKIPARRGNHWSAGTVIDMLRNEKYMGDVLLQKTYTDSNYNRHSNTGEKDQYYYMDNHEPIISREDFAKAQDLIDERAKMKCKGVKKNVYLNRYALSGKIVCGECGRNFRRKTNYSAGRSYIAWSCIGHIEDKESCSMLFLRDGEIKATFTTMMNKLAFSNKLILEPLFKSISQIDEESDRERMDAIDKRMEQLMEERNTLITLMAKGFLEPALFNQERNVLDSEMKNLSTEKTNLVSNSASGVWRANEIKDLINYVSADNFNGDYTEELFEEFVVNIIVNSRDELTFNLKCGLSLKEKVVR

SEQ ID NO: 17997 - protein, 403 aa, synthetic construct
MNRSGKKCVLYPRVSTEMQVDGFSLDGHKNSLKRFADREEMEIVNIYEDAGKSGKSIEGRPAFMQMLSDIENGLGIDYVLVYKLSRFGRNAADILNSLEHIQFFGVNLICIEEGIDSSQTSGKLLISVLSAVAEIERENIIEQTMNGRKEKARQGGWNGGFAPYGYFLKDKQLFIQEDEAEAVRIIFDKYVNGNMGFYKIANYLNLQGIQKVKRDNGTLTQWSTHFVRMIIDNPMYMGKIAFGRRTREKVKGTKNEYRQVHQDDYILADGQHNGIISEELWTQTHERREITGVKASSKIGRDRAHLLSGVLKCPKCGGPMYTNKHAWTNKDGTYKEIYYYVCRKARTTRKKSCDYKAMLKRTDIEPLVVEAIRDMIKNEDFAAEIKSKIGKQIDTSTLDRERT

SEQ ID NO: 17998 - protein, 532 aa, synthetic construct
MKAAIYSRKSRFTGKGDSIENQIQLCIDYAKSIGVKDFLIYEDEGFSGSNIDRPQFKKMMQDAKDKKFSYLVCYRLDRISRNVSDFSTLIEKLNELNISFISIKEQFDTSTPMGRAMMFISSVFAQLERETIAERIKDNMYELARSGRWLGGNTPHGFNSEKITFLDENLKERSMYKLQVNNEQMEVVKLIYNKYLELRSLSKLYKYVYNNGIRGPRGGKFDPSSLSRILRNPAYVKANDEILDYLKNSGMDVVGTPDRKCGILTYAKNTANSIAAIAKHHGVIEPEIWLEVQNQLDKNRDKTPRISTGKTALLSGLIKCGKCGSNMRITYKGKKTDKDLKYYYICGTKKTLGSDSCNCKNLNGPLVESLVIDKIKNCKEESIISAFNSNNIKADNVFNAFKSETNLLKNQILDKERLIKNLVIELAKNTGSTASDYIVSQIESLNNEISILKDKINTLESSNINISSDSINIDIIVSNLKRFNDEVDNASLDDKRLLLSTIINSIVWDSSLGNLNIVYMGAEMDNSVSLSN

SEQ ID NO: 17999 - protein, 654 aa, synthetic construct
MAGIKEEKKIYSVGIYCRLSKDDGTENESASIATQKSILTDYVKKQGWHLAKTYVDDGYSGTNFQRPSFQNMIKDIENGLINCVITKDLSRLGRNYLDCGLYLEVFFPENNVRYIAVNDGVDTLNKSAMDITPFRNILNEMYSADVSVKIKSAYRARFQQGKFMGTYAPYGYIKDPADHNHLLIDDKVAHVVREIFDLALAGNGLAKIRKHINSQHILRPAAYAAEQGAAGYERYFEGNEENRYIWSENSVRGILRSPIYAGNLADYKRIAANMKSKKRPSKLPEEWEVIPDTHEGIVTQEEFDIVQQLMTSRRREKNKGGFENIFSGVIKCADCGYALRAMSANRRKRPDIIDCIQYTCNNYGRYGNVMCTAHAIEARDLFNAVLADINRFADMAVNDERAVRAIEKRLTETDQSKAKAMEKERKKLNKRLAELDRLFSSLYEDKVMERITERNFEMMSGKYQKEQLEIEARLKEVTETLNESYEKSQGIRDFLSLIRNYQGLKELDATVVNALIDKILVSEREKSADGTVKQEIKIYYKFIGFVGELHITPTKRWTALPAKHCTVCGIEYVPGSGISKYCPACAKKIQREKSNESKRRSREQKRMACIELSAKNDRLIWCRKRDTYLSLHRERGYDFETIRLPKDDTVSVGL

SEQ ID NO: 18000 - protein, 532 aa, synthetic construct
MKAAIYSRKSRFTGKGDSIENQIQLCIDYAKSIGVKDFLIYEDEGFSGSNIDRPQFKKMMQDAKDKKFSYLVCYRLDRISRNVSDFSTLIEKLNELSISFISIKEQFDTSTPMGRAMMFISSVFAQLERETIAERIKDNMYELARSGRWLGGNTPHGFNSEKITFLDENLKERSMYKLQVNDEQMEIVKLIYNKYLELRSLSKLYKYVYNNGIRGPRGGKFDPSSLSRILRNPAYVKANDEILDYLKNSGMDVVGTPDRKCGILTYAKNTSNSIAAIAKHHGVIEPEIWLEVQNQLDKNRDKTPRISTGKTALLSGLIKCGKCGSNMRITYKGKKTDKDLKYYYICGTKKTLGSDSCNCKNLNGPLVESLVIDKIKNCKEESIISAFNSNNIKTDNVFNIFKSETNLLKNQILDKERLIKNLVIELAKNTGSTASDYIVSQIESLNNEISILKDKINTLESSNINISSDSINIDIIVSNLKRFNDEVDNASLDDKRLLLSTIINSIVWDSSLGNLNIVYMGAEVDNSVSLSN

SEQ ID NO: 18001 - protein, 537 aa, synthetic construct
MKQQIYNTALYLRLSRDDELQGESSSITTQKSMLRLYAKEHHLNVIDEYIDDGWSGTNFERPSFQRMIEDIEAGKINCVVTKDLSRFGRNYIMTGQYTELYFPSHNVRYIAIDDGVDSEKGESEIAPFKNIINEWVARDTSRKVKSAFRTKFAEGAHYGAYAPLGYKKHPDIKGKLLIDDETKWIVEKIFSLAYQGYGSAKITKILREEKVPTASWLNFTRYGTFAHIFEGKPESKRYEWTIAHVKAILKSEVYIGNSVHNMQSTVSFKSKKKVRKPESEWFRVENTHEPIIDKEVFYRVQEQIKSRRRQTKEKATPIFAGLVKCADCGWSMRFGTNTANKTPYSYYACSFYGQFGKGYCSMHYIRYDVLYQAILERLQYWAKAVQQDEEKVLHKIQKAGNAERIREKKKKASALKKAENRQNEIDRLFAKMYEDRACEKITERNFVMLSGKYQKEQIELEQQITSLREELSKMEQDMIGAEKWVELIKEYSVPKELTAPLLNAMIEKILIHEATTNEDNERIQEIEIYYRFIGKVD

SEQ ID NO: 18002 - protein, 986 aa, synthetic construct
MIDKILKDIKGLFKVQDKAKFLKQNIPYLAFFYVGNIFSHHVRAYTGGDVIDKIFQGILELNTMSFLPSFHPTDILIGVGVATLIKFIAYTKGKNAKKFRQGKEYGSARWGTRKDIEPYIDEKFQNNILLTQTERLTMNGRPKNPKYARNKNVLVIGGSGSGKTRFYVKPNLMQMHSSYCVTDPKGTIVLECGKMLEDNGYEIKILNTINFKKSMKYNPFAYLRSEKDILKLVQTIIANTKGEGEKAGEDFWVKAEKLYYTALIGYIFYEAPREEKNFATLLDMIDASEVREDDETYMNPIDRLFEALEKKEPTHFAVKQYKKYKLAAGVVCSKRLLNQAVGKSLRTHNLKPKKGAQVMRKNEKITALYERLSRDDFGKDDDQQRESNSISNQKAMLEEFAARQGFTNIVHFTDDGISGTCFDRPGFLAMMKEVEAGNVEYLCIKDMSRMGRDYLKVGQIMEILRQRGVRLIAINDGVDSARGDDDFTPFRNIMNEYYARDTSRKIRSTFQSKGKSGKHLTGTVIYGYLWNEARDQWLVDPEAAEVVKRIFAMTIEGYGPYQIASKLKEEKVLIPSAYLAQHGEGVNKNKTFKDVYGWGSSTICNILEKREYLGHTINFKTRKHFKDKKSHYVPEDEWTIFENTHEPIIDQQTFDLVQKIRGNVRRYPDGWGEAAPLTGLLYCADCGGKMYVHRTNNGKRISQYTCSQYTKVPCGTLCKTQHRINEDVVLSLVSEMLKAIAEYAKHDRAEFVRVVQEAQSSQQTAEVRKQRTRLATAKQRVSELEVLLCKIYEDNILGKLSDSRYATLDAQYEKEQSELTAEISALEKAIKSYEKHEKDADRFIALIDKYENFDKLTIAMLNEFIEKILVHERDRKGSIQTTQEVEIYFNFVGRFVPPAFGEVELTPEELEEIRKREERKDRLHQNYLKRKASGAQKRCEDKIKKRKKAEIEAKKAAIRAEDIAKGVFVPVSSLPQREPMKGVQTA

SEQ ID NO: 18003 - protein, 558 aa, synthetic construct
MLQQSNSTITSIYPIGNQTEELTALYCRLSQDDKQEGDSNSIINQKKILKRYAIEHGYQPYVFFVDDGFSGTNFNRPDFQRMIAEVEAGKIKRVIVKDMSRLGRDYLQVGMYTEIMFPNMDVHFIAVNDGVDSRVGDNEFTPFRNIINEWYAKDTSKKIRAVKRSKGMAGEHIGSHAPYGYMKNPDNKKEWLIDEEAAEVVREIFRLCVNGYGPTRIANILTERKILCPTYYALEHGEKPRTVLPPDKYLWSATVVSHILERMDYLGHTVNFKTHVKSYKNRKKIDNSPEQWKIFENTHEAIIDKETFEIVQKIRSGKRRPTKMGDMPMFSGLLYCADCGSKMTFHRQMAQSAEKHNFVCSNYRHNSKSCTMHYIRNVVVEQIVLENLKEVIRYVSDYEDEFVQMVMDTDMRQRNKELLQKKKRLTEIHSRIQELDKIFQRIYEDNISGKLSDERFMKLSKGYEEEQHTLQEEQTSLEKELQKEEKQSVDVKQFLSAVRKYTNLTELTPEIVHEFIDKIIVHAPDKSSGKRLQEIEIIYNHIGVFDHSKVTLWKGKAV

SEQ ID NO: 18004 - protein, 559 aa, synthetic construct
MMTNNEIKNVVMYCRTSTELQADNFSIPAQIDKITQYCKFHNYNLTGKYIDECKSGTTIKNRTSFINLINDIKSKKNTISAVVIFDISRIARNLSDLSSIINLFEKYNIALISIHDNINTSDAYSRSMAYIFGTFAELNRYSIVNACRSGMEQRAKKGLWNGGKMFGYVSNKNKELEIVPEQATIVKEIFNLYVNKNWGYKKIACHLNACNYKTLNNGTWSIYSIKQIIDNPTYAGFIRWGQYLDWAKKGRKGKNEDYELFQGQHQPIIDMETWTKSQAMRKINKDKFNKIYEGDFILTGLLRCPVCGASMISHRTKKKNKPNEFYRYYQCSNFFNKGVTVCTSNLVNADTAEKYVLDRISEIINSQEIINSLISKLNNRTNKDITPLEKQLKELEKSLAKINIKRNEHMENHFNDFISSDDLNANLKYLREKEDKITTQINIIKNEISQLSDFQCIDSEKVINILKNFNSVFINATIEQKKSLLRSIIDSISVNRGKTTKDRIINKIKLHFEPVDIQAQKINKKFATTCDTVLHYLSYKPYKSVLAISISSSDEEKSS

SEQ ID NO: 18005 - protein, 537 aa, synthetic construct
MKQQIYNTALYLRLSRDDELQGESSSITTQRSMLRLYAKEHHLNVIDEYIDDGWSGTNFERPSFQRMIEDIEAGKINCVVTKDLSRLGRNYIMTGQYTELYFPSHNVRYIAIDDGVDSEKGESEIAPFKNIINEWVARDTSRKVKSAFKTKFAEGAHYGAYAPLGYKKHPDIKGKLLIDDETKWIVEKIFSLAYQGYGSAKITKILREEKVPTASRLNFTRYGTFAHIFEGKPESKRYEWTIAHVKAILKSEVYIGNSVHNMKSTVSFKSKKKVRKPESEWFRVENTHEPIIDKEVFYRVQEQIKSRRRQTKEKTTQIFAGLVKCADCGWSMRFATNKANKTPYSYYVYSFYGQFSKGYCSMHYIRYDVLYQAVLERLQYWAKAVQQDEEKVLNKIQKAGNAERIREKKKKASALKKAENRQNEIDRLFAKMYEDRACEKITERNFVMLSGKYQKEQVELEEQITNLREELNQMEQDMIGAEKWIELIKEYSVLKELTAPLLNAMIEKIFIHDATTNEDNERIQEIEIYYRFIGKVE

SEQ ID NO: 18006 - protein, 584 aa, synthetic construct
MKEVEVIKARNDLQTRTRGKTIELMRVGAYCRVSTDSADQLNSYKSQVAYYTEMIKKNKEWVLADIYADEAITGTQVAKREDFQRMINDCMNGEIDMVITKSISRFARNMLDTLKYVRMLKERNIAVYFEDEKINTLTMDGELLLVVLSSVAQQEVENISANVKKGLKMKMKRGELVGFQGCLGYDYHKDTKTITVNEEEAEIVRYIFNRYIEGAGGSVIAHELENLGYKTKYGSSTWVQSTVIGIIKNEKYKGDLLLGKTFTVDPISKRRLENFGEEDKFYIRNHHEPIISEEVFEKAQEILARRNVNRGKIGEGNTKREKYSRKYAFSCMLECGFCGGTLTRRNWHSSSQYSKVIWQCVTATKKGKKFCKHSKGIPETAIEEAFVESYRLLCDDNKDVLEEFLQRMDDTLSSSAVSKQLAKAEKEIDALEKKKSKLVDMRLEEIIDKETYESKYADLVSKQEQLVEERQKLQETSDNEKDIKKRLKEFKKTLEQNEVLDKFDRYVFESIVEKVIVGGLDENGNVDPAQLTFVYKTGLKNSVDGAKFKPQRKNARGRHRTDELCSHDSNEVDKMCSDSSNDTL

SEQ ID NO: 18007 - protein, 584 aa, synthetic construct
MKEVEIIKKNDNLENRRRGKYIDCKRVAAYCRVSTDSEDQLNSYKSQVSYYTDLINNNIEWCMVDIYADEAITGTQVNKREDFQRMINDCMNNEIDMIITKSISRFARNTLDTLKYVCMLKEKNIAVYFEDEKINTLTMDGELLLVVLSSVAQQEVENISANVKKGLKMKMRRGELVGFQGCLGYDYHKEDKTLTINEKEAEIVRYIFNRYIEGAGCSIIGQELENLGYKTKYGSTIWSNSTVLGIIKNEKYIGDVLLGKTFTVDPISKRRLDNLGEEEKYYVKNNHEPIISREIFDKAHEILNRRGKNRGKYEEGVTKREKYSRKYAFSCMMECGFCGGTLTRRNWHSGSEYSKIIWQCVVATKKGKKYCPESKGIPERVIENVFVESYRLLCDEKKSVLEELLNRINDIVGSSEVNNKIKKIEKELSVIEKKINNLVDMRLDDIIEKETYEIKYQELIDNQEKLLNERNKLNVIAKNENSMKQRLKEFKKTLEENEVLDKFDRGVFESVVEKVIIGEKNKDGENDPTKITFIYKTGFKNTLSSDEFKIPRKNARGRHKRKELCLHGNNEVENLCSHSSSNTL

SEQ ID NO: 18008 - protein, 569 aa, synthetic construct
MTDIKDVFKHHKSRVDKIDTIEEKTKKDTYGVLIRVSDVKQVTKDSIPMQRERAYKFIKERDGILYKEYIEEAVSASKNSIKQRPVLQELLKDIEDGKINKVIAYKRDRLSRIQKDWLTILDTIFKNNCDIEFTSAEEQPISSNPMVRGIMEPVLGFLANMESNNTSMRVKETRASIAAKGRWTGGTLPYGYDLNKNKEIVVIKEVIPSLIEIEDLYLNGIGVGSITRYMNGHEVKHLGKRKKGADIKRVVYKGRKTYWTESAVEGVLFNPFYAGIIEYSKEGNKHLQYDQDKFVREKGFHEAIRTLDKQEKIYEMKSKKSISAPRKFSTTFLLTGLVYCSECGSPIQSRTVLKKERNNEKYCYYVCASKQNKDKTSRNEMCPSKNFKQNILEDFVVSKLLEMFDGFNKDNLKEEILKGIDQGKSTIETDIVSAQAELKELQSELVSIMNLMKRVSPESPLYEEIITDYEKSYTETLLKKKEIEEKLESLQQSIKENNDKEIEQNIVLDALKNFSIVFKEASQVQRKTLLDSIIKRIDISQDGKLNILCNFELPKDGESYVHSINRRPV

SEQ ID NO: 18009 - protein, 510 aa, synthetic construct
MALHENSRIAVYSRKSREDRDSEDTLAKHRNELEYLIKRENFKNVQWFEEVVSGETIDERPMFSLLLPRIENGEFDAVCAVAMDRLSRGSQIDSGRILEAFKQSGTLFITPKKTYDLSIEGDEMLSEFESIIARSEYRAIKRRTINGKKNATREGRLHSGSVPYGYKWDKNLKAAVVVEEKKKIYRMMIKWFLEEEYSCTVIAEMLNELKVPSPSGRSIWYGEVVSEILSNDFHRGYVWFGKYKKSKSNNSIVQNKNLDEVLIAKGHHETMKTDEEHALILNRIEKLRTYKVAGRRLNMNTHRLSGIVRCPYCHKAQAIEQPKGRRKHVRKCLRKSAERTKECEETKGIHEEVLFQSIMKEIKKYNESLFSPTEQDVNDDSYTAQLIGLREKAVKKAKGRIERIKEMYLDGDISKTEYKEKLKISQETLQKAENELAELIASTEFQNALSAETKKEKWSHHKVQEMIESTDGMSNSEINLILKMLISHVTYTVEDLGDGTKNLNIKVYYN

SEQ ID NO: 18010 - protein, 560 aa, synthetic construct
MSKEKIKVYLYTRVSTSIQIDGYSLEAQKSRMKAFALYNDYEIVGEYEDAGKSGKSIEGRVQFTRMMEDIKSGKDGVSFVLVFKLSRFARNAADVLSTLQIMQDFGVNLICVEDGIDSSKDAGKLMISVLSAVAEIERENIRVQTMEGRIQKAREGKWNGGFAPYGYQLIDGKLLINEEEAIAIRTIFDQYVNTSIGANGLSKYLENHGIRKIPRQNGKNPLFDAGLIRKILKNPVYNGKIAFGRRTLEKVHGTRNEYRQVEQDDYLVAEGIHEAIIPDELWQAAQVKLKAQAKKYEHVNKGKNMRTHLLSGIVKCPICGAGMFGNKSIKYKKDGTKYKDFYYYGCKHRLMNRGHKCTYNKQIREELLDDAVAEVIIKLVSNPKFASMIQEKINMKVDTSAIENEIDNYQKELRKSHSTKFKLIEEIDNLDVDDKHYKRRKTDLDDRLYRMYDKIEELEGQLIEAKAKKETIEAEKLTGDNIYKVLIYFDKLYKVMNDVERRQLIEALISEIQIYEEKQPNGQWLKSITFKLPIIDEDLNISLDNDEQVETCVLLQRRTM

SEQ ID NO: 18011 - protein, 552 aa, synthetic construct
MIAAIYSRKSKFTGKGESIENQIQLCKEYAASQLRDNDITEFLIYEDEGFSGGNTNRPEFQKLMDDARLKKFDVLICYRLDRISRNVSDFSSTLEILQKHDIDFISIREQFDTSTPMGRAMIYIASVFAQLERETIAERIRDNMLELSKTGRWLGGTAPIGYNADPITYFDADMNERKMVKLKQVPKELNTVKLLYKKYLELKSLSKVETYALQNSIKTKRGSDFTKNNIRIILTNPVYVKATENVFDYLENEGITTCGDPDGEHGLLTYNKQKSVSNDNGKTVRVFRDKSEWIAAISSQKGVIEADDWLEVQKILSENKDSFPNEGKTHNALLTGKIRCAKCGSNMQIAHGHISKKTGKQIYYYACSMKKHSKGVRCNNKNAKVSELDPVVIKQLKELAYNKESIINKLEMKNKKARELNKSSNREEILNNSIADKNKQIQNLMNKLAVADDISDLLIEKIRSLKNEIKELKVQLDNLNKLNSEFTDTELNLSFIKLMLNRCSMIDSLPNEEIKQLIDVLIDKITWDGESYGVTIDFIGSNPEEDEESKKK

SEQ ID NO: 18012 - protein, 586 aa, synthetic construct
MQEVEVIKAKNVLSRQARGKAIERLRVAAYCRVSTDSEDQLNSYKSQVQYYTDMIKKNKEWVLADIYADEAITGTQVTKREDFQRMINDCMNGEIDMVFTKSISRFARNTLDTLKYVRMLKERNIAVYFEDEKINTLTMDGELLLVVLSSVAQQEVENISANVKKGLKMKMKRGELVGFQGCIGYDYHPEDKTITVNQEEAEIVRYIFNRYVDGAGGSVIGQELESLGYKTKYGSSTWAPSTVIGIIKNEKYKGDILLGKTFTVDPISKRRLENMGEEDKFYMKDHHEPIISEEIFEKAQEILNRRNKNRTTVGSGKREKYSRKYAFSCMLECGFCGSTLSRRNWHSSSEYSKVIWQCVTATKKGKKFCPDSKGIPETAIEEAFIESYRLLCDNNKDVLEEFLHRLDETLSNSTVSKQLSKIEKEISAVEGKKNKLVDMRLEDSIDKDTYETKYTALMEKLEQLASDRQKLQETAVNEKDIKRRLKEFKTTLEQNEVLDVFDRHVFESIVEKVIVGGYDEDGNKDPAQLTFVYKTGMKNSVDGSRFKPQRKNARGRHRTDELCSHESNEVNSLCSDNSADTCGNCS

SEQ ID NO: 18013 - protein, 565 aa, synthetic construct
MGFKKLVNDIKVEKRRKLIAIYCRVSTEEQSENGYSIDEQERLLEEWCKKMGYVIYKCYSDRGISGKNIKDRPALKELLSDAKAGKFDMVISWKINRVSRKLEDVLKIVNILEKNNITFKSYSEPFETDTPAGRMQFQMMALIGEFERGTIAQNVKMGMIAKAKSGNWCGGRVLGYDLVPNNSPEEEKKGKNKLEINEKEAEIVRFIFNEYSKGKGYKAITNQINKLGYKTKKGNNFSVGSIRDILTNPVYIGEIRYNVRQNWSEKRRRNINPNPIRVKGKHEAIIDRELWDKVQLILESKKGKPSRIYDGEYPLTGILRCPKCGAGMVISRTTNTLADGTKKRIAYYCCGNWKNKGTSVCNSNTIRVDKANEYVFKKIEELVSNEAMIKAVVKNINKERKEKVKPAKRLLGDIDKELEKLDKRKRKIFEAYEDDIITKEEFQIRKDELNDKIRILEEEKKPLLNTISDEVSEDIPYEFIKDILMNFSKILNSSVSREQQKKLLHMIISEITMNESREIDSIKLNINDNLVEYLVKEGGVPIKGIPSSFMLKNVGLKVLNLYIDI

SEQ ID NO: 18014 - protein, 502 aa, synthetic construct
MKKVAIYSRKSVYIEGSVSIETQINMCKEYILKKFPNSTFEIFEDEGFSGGNTNRPAFQKLLRLAELKQIDIVVCYKIDRIARNTLDFLNILEMFKENNVELISITEGFDPNTQMGKVMLTLLASFAEMERSNIQQRVKDNLLSIAKKGKWTGGSPPTGFKNNPNGGIEWDNKDMILDVFNMKYEKSKNTDLIQFIQHKYNHKFLGGTLATTLRKPIYVKSSSSVSLYLKSKGYIVQGTEDNIHSYLTYTDKDTKYAIVSNIVGLVEPSIWISVNKDMDKNISREGNRFSEKFWLTKTIRCKCCGQTYCGQTKTTKTKYYNKKGEEKIYVSTYSYYSCRDAVRGKLKTCNNTKRIKQDVLEAKVSALIYSLKDEKIFNSSYSINKVDNSFKIASLNKKVIEIDKTISNLTDKIALLSNDASLIFIDKIENLIKEKSSIKSNIVELELQELNSKIKTDKALIYNNIKAFNNNLSVDDKRKITMSIFKKIVYDPETNDLDVTFM

SEQ ID NO: 18015 - protein, 570 aa, synthetic construct
MKTVAIYSRKSRFTGKGDSIENQIEMCKEHIKKFVSPKVEFLIYEDEGFSGGNTNRPAFQRLINDIKYGNIDLLICYRLDRISRNVADFSSVLDVLQEYKVDFISIKEQFDTSSPMGRAMIYIASVFAQLERETIAERIKDNMLEMAKKGKWTGGKLPLGFTSKKIAYIDEEGKKRFKVTLEHDSKDLEFVKFLYEKYLELGSLHKLETYTHENNIRSASGKIFEKSTLKIILQNPIYVKADENVFNYFENKGWSVYGEPDGLHSLLSYNKTETAKKDGKLTKRNKDESESLVAVSDVKGFIDSSLWLKVQYQFKKNKNTFPRLGKTHNALLVGKLFCGNCGTRMIIQHGRTSTKTGIKTFYYVCSLKKTSKKKLCSAHNVKTDFLENLVLDSLEKLYYKKDFINDSLKINLKENKDNIKEINTTKKLIELNKNKINSLIEKLSLDFDNVLSDILIPQIKKIKIENDVLESKLEELKLKKQESEMNRIEIDLITSLLNKCKNIKELTRTEQKQIIDCLVDSIYYYSNDNGNDKIKIKFINDIDSINTLLSDEEKRQFEKLSFYSHSMSSI

SEQ ID NO: 18016 - protein, 532 aa, synthetic construct
MKAAIYSRKSRFTGKGDSIENQIQLCIDYAKSIGVKDFLIYEDEGFSGSNIDRPQFKKMMQDAKDKKFSYLVCYRLDRISRNVSDFSTLIEKLNELNISFISIKEQFDTSTPMGRAMMFISSVFAQLERETIAERIKDNMYELARSGRWLGGNTPHGFNSEKITFLDENLKERSMYKLQVNDEQMEIVKLIYNKYLELRSLSKLYKYVYNNGIRGPRGGKFDPSSLSRILRNPAYVKANDEILDYLKNSGMDVVGTPDRKCGILTYAKNTSNSIAAIAKHHGVIEPEIWLEVQNQLDKNRDKTPRISTGKTALLSGLIKCGKCGSNMRITYKGKKTDKDLKYYYICGTKKTLGSDSCNCKNLNGPLVESLVIDKIKNCKEESIISAFNSNNIKTDNVFNIFKSETNLLKNQILDKERLIKNLVIELAKNTGSTASDYIVSQIESLNNEISILKDKINILESSNINISSDSINIDIIVSNLKRFNDEVDNASLDDKRLLLSTIINSIVWDSSLGNLNIVYMGAEVDNSVSLSN

SEQ ID NO: 18017 - protein, 502 aa, synthetic construct
MKKVAIYSRKSVLVEGSVSIETQINMCKDYINNKFPNAKFKVFEDEGFSGGNTNRPAFQKMLRMAQLNEIDIVVCYKVDRIARNTLDFLKILELFKENNVELISISEGFDPNTQMGKVMLTLLASFAEMERTNIQQRVKDNLLSIAKKGKWTGGSPPTGFKNGLNGGLEWNKQDMILDVFNMKYEKEKNSNIIKYIKEKYNHNFLGGTLATTLRKPIYVKSSPSVSLYLKTKGYIVQGDEDNIHSYLTYTDKETKYAIVSDIVGLIEPSVWISINKDMDKNISREGNRFSKKFWLTKTIRCKYCGQTFCGQTKTTKTKHYNKHGEEKIYISTYSYYSCRDAVRGKLKTCTNTKRVKQEILESKVSELIHLLKDKKTFNSSYFSNKIDNSSKIDTIKKQIKSIDKTINNLTDKIALLSNEASLIFISKLEELVKEKSILKDNLLQLELQELNSNTKKDSSLVYNNILAFNDELSVDDKRKIAMSLFKEIIYDPETDSLDVTFM

SEQ ID NO: 18018 - protein, 583 aa, synthetic construct
MKKVEIIKANRSLSDRNKNNMRSILRVAAYCRVSTDSDDQLNSYNSQVSYYTDLIRKNNEWDFVDIYADEGITGTQISKRTNFQRLINDCMNGEIDMVITKSISRFARNTLDTLKYVRMLKEKNIAVYFEDEKINTLTMDGELLLVVLSSVAQQEVENISANVKKGLKMKMSRGELVGFQGCLGYDYNVDDKSISINREEAEIVRYIFNRYIEGAGGRLIGNELEQLGYKTKRGSSTWHESTILGIIKNEKYKGDVLLGKTFTLDPISKRRLENYGEEDQFYLREHHEPIVSEEIFDKAQAIRLKRSIPRGSHEVEGFKRQKYSRKYAFSCMLECAFCGGTLTRRSWHSGTNHSKVVWQCVVSTKRGKKYCEHSKGIPEKVIEDAFVESYKKLCGNNKEILEEFLIRLSNTLNESNVEKEFLEIEKQIDVLDKKRKKLIDMRLEEIIDKESYEEKYDDLTVEIKKLSKRKQTLKASLINENTIKARLKEFRKTLERNEVLEKFDRYVFESIVDKVIVGTTNEDGTVDPYKITFVYKTGFDDKQDGNKFRNNKTLKACSKDKNDNKKECSHAKDDTRRDSCKIK

SEQ ID NO: 18019 - protein, 345 aa, synthetic construct
MKCAIYIRVSTNKDEQKTSLINQKDLFNRLLKKNNWDLFDYYIDIESGTTAKRENLQRMIKDAEERKFDIILVKELSRLARNGSLAYKIRDLAQINNIQIIALDNSIDTLNNHTQNFGLFAWLYERESENTSSRLKAAFKSRANKGLFKGTIPPYGYKCENGCLIIRDDNTPNIVRRIFNEYLSGSSVRIILENPNYTGDLVQNKSNSVSAISKKRIKNNPNDYIIVENTHQPIISKEVFNAVQSLINNRRKIRPQQNSHLFSNLLFCADCGHGFHFKKNRRGYVCGFYNKLGNAACSSHIVREETLKKILLSEFKVISSQLNKETYLKKIQQNLLKLKTNIKKI

SEQ ID NO: 18020 - protein, 503 aa, synthetic construct
MKRIAIYSRKSVFIEGSISIETQINMCKEYMINKFPDATFEIFEDEGFSGGNTNRPAFQKMLKLAELKEIDIVVCYKIDRIARNTLDFLNILEIFKKNNVELVSITEGFDPNTQMGKVMLTLLASFAEMERTNIQQRVKDSMFSLAQKGNWTGGAPPLGFKVKESGGIEIDNKSLILDAFNMKFKKYKNTEIIEYIESKYNHKFVNTTLASMLRKPIYTKSSKEVSTYLKTKGYKILREENNSNSYYTYKNNNQDYAIVNNDIEGLIDPYVWISINKAMDDNSNGETNRFSEKFWLTKTLRCKYCGKTYCGQTKIVKSKYTNKDGDSKEYIGTYEYYMCRDMFRGRLKTCENTKRLKKKDLEKKIEELIYILKDRNIFEKKYYKSEVNNPAKELKELELNMKKLDKTINNLTDKIALLSNDAAMILIDKIETLVKEKKALKDKMIKIELKSLDNLEGKEEFIYENILKFNTNLSVDQKRNIAINIFKEIVYDYKTDKFEVFFN

SEQ ID NO: 18021 - protein, 515 aa, synthetic construct
MKTAIYLRKSRADLEAEARGEGETLAKHRTTLLKIAKEMNLNVLAVREEIVSGESLVKRPEMLALLEEIEDNKYDVVLCMDMDRLGRGGMKEQGIILETFKRSNTKIMTPRKTYDLNDEWDEEYSEFEAFMARKELKIITRRMQRGRVASVEAGNYLGTHAPFGYDIHRLNKRERTLTINSEEASVVRMIFDWYANEDMGANAIRSKLNDLGYKSKLGNEWNPYSILDILKNNVYIGKVTWQKRKEVKRPDAVKRSCARQDKSDWIIADGKHEPIIPESLFEQVQEKLNSRYHVAYNTNGIRNPLAGIIKCSKCGYSMVQRYPKNRKETMDCKHRGCENKSSYTELIEKRLLEALKEWYINYKADFEKHKQGDKLKETQVIQMNEAALRKLEKELVDVQKQKNNLHDLLERGVYTVDIFLERSKAVSDRINEITSTMENLKKEIKTEIKKEKVKKDTIPQVEHVLDLYFKTDDPKKKNSLLKSVLEKAVYKKEKWQRLDDFELVLYPKLPQDGDI

SEQ ID NO: 18022 - protein, 532 aa, synthetic construct
MKAAIYSRKSRFTGKGDSIENQIQLCIDYAKSIGVKDFLIYEDEGFSGSNIDRPQFKKMMQDAKDKKFSYLVCYRLDRISRNVSDFSTLIEKLNELNISFISIKEQFDTSTPMGRAMMFISSVFAQLERETIAERIKDNMYELARSGRWLGGNTPHGFNSEKITFLDENLKERSMYKLQVNDEQMEIVKLIYNKYLELRSLSKLYKYVYNNGIRGPRGGKFDPSSLSRILRNPAYVKANDEILDYLKSSGMDVVGTPDRNCGILTYAKNTSNSIAAIAKHHGVIEPEIWLEVQNQLDKNRDKTPRISTGKTALLSGLIKCGKCGSNMRITYKGKKTDKDLKYYYICGTKKILGSDSCNCKNLNGPLVESLVIDKIKNCKEESIISAFNSNNIKTDNVFNIFKSETNLLKNQILDKERLIKNLVIKLAKNTGSTASDYIVSQIESLNNEISILKDKINTLESSNINISSDSINIDIIVSNLKRFNDEVDNASLDDKRLLLSTIINSIVWDSSLGNLNIVYMGAEVDNSVSLNN

SEQ ID NO: 18023 - protein, 540 aa, synthetic construct
MKQPYNTTIYNTALYMRLSRDDENYGDSVSIETQRTILQQYAKEQGLHVVGEYVDDGWSGTNFERPDFQRMMDDVEAGKVNCIVTKDLSRFGREHVMMDYYLEFLFPEKRVRYIAVAENEDTEKGLSDFVPFKNLFNEWFAKDTSRKVKAAFKAKFATGQRIGAYAPIGYRKHPEIKNKLIIDEETRWIVEKIFDLAFHGRGAASITSILIAEKVPTPGFINFQRDGTFANIYAGAPEEKSYAWTIAQVKSIMKDETYIGHTIHYRETNISFKNKRRVRKPQSEWVRVENTQEPIISEQVFRQVQEQIANRRRKCKDGTTQIFSGLVKCADCGWSLSYGENRQNSKPYGHYHCSKYGQGTRQCSMHYIRYDVLYAYVLSRLQYWSGLVQHDEERLLKRLLNANDKGQAAARKKQAAELKKAEKRKSEVDTLFARMYEDWAAGRITEYNFSMLSGKYQSEQAELDEKIEQLQSAIATESQNTADAEKWIALMKECVNPTELTAELLNTLIEKIVVHEAVKGEDGSREQEVEIFYRFIGKID

SEQ ID NO: 18024 - protein, 532 aa, synthetic construct
MKAAIYSRKSRFTGKGDSIENQIQLCIDYAKSIGVKDFLIYEDEGFSGSNIDRPQFKKMMQDAKDKKFSYLVCYRLDRISRNVSDFSTLIEKLNELNISFISIKEQFDTSTPMGRAMMFISSVFAQLERETIAERIKDNMYELARSGRWLGGNTPHGFNSEKITFLDENLKERSMYKLQVNDEQMEIVKLIYNKYLELRSLSKLYKYVYNNGIRGPRGGKFDPSSLSRILRNPAYVKANDEILDYLKNSGMDVVGTPDRKCGILTYAKNTSNSIAAIAKHHGVIEPEIWLEVQNQLDKNRDKTPRISTGKTALLSGLIKCGKCGSNMRITYKGKKTDKDLKYYYICGTKKTLGSDSCNCKNLNGPLVESLVIDKIKNCKEESIISAFNSNNIKTDNVFNIFKSETNLLKNQILDKERLIKNLVIELAKNTGSTASDYIVSQIESLNNEISILKDKINILESSNINISSDSINIDIIVSNLKRFNDEVDNASLDDKRLLLSTIINSIIWDSSLGNLNIVYMGAEVDNSVSLSN

SEQ ID NO: 18025 - protein, 541 aa, synthetic construct
MKIAIYCRVSTEDQAERQTIENQIVFAEKYVDLHEMDVFTYYREDGITGTIPLYERPEGTRLLQDAKEKKFDTLLIYKLDRLGRSARIILNSIHELEALGIQIKSMTEPFDTSSPAGRFMITMLAGVADLERETILERMWHGANRAARDGKWLGGIVPYGYFVNENKELEINNNLLEGFSMSETQVIKIIFDKIGNEKWSTIKVCDYLNALGVPTSYAKANRKINSKDGKRKVATANLWRPGQVLRISKNTTYKGIHTYGKRSKKERELIEREVPAIVDTELWEKVQKQLKDNQAESFKNKSRDFLLSSIVKCGDCGLTFIGSNDRKTNRAFYKCIGKQNYKNPIENKKCESKNIPADYSENMVWEGCLNFINDPGKAVVEIEKNIKSNKEKFVNTEVEINMLNASLLKKENEKESILDLYRKKLIDSKDVEIQLLNIQSEKAQIEEKIKELNQIKDTTNQMLASVNSATEFLNSLKEKSIDADFKTKREIIKSLIKKVTVITNHDLPRKTATLQIEYNFSGNNNYSVEKIEGVTHTDMDS

SEQ ID NO: 18026 - protein, 502 aa, synthetic construct
MNKICIYLRKSRADEELEKTLGEGETLSKHRKALLKFAKEKKLNIVEIKEEIVSGESLFFRPKMLELLKEVENKQYTGVLVMDMQRLGRGNMQDQGIILETFKKSNTKIITPMKTYDLSNDFDEEYTEFEAFMSRKELKMINRRMQGGRVRSVEDGNYIATNPPLGYDIHWIKKSRTLKINAHECEIIKLIFKLYTEGNGAGSIAEHLNNLGYKTKFNNNFSRSSVLFILKNPIYIGKVTWKKKEIKKSKNPNKTKDTRTRDKSEWIVVDGKHEPIISMKMWNKAQEILNNKYHIPYQLVNGPANPLAGIVICSKCKFKMVMRKLKGIDRLLCRNNKCDNISNRYDSTEKAIVQALERYLNEYRINISNKNKTSNIKPYERQVNILEKELAALNEQKLKLFDFLERGIYDENTFLERSKNIEKRITKTSSGIEKINDIINKEKKVIKEEDVIKFQKLLDGYKNTDDIKLKNELMKKLVNKVEYTKDKRGETFGIDIFPKLKP

SEQ ID NO: 18027 - protein, 562 aa, synthetic construct
MSKEKIKVYLYTRVSTSIQIDGYSLEAQKSRMKAFALYNDYEIVGEYEDAGKSGKSIEGRVQFTRMMEDIKSGKDGVSFVLVFKLSRFARNAADVLSTLQIMQDFGVNLICVEDGIDSSKDAGKLMISVLSAVAEIERENIRVQTMEGRIQKAKEGKWNGGFAPYGYQLIDGKLIINEEEAIAIRTIFDQYVNTSIGANGLSKYLENHGIRKIPRQNGKNPLFDAGLIRKILKNPVYNGKIAFGRRTLEKVHGTRNEYRQVEQDDYLVAEGIHEAIIPDELWQAAQVKLKAQAKKYEHVNKGKNMRTHLLSGIVKCPICGAGMFGNKSIKYKKDGTKYKDFYYYGCKHRLMNRGHKCTYNKQIREELLDDAVAEVIIKLVSNPKFASMIQEKINMKVDTSAIENEIDNYQNELRKSHSTKYKLIEEIDNLDVEDKHYKRRKNDLDDRLYRMYDKIEELESQLIEAKAKKETIEVEKLTGDNIYKVLIYFDKLYKVMNDVERRQLIEALISEIQIYEEKQPNGQWLKSITFKLPIIDEDLNISLENDEQVEPCTNCQGNKCNN

SEQ ID NO: 18028 - protein, 515 aa, synthetic construct
MKTAIYLRKSRADLEAEARGEGETLAKHRTTLLKIAKEMNLNVLSVREEIVSGESLVKRPEMLALLEEIEDNKYDAVLCMDMDRLGRGGMKEQGIILETFKRSNTKIMTPRKTYDLNDEWDEEYSEFEAFMARKELKIITRRMQRGRVASVEAGNYLGTHAPFGYDIHRLNKRERTLTINPEEASIVRMIFDWYANEDMGASTIRNKLNDLGYKSKLGNDWNPYSILDILKNNIYIGKVTWQKRKEIKRPDAVKRSCARQDKSDWIIADGKHEPIIPESLFEQVQEKLNSRYHVPYNTNGIKNPLAGIIKCSKCGYSMVQRYPKNRKETMDCKHRGCENKSSYTELIEKRLLEALKEWYINYKADFEKHKQGDKLKETQVIQMNEAALRKLEKELVDVQKQKNNLHDLLERGVYTVDMFLERSNVVSDRITEITSTMENLKKEIRTEIKKEKVKKDTIPQVEHVLDLYFKTDDPKKKNSLLKSVLEKAVYKKEKWQRLDDFELVLYPKLPQDGDI

SEQ ID NO: 18029 - protein, 578 aa, synthetic construct
MATASNNTDPVRDDPAQSLIDPPEGAAVAVSYLRVSTKEQAERGGRDEGFSIPAQREANRRKAGQLGAAVVEEFVDAGESARKADRPELMRMIRYVKQHKVAYCIVHKVDRLARNRADDVTIHLALQQAGVLLVSATENIDETPSGMLLHGIMSTIAEFYSRNLATEVTKGMTQKAAGGGTLGKAPIGYLNVRTRDELGREARTVELDPERAPLVQWAFKAYASGNWTVSQLHDELTSRGLMSLPTPKRPSKPMAVSSVHRLLTNPYYKGDVTYRGVNYKGAHQPLVPAEVWYQVQSVLTAHKSAAEATQIHDHYLKGTIHCGGCGSRLIVSNAKNRHGNVYCYFVCSGRHSKRTNCDRSAILIADVEKLIEDYYQRIQITPAQHEALAGMLHHEFDRLMSAEVDELAQLTANRDRLQHEQERLLQAHYADAIPLALLKREQDRILGELDQVSRRIDAHHGEYADARAHLDDALNLLTNCADIYNRCDDANRRLCNQAFFTKVYIDEDDELRVENNRPFEMLLDPEINANALTWAENADKTRTTTNDSVGKGSSLVRRVEPRGFEPLTSALQRQRSTN

SEQ ID NO: 18030 - protein, 611 aa, synthetic construct
MKPSSPGLRVLGRLRLSRLTDESTSIERQRETIQHWADVNGHTVVGWAEDADVSGAVDPFDTPQLGQWLKHRVEEYDVIAAWKLDRLGRNAIQLNKLFGWCLDHNKTLVSCSESIDLSSWAGRMLASVIAGLAEGELEAIRERARGSRVKLRESARFAGGKPPFGYRKKQRPGGGWMLEIDELAAGLVGEIVAAVLDGKPVSRVVSKLNDDGYRTPRDYYETVKVGKPSLILAEGEKRTLHWRSTALRNLLTNPALRGYVHHQGQVARGDDGMPLQLADVPLVDADEWEALQSIFDGHRERRSHYRRPDASPLVGLVFCYWCHSPLWHNRNVSRGHEYFYYRCPNIQQHERASMIPADQAEKAVAESFLDEAGDLPVMERVWVPGDSAEQELKEATTALDDVFAELETAKSEITRERARKRIAALDERISILEAKPKQEARWEYKQLGGTYREAWEALGESDRWQLILKSGMTFAFGLTDRGRGPNSVWVSSVYTPEPLKHTLVSGVKQRRTLADADPNRDVNPADHTTWLPEHWATMREAGIEGIETHQDKTVVVMKSGERVEIPRWLDEIGISEITNDDDVRIAWTTDGRGFYHQPAGEWIEVPLGDAE

SEQ ID NO: 18031 - protein, 522 aa, synthetic construct
MTTSLVRAVVGARVSIFTDGKESQITQRTKGTAYAESQGWTVVGAFEDLDVSAIKKSPWDRPDLKQWLTDRADDWDALVFAKTDRVFRSAADCVKLSEWCRDHKKILVLVDDGIKLDYFHPDSQQDAFAGAMSKVFLILASVFAEIEGQRFVQRALDRVTQYRHQPRWAYGVPPYGFQVVDRPEGGKTLGHDLEAQQVLQGIATRLLSGDSLTRITADLNETGVLSPADRLRQRTGKELRGSRWTVITVQTILTNPATQGIKTAKGKPVLDAGGEPVRVGPPSFDSETWGRIHSELAQRSQSGQQRRHSDNPLLGVAKCGVCGKNMRHFQRTKGGRHYRYYICGSTPKACPGVLINADNAELAVETSFLDVHTNRRIKERVWRAGSDHSAELEQTTNTITALWEDRALGLFTTPEDQDMFRSQMAALVAKRDALAQTPVIKAGWVDVETEQTYGAVWPDATPVERRKMLTDAGMKLTVYRANKYETYVDLDKAIGEGSVGEELHSELEARAAEERRRWGMPD

SEQ ID NO: 18032 - protein, 490 aa, synthetic construct
MKQRAKRALVVVRLSRVTDETTSPLRQREACFELCEQRGYEVIGTAEDLDISAGKTSPFDRPQLGDWLTNRRGEFDVLVTFRMDRIVRRLLDLADLIRWCQSNSVSLVSATETFLDLDSAFGDIIALLVAKVAEMELAAISERNRSAAQHNMRQGKYRGGPPPWGYRPEKIDGDWRFVQDDEQVAVINEVVRRVLDGEPLRQVAADLSDRAVLTPRDRVNQLKGREIRGYSWHSAKIREMLTSKSLLGHAVTANGSIRNDDGSPIIRATPILERDVFEQVQVELAGRENRKEPTKRSSSLLLRVLYCGVCGKPAYKLKGGKGRQDRYRCASAQYKSTCGNGMVLVADANEVLTDAVMFELGDKYRRDRVWDAGSDYAAELAEIDDTLADLTDQLGTGAFRKGTRQRERLDARIADLAERQTQLAAQATRPAGWTWVPTTELFKDWWKSQTVEQLNLWLRSMDIQMWWNHQGIQTDMLHLERMAEQWSTPS

SEQ ID NO: 18033 - protein, 546 aa, synthetic construct
MSRKKQENQKITALYCRISLDDGGDNESMSISNQKIMLRDFAEKNGMFLHEYYVDDGYTGRNFNRPSFQRMIADIEAGKIGCVITKDLSRLGRNYIEAGSYIEIFFPKHNVRYIAITDGVDSLTRQEMDITPFKNILNDMYSRDISKKVLSGITIRSRQGKFCGGTPPLGLMRDPEDKGHLIIDPKTAPIIRKIYDYALDGLGCMRISKKLMEEKIPVTHVKSNTERKENYYYWAGSRISHILRNPFYKGAHLVFRTHQKGIRSNTYDIIPREEWEIIENCHEAIVSPEEWDKVQELIDRRPPIMQGNACPFYNLFHGIIYCATCGKSMQVRYEKVGRTNKNRFTGEQREPIDKAYYICQTYNRLGKNACTSHKLEARDLYDLVLKDIQELAKTALKDADAFYQRLSSRMERRYMADASQMQKERERLEARNREIDEMFLNLYTDKAKGILSEQRFMKLTAIMEHEQEENQHRLQELMRMLQQSDAQESEVRTFIREIRQYATIQKLDETVLNRLISRILVGEVRKVDGKKVQEVRIVYNFVGEIV

SEQ ID NO: 18034 - protein, 519 aa, synthetic construct
MPTEYCIYLRKSRQDLEAEARGEGDTLARHRQTLTALAEQRGLPVSAVYEEVVSGDTIAARPQMKRLLSEVEAGFWRGVIVMEIERLARGDSIDQGIVARAFKYSETLIITPFKTFDPSNEFDEEYFEFGLFMSRREYKTIRRRLNAGVQAARREGKYTAGQPPLGYKKIKLKGEKGGSLEPDPEKAPIIQNIFQWFVHDGVCISQIKKRLNQMDPPPPGERNKWTDRHISAVLHNPHYAGYTTSTRRPTRKEVVDGKLKTVRLTAKDVQLYEGRHEPLVPREDWHKAQDILANHPAPPVPAGKGQKNAFTGLIVCGLCGRKMQRTYVSTKGDIPREPMIFCISRSACATISHRYDEVERMVLDTLRGWLTAYSSGRDPFPQRDVSDQLHASLRQFEKHLSDLDARTNRAFELVETGVYTPEIYIERKNALDAERVSVMKRISDIQAELKKLQNEEAIRREFLPKLRHVLESYETAANAREQNQLLKTVIEKIVYTKTVRVTRNNPGNLHLQVFPLLPH

SEQ ID NO: 18035 - protein, 671 aa, synthetic construct
MARKNIQYRTGNEGISYLRVSSKGQVETEYDAEGMSLPAQRRRCAARAHEKKLVLVDELIDPGITATNIEDRKSYQELIKRLKADESIAFVMVYTVNRLHRNWTEGGLMLMQLRSMGVRLISAMEDIDDSTATGRMLLGMLFTTAGYQSEASSEDLQYKMTQKAIIGGTPGYVPIGYQNVSEQFEGRKVNTVAVDPERGHYIPMAFEWFATGHYTYVELRNKLTEAGFRTRPNRRYPSGQISIHSIETMLRNRYYLGYVTWNGQEYKGRHEPLVTQGLFDQVQAVLAAMPGAGTRQRRYNHLLKGIIWCERCSRRLVVMRGRSKSGEFYFYFVCRGRQSKVCDLPYIRASQAEHAVAEHYRTVTLGEDFKSQISELFAGAVNQCRASRRGNRSQMKKRLTELDRQEDRYIEMALDPDWPKEKITAKLRQLRDERKRLTQELAAGEQTIAQAFTNVSHVLDYLDKPYEMYRESGNRYKAALNRSIFNRLYLNVDGDQPNTPPDGSRTVYVASDELSEPFEEIIELRRNWHARQTTGGEGIQALHRHHYTRKNNNSAPVRDAAADVPRPVDTAVSLLEQAFYSPRCSNSDTLAEDRGFEPLRAINPTRVPGERHRPLGESSVGHGSGLDWVLMSTTGLTGPDARRELATRAAPPIIAATRMLSSGRNPRACAR

SEQ ID NO: 18036 - protein, 541 aa, synthetic construct
MPKAISYIRFSTKIQSVGDSTKRQSKYINDWLKRNPDYYLDESLRFQDLGISGFSGANAKSGAFGEFLAAVESGYIEAGSVLLVESLDRVSRQDIDTAGEQLRKILRSGVEVVTLVDNEWYTKESLKDSLSMIKAMLVMERAHEESAMKSTRLRSVWAAKRERAAKGEIMSKRCAAWLKVSEDRSRFEFIPENVKAVQRVFQLRLEGLSHVKIAKQMNDEGFSTLNQFKSVTGGWSQSSVTELLSNRSVIGFKVPSKSMAVKGVSEIPNYYPSIITDEQFYAVQQLKQGSGRKPSSDLPLLTNLFKGVLRCSECGFIVVVAGVSAKRSGIYKCSMKSEGRCNSVGFSRLQTDRALVQGLLYNTNRLALNRDNGSAIGSLQSELEQLQKQRERLIKLAMLADDTESMAKDLKALNSQIKDAEKAVSEVHQREQSSQLETISHLDLTVKKDRIEAQIIIKRIVKEIRLNTARKKCDVFLHNGLKLLNFPLDRVVDGAQWLEVLPLIDGDEFDFEGFTTKPQHIALEESPEWVKEMEEQPNQPL

SEQ ID NO: 18037 - protein, 500 aa, synthetic construct
MKGVIYARYSSDNQREESIEGQLRECKDYAERNGITILGTYIDRALSAKTDNRPEFQKMIKDSAKGLFDVVLVWKLDRFARNRYDSARYKNLLKKNGVKVISARENISEGSEGIILEAMLEGYAEYYSAELSEKVIRGLTDNALKCKYNGGTVPMGYYIDDQQYYQIDPKTAPVVLEMFTKYSEGATMQELVNLLNSRGMRSIRGGKITLNIMNHLLKNRRYIGEYSYRDVVKEDGIPSIVPKELFERVQERLAKNKKAPARHKAEDDYLLTTKLYCGKCGSFMVGESGTSHTMKVHRYYRCVNTKKKKLCDKKAVKKDLIEDLVVSYTMKAIMNDEVMERLIDTLMELQKRESTDLPLLKKQLAETEKGINNMLNAIQAGIFTPSTKQRLDELEETKSQLEVSILQEEMHKPLLTREQIAFFIYRFRKFDVTKREQRQRLIDSFVNAVYLYEDKIILTFNYKDGSKTITLAEVEGSDLSVLGAGKKLFSFWLKSFFIYF

SEQ ID NO: 18038 - protein, 620 aa, synthetic construct
MLGIYCRTSKNRAEKYTIENQREGGIKCAIELGLEYIIYIDDGISGTLDESVRDGLSDLFRDIRKNKITHIYCIDQSRIERDTRTWDFFVAECLNKEIKYYPNGSFFALDNPTNRMFASLMSVVNAYYAEITSKKVRLANARKAKEGKTHGIKPYGYTKGINNEYKIEENEAVHVKRMFKLSLDGIGAYTIANILNEEGIPTKFSKNFKGKIKRKDEYTGAITYHDKSTIKWRGNVISDILRNKIYKGIREWNRNEDKIENINGKPVKTKVKVELITSKVPHIIEPELWDKVQANLSVNKKNVGKKSQYNYLLNGLVKCHHCERLFVGKRRKGSRDNSYKCKGKVYPNSNCDKSRSININKLDTFIIKHLFISKSLKGHLDSLPKTESKHDRLKIKLDEEKSILKKIEKKLDKGYKLLFNEDSGFKDDEVVQSNVLKLKNKKKEKSEVVTKLEQELLLAESSFRDSRTERLLSEYTDESTFDDIKRIIHSLIDYIKIEHHKEEGKMGTFLLNIKYKGYDEVISFMTNWHANKWYWISKYRKGANTPQELEDDREMDKALLKQFGMNKDDIELTGFQKESGLTDDEIAKMNPFSSKYEGAETKEFIYDLIELKTEEIIDFN

SEQ ID NO: 18039 - protein, 545 aa, synthetic construct
MKIAIYSRKSKYTGVGDSIENQVQMCKDYANAKYMGQDLEFATYEDEGFSGRNLIRPEFQKLINNINSYDILMCYKLDRISRNVADFSSTLEVLQDAKCDFVSIKENFDTSTPMGRAMIHIASVFAQLERETIAERVKDNMLELAKNGRWSGGRTPLGYKSEPVQYIDEEGNERKAVKLVQDQEELELVKLIYDTYLKQGSLHKTEVWFTQHKIKSNSAVLLEKTSLKIILQNPVYVRSAPEVINYLKDNNWNVYGEADGVHGLLTYNKTESVAGSNGKVTKRVQNKENWIAAVSNVKGIIDADTWIRVQEQFKKNKNTFPNLGKTHTAILTGKLRCSKCKNYMLVQHGRTSVKTGDKIYYYICSMKRKSKGELCNCKNIKANEIEPAVLNLIEELATNKEEFKNKLREKNTASKLDNDIKLKKSALEKQIADKEKQITGLVDKLSLDDSIADILINRIKNYKAEIETLKADLLNISAEIEQNNNYKLAESFLDGFFEQCKDISSQPKEKQRQLINSYVNYINFDSDTEEAELKLYEPGEIKKIN

SEQ ID NO: 18040 - protein, 472 aa, synthetic construct
MIATNKVAIYVRVSTISQAEEGYSIDEQINKLKAYCDIKDWSIYDVYSDGGFSGASTNRPALERLINDAMKKEFDTVIVYKLDRLSRSQKDTLYLIEEIFNKYDIAFYSLAENFDTSTAFGKAMVGILSVFAQLEREQIKERMLLGKLGRAKAGHSMMWTNPPFGYRISKGDKVVSINPVQSVIVKRIFSEYIAGKPISKILTDLDTEGHVGRSKPWSLTTIKDILKNPTYWGKIRYQGELYDGLHEPIISEEEFKLAQVELRRRQDETFSRTNNPRPFQSKYMLSGLLKCGYCGSTLRIYVAHKRKDGTYPPLKYQCANRFSKDTKKRCNSRQYDKSELEATIISKLNQLRLNNDIEVVTKPNINKDELKQEIQAIATKLNRLTDLYVDGIINRDDLQKRRLALENQKSILESELAIDHDELLTRRKQTILEELGRLNLIEGSYVEQTTIVRKVVKEILVKTGSIDLMLDI

SEQ ID NO: 18041 - protein, 487 aa, synthetic construct
MIALYARQSVDKPDSISISQQLELCRYEARGAPCRCFADRGYSGKNTERPAFGEMMAAVAAGQIRTVIVYKLDRISRSVLDFARMMQQFEQQGVQFISATEKFDTGSPMGRAMLNICIVFAQLERETIQKRVADAYAARSDRGLYMGGPVPFGFRRIPAVLGGVHTSVYVPEPEEAAQLSLIYRLYADPAVSLGEVAARLRAEGMQKRGRDWERARIREVLRNPVYVQADRQVYAFFAARGAQLVNPQSDYIGENGCYCYKSRDASGGEGCLQNRRIVLAPHRGLIPADLWLACQQKNTKAPTVRHGDGSWLSGLLYCGACGSGLTAKQGSRGRYLYCARRLHKGVCSGIGTLEAGALEQAVEQLVLDRLNGLGTLYGETLPDPALTGLEHALTETEQELTALLEKLPQADTALFSYINNRVTGLHLRRAQLEGQLAEQTAKASGQGILPDAALWHGMSPADRRRAAGVLIRRVEADPEQITIYWRL

SEQ ID NO: 18042 - protein, 596 aa, synthetic construct
MLQSKNQLRDTILRIAIYLRVSSDEQAKNGEGLDGQLFKCKQWIQQNHPNAVITMFSDEGISADKIPMHMRHGLGKMMSEARKGQLDLIVTFKYDRLARKVEESETIYNQMDRIGVPVWDISGDKKLNQASSADKLTRQILASVAEMEISNTKERIRAVKENQRATGKFAGGELPYGFRWNAEEEKIVEIEEEIRVWLSIIHKYMNENKGTVVIAKELNEEGISFTKGKKGHGRSDKWDKENVRNLLKNPTICGRLANGVLNRYYDADGKPKVSRRPPREWTLQETPLLKEIVPLDVWYKIIERMEQKRSTKVSPKQMATSWLLSGVIKCTHCGSQTKTKDSGVRKSGKSFRYYVCSNTECDNPTRLRKEDIEHQVLSELQGMFTTTDKQEAVELAVGYLSTFGETKGAEISTMELQLDENKAKLNRVESDYVNGDLSAKAYSMAVERIDNLIEELTTQLEAKRISMHAQQQHLTNISVAMEVLSEYTDIAGQDDPVTFQRKRAVVLQLVDHITVVDGEPHIVLRAHTGSEVPAHLQRMMDGKMEQVMKEVITGSREVSAASAAWVNTMSHRYSLMILHPVMDALSSGCCRMPEYC

SEQ ID NO: 18043 - protein, 581 aa, synthetic construct
MTTRTPAGYAYIRHSTKRQGGDDKDSVTRQKESIRALAEHHKVEIPDENFFYENGVSAYSGKNLTHGKLKDLIDQIASLRIRPGDYVFVESIDRLSRQRLLQAKELVNGILEKGIILVTTIDNQRYEKASDTNGIDDLSQDILLSVIAKRAHEESRTKSVRRLSAWTKAKNAAVENQVPFNAKRPPFGVRYNESTNRFEPHPEQVAELTKIFESLKLQGVTATIKEINKDSMVRWTNNRVKNIFETKYPLGFMYSQVKKEGKMVFDKYIENYYPQIISYELFEQARQSMQSRRVHRRAGRASQDNTNIFRHTAMCGICNESMFFANHFGSTTKRYFYMSCRSNFEQEEKCGNRFRYDYAVAVLLHMIGSTFFWDYLSKKPALFEAVKKSEFSVGTANGTKIETPEEMDNYAKIGKQFMRFLEGNNESKSLNKEKIEKEIIFSRKKMTLENLEKTVESITDGAVPAAILKMLMKAETEVAKAKEELEILTVNSIDTSAKLNVKSVEDFVSLFKTEHGRLEIINFLATNGLTFYFNFEKKTKMLEAKVAVNKEVMATYNIKTEIDVLEQYGFGNLAEEFKTTI

SEQ ID NO: 18044 - protein, 507 aa, synthetic construct
MGKVYSYIRFSKKEQGAGSSTARQLKYAEEYAKKHGLVLDSTLVDDGLSAYHAKHLSKGALGLFLAAVESGDVEPDSTLIIERLDRLSRQKPRQAQALLSQIIDYGITVVTASDGAVYNEKTIDDDPMKLVYSLLIAIRANEESETKAQRSKAAIQHNINQFQKHKIRSLGGAVPAWFDRFNSAQGWEYKLNPKTDTVRRIVELSLNGTGAKTIARMINSEGHKPFGKSENWGMTSVVSVLKNPALFGRRVVNSNGSVMLDDYYPAVVSRKDFDAVQYRLNKRKNTKGSEKFVNLITGLGKGFCTCGYCGSAIATQNQIFKTKSGERIVRRMHCTATKESGQCHSSKRIEKTEEAVLMFMMERNLDTLKAGDTQSYEIEIDTIDKKIRKMVSLQLALETSELPDDFLDSLTQLRARKVELSDKAAKGGIDIELNEQFKALGEKAIKLENSEARTTVRQIIRDSVASIRIWTCGVELVNEPDIAIEFKNGTRGLISIRGQEIIAQQLS

SEQ ID NO: 18045 - protein, 563 aa, synthetic construct
MKQPIAYSYVRFSSPEQAKGDSFRRQTEQARLYCERNNLQLADFTLKDLGLSAYHGNHIKDGALGEFIEAVKNGKISQGSYLLVESMDRLSREKISIAQARFLNLLELGINVVVLKGERIYTAESANDLGQIIYSLIEMSVAHEESEKKSMRLSAAQANKRKQARENKTPTGYRPPDWITTVKDSESGQLRYEPIPKRVDVVRRIYNLNNSGMGAIAIARLLNAEQIPPWGRSKTGWQTSYIKKILKARTVLGEYHPHKTENGKRVPDGEPISGFYPAVVDPNTFKLAQLTMTARDNRSGGIRKNRVNNLFTGLAKCKHCGNTMHFVDKGRLPKGGEYLLCSLAKTGATNKDGISCKRASIRYQVAEDAILTIAATLNLKMETPSNKREVEILREQLSKVNADLGTAESAIGRITSAIAELPDSSGLISKLAELEQQKRDKKSEYKALEKRIDELELTPQSSSVWKELKNTLRTLRVEAADRNKVELRTKINSQLVNCIDLIEFDNFAKVITVHIDKNRSVDIRFEEKMKGYTVKPSWGTREFLPNTFVIKCISGSFEKRAND

SEQ ID NO: 18046 - protein, 515 aa, synthetic construct
MKTAIYLRKSRADLEAEARGEGETLAKHRSTLLKIAKEMNLNVLAVREEIVSGESLVKRPEMLALLEEIEDNKYDVVLCMDMDRLGRGGMKEQGIILETFKRSNTKIMTPRKTYDLNDEWDEEYSEFEAFMARKELKIITRRMQRGRIASVEAGNYLGTHAPFGYDIHRLNKRERTLTINSEEASVVRMIFDWYANEDMGASAIRSKLNDLGYKSKLGNEWNPYSILDILKNNVYIGKVTWQKRKEVKRPDAVKRSCARQDKSDWIIADGKHEPIIPESLFEQVQEKLNSRYHIPYNTNGIKNPLAGIIKCSKCGYSMVQRYPKNRKETMDCKHRGCENKSSYTELIEKRLLEALKEWYINYKADFEKHKQDDKLKETQVIQMNEAALRKLEKELVDVQKQKNNLHDLLERGVYTVDMFLERSNVVSDRITEITSTMENLKKEIKTEIKKEKVKKDTIPQVEHVLDLYFKTDDPKKKNNLLKSVLEKAVYKKEKWQRLDDFELVLYPKLPQDGDI

SEQ ID NO: 18047 - protein, 468 aa, synthetic construct
MKCVIYRRVSTDMQVEEGISLDMQRLRLEQYAKSQGWVVVNDYCDEGYSAKNTERPAFQKMIKDMKKRQFDIILVYRLDRFTRSVSDLHSILKTMDEHNVKFKSSTEIFDTTTATGRMFITLVATLAQWERETTAERVRDSMQKKAELGLRNGAKAPMGYNLNKGKLYINTTEAEIVKYIFEMYKTKGIISIVKSLNSRGVKTKQGKLFNYDAVRYIINNPIYIGKIRWGDDVLTDIAQEDFESFIDKNTWYTIQQVQSNRKIGKVRLQNFFVFSNVLRCSRCGKHFLGNKQVRAHNRIVMGYRCSSRHHKGMCDMPQIPEDVIEKEFLNLLENIIIDLDDTVDQPVELSNLQEQHNRIQDKKSRLKFLFIEGDISQNEYKKEMLIITQEEITIQKQLATTEDTVSSIEIKELLNRLKDEWPHLNNESKKAAVNSFVSSISVEVVKPARAGKNPIAPVIEIKDLQWKY

SEQ ID NO: 18048 - protein, 528 aa, synthetic construct
MNRTAARSVTVIPPTINPLTHLSRVAVQKRRVAGYARVSTDSDEQFTSYEAQVDYYTQYIKRNPEWEFVKVYTDEGISGTNTKHRIGFNEMIADAMSGKIDLIVTKSVSRFARNTVDSLVTIRKLKEKGVEVYFEKENIYTFDGKGELLLTIMSSLAQEESRSISENVTWGQRKRFADGKVNLPYKQFLGYRKGADGFPEVVPEEAIVVHRIYTRFMEGLTPGAIAKELTADGIPTPSRKQRWQTSTVESILQNEKYKGAALLQKCFTVDFLTKKRKVNEGEVPQYYVEHSHEPIITPEEFDKVQTELARRKRISRQYSGKSIFSSRIICGDCGSYFGSKVWNSTSKYRRVIWQCNSKFKGEHKCETPHLDEETIKARFVTALNAIIESKDNILEDCRLMQATLTDCTGIDTEIESLLEEIDVVTELTKRCIAENSQMAQNQEEYAARYNGFVERYEKAKARLEQLRTTKAAREAQAEAIGAFMFEVQELDALTEFDEKLWLTIIDTITVHADGRMTFKFQGGTEIEA

SEQ ID NO: 18049 - protein, 434 aa, synthetic construct
MERVVERVDALIPAQPKALRVCAYARVSTGKDAMLHSLSAQVSYYSKMIQSHNGWMYCGVYSDEAVTGTKRERAGFQHMIEECRQGNIDLVITKSISRFARNTVTLLQTVRELKNLGVDVFFEEQHIHTMSADGELMMTILASYAQEESLSASENQKWRVRKAFESGEIINLRFLFGYDITPDGIQVNEKDAAIVREIFARFNSGESMSSICRDLDARGHKGVLGGTWCAERMRNTLSNEKYLGNALLQKRYRNNHIEKKLLPNRGELPMYYAEGTHEPIIDQATFDKAQERLRILAQQTSTRKKPTHSVFSGLIRCGLCGNTYKRVTYRKKHYWNCTTFQTKGKSECAAKRIPEETLEVLTCEVLGEGSIDSNMVRSKITAIRAEKNNVVVYCMDDGSEIVKRWKDRSRAESWTPEMKEKARQRALQARRKKE

SEQ ID NO: 18050 - protein, 466 aa, synthetic construct
MKKAIAYMRFSSPSQMSGDSLNRQRRLITEWLKVNSDYYLDTVTYEDLGLSAFNGKHAQSGAFSEFLDAIEHGCILPGTTLLVESLDRLSREKVGEAIERLKLILNHGIDVITLCDNTTYNIDSLNEPYSLIKAILIAQRANEESEIKSSRVKLSWKKKRQDAMESGTIMTASCPRWLSLDEKRTSFVLDPDRVKTIELIFKLRMERRSLNAIAKYLNDHAIKNFSGKESAWGPSVIEKLLANKALIGICVPSYRARGKGIIEIADYYPRVISDDLFYSVQEIRLAPFGISNSSKNPMLINLLRTVMKCGACGNTMIVNAVSGSLHGYYVCPMRRLHRCNRPSIRRDLVDYNIVNELLFNCSKIQPVENKKDVNETLELKVIELQMKINNLIVALSVAPEVTAIAEKIRVLDKELRRVSISLKTLKSKGVSTLGDFHDIDLTSKNGRELCRTLAYKNIRKNYNKHR

SEQ ID NO: 18051 - protein, 541 aa, synthetic construct
MASNSAVKKVVTVIPVKPVEVVKGFALGAKKRVAAYCRVSTDLKEQETSFESQVQHYTDTISNRMDWDLIDIYADEGISGTTTTKRTEFLRMINDCMAGKIDMIVTKSISRFARNTEDCLHFVRKLKDKGIAVYFETENIDTLGSGGELLLTILSGMAQDSSRNQSDVTKWGILRQFESGRVLVNTTRFLGYDKNDNGELVINEEQADLVRRVFREYLEGKSYNAIAKGLTKDKIKTVTGNEKWWDSTISGMLENEKYYGAALLQKTITVNFLNHKRKANKGQAQKFMVDDNHPPIIPKEIFDKVQDEKERRALLRGNLVGDRHKYSSKYPFSAIVFCGNCGNIFKRRQWNSTNTSKKVVWQCKTYIMDGKDACGAKAVDEIVLKNAFVRMFNGIYENKQSFIKTLTENIETIILQRPDSRETEALDNRIEELKNELKRLIRFQVNNGVDAEVYNEEYKSISEELEEVRKKRLEQDKVIESKDGLKQRFDEILETINGRDSLLEEFDEEIFNALVEKIEILTPTHFVFELKSGMRVEEVVK

SEQ ID NO: 18052 - protein, 564 aa, synthetic construct
MEKPFVYSYLRFSSAKQALGGSSDRQTTYAQRWAADRGLTLDESLSLKDEGLSAYHQAHVRLGALGSFLRAVEDGQIPAGSILVVEGLDRLSRAEPIQAQAQLAQIINAGITVVTASDGREYNRERLKVQPMDLVYSLLVMIRAHEESDTKSKRAKASMHRQCQQWIAGQYRGIVRGGRYPQWLRVVDKKFEVIPERVEAIKIAIKLLIEGYGHEAITHKLSALGLQITDVGVSKTSLRKVLGRKDLIGVNVLNIEGIEYCLEGYYPRVISDDEFNELQSVMASRHRKQIKGEIPAVLTGVGVLMCGYCGKAVVGQNIRGGKLADGKPRDYLRRAMCSGEYVANKCPHPGTFSIGPLERAVLNYCSDKFNLSQLLKGDGEAERCKAEINSKNSDLKKLELQLKRVTDALLAAEDNSPVAFIRKAQELESKILESQAELQILNQKLARLGSKNIPEIANTWKALVADALELDYEARMKLRKLVYDNFEKIVVFQFGVMPHQTSPEKVMDILLISKVGTTRMLRVDRKSGAWIAGEDVNIGGVDLPSPERARKPRRNASPIKVIQS

SEQ ID NO: 18053 - protein, 557 aa, synthetic construct
MEREDLPNLRALGFEETELKELGLWEPASGNPANLAEMYVRRSKKKDTLSTLREQVRRMCAHADSEGKRIRHVWFEQKSASKSYVRREEFEKATAAIADAGLSKTLYVFKTSRLSRRGMGQVGLLLDKFEEQSARIYVVAEHIDSTRQRMILAILSEQAREQVTDLSEFVKLGIDAHKAEGKWTGGVTPFGLRTAGGRLEHDPAEYPLARRIAEYLLDRKTPNWIANQLNSEGKVTRHGKKWSGPGIISLAHAVTWAGLVAHRDRALDEKGKWTGKYHRGGTPLLDKKGNPISCGEGVITFAEHVKINAILASRAQKGTSIGDRTRGKREIVALLTGTLLCGLCNGRMVNGGVNYRCYARQVEGEHSCKGVSTERTRVESAVEVMWLNHILSLSPDSPTIRAIAREWLSYQDPEKEARKAHVSAALESAVGREMKLEKEFFVMGRMDEDKYDRLREQVAAQIAELKAELAELSQDADLTPLMDPVSLADMWQDAGISGQRALLKAAAKGITLLPSKGRGDRTPILDRLVPEWRDESVNPAAEAAWDRWEARWAKSAG

SEQ ID NO: 18054 - protein, 493 aa, synthetic construct
MKPQVDLYVRKSKRVSEGTDALSIRAQEDRGRRWADQNGYGVRKVWRENESAFRAVERPEFEKALAAVLSDEVPALWCFAMDRFSRKGARSVIDLLDSGKRVVFDYEDLDTSRKRDRRWIIQRAEDAFEYSDRLSYNVRTTKERQRTEGKWLARPPYGWTVDKNRKLHNNPKTWPVVKRIYAEAEAGSSTRVIAKGLNADKIPGPGGGKWHSATVRQIVHHPVHEGWLTVSVKKTTPVAYLNDGKRVRCAVKDEATIPADKAARARRVISGFQLAANPEAPRRGRAETTMVGLCVCAGCGYNMARSGGSLLCNQQRSGIACPAPASVSITAIESYVVDAWSARLGASDPEDALLGIVADRYAALNAPQETAAISEAKAALRGVEQEAKQLAADYKAGMFNGALRAHFANLAADLDLRKAEAEERLSALESPRVDITFLLEGYARQAYDNAEQSTRRDLVRLAIERVTVTKAPYKGARFNGAERVRIEWAETAA

SEQ ID NO: 18055 - protein, 516 aa, synthetic construct
MRYAAFYGRYSCERQNEQSIEGQLRICQQYADQHDLKIVETYIDRAMTGTNDHRPAFQKMLADCEKNVLWDIVLVYAIDRFGRNSIEIAVNKQKLKKNNKMLISATQRTSDNIDGTKNLDGILLENVYIGLAEYYSAELSQKIRRGLHESRMKGQFSGGILPYGYYVENKKVFIDEERAEIVRFIFQQYAEGTTVKEIIRKLTEKGLTYRGKPFAMNTVYQMLRLEKYIGICRYDEGVYDNIFPAIVPKYIYEDVQKILQTNKKGSKSTRTEFLLKGKLLCGYCGKNMHGDSGTSHTGKTMHYYNCMARKRNNSCNKSAVSKDKFEKLITDTTVQLFEDQSNIDLIANEIMNVHKTRMNKKSVLSILENQRDEIKRSLANIMKAVEKGIFNATTQSRMEELEKQLADVESNIAIEQYKEKTILTKENIIDFLTNAILQKPKKMLQTLIQKIVVYDDKIIIYYNFTDKTNPDESNHRDSFYYPGSDSSVMVECLYRKLNEKKSIEFSIDFFNCYLGA

SEQ ID NO: 18056 - protein, 508 aa, synthetic construct
MKSAVIYARYSSASQTEQSIEGQLDVCKKYAQDNDLQIVDTYIDRAMTGKNDQRAAFQKLLSDSEKPVTWEIVLVYAIDRFGRNSIEIAVNKQRLKKNRKTLISATQRTSENIDGTKNLDGILLENMYIGLAEYYSEELSQKILRGLNESRKKGFYCGGGVPYGYKVVARKIVDDAEKADIVRYIFSQYALGVYVPTIIKALTERGVYHNGKPFAPNTVYHILKNEKYLGIYRNKGEEYDNIYPQIVPIEIFDKVRAKVQKNKYGKRSVQVTYLLRHKLKCGYCGHPISAESGTSSNGEVIHYYKCHGRKKYRNGCEKTALRKEFLENFVLETILRELSKPDTMNKVVDGLMQIQEMQNKESPILKTLLSEKRQTETALNNLMSAIEQGIISATTNKRLHELENKLTELERNILIEQSKTKITLSEDKIRKYYEQALLKEPQMLINLLIKQIVLYNDKMIVYYNSPIQTSPDGNSQGFSFYDEIAFMPYIIQNKPNPAMRAIRVIMTV

SEQ ID NO: 18057 - protein, 587 aa, synthetic construct
MSTDIQLKGDSLRRQTERSKQYADEHGLELVEDFKLEDIGVSAFKGDNLSSGNLGRFLDAVKAGRIPEGSYLLVESFDRLSRQKLNASVSLFFDITSNGINLVTLSDNQLYKAGEAEFAQLIMSIVVMARANEESEMKSQRLSAAWDAKRRAVGEKKLTGLCPAWLQLSEDRKNFHVIDDRAQVVRRIFEDSASGQGSFVITRRLNDSGVPAFGRSTGWVQSYVTKIIQARAVLGEFQPHTKQNGKRVPLGDPIPDYYPQIVDENLFLRAQFARGKRRIEGGGRKGEALRNLFTHLATCGYCGSPMHFLNKGIGPGGGTYLKCSHALRGLDCVPTAWRYQDFERSFFLFVNEIDLAEMLRASSQKSEVLILDERAVALAEKKSELELKRERTYALIDDGAISVDFLTTKLRECEAELVSIEQQIVDVDRQRQEIREQQSISPDELRLLIDQLQQMKGPEAFSQRSMLATRLREIVTELKLEVEGSRPRQGKAAALLDAADIDPQERSQILDLIERSDREAQRHNRSFSVVLADGVSRRVVLKNDDPASFVAEVLVGKDGAISGSDRGMPIGWSDGWDKVFDEPATAQ

SEQ ID NO: 18058 - protein, 544 aa, synthetic construct
MIRAAIYARFSSDRQNDRSVDDQIASCRELCAREGFTVVLTFCDREISGASTVNRPGFQNLMRAAEALHFDVIVAEDVDRISRDQGDWHTARKRLDFLGIAIHTASGKVGKLDGALRALMGEMFLENLVVHTRRGLESVIRDGRHAGGRAYGYRAIAGKPGELEIDQAEAEIVRRIFCEFVEGKTPREIAAGLNADGVKPPRGKNWNASTINGNAARGHGMLINELYAGRIVWNKVRMIKDPATGRRVPRPNRKDQYRSVDAPHLAIVDDATFKAAQVIKAGRSHQGASHSRKAVRPLSGLLRCGSCGAGMSAIGAQRKGKPHRMQCSAFRESGICSNGRKVSRPAIETLVFEGLREELANPEAIAEYVRTYNAERRRLAKQSGDREKHLQRRNGELDREIDRLITNIAKGADFDTYNPKVNDLAAERKRVKAELAQIAATSEIVTVHPAAIERYLADIGRLAEVAAEAAELDEPGLVATLRQLVQAVVVHAPPGTDELAIEIKASLSELTLPGPLLKRSNGGVTVGSGGGTRTPDPRIMIPVL

SEQ ID NO: 18059 - protein, 594 aa, synthetic construct
MDSNASKPSAYSYVRMSTDIQLKGDSLRRQEQASKLYAEQNDLQLVEDFKLEDIGVSAFKGANVVSGALGKFLTLIKSGGVPKGSYLLVESLDRISRQQIMDSLTVFFDIIRNGVSVVTLADSHVYRAGEAEITDILYSLIILSRAYEESATKSLRVGEAWRNKRDNASHKKLTKMAPAWVQLREDRSTFDLIPEKAEIVRQIFQMADAGHGSFAIARRLNQTGVPTFTKSNGWHESYVTKILRSRAALGEFQPHRYDDKGKRIPSGDPVADYFPGLVDEDQFLRIQASRRRRLVEGAGRKGPEYRNLFTKIAKCHYCGEPMRFVHKGRPPKGSQALKCTNAVRNLGCESTSWRYSDFETSFLFFVKEIDLTATLRAATDNSERQTIEQKIAANEEKLHQLRDKQEATFELVSSPGPSAAFLKTKLDQIADEIVGIEQQLVKLKNQLADTQLLPSISAFELRSQIDSLQDMSAPDIFDRRAAVANRLKSIVTSLRVAANGSRPRLKTIADALGDQGIDEEYREKLLAHIDHVNAVTQSYSRTFTVTLADGVQRLVVVKGDDPTDFVSEVVIEANGKTTGSILGKPLGYPPVTTS

SEQ ID NO: 18060 - protein, 578 aa, synthetic construct
MDRPVLVYSYVRMSSTAQTKGDSERRQIEQAKAYAEKHGYTMAPAILDLGVSAFKGANRKKGALGGFLKAIKEGLVQPGILVIEAVDRLSREEPMDILMLLRDILSTGMSIHLLSLNQTIDQKSFAEVTWLLPAIASMAGLAHTESKQKSQRIEAAYRERQRQARQGVTLKGNYHPAWLRRVYHPDGTVEHVIIEEVAAAVRRVFQLAATGMGSHSIARTLNSEGVPVVPACFGDSEEAKERAANRRWYQAYVGRLTLDRRVLGEYQPKKTDGDRSSPLGDPIPGHFPAIISQEVWDQVQAAKHPKHGKKTGGRKLQMSNLFTGGMAKCDHCGEPMRILGRWNADKTKERLYLRCASHQEGGNPCDNKRTPRYDWFEKKFFKALPDIPWRGLLQNIEPDDGVEAVTRQIEEISVRIDSLQKVSTRLLRLIESEDEPDAEIFTRRREIQADIGDLLKRKDVLIRDREGLRLVAGTDEHVVDEAAELILMMEGQSETELFITRQKLHVLLWRIVEGAYFTGYTPGTARVLIRGGLILTIPLDEFGEVRSGYCKAVQRVLPNDGIPPLEPNEAGTQLIAAE

SEQ ID NO: 18061 - protein, 496 aa, synthetic construct
MEEKKRVGIWIRVSTEMQVKDDSPEHHEQRARYYVQSRDWHIEEVYRLEAVSGKSVMDHPEAQRMLKDLRSGRITGLIFSKLARLARNTKELLEFGDIFRKANADMVSLAEQIDTSSPAGRLLFTILAALSEWEREEISSRVLASVPIRARMGKPLGGQASFGYKWQDKILMIDQKEAPVRKLMYEIFLECQRKKTTSDRLNSLGYRTRNGARFSDTTVDRLLRDTTAKGQRLANHTKSLGDGKQWITKPEHEWVVLPCPAIIDEHLWQQCNSILDEQTTKRTKIGRKSEYLLAGFVKCSCGKSMYVTSTAKKFTCKVCKNNISVEDMDDIYQGLLKGYLNDMRPEMYIDEIDTQLKEKEQLLSSTIKKRAQLRKKMDDLVTLRLNGELDKDHLAELYKPYETQVHQLDKSVPELQSEIDLKRAQMTSSEFVLTEAKALYEEWHNMLFPQKRAIVETVTEYITIGQDSVNVGLAYLPTTTPQTSQHDFKGSLRQLA

SEQ ID NO: 18062 - protein, 496 aa, synthetic construct
MIYIRLSVYRGEADPTTSPASQEARCRAYAESKGWDVVDVVRDLDVSGSDKGLRLDRPGLASIRERFHDVDVVIFAKLDRLARNVLDFNRFAEEARTHDVDLVSVAESLDLSTPGGRFVAQILAAFAEMEAATIAERTKLGKETAVTKLGRYGGNTPPYGYRIVEHPSGRGSALEIDPEEAAHIREAARLVLDGGSLYGAAQMLNETGSKPHRAERWGWSTLRAVLVGDAVLGRVKHRGRLILGDDGLPEVRWEPIFTLEESQRLRAILARPSDLPKDSPARAVAEQEHTTRTRAARLLSGLLTCSGCGRPMRAGVFPRRGEKVGRYVCSAEGARCPAPVTITATLVEDYVAEVFLGMAGLMPVFEVRTMNRDAAEVAQVEQAIAETTDELRAPDADIAALVERLTILRQRRDELAAQPAEPEVVKVDTGEMMAARWEREDVAGRRALVHSVLTGPMTVHPGKRGPKRLDPDRLDIPWRWEDIDVDAEIADAARVD

SEQ ID NO: 18063 - protein, 524 aa, synthetic construct
MNLAHKDIEPGPGTPAVIYCRVSSKAQTTRGDGLGSQENRCREYADYKRYAVQGVFTDDVSGSLAERPGILEMLAWLRKHKKETPVVIIDDISRIARDVRTHFKLRELVTECGGTLKSPSIEFGEDSDSILIENMLASVSQHQREKNSEQTKNRMRARTLNGYWVFHAPIGYKYARKHGHGNVLVRDEPQASILQEALEGYASGRFETQVEVKRFLESQPAWPKDLPDGQIRNQRIAEILTRPLYAGYIEVPNWGVSLRKGQHEGLIDFETFDHIQKRLQGTAKAPARKDINADFPLRGSVLCNDCGKPLTACWSQGKSRKYPYYLCPTKGCESYRKSIKRDELEGAVEGLLQQIEPSARLYELVKTMFRDAWNHRLAKASDTAQSMKTSIKRIETQIEQLLDRIVDANNDSVISAYEKRIAKLEREKALAEEKLSGLGKPRLTLEESFEHAMRFLSSPWSIWKNSDLHLKKTVLRLAFSEPIPYCRKEGLRTPNLAFPFKALGEFCSGKCEMAHRGGFEPPTP

SEQ ID NO: 18064 - protein, 577 aa, synthetic construct
MVVANRTDNFTTNTDTKVKKVGTLYRVSTKKQVHFSENGGDIPTQRKACHDFIRSMPGWVLVEECEYYEKGVSGFKTRAENRDVIQQAKEDALQGKFDVLLVFMFDRLGRIDSETPFVLEWFVQQGIEMWSVKEGQQKIEGQMDKLMNYLRFWTANTESVNTTHRVKNSHDQMVKEGVYRGGTVPYGYKIVESGEISNRGRLLHKVVIDPNAAEIVKMMYDLVDQEGYGQYRISKLLNEKGLKTNRGKPWSSPSVSVILRNPLYKGLMAINRGSSAEVYSEKPNPELIIIDEEKWNRVQAIREGRNPENRKKENKVTVLMSTKSTLLLIGMSRCGCCGNVLSPTWNKKDHKLKDGTIQSYRYPKYRCSGKGAQKAITCTGQTTYAQKKLEGIVLAEVYRYLDHLECVDIDEQLKKLKSEKVSDEEIVLKNLKKQLAKSTQELTALDDELMKVVMGKSPFSREKISTIMSDKESEVNDLKSKVDELEQELNSRNVKRTELEVLQKRIPIWRDVFRRSSIAKQKMMLNTLVDQVDVFRNKVVIKYNLRIGSFIAAMGIDTKERLGNKKLMAQNVITNKG

SEQ ID NO: 18065 - protein, 509 aa, synthetic construct
MRRAISYIRFSSERQLKGDSVRRQSKLVTDWLDKNPEFYLDSSLSFKDLGKSAFSGKHLKGGLGDFLTAIEKGLVKAGDTLLIESLDRLSRQDIDIASELLRRILRAGVDVVTLSDGEHYTRESLKDPLSLIKSILIMQRAHEESLRKSERVQAAWNRKKELISEGIKVSRRCPAWLRLNDDRRTFTIIPDKVEVVKRAFDLRLQGLSFWAITRTLNDEGHLSLNQYTPKQKGWSDTAVKKLLRNRAVIGCFTPAGREEVQGYYPAIISESLFYRVQQLNTGQYGRASVSSNPLSVNLFRGIIKCSECGATIVLGGYALKRFGMYRCPNRSANRCSAKAISRKQTDATILYMLALCDRFETENTDIIDSFKLQREDLQRKISKMAELAIELDDMTIITEKLRDMKNALSKLNHDIEEETKRIKAITTGSLKDIDRTTKEGMIETQLLIKGVLKEIVIDAAKRRCKVTFHNGKAITLPITENPSEDVTEAIQSLSEVTERGLIDVDEVII

SEQ ID NO: 18066 - protein, 506 aa, synthetic construct
MRTVITYLRFSSAIQGAEGADSTRRQNDLFKQWLKKNSDAQVVASFSDEGLSGYKGKHLTGQFGDMLARIESGEFPEGTILLVEAIDRIGRLEHLETEALMNRIIAHGIEIHTLQDGLIYTRDALSDDLGISIIQRVKSYVAHQESKQKSFRVSQKWKQRAKLALAGEQRLTKMVPGWIDPDTFKCNEHAETVRLIFKLLLDGESLHNIARHLQANNISSFSRRKDANGFSVHSVRTILRSETTIGTLPASQRNDRPAIPNYYEAAIDAATFNKAQEILDKNRKGRTPASDNPLTINIFKGLFRCQCGASVHPTGTKNKYAGVYRCNNNPDGRCDVPPLKRKPFDKWMIDNFLGMIDVGNDGEAEGKIASLQHEVEIVTTRIKKATALLLEMDDIDELKIQLKELNQKRTELQTTIDNMRRKASLTDKELPQLKDIDLMTKAGRVECQLILSKHLKGLTLGKDSVTVTLQNDTEITIPTNPLPLNDGSPIFEIADKELLDIDAYQL

SEQ ID NO: 18067 - protein, 506 aa, synthetic construct
MRHVITYLRYSSAIQGAEGADSTRRQNDLFKQWLKKNSDAQVVASFNDEGLSGYKGKHLSGQFGDMLSRIESGEFPEGTILLVEAIDRIGRLEHLETEALMNRIIAHGIEIHTLQDGLIYTRDALSDDLGISIIQRVKSYIAHQESKQKSFRVSEKWKQRAKLALAGKQRLTKMVPGWIDPDTFKLNEHAETVRLIFKLLLDGESLHNIARHLQANNISSFSRRKDANGFSVHSVRTILRSETTIGTLPASQRNDRPAIPNYYEAAIDAATFNKAQEILDKNRKGRTPASDNPLTINIFKGLFRCQCGASVHPTGTKNKYAGVYRCNNNPDGRCDVPPLKRKPFDKWMIDNFLGMIDVGNDGEAEGKIAALQHEVEIVTARIKKATALLLEMDDITELKTQVKGLNQKRTELQTTIDNMRRKASLTDKELPQLKDIDLTTKAGRVECQLILSKHLKGLTLGKDSVIVTLQNDTEITIPTNPLPLNDGTSIFEIAEKELLEIDAYQL

SEQ ID NO: 18068 - protein, 601 aa, synthetic construct
MKKEVKVIKGDTTLKRTASGCVERSIKRVGAYCRVSTDTEDQINSYNSQVEHYTEFIQKNNEWTLAGIYADEAITGTQVDRRIDFQRLINDCMNGDIDMIITKSISRFARNTLDTLKYVRKLKEFNVAVFFEEENINTLTMDGELLLTILSSVAQQEVENISANVKKGLRMKMERGEMVGFQGCLGYDYDPETKSISINEKEAEIVRYIFRRYIEGVGGMVISRELEEQGYLSPRGNKRWTETTVLGIIKNEKYKGDLMMGKTYTVDPISKRRLDNFGEQDKFYIENHHEPIISEEDFEKAQGIRLRRSKNRNTVANNGGKREKYSRKYAFSSMLECGFCGHNLSRRNWHSSSEYTKVIWQCVNATKNGKKYCPHSKGIEEEAIEKAFMESYRQVCHNNVEITNEFLKTVEEELKDNSLAKDLKKITNQLDKILKKEKDLVELRLNESISMDIYQDKYNEIAISKEKLLAEKRTLEVTLTDEKALKKRLEGFKKLLESNKYLEEFDRAVFESIVDKIIIGGTNDEGEIDPAMITIIYKTGKKDSQDGRLFKSRRKNAKKVNEETDNKLYPHSSDEVNNLYSYPIDNTCGVCGSARKSLETF

SEQ ID NO: 18069 - protein, 548 aa, synthetic construct
MIQTNSNHFSFKAAIYCRLSKDDEQKGESASIQNQKELLENYVKSRGWSIYDVYIDDGYTGLNTNRPSFQRLIRDIENKKVDIVITKDLSRLGRNYLQTGYYTENFFPKNNVRYIALNDGVDTFQENNEIVPFKNVLNEFYSRDVSKKMKSAYMTRARQGKFIGCLAPIGYRKDNDDPHKLVIDDETSWIVEKIFDLAFSGYGVQAIRRRLFEEKIPTPTWWNRKKGLRNKKTKLEMTVDGGEYWWDCTTLKEIIENPVYIGHIASQKVNYKFKVGWLSDKPKEEWIIVENTHEPIISEDIYNIANEKLKSRRRPFKNGEESIFAGIVKCPDCGKSLNLGRNKSKKREKLLTCNTYRRYGKSLCSQHRIYYDTLYEIVLKDIRKNAEIALKDEKEIIKALEKSREIDNEEEQKFIMDKIYEDQIRVEDLTKKIERLYDDWLDNKISESNFQNILEKSQKEQDYLNQRIEDNQKLIVKEDLEDINVKKWIELIKKHRDIKKLDKETLNELISKIYVHEKEVVNGEITQTIDIYYNFIGNTDTLQVFYNL

SEQ ID NO: 18070 - protein, 559 aa, synthetic construct
MSKEKIKVYLYIRVSTSIQIEGYSLEAQKSRMKAFAIYNDYEIVGEYEDAGKSGKSIEGRIQFNRMMEDIKSGKDGVSFVLVFKLSRFARNAADVLSTLQIMQDYGVNLICVEDGIDSSKDAGKLMISVLSAVAEIERENIRIQTMEGRIQKAREGKWNGGFAPYGYKLEDGKLFINEEEAVAIRTIFDQYVNTTIGANGISKYLENHGIRKIPRQNGKNPLFDAGLIRKILKNPVYNGKIAFGRRTLEKVHGTRNEYKQVEQDEYLISEGIHEAIVSDEVWQAAQVKLKSQAKKYEHVNKGKDTRTHLLSGIVKCPICGVGMFGNKCIKKKKDGTKYKDFYYYGYKHRQMIRGHKCTFSKQIREELLDDAVAEVIVKIVSNPKFASMMQEKINMKVDTSEIEKEIDNYQKELRKSHSTKFKLIEEIDNLDVEDKHYKRRKQDLDDRLYRMYDKIDELESSLIDAKAKKQTIEAEKLTGDNIYKVLIYFDKLYKVMNDVERRQLISALISEIQVYEEKQSNGQWLKSITFKLPIIEENLNIDLDNDEQVECVSLLEKRS

SEQ ID NO: 18071 - protein, 515 aa, synthetic construct
MKTAIYLRKSRADLEAEARGEGETLAKHRATLLKIAKEMNLNVLAVREEIVSGESLVKRPEMLALLEEIEDNKYDVVLCMDMDRLGRGGMKEQGIILETFKRSNTKIMTPRKTYDLNDEWDEEYSEFEAFMARKELKIITRRMQRGRVASVEAGNYLGTHAPFGYDIHRLNKRERTLTINSEEASVVRMIFDWYANEDMGANAIRSKLNDLGYKSKLGNEWNPYSILDILKNNVYIGKVTWQKRKEVKRPDAVKRSCARQDKSDWIIADGKHEPIIPESLFEQVQEKLNSRYHIPYNTNGIKNPLAGIIKCAKCGYSMVQRYPKNRKETMDCKHRGCENKSSYTELIEKRLLEALKEWYINYKADFEKHKQGDKLKETQVIQMNEAALRKLEKELVDVQKQKNNLHDLLERGVYTVDIFLERSKAVSDRINEITSTMENLKKEIKTEIKKEKVKKDTIPQVEHVLDLYFKTDDPKKKNSLLKSVLEKAVYKKEKWQRLDDFELVLYPKLPQDGDI

SEQ ID NO: 18072 - protein, 553 aa, synthetic construct
MSTITKIQSYHRDVKHLRVAAYCRVSTDNIEQLESLENQRIHYQEYISNHSDWQLAKVYYDEGISGTQLTKRDALKELLADCHNHRIDLVVTKSISRLSRNTTDCLQIVRELQQLNIPIIFEKEHINTGAMTSELFLSILSSIAQDESHSTAGNLRWAIRQRFASGQFRVSSAPYGYSIEDGNLVINRTEARIVREIFQQFSKGMSASQIARKLNHSHVATKRGGQWRSNTVINILRNCNYTGDMLCQKTYRDDQYHRHFNQGELTQYLIEDHHPSLVSHEIFNRVQGLLTEVVQKRHIETGSHKYQQHYLFSGKITCGNCGTIFKRQTRPNKIYWACQKHLKSTKQCPIKAVPEASLEVAFCNMMNKLVYSRKFLLQPLLENLRVQANSDTNGQLSLLVAQVKANDHKAETLTELMQSGFLDKAIYVNQTAKLEQDTCQCREKIKQFNSNNTDSANNFENMRALLHWCQQGQKLSSFNKAPFQDFVQQIVVNGPNNVVFKLKCGLRLTEKLTKAAGLDENFYRGVIRQRFNEPIRQAEYLYSIIESEGDLIG

SEQ ID NO: 18073 - protein, 515 aa, synthetic construct
MKTAIYLRKSRADLEAEARGEGETLAKHRTTLLKIAKEMNLNVLSVREEIVSGESLVKRPEMLALLEEIEDNKYDVVLCMDMDRLGRGGMKEQGIILETFKRSNTKIMTPRKTYDLNDEWDEEYSEFEAFMARKELKIITRRMQRGRVASVEAGNYLGTHAPFGYDIQRLNKRERTLTINSEEASIVRMIFDWYANEDMGANAIRSKLNDLGYKSKLGNDWNPYSILDILKNNVYIGKVTWQKRKEVKRPDAVKRSCARQDKSDWIIADGKHEPIIPESLFEQVQEKLNSRYHIPYNTNGIKNPLAGIIKCAKCGYSMVQRYPKNRKETMDCKHRGCENKSSYTELIEKRLLEALKEWYINYKADFEKHKQDDKLKATQVIQMNEAALRKLEKELVDVQKQKNNLHDLLERGVYTVDMFLERSNVVSDRITEITSTMENLKKEIKTEIKKEKVKKDTIPQVEHVLDLYFKTDDPKKKNSLLKSVLEKAVYKKEKWQRLDDFELVLYPKLPQDGDI

SEQ ID NO: 18074 - protein, 421 aa, synthetic construct
MQQLIKDADTGLYDAVLVYKLDRLSRSQKDTLYLIEDVFQKNNIHFISLSENFDTSTAFGKAMIGILSVFAQLEREQIKERMSMGRVGRAKSGKIMEFNNPAFGYEVDGDNYKVDPLRAEIVKRIYKMYLSGTSINKIKETLNSEGHIGNKKNWSDTRIRYILSNPTYLGKIRYDGKTYDGKFSPIIDEETFNKTQNELKERQTATYKRFNMKLRPFQSKYMLSGLLRCGYCGATLFVNSYIYNGKRKLRYNCPSTYKSKQKTRTYKIMDPNCPFKLVYAKDLEPAVINEIKNLALNPQSIQKPVKKTPDIDVEAIQKELAKVRKQQQRLIDLYVISDDVNIDNISKKSADLKLQEETLKKQLAPLEEPDNDDKIVAFNEILAQIKDIDSLDYDKQKFIVKKLIKKIDVWNDNKIKIHWNI

SEQ ID NO: 18075 - protein, 553 aa, synthetic construct
MSTITKIQGYQHDVKQLRVAAYCRVSTDNFEQLESLENQRAHYQKYINNHPNWELAKIYYDEGISGTKMTKRNALKELLTDCHNHRIDLVVTKSISRLSRNTTDCLQIVRELQQLNIPIIFEKEHINTGAMASELFLSILSSIAQDESHSTAGNLRWAIRKRFASGKFHVSSAPYGYSIEDGNLVINHTEAKTVRQIFQRFLSGTSASQIAKELNQKQVSTKRGGQWRSNTVINILRNSNYTGDMLCQKTYRDDQYHRHFNQGELAQYLIEDHHPSLINHENFNRVQVLLKEAVKKRHIETGSHKYQQHYLFSGKIICGQCGTIFKRQTRPHKIYWACQQHLRSAQQCPTKAVSEASLKAAFCNMINKLVYSKKFLLQPLLEGLKEEANVNSDGQLISLTKQIKANDHKAETLTELMHAGLLDKAIYVNQTARLEQDTYQCQEKIKQLNGQNTDSANDFEDVRTLLRWCHQGKQLTEFDEGVFQEFVQQIVVNSSNKATFILKCGLKLPEKLNKNATIDGHFYRDIIKQRYNDPIKQAEYLYSIIESEGDLIG

SEQ ID NO: 18076 - protein, 525 aa, synthetic construct
MGKVRIIPAHQQKGNSVQPQKNRLPFEQLRVAAYCRVSTDYDEQASSYETQVAHYKELIQKEPTWEFAGIYADDGISGTNTKKREQFNQMIAACKAGKIDLIVTKSISRFARNTIDCLKYIRDLKAINVAIFFEKENINTMDAKGEVLITIMASLAQQESESLSQNVKMGIQYRYQQGKVFVNHNHFLGYTKDAQGNLVIEPEEAKVIKRIFYSYLNGMSMKQIADSLKADGILTGGKTKNWQSSGVSKILKNEKYMGDALLQKTYTVDFLSKKRVKNNGIMPQYYVENDHPAIIPKSVFMQVQQIIKQRRNGITTKNGKHRRLNGKYCFSQKLFCGKCGDIFQRNMWYRPEKVAVWRCSSRIKRSKTGRRCMIRNVKEPLLKEATVEAFNQLIEGHELAGKQIKANIMKVIKNSKGPTLDQLDKQLEEVQMQLIQAANQHQNCDALTQQIMDLRKQKEKVQSRETNQQAKLHSIDEINKLVEFHKYGLVDFDEQLVRRLVEKITIFQRYMEFTFKDGEVIRVNM

SEQ ID NO: 18077 - protein, 464 aa, synthetic construct
MKRAALYIRVSTMEQAKEGYSIPAQTDKLKAFAKAKDMAVTKVYTDPGFSGAKMERPALQEMISDIQNKKIDVVLVYKLDRLSRSQKNTLYLIEDVFLKNNVDFISMQESFDTSTPFGRATIGMLSVFAQLERDTITERMHMGRTERAKQGYYHGSGIVPLGYDYVDGELIINDYEAQIIQEIYDLYVNQGKGQQYITKRMVAKYPDKVKTLTIVKYALTNPLYIGKISWDGKVYDGHHTPIIDKSMYDKAQEIIARKAQKGGEQHGNQLGLLLGITYCGKCGAKVFRYVSGGKKYRYNYYMCRSVKKMLPSLVKDWNCKQPSLRQEVVEKKVIDSLKSLDFKKIERELKQVENKTKSKITTINNQISKKHNEKQKILDLYQYGTFDVTMLNERMKKIDNEINALTDNISNLEGTKSESLINKLETLKTFNWETETTENKILIIKEFVERIELFDDEVIIKYKF

SEQ ID NO: 18078 - protein, 594 aa, synthetic construct
MKKEVKVIKGDTTLKRTASGCVERSIKRVAAYCRVSTDTEDQINSYNSQVEHYTEFIQKNNEWTLAGIYADEAITGTQVDRRIDFQRLINDCMNGDIDMIITKSISRFARNTLDTLKYVRKLKEFNVAVFFEEENINTLTMDGELLLTILSSVAQQEVENISANVKKGLRMKMERGEMVGFQGCLGYDYDPETKSISINEKEAEIVRYIFRRYIEGVGGMVISRELEEQGYLSPRGNKRWTETTVLGIIKNEKYKGDLMMGKTYTVDPISKRRLDNFGEQDKFYIENHHEPIISEEDFEKAQGIRLRRSKNRNTVANNGGKREKYSRKYAFSSMLECGFCGHNLSRRNWHSSSEYTKVIWQCVNATKNGKKYCPHSKGIEEEAIEKAFMESYRQVCHNNVEITNEFLKTVEEELKDNSLAKDLKKITNQLDKILKKEKDLVELRLNESISMDIYQDKYNEIAISKEKLLAEKRTLEVTLTDEKALKKRLEGFKKLLESNKYLEEFDRAVFESIVDKIIIGGTNDEGEIDPAMITIIYKTGKKYSQDGRLFKSRRKNAKEVNEKADSKLYPQSSDEVNNLCSYPMDNTRGVCKFT

SEQ ID NO: 18079 - protein, 517 aa, synthetic construct
MASVTKLTKPQSKVKAVLQVAAYCRVSTNSDEQEDSLANQQDHFKSYIQQQPNWQLHQIYYDNGISGTKAQNRPGLQALLKDCQNGQVDLVLIKSISRFSRNTTDCLRIIRQLKQLDIPVIFEKENINTGSMDSELILSVLGSLAQDESQSIAHNVRLGYQQRASNGVFHYSLPPYGYQKDANRDLIIDPIERKVVLRIFNWTIEGKSPDQIAQTLNEQAISTKRNGKWHDSTIRGILQNTVYLGTTEFQKTFTDDEYHRHPNQGEQGKIIIEEHHPAIIDQATFTQVQKIIMLKRKFYPQAKAKPQRHTFSRKIYCGNCQKLFKRQSRSGKVCWGCQTHIKSAKDCPVKSIREDALHLAFCTMVNKLIFSQKFLLEPLVEQLQADQNQEQAAKLSQVETELKEAKDKQDNLQQLRKQELIEKDFFTKQDAELEQEIANLQSEIERLKQLLGGQNSKLPLTHELLKLCQRSNYLTSFNAELFEQIIESITVDQDHNLTFHLKCGLNLTEGSKHHVKA

SEQ ID NO: 18080 - protein, 528 aa, synthetic construct
MAKVRIIPAQVKQGNRNRQVEEADIKLKVAAYCRVSTLYEDQASSYETQVAHYKEFINKNPKWELAGIYADDGISGTDTKKRNQFNQMIDDAKQGKIDLIVTKSISRFARNTIDCLQYIRELKELHVAVFFEKENINTMDAKGEVLITIMASLAQQESESISRNIKIGLQYRYQRGQVIVNTARFLGYDKDNDGNLVINPEQAKVVKRIFYECLTGKSAIEIARELTKEGIKNGIGRTQWHSSGIIKILRNEKYIGDALLQKTYTVDFLTKKRIKNDGQVPQYYVENNHPAIISRATFYQVQKLLDMRREGFTTEGGHHHGYTNAYCFSSIVYCGRCKDIYTRCVWYRPRIGEVEKVYVWRCYSRLHWNHKGKRCMGRTITEADLEEASLKAMNELIQQHQLADKQIAANILKVTQGSAGPSLDELDQQLEDQQLLLLNMSTHNKNVEQLTEQVQALRKQREQLIRQEIDHDIKRSNLKNIQSFFQTYQGGLIKFDKKLVRLLIEKITIYKSKIEFTFKDGEVITVKM

SEQ ID NO: 18081 - protein, 488 aa, synthetic construct
MQLYAVYVRVSTDRDEQVSSVENQVDICRNWLERNGFIWDESCVYKDEGISGTLFIDRPAIQLILEKAKQKKIDTVIFKSISRLARDLKDSLEIREVFLAHGVRIISVEEGYDSNKAGKNDMAFELWSLFSAQYSRTLSSSISAALAAKVRRGEHIGKVPYGYDRVEQKLIIKDEEAQVVRQIYKWYNDGWGFKRISNELNNLGIKPKSNNVWQLTSVQRLIRNTIYKGVFILNQYTNVKVGGKKKQIRNPPEKWLIFEDHHPAIVDKEIWDEANREQAQSRKVRITPWNEFRYLAKCSECGSNMVIVQSHRKKRNGERTEWKYLKCSQYRRAGRHGCVNHIPIQYGDFREFILNLLMKKGESVLLNLRPNVENEQVRKEKKLKQILKQNEQRTKNLLELYLDGLIKKNEFEKKRKEIEEVVAKTTNELFLINKVETVQTNIQTIKEAFEELKNQNQDLFDVFQALIEEIVIHPDGTIDIAYTFEEPD

SEQ ID NO: 18082 - protein, 588 aa, synthetic construct
MKKDVKVIKGDTTLKRTASGCVERSIKRVAAYCRVSTDTEDQINSYNSQVEHYTEFIKKNNEWTLAGIYADEAITGTQVDRRIDFQRLINDCANGDIDMIITKSISRFARNTLDTLKYVRKLKEFNVAVFFEEENINTLTMDGELLLTILSSVAQQEVENISANVKKGLRMKMERGEMVGFQGCLGYDYDPETKSISINEKEAEIVRYIFRRYLEGVGGMVISRELEEQGYLSPRGYKRWTETTVLGIIKNEKYKGDLLMGKTYTVDPISKRRLDNFGEQDKFYIENHHEPIISEEDFEKAQGIRLRRAKNRNTVANNGGKREKYSRKYAFSSMLECGFCGHNLSRRNWHSSSEYSKVIWQCVNATKNGKKYCPHSKGIEEEAIERAFMESYRQVCHNNVEITNEFLKTVEEELKDNSLAKDLKKISNQLDKLIKKEKELVELKLNETISMDIYQEKYNEIFINKEKLLEQKRSIEVTLTDEKALKKRLEGFKKLLESNKYLEEFDRTVFESIVDKIIIGGTNDDGEIDPAMITIIYKTGKKDSQNGRLFKSRRKNAKVGDQNDGNKLCSQSGDEVKTLCSYSIDNTH

SEQ ID NO: 18083 - protein, 565 aa, synthetic construct
MGFKKLVNDIKIEKKRKIIAIYCRVSTDEQAEFGYSIDEQKRLLEEWCKANDYIIYKCYSDRGISGKNIKDRPALKELLSDAKEGKFDMVISWKINRVSRKLEDVLKIVNLLEKNNITFKSYSEPFETDTPAGRMQFQMMALIGEFERGTIAQNVKMGMIAKAKSGNWCGGRVLGYDLVPNNSPEEEKKGKNKLEINEKEAEIVRFIFNEYSKGKGYKAITNQINKLGYKTKKGNNFSVGSIRDILTNPVYIGEIRYNVRQNWSEKRRRNINPNPIRVKGKHEAIIDRELWDKVQLILESKKGKPSRIYDGEYPLTGILRCPKCGAGMVISRTTNTLADGTKKRIAYYCCGNWKNKGTSVCNSNTIRVDKANEYVFKKIEELVSNEAMIKAVVKNINKERKDKMKPAKRLLGDIDKELEKLDKRKRKIFEAYEDDILTKEEFQTRKDELNEKIRILEEEKKPLLNTISEDVSEEIPYEFIKDILMNFSKVLNSSVSREQQKKLLHMIISEITMSESREIDSIKLNINDKLVEYLVKEGGVPIKGIPSSFMLINVGLKVLNLDVVI

SEQ ID NO: 18084 - protein, 490 aa, synthetic construct
MKNIAIYIRKSVKGDDNSISLEAQTEVIKHYFKNENKFTIYKDDGFSGGNTNRPAFQKLMHDATQNKFKAVACYKLDRIARNTLDFLTTFNTLKEYGIDLICVEDKYDPSTPAGRLMMTLLASLAEMERENIKQRVTDSMLNLARSGRWTGGTPPFGYKVITIDGGKYLELEDKNNILYIFDEFINGKGILKLSSEFNCDKKKISRILHNITYLKSSTEANTYLKQTLKYEIVGTPNGCGYLPYGKNKVINGKKVKNIDGLKIAAISKHKAIIELETFIKAQENLKTFEGRKAPRISNKSFLAQLIQCTCGSNMLIVLGHKKKDGTRKLYFSCPNKCGNTFGDVKEIEEDTLLTLKDVNFFEKINKNKPTINNKDSSRIKASLLKELENKKKILDGLVQKLALVDSDLANILIDKMETLNENIKELQSKIDLLEKEEISLSYNKEDLNLKEKNRKHFIKEFENMNMQEKQTSIRKVINKITWTGENIIIS

SEQ ID NO: 18085 - protein, 533 aa, synthetic construct
MKTAAIYARRSKVVETGDSIENQIQLCTNYLKNIGINNTLIYSDEGFSGKNTERPGFVRLMNDAKQKKFDTLVCYKVDRLSRNIGDFSNLINELEKNEISFISVIEQFDTRAAMGKAMMYICSVFSQLERETISQRVCDNMYSLATNGYWLGGEFPFGFSSSRKNFTDSSGKNRSYSELIPIEKEINLVKLIFNKYIELGSLSQVEKYLLQNNIKTRRGKDWSKASIKNIISNPVYVKANDKTIEYFKSQGIKTYGEPDDIHGILIYKKRKGKSGKIRNPDEWIYAVSTHEGIIDSDSWLEVQKIAEINKYKAPALGSSHKALLSGIIRCAQCGSSMRVSYGVPNKLTKKRKHYYMCTLKHNSGKVRCASKNVDGPEVDKLVINKLKELSLDKSYLVQRLKDYKESFATSSENILSKNIQNEISKNKEQIDNLVNNITLTEDPQLVQILLDKLTKLKSKSVELTNSLNKLNDELAKQDILINNCDNIIQKLKNLSALIDDLDVPQKRSLLSSVIDKVFVDGDTGAVKIKFKTK

SEQ ID NO: 18086 - protein, 504 aa, synthetic construct
MKKVAIYSRKSVLVEGSVSIETQINMCKDYINNKFPNAKFKVFEDEGFSGGNTNRPAFQKMLRMAQLNEIDIVVCYKVDRIARNTLDFLKILELFKENNVELISISEGFDPNTQMGKVMLTLLASFAEMERTNIQQRVKDNLLSIAKKGKWTGGSPPTGFKNGLNGGLEWNKQDMILDVFNMKYEKEKNSNIIKYIKEKYNHNFLGGTLATTLRKPIYVKSSPSVSLYLKTKGYIVQGNEDNIHSYLTYTDTDKETKYAIVSDIVGLIEPSVWISINKDMDKNISREGNRFSEKFWLTKTVRCKYCGQTFCGQTKTTKTKHYNKHGEEKIYISTYSYYSCRDAVRGKLKTCTNTKRVKQEILESKVSELIHLLKDKKTFNSSYFSNKIDNSSKIDTIKKQIKNIDKTINNLTDKIALLSNEASLIFISKLEELVKEKSILKDNLLQLELQELNSNTKKDSSLVYNNILAFNNGLSVDDKRKIAMSLFKEIIYDPETDSLDVTFM

SEQ ID NO: 18087 - protein, 549 aa, synthetic construct
MKNKLKSSLNIESPKIAIYMRVSTSKQTDNQSLDTQEKTINSYIASRHDWINPICYKYIESHSASIKPKVNNTLKESSFDSLKRPKLRELFLDATIGKFDYVLCASHDRLTRNTNEGIILKHLFSRLNITLIYCRPGETISSENEALNKFFENLLVNIAALESNITGGRVTLANKHKIQNNFWAGGPPPFGYNLVSQPSNKRNSFLEINFEEARIVKKIFELYNLGCSYNEILTRLNRDFTLPPKRLWTHNTLKEILRNPVYTGFLVWNKRGGARKPNRHSPNDFVKSNLVEKNIIIPENEFLETQKLRNILSRDSKFLSTDFLLRDFLYCNKCNKKLSAKNYGNNKRFYYCYSHNNMEINKKCRSIKASKIESTILSNINDLINSSLQSEVQIEKFYDKYIENFNAELLDNKKSLEITINQLKSSTDLLELCVNEINISKDNLTVDYEDLSSSSTEFSFINALLEFQVVTQTEIKSLKARKEYLTYKINSSPKSFDDFKSNLNKSFKLFKYDEEKQKLISSPRSFRLFLFKVVKKIILSDHEITIIFK

SEQ ID NO: 18088 - protein, 537 aa, synthetic construct
MKKAAIYTRKSKFTEKGDSIESQIKLCSKYLDNINIKDYCIYTDEGFSGKNTDRPEFQRMLSDAKAKKFDVIICYKFDRISRNVSDFSNLINKLNELNISFISVVEQFDTNSAIGRAMMYLCTVFSQLERETISQRITDNMYSLATKGYWLGGETPTGFRSEKKFFNSNNKQKMYSSLVPIKGELDLVKLIFNKYLEFNSISKIEKYLLSNNIKTKRNKDWSKASISLILRNPAYVKADEETFKYIESTGSKVYGNPDGKHGLLIYKKNKGRKGAKHDISEWIYAVSEHEGIIDSDIWVAIQKQIKKNAILAPALGTSNIALLTGLIRCAKCNSPMRVAYGKRNPKTNKKNYYYVCTLKTKSGKTRCDSKNLPGLDLDNLILDKLKEMSLDKNTLLKELNKYKDTIESNFHNDVLKNIQNNISKNNSMIDNLLNNVALSTDSEVTAILLEKISKLKDENKLLTQKIDDLKSELEAQETLLNDCNSLITKLKYFSKFIDNSSIEEQKQLVSSVIEKVIADGDTGSIEIKFRPLLDFKI

SEQ ID NO: 18089 - protein, 474 aa, synthetic construct
MRIALYIRVSTDEQAKHGYSLDAQKEKLEAFCKSQGWENYETYIDDGYSAKDLNRPKFNLMKDAIKKGTIDVLLVYRLDRLTRSVIDLYEILKMLDENGCKFKSATEVYDTTNAMGRLFITLIAAIAQWERENLAERVKMGIEKKVKFGKWPGGLPPYGYVYKNDELIINPEEAKVVKLIFSMAKTLGFYTIAKRLTETGYSTKNGGQWHVDTVRGIANNPVYAGYLTHNDSPKAAKKPPREQALYEGEHERIVLRDEFWQLQEILEKRRGAGGKRETSNYYFSSILKCGRCGSSMSGHKTPAGKTYRCSGKKAGKSCTSHIVLEKYLVQKVFESFDDLISELSPQADVATNPLDEKIKELENNLANIEKKLEKQKNMYERDIIDIDELVTKTEKLREEEKEITSQLRAYKKSADQSEDITYIAENISSLWEIANEYERKQMMTTLFSQMVIDTKDEYKRGTGKPREILILSVK

SEQ ID NO: 18090 - protein, 509 aa, synthetic construct
MKTCIYLRKSRLDEEDEKQGEFETLSRHRSTLLKVAKEQNLNIVEIKEELVSGESIAYRPKMLELLEEVKNGLYDSVLVMDIDRLGRGNMQDQGLILETFKKSNTKIITPRKTYDLNNEWDEEYSEFEAFMARKELKLITRRMQRGRVKSVEEGKFIASKPPYGYKFVFDESGNKSMVIDEDKAKVVRMIFDLYVNKHYGGVKIATHLNSLGLKTTTGRTWYDKGVRDILKNKTYAGYVVWNKVERRKNSSKTRPIDERIEAKGIHEPIIDESIFLEAQSLFKSNFIPSTKQHTTITNPLAGLIVCSKCGHKMIAQQSTYKNKEIVKFVKCLNCGKNRGIKLDILEKDIINELADWVDAYNVSIKDLDSNENKNPNLESYDSIIKSLESEYQTLMKQKENLHNLLEQGIYDVDTYLDRSKILTDKINLNRSNLSQAKKDLENEKESVFSIADIIPQIKKVLELYYQSNDMQERNELLKEVIDFINYSREPKKRTSRFNIKIYPRLIKNK

SEQ ID NO: 18091 - protein, 452 aa, synthetic construct
MKAAIYIRVSTQEQIENYSIQAQTEKLTALCRSKDWDVYDIFIDGGYSGSNMNRPALNEMLSKLHEIDAVVVYRLDRLSRSQRDTITLIEEYFLKNNVEFVSLSETLDTSSPFGRAMIGILSVFAQLERETIRDRMVMGKIKRIEAGLPLTTAKGRTFGYDVIDTKLYINEEEAKQLRLIYDIFEEEQSITFLQKRLKKLGFKVRTYNRYNNWLTNDLYCGYVSYKDKVHVKGIHEPIISEEQFYRVQEIFSRMGKNPNMNRDSASLLNNLVVCGKCGLGFVHRRKDTVSRGKKYHYRYYSCKTYKHTHELEKCGNKIWRADKLEELIIDRVNNYSFASRNVDKEDELDSLSEKLKIEHVKKKRLFDLYISGSYEVSELDAMMADIDAQINYYEAQIEANEELKKNKQIQENLADLATVDFDSLEFREKQLYLKSLINKIYIDGEQVTIEWL

SEQ ID NO: 18092 - protein, 474 aa, synthetic construct
MKCIVYVRVSTDEQAKHGYSIAAQLEKLEAYCISQGWELTEKYIDEGYSAKDLHRPYFEKMMEKIKQGNVDILLVYRLDRLTRSVMDLYKILKILDDNNCMFKSATEVYDTTNAMGRLFITLVAAIAQWERENLGERVRLGMEKKTKLGKWKGGTPPYGYKIVDKHLVINKDEKDVVKTVFELSKTLGFYTVAKQLTIKGFPTRKGGEWHVDSVRDIANNPIYAGYLTFNQSLKEYKKPPREQTLYEGNHELIISKDEFWTLQDILDKRRTFGGKRETSNYYFSSILKCGRCGHSMSGHKSGNKKTYRCSGKKAGKNCSSHIILEDNLVKKVFHMFDQIVGNITGPTNASEYSLETISALDSELKSIERILNKQKIMYENDIIDIDELIAKSTELREREKRINIQLKNIKQEVPKNQKEIEYLTKNIESLWQHADEYERKQMITMIFSRIVIDTEDEYKRGSGDSREIIIVSAE

SEQ ID NO: 18093 - protein, 515 aa, synthetic construct
MKTAIYLRKSRADLEAEARGEGETLAKHRSTLLKIAKEMNLNVLSVREEIVSGESLVKRPEMLALLEEIEDNKYDAVLCMDMDRLGRGGMKEQGIILETFKRSNTKIMTPRKTYDLNDEWDEEYSEFEAFMARKELKIITRRMQRGRIASVEAGNYLGTHAPFGYDIHRLNKRERTLTINSEEASVVRMIFDWYANEDMGASAIRNKLNDLGYKSKLGNDWNPYSILDILKNNIYIGKVTWQKRKEVKRPDAVKRSCARQDKSDWIIADGKHEPIIPESLFEQAQEKLNSRYHVPYNTNGIKNPLAGIIKCSKCGYSMVQRYPKNRKETMDCKHRGCENKSSYTELIEKRLLEALKEWYINYKADFEAHKQGDKLKETQVIQMNEAALRKLEKELVDVQKQKNNLHDLLERGVYTVDMFLERSQVISDRINEITSTMENLKKEIKTEIKKEKVKKDTIPQVEHVLDLYFKTDDPKKKNSLLKSVLEKAVYKKEKWQRLDDFELVLYPKLPQDGDI

SEQ ID NO: 18094 - protein, 452 aa, synthetic construct
MKAAIYIRVSTQEQIENYSIQAQTEKLTALCRSKDWDVYDIFIDGGYSGSNMNRPALNEMLSKLHEIDAVVVYRLDRLSRSQRDTITLIEEYFLKNNVEFVSLSETLDTSSPFGRAMIGILSVFAQLERETIRDRMVMGKIKRIEAGLPITTAKGRTFGYDVIDTKLYINEEEAKQLRLIYDIFEEEQSITFLQKRLKKLGFKVRTYNRYNNWLTNDLYCGYVSYKDKVHVKGIHEPIISEEQFYRVQEIFSRMGKNPNMNRDSASLLNNLVVCGKCGLGFVHRRKDTVSRGKKYHYRYYSCKTYKHTHELEKCGNKIWRADKLEELIIDRVNNYSFASRNVDKEDELDSLNEKLKIEHTKKKRLFDLYISGSYEVSELDAMMSDIDAQINYYEAQIEANEELKKNKKIQENLADLATVDFNSLEFREKQLYLKSLINKIYIDDEQVTIEWL

SEQ ID NO: 18095 - protein, 572 aa, synthetic construct
MKNKTVRIIQPKTHYTLDQINNPITRKRVCAYVRVSTDNLEQKTSYEAQRDEYTQRITKNPDWIFDGIYADEGISGTSTKNRKQFNLMIEKARAGQIDIILTKSISRFARNTVDALNYIRELRQINVEIIFEKENISSLDPKVEFLLTIMSSMAQEEARNVSENVKWNVQRRFREGVPIINHKRFLGYTKDKKGGNLVVVPEEAQIVKLIFNLYISGVGPAKIAKQLIEMGAKTGAGKTEWRLSTITTILKNEKYMGDMLQQKTISIDYLSHTRVKNKNHAPTYYTENSHEAIIDRDTFELAQRIRKDRAKVRIGEDKNLSKYSRTYPLTAMIICSECGRTLKRRYWNYGKPSQRVMQQCGSYIEGKANCNAKASHQDLIEATTIHMLNKVFLKDLDIMSTIQRIIKSTIKVDDVQGIIEKLTLERDENEIALSNLIDTKVKTPDIPESIFNTKYREYSDRLKVLTAEINKLELEHVKNYDTRKRMDKINEILGKKNLVIDELDSEILSTFIYKMISVNPNEIVYCIAGTKNYSDNEFKERRFEFLKTEPIIVETYHAPDGLAKMLYRVVVI

SEQ ID NO: 18096 - protein, 531 aa, synthetic construct
MKEIIKIDSTIRKTGFKKKTRVAAYARVSSDSDEQLLSLEVQKEHYENYIKSNPCWEYAGLYFDEGISGTKIGKRESLKQLLKDCQSGQIDRIITKSISRLARNTVDCLEIVRKLTGLGIYLYFEKENIDTEHMSSELMLSILSSIAQSESRSISENSMWSIQKRFENGSFVISCPAYGYKNENKKMIIVPEQAKVVKEIFNMALSGMGGEAIARVLTDKKIPAKRGAKWSSTTVNAILNNKTYTGDVIFQKTFTDDNFNRHKNCGEKKQYVIENHHEAIISHETFNLVKEIIAWRRNENNIVCGSGKYNKLYAFSGKIRCGECGSKCKRRIIYQHNKAYGIWVCITHLEDIHACSQKSVMESYLKISFLQMLNKLKATSAQILTPFIKSLRNVNSKDGLNKVIELEEKIAKLQEQEQVLSKLFAGGYIEMDSYYLESNQLKAEIDTCLKEKLQLSNSLNGNLTHLNEAQKLQRFVSVTEVFSEFKDEDFLDFVDDVVVKSRTRFLFILKCGLELEEEVKETWHASHMVTE

SEQ ID NO: 18097 - protein, 525 aa, synthetic construct
MSANVIIIPPRKIAGNTVDKHEDKPKLRVVAYCRVSTDSEEQATSYDTQVQHYTDYISRNPLWEFAGIYADDGISGTSTKKRVGFNDMIHDCMSGKVDMVITKSISRFARNTIDCLKFVRQLKDKNIPIIFEKENINTMEASGELLLTIMASLAQQESASLSQNVKLGLKFRYQEGKVQINHNWFLGYTKDDEGNLVILEKEAKVVRRIYREYLEGASLRDIAEGLEKDGIKNGAGHLKWNLSNIKGILQNEKYIGDALLQKTITTDFINHVRIKNDGTEPQYYVKDSHTPIIPRDIFFKVQEEMLRRANMFSGEENKKRRVYSSKYALSSLCVCAKCGDVYRRIAWNNRGVHSVVWRCCTRWENGPSACDASTVKEEELQSAIVKAINKVFSISDEVLDTLNNSIREIIAGNNLSEIETVDKKIADKQAILLTLLKAKKDYTKTANEIDELKGKKQQLLIEKAGQEDAKRRIREMEDFLKSERHDISEYDEKLVRKYIKKIKVYEDKFSVTFKSEISVDVERAS

SEQ ID NO: 18098 - protein, 520 aa, synthetic construct
MKNKSVTMIPATKRVGTLKVDAEEKPKLRVAAYCRVSTDSDEQASSYEVQVEHYANFINSNSEWELAGIYADDGISGTSTKNREEFNRLIQDCMENKVDRIITKSISRFARNTLDCLKYIRQLKEKNIPVFFEKENIDTMDSKGEIMLTIMASLAQQESQSLSQNVKLGLQYRYQQGEITINHNRFLGYTKDEDGHLIIEPTEAEVVKRIFKEYLEGSSLIQIARNLEADRILTGAGNKNWAGTTVKGILVNEKYMGDALLAKTHTVDFLTKKRVKNNGIVPQYYVENSHEPIIPKTLFLQVQEEITRRANLKNKKGSITYSSKYALSGITYCGKCGEIYRRLHWNNRGKKSIVWRCYSRLDKTKDCDARTILEKDLKQAVVDGINRVFADEGRIKEILNSSIRNLLKVDNTAEVEIIDSQLQELQQQLLEKSNGNQDITTIGEQIVQLKEQKQNILLGKAVNDNSKQRMDEMLEFIDKNEHDSLEFDEILVRRLVEQIMVYDEHITIKFKSGIEIKVQS

SEQ ID NO: 18099 - protein, 519 aa, synthetic construct
MKKITKIDTVAQVKPAKLKVAAYARVSTSSEEQLLSLENQKLHYEQRILANSNWEFVEMYFDEGISGTKIDKRNGLKRLLQDCETGKVEFILTKSISRFSRNALDCLEIVRRLIDLNIFIEFEKENINTQTMDGELMLSILSSLAESESRSLSQNTKWGIEKRFQNGTYKIGYPPFGYDWLDGAMVINKEQAVVVKDIFADILKGTSTGDIAEKLNQQGVTTKRRKTWHGTTIRGIIKNEKYIGDALFGKTFTDDSFKRKVNRGDKNQYFMEGHHSAIIDKETFEQAQQMLVQNAKSKNIVQEDDKYQNRYSFSGILKCGECGKTFKRRIQTKNKNEKYVAWACTTHLKDKHSCSMKFIKDEQIKLAFITMMNKLVFSHQILLKPLLADVRSTTYTVDNTQIVVLDDELEKLKQQQDNLVQFVANGYIDRPTFVKEQNQLTKQMDDLENKRKMLTVAISKGFDNLESLEELVKFTKQDQMLTSFEDTHFVIFVDEVVILSRTELVFKLKCGLKLKERLV

SEQ ID NO: 18100 - protein, 475 aa, synthetic construct
MEINKLKAALYVRVSTTEQANEGYSIQAQTERLKNYAKAKDYFIIKTYTDPGFSGAKIDRPALQEMIKDIENNQIDIVLVYKLDRLSRSQKNTLFLIEDVFLKNNVDFVSMQESFDTTSAFGRAMIGILSVFAQLERDTITERMGMGRAERAKEGYFHGGGTTKIPVGYDYVDGLLQINDYEAEIVRSIFELYNSGKGVNAISTAIKNKFPSKRKFNVSLIRGILTNNIYLGFIKFKNGVYKGKHEPIVSKEIFDKAQGELSRRTTDKIKVFNSKYLLTGVTYCGHCGARMKATGSSTLKDGTRLTYYNCYSKSGSPAHMVKDLNCPSKTYRTEVLDEYLISQMKRISKSDISIEFDDNTNNDNETDKSVVKKEIGSIESRIEKLLKLYEFGNVPLDVLNSKINSLNSEKAKLKEILNENKIEKIDDKSDKLEIFNNLKNIEWDTMTHEDIKVIISRSVEKITVFNEKIEIEWKF

SEQ ID NO: 18101 - protein, 541 aa, synthetic construct
MRFSDPKQAAGSSADRQLEYAKRWAAEHGMALDAALSMQDEGLSAYHQRHVTKGALGVFLAAIDEGRIPAGSVLIVEGLDRLSRAEPIQAQAQLAQIINAGITVVTASDGREYNRAGLKAQPMDLVYSLLVMIRAHEESDTKSKRVRAAIHRQCKGWQDGTWRGVIRNGKDPSWTRLDPETKAFQLVPERAEAVKLAIRMFRDGHGAVRIMRTLAEEGLQLTNGGNPAGQLYRILRNRALIGEKVLEIDGEEYRLAGYYPSLLSAEQFADLQQATEQRAKQKGTGEIPGLITGLRISYCGYCGSAMVAQNLMNRGRREDGGPQHGHRRLICVGNSQGMGCAVAGSCSVVPIEHAIMSYCADQMNLARLFEGGDRSEALAGKLAIARARVADTTAKVERITDAMLADDAGDAPAAFMRRARELEASLVEQQAEVDALEHELAAIASSPTPAVAKAWADLQEGVKALDYDARTKARQLVADTFERISIYHRGTEPEQTRSWKGTIDLVLVAKRGSARILHVDRQTGEWRGGEEVRDLPDDPIQ

SEQ ID NO: 18102 - protein, 558 aa, synthetic construct
MTKLYSYIRFSSMRQSDGSSYERQIRMAKEIADRYNLELVNDYQDLGVSAFKGANSKTGALSRFLDEIGRSIPVGSWLFIENLDRLSRQDIISAQELFLSIIRRGITIVTGMDNKIYSIETVTANPMDLMFSILLFIRGNEESQTKRNRTNSSALLKIKAHQQNPQNPAVAIEEIGKNMWWTDTTSGRVLPHPVYFPVLQKIVQLRQEGHSAGAILDYLNEHHEPPAPTSNKKHGKWSRAMVSRLFATKALIGVKTVNVDGVEYELRDYYPRVLSDSEFYFLRKNIIKKAWDYSHDKEKVIPLLSGIGVLRCVHCGATMVKQTAANGKREQYRYCCDGRKSGRTDCPYPNWGFRAVTLEGAVLQLLADKIWIAEDKTNPIPEIQVKIDEISRKIDNLINLSAMMGATKELANQITDLNSQREALHEEIRLFEREMYSVDSQGWDKLAQFDLSDVQNEERLKVRMKIKGALHEIECSRIDSKKNLFVLVYLDGLRQRLVIENNRGLKKGQIFVDLKTINDRQILESAGMVLHPCIEMIIDADWKAPEEIPGLLSEEFGI

SEQ ID NO: 18103 - protein, 603 aa, synthetic construct
MVMDGVKKRVATLYRVSTKGQLDGDDIPMQRNACRSFIEKKGNWELVKEYIEKGVSGFKVSASKRDAIQRAKEDAENGLFDVLLVFMFDRLGRRDDETPFIVEWFINNGIEVWSVKEGQQKLEDHADRLINYIRFWQSSGESRKTSIRVNEKHSQMVEDGIYRGGLVPYGYKTVNSGVFNKKGKELLKVVIDEEEAEIVKKMYDLVLEEGYGQSRIAQYLNEKGIPSKTGKKWTSGAVNNVLRNPMYKGYMVYARGTEKEVVSKEKLEELVIIDEEKWNKVQSIREKRNPENVKNRGEESIITTTKSSLLLVGLVRCGHCGNPLCTTYNKKKYVRKDGTEYVKREAKYRCSGKAQKKVDCDGQTLYSPKKIEGVVLDELYDYLDQLETIDLTSKIQEFKQHNTDKEVKTLKKLQSEFDKVNSALVKLRDEALKIIMGESSFDAKVVNDLINQKENELRKLEESINKAKLDLESKTVELSEMEELQRYIPVWREVFEKASVEKKKMMLSTVIDKIVVFRDRVEITFKISLNRFLVNEGSHSNNDALPTELMPQTNMDELPMLYYIQMTGGLQSFFINRFRYRRGQCLRWSEWRNTVQQLTAFDR

SEQ ID NO: 18104 - protein, 539 aa, synthetic construct
MKLDNAKVFSYLRFSDPRQATGSSADRQLAYAASWALKRGMALDATLTLKDEGLSAYHQRHVTQGALGVFLRAIEDGRIANGSVLVVEGLDRLSRAEPIQAQAQLAQIINAGITVVTASDGREYNRAGLKAQPMDLVYSLLVMIRAHEESDTKSKRVKAAIRRQCEGWVAGSFRGLIRNGKDPQWVRLTNDGWELIPERVAAVKRALELYRQGLGAGRAAAVMHEEGFQLTDGGISGLQIYRTIKLPALRGVKRLSLDGEDYELEEYYPRILSDAEWSDLQHLAGQRLRRRGAGEIPGIITGVGLAYCGYCGTALVAQNIMKRRRSDGSIADGNRRLQCTSYSKNGGCSAGGSCSVVPIERALLSFCSDQLNLQRLLQLGDDGKGVRQKLLVARAALEKITTQLGKVTDALLADESGASPIAFIRKARELEEQQGVAEQNVKRLEFELAAMSCAVRPAQADRWEELAAQVFAGDYGAREKVRQLIMDTFERIVIYMRGMSAQDRKGQAIDVQLLSRTGQHRLIQIDRRTGEWVASEDWG

SEQ ID NO: 18105 - protein, 503 aa, synthetic construct
MPQRNNGIAYSYVRFSSKRQELGDSLRRQTEMAEEYAIKNGLKLSSKNFQDLGISAFREGKRASLVDMLAAIEEGQITAGSTIIIEALDRLSRRGIDATLETVKEILRKDVQVVSLSDGLLLTKNSLNDLQSVIRIAVAADLAHKESERKAIRLRETKGQQRQAALSGKPINKILPFWLQRTETGYAFSDKAGVARQIVQLKQEGKGSNMIAKALNKLGIAGVRTAQWNHASITKMLKNPALYGAYQTGETTKDRELIKLELVEAYYPALINKEEWLLLQSDQSKSKRGRRSADNPYSGLLRCECGGALVKRKHTVKEKLYVYHGCLNAKDGRCTQNISIKGLDGALTTILGRLEFKKKQTLDQSIHQERQQLEARINDLNSKLQVLDDIPLSVIKSIGTMESRLKEITDQIAKDEREQRGIEAVKSEKLSSITDGLELNLLLKRVLKNITVIRSGNGWAVKVLHLSGHKQNFLMVDGEIKFLSDTIALQNLLAGFREATENN

SEQ ID NO: 18106 - protein, 668 aa, synthetic construct
MPDALAPDPFTAMAAQLTPKRAVSYIRVSTREQAQRGGSEEGFSLPAQREANKRKAQSMGALVVKEFADRGESARSANRPELQKMLAYLKEDGGIDYVIVHKLDRLARNRADDVEINRAFEDAGVRLVSTSENIDQTPGGMLLHGIMSSIAEFYSRNLANEVMKGMGEKARNGGTLGKAPLGYLNVRARDENGREVRTIALDEERAPLIRLAFTEYATGNWTVRQLADHLNTLGLSIPPTPRRCAKPITATRLHEILRHPYYKGIVTFQGVEYPGKHEPLVDSQTWQTVQTILASRRYGERQRIHNHFLKSTVVCGQCGARLSVQNAKNSKGSIYPYFVCARRCRLHDCAFTAVLIDVVEDRMSDLYRAIELSAEDRTQIEHYLHDELAQIEGDKAKAVRSLTTRRTNIEDRRRRLLHAHYEGAVPLDLLKEEQAELSTELSQIERQLAAYQADAAEVRQHLTQALDLLEDCHRLYSTAPAHLKKLLNQVFFERVLVNPLVDEDGRVILPSTGDGTTDGGKQPGKDAGAHNEQDSAGEEGLGDASRGGGAAATDTPAPVPHSIHLADTGSGTRLSALLVSPFDQLASPSLHAAAHTHYLQHAAQPGKPITSPTADDEPVRPTTRTTPTLVGERCSSSGTASQPVSTGVGSGKSWLVPPVGLEPTTLRF

SEQ ID NO: 18107 - protein, 579 aa, synthetic construct
MAASPQVSGPAYPTQQSTRMNTHSGPACTTGQSGRMNPLLRGVSALRLSVLTDETTSPERQREANQVAAASLGIDLADREAVDLGVSASKTTPFERPELGAWLRRPNDFDALVFWRFDRAVRSMDDMHTLSLWARENRKMIVFAEGPGGRLVLDFRNPLDPMAQLMVTLFAFAAQMEAQAIRERVTGAQAAMRVMPLRWRGSRPPYGYMPAPLEGGGWTLVQDPEAVAVLERIMRELMGDPSAGILGKSTAAIARGLNADGILSPRDHWSMKKGRQTGGKTGGSPGETVTRDRFGWLHSSVKELLTSERLMGWKIHGANPVRDDKGAPVMATAEPILTREEFDIIGAALAERSHKKVDRSDTVALLLRVIHCDGCGERMYLHVPSSTSKSTSKTATYKCSAHIKGVVCKAQSIIKREWADEYVEGEFLRLLGSLEVTQHRTIPGYDPQPEIDATLAEFEDHQAQQGRQKSTAAQSAWQRRADALDARLAELEGREKVEPRTEVTSTGKTYADVWAEADTEVKRRMLQEAGAHLIVKRATRGRWHSLDLRRVEFEVRQPFFADAAADHVAMIADLESAER

SEQ ID NO: 18108 - protein, 578 aa, synthetic construct
MSTDIQLKGDSLRRQTERSKKYAEDHDLQLVEDFRLEDIGVSAFKGDNVSSGELGKFLGAVKAGRIPKGSYLLVESFDRLSRQKLNASVALFFDITSNGINLVTLSDNQLYKAGEAEFTQLIMSIVVMARANEESEIKSQRLSAAWGAKRKAIGDKKLTGLCPAWLELLEDRKSFGVLEDRAQIVRRIFEDSASGQGSFVITRRLNDLGTPAFGRSNGWVQSYVTKILQTRAVLGEFQPHTKQNGKRIPFGDPIPGYYPQIVDEELYLRAQFARGKRRIEGGGRKGEALRNLFTHLARCGYCGAPMHFLNKGFGPGGGTYLKCSQALRGLDCVSTTWRYQDFERSFFLYVKEIDLGEILAASATKSDAIALDDRLTSLKEKRKQLEVQRERTYALITQAISIDFVSAKLKECENELAEVDVQMADVELLLSTIREHQSISPDELHRLIDQLQVTEGPDAFAQRTMLAGRLREIVSDLRLDVEGTKPRLKKAEALFDQAGTDPIERQRSLEVIERTNIEAKRYNRSFSVVLADGVSRRVVLNNDDPTDFIAEVTVNAAGKPVGTDRGLNLQTLFGRAPE

SEQ ID NO: 18109 - protein, 503 aa, synthetic construct
MNNRIDAIYARQSVDKKDSISIESQIEFCKYELKGGNCKEYTDKGYSGKNTDRPKFQELVRDIKRGLIAKVVVYKLDRISRSILDFANMMELFQQYNVEFVSSTEKFDTSTPMGRAMLNICIVFAQLERETIQKRVTDAYYSRSQRGFKMGGKAPYGFHTEPIKMDGINTKKLVVNPDEAANIRLMFEMYAQPTTSYGDITRYFAEQGILFNGKELIRPTLAQMLRNPVYVRADLDVYEFFKSQGTIIVNDAADFTGMNGCYLYQGRDVKPSKKNDLKDQMLVLAPHEGIVPSDIWLTCRKKLMNNMKIQSARKATHTWLAGKIKCGNCGYALMSINNPVGKQYLRCTKRLDNKSCAGCGKIITSELEAVVYQQMVKKLEKHKTLTGRKKAAKANPKIAALQVELLHVDSEIEKLVDSLTGANNVLLSYVNVKIAELDGRKQELLARIAELTVEAISPEQVSQISGYLDTWEDVSFDDKRRVVDLMITTIAATSDSLNITWKI

SEQ ID NO: 18110 - protein, 480 aa, synthetic construct
MKKAVIYARVSSKMQAEDGLSIDAQINQLREYAVDNGYEILNEYVDKGESAKTADRPEFQQMIRDIKGDKNSYDAVLIHKTDRFARNREDSIVYKSLLRRDCGVDVIAIKEDFGEGPIGKMIEGILEVIAEFYSENLAREVKKGQVEKAKKGQALGEPPYGYIIGEDGKFKIYEPEAEVVRYIFNRYLEGDGSHTIADKIKEIGIKQFGEAAIKKTTGKELNWSSNRMVLFIIKNEVYTGLFEWDDIIIEDNHPAIISKEEFELAQELRDKKKGRGCGQRNMYLLKGLLKCYECNSNLGRKNYKSKGKTVHVSYCMNNRINNECYSNRNKMADLEKHIIKSLEKISKGITKINNLTVTRDDKDQNQKQIKKLQKKLEEFDKQFDRQMEAFEAGVINIEQLKKYKTRLNNQKDEVKNQIVKLKDVKKDIDENKFRNKINNVVTLLKDESININKKRLALLSIIKEVRVSRKNGIIKMIYKW

SEQ ID NO: 18111 - protein, 532 aa, synthetic construct
MTIINPLPRAFADVFQGDENINVYSYIRFSSKSQKLGFGEIRQLDQLNRFFDQYPQARQVERYEDLGVSAFKGKNLKSGQLAKFVERIKSREILPNALLLVESFDRISRMGGYDALELIISIIQADCAIYTLFDNRLYSKRKKDSSVDISLIQNILERANDESRAKSERISDAKARNLEKGLNGGIITKRCPFWISFIGGKFVLNENAEAVKKATELCFDFGFQVVAQELNKQGYPKKYSASSIGKFLHSHALYGSFLALKLDENGQRSIVNKEVRNYYPALISEAEFHRISAKLKERLDPKLAGRKADEFKNILRGIVFCKCGSTFRYHAQKSQYVDLVCSASMIGKCEFAKQGKGVRHRYALVEQLFLIFHAQIPFHKIIIKSDDVKALEREHENVSGLIILKEKALANNFAILEKSSESAQKYIMSRIDEVSFELDNLKLDEHRLKVQINSLHIASKSELKVIEIYRLLVTEKGRVRINNFLHSQNVKMIITPILKKYFSIEIMHGENYIDTIDVTPTGYTARINAHLK

SEQ ID NO: 18112 - protein, 542 aa, synthetic construct
MRYEDGHSHNITDALIYCRVSSKAQTKRGDGLGSQETRCREFARYKGYDVVQVFTDDLTGQSANRPGFTAMLSYLKSNRKNPHVVIIDDISRFARNVRVHFDLRQSIAAAGGILESPSVELRDDADGELHEYILASVSQHQSRKNAEQTINRMRARSMNGYWVFQSPVGYRYEKQSGHGKLLVRDEPQASILQEALEGYASGRFDTQVEVKRFLESQPDFPKDLPDGQIRNQRITDILTRPVYAGYLEAPKWNVSLREAKHEGLVSFETFVKIQERLKGNARAPARKDINEDFPLRGFVTCGDCHKPLTACYSKSKTGKRHPYYLCYNRACDSRGKSIPRDKLESEFETMLQSLQPKPYLFNMIADMFKRGWEMQRTRSEELKLALERDIAKADKQIEQLVDRIVDSESPTAVKAYEQKIAKLEREKLIAAEKRAIAAAPKRTFEEMFELAMGFLSNPWKLWVSERLADRRTVLKLTFSERLAYQRNQGFRTPQLTVPFSFFRENIKKCEMAHPTGFEPVTSAFGGRVVVLFRCFLLFTRHR

SEQ ID NO: 18113 - protein, 530 aa, synthetic construct
MIGLYSRVSTLAQAEEGYSLETQEQLCIDRAIAMGYKKSQIKIYREGGRSGEDIDRPEMNKLREDTANGIINKVIITDPDRLTRDLTDKLIICKEWDRQNVEIIFIDTEYQNTPEGQMFFNMRSVFAQYELAQIRKRTTRGRLRAVEKDKKIMPMRVAPYGYDYKDGQLTINEEESHFVKKIYDWYLKGQTLREIGALLFEAGAVPKRRESKNFGASSIRRILTSEIYIGQYVYNKRQGKKVWGEKTASGKARMTRTVREEKDWLRVDVPSIVDKETYDLAQKQRDKNTKKRGNVKFEYLFKGMIRCKCCNRIWECTTYSGREDKETGVRKKYGVYRCPNVNPKRYGDGVSKCPSLSIRVDEIEVYILNLIQDTLTDHTAFEKAIKEQVDSFDGTLDTKIAEHKKQLIKKQNERDRIKQMFIKNVITEDEMLKDMIAINKEINNIIEKMESKQSKKNLQDSQTLTQDTLDIFINNVHQLFEKDGLTFQEKRQLIELIIEEIEIDATDEKVKISIQGPLDDIVSCSQYQEI

SEQ ID NO: 18114 - protein, 562 aa, synthetic construct
MPIGKATFKLKEAIVPTRRAVIYTRVSDTNEGNNGVSHEFQETACRSRAAELGYEVIEVFRDNFSGKYLHERPELSRLRELVRQGHIQAVFVWKLDRFSRRLAQRVICVQELRDHGCQYISATEEISDSPEGRLLESILGAIAEFEVERTLERSQAGIAVLKGRCLPICQGKARYGYRYIKESRTREIVEDEAKWVRKIFEWCVGGDSSMVIAARLNRFGVLCPAVGRGVKTRGASPQWHSSTIRSILKDASYAGAPMVSGKKRSTAEVSRKGHKRTEKTNPAEWWKAKDPTPPLVDKETFDHVQEALRSRRKTRDGRTAEYPHLLRGMVKCKICGRSMSPWKTKNPAGKTYFYFCCVSRQMGCNCGNAVTPIAWLDEQVWSSVVNLMRDKDAIEARCREFMKENKCDDLERDQAAHQSKISEARESIQRLIRMLGSSDDPEILTPLQGRLAELRSNIEAHQSEVRHIESKLFTVKNQAYALQHWAEACQVGGEIIDEENVTFDYKRKLLKALDLQVFAAKKSIQMSLGLPLVIPDSSPGLAASPTSPAARPDVRGAITTRR

SEQ ID NO: 18115 - protein, 604 aa, synthetic construct
MKKGALLLRVSTEQQEFESQKNELIPIAEGLGYKISDDLIFGQFITGKDDYRGRERESITALKEACRSGKVDAIFIWEVSRLSRSSIAGRMFINEFNEMKIPIYFKDRNIWTLDPETLEEDNTTKMIIGLFFDFAEAELKTMRNRMMRGKRRNASDGLATGGYLNYGYEKELETGKIQICEEEAIFVKDLFQKYSTGQYSLGDLVRYANSTPNLPRYKKNSKRGEFTTNTGRLKSISTVHWNKAVIRGMLKNLIYIGKSHFQDITKSVPAIVDKNLFDQVQERLAKNPKTKEKSRKHTHLLQKLMICGFCNNMFYGHYSYKGNHYICSSFNTTHLNCGNSSLGYEKVESIIWDFVKKHTYIFNKIEEKEKEEFKKELMTQKEELIKDRNRTEQEINKQAKAIDNLLDMVANGVFTMQDIQRKKKSIDQDIEKYNNDLAKIESSLTLIEIKLNKIDNQLLTEDDILELEQSRQKMKDIINLAIENIKVYRINRSNVVLQIALVNKVVNILYMYRARKHFRYYYIDDDVATFLPHNEIPEFVKHKIVDVCFEVTSNNNSVFGEEIFGNYSYSQMCEILERYNQYEDYKPFEKMIVYTKKDKSIPSF

SEQ ID NO: 18116 - protein, 559 aa, synthetic construct
MKTKLYSYIRFSSMRQSDGSSYERQIRMAREIAAKYDLELVNDYQDLGVSAFKGANSKTGALSRFLDAIGRSVPVGSWLFIENLDRLSRADIVSAQELFLSIIRRGITIVTGMDNKIYSLDTVTANPMDLMFSILLFIRGNEESQTKRNRTNSSALIKIKAHQENPQNPAVAIEEVGKNMWWTDTTSGYVLPHPVYFPVVQEIVELRKNGRSTAEILDHLNETYAPPPAVSNKKHSKWSRAMVERLFHTRALIGIKEVSVDGVNYELKDYYPRVIDDPTFYHLKKNIGARAWNFGDKEEVKPIPLLSGIGLLKCDHCGCAMVKVKGTNKRSDQYRYTCDATRSRRLDCEHPNWSFRGDQLEKAVLQLLADKIWIAEDKANPVPALKVQVDEISRKIDNLIALSAMTGATKELADQITTLNSERETLYNQIKMAEEEMYSVDSQGWEKLAEFDLEDVYNEDRIKVRFKIKQALKRIGCSRIDKYKNLFVLEYIDGKTQRVVIENSRGPRKGRIFVDLKTINDRQILESNGLVLHPCLDMLTDKNWKPEEEIPGPLQEFGI

SEQ ID NO: 18117 - protein, 559 aa, synthetic construct
MPKAYSYIRFSTPKQAQGDSYRRQLAKAKEYCAEHNLTLVEETIDDHGISAYRGANMTEGALGRFLEAVKSGAIEQGSYLLVESVDRLSRQAVEEALGQFLGLINAGVVVVTLDDKAVYRKGQVETQNLLLSIMFMVRANNESEVKSDRSRKAWENGRKQARENNKVMKNSRLPSWLQWEEGQIVPIAERAAIVNEMFEMAKSGCGYEQIAKAFRSKGYKTFGKVTDWRPAGIQAVIKSRAVIGEFQPHIIEQGERIPNGEPIVGYYPAIVSRSLFKDVHHIISQRNNHSGSYRKGLFNNLFSGVLRCQCGEPLRFNNKGKAGSPRNYLICPMRQVAGCKLPNLLHEKLEPQLLQAASLLSKVMKQRRPEDAKTVALKEELAEFQMQLEIGIKKRKKAAESMVDNDDDADFREIFLSHKANCQALEEHITQLESEIMDRELSQKTLGRLIQPEDLNSTEQRQQFNAQLKAVLQEIRLHYDGFDLAAVFKDIDGSIVLEQAFKPKLTGSSVRDIRGEELLRTTSEAPYIDAAWVKGEIEEYDLHRKDVSSGLDDEFEDLS

SEQ ID NO: 18118 - protein, 541 aa, synthetic construct
MPKAISYIRFSTKIQSVGDSTKRQSKYINDWLKRNPDYYLDESLRFQDLGISGFSGANAKSGAFGEFLAAVESGYIEAGSVLLVESLDRVSRQDIDTAGEQLRKILRSGVEVVTLVDNEWYTKESLKDSLSMIKAMLVMERAHEESAMKSTRLRSVWAGKRERAANGEIMSKRCAAWLKVSDDRSHFEFIPENVKAVQRVFQLRLEGLSHVKIAKQMNDEGFSTLNQFKSVTGGWSQSSVTELLSNRSVIGFKVPSKSMAVKGVSEIPNYYPSIITDEQFYAVQQLKQGSGRKPSSDLPLLTNLFKGVLRCSECGFIVVVAGVSAKRSGIYKCSMKSEGRCNSVGFSRLQTDRALVQGLLYNTNRLSLNRDNGSAIGTLQSELEQLQKQRERLVKLSMLTDDVESMAKDLKSLNSQIKDAEKAVSEVHQREQSSQLETISHLDLTVKKDRIEAQIIIKRIVKEIRLNTAGKKCDVFLHNGLKLLNFPLDRVVDGAQWLEVLPLIDGDEFDFEGFTTKPRHLVLEEAPEWVKEIEAQPNQPL

SEQ ID NO: 18119 - protein, 525 aa, synthetic construct
MSANVTIIPPRKIAGNTVDKHKDKPKLRVVAYCRVSTDSEEQATSYDTQVQHYTDYISRNPLWEFAGIYADDGISGTSTKKRVGFNDMIHDCMSGKVDMVITKSISRFARNTIDCLKFVRQLKDKNIPIIFEKENINTMEASGELLLTIMASLAQQESASLSQNVKLGLKFRYQEGKVQINHNWFLGYTKDDEGNLVILEKEAKVVRRIYREYLEGASLRDIAEGLEKDGVKNGAGHLKWHLSNIKTILQNEKYIGDALLQKTITTDFINHVRIKNDGTEPQYYVKDSHASIISRDIFFKVQEEMVRRANMFSGEENKKRRVYSSKYALSSLCVCAKCGDVYRRIAWNNRGVRSVVWRCCTRWENGPSACDAPTVKEEELQSATVKAINKVFSISDEVLDTLKNNIREIIAGNNLSELETVDKKIADKQAILLTLLKAKKDYTKIADEIDELKGKKQQLLIEEAGQEDAKRRIREMEDFLKSERHDISEYDEKLVRKYIKKIKVYEDRFSVTFKSEISVDVERAS

SEQ ID NO: 18120 - protein, 530 aa, synthetic construct
MKMITKLEAKQPDNSLRKIRVAAYARVSSDSDEQLLSLEVQKEHYENYIKSNPCWEYAGLYFDEGISGTKIDKRESLKQLLKDCQSGQIDRIITKSISRLARNTVDCLEIVRKLTGLGIYLYFEKENIDTEHMSSELMLSILSSIAQSESKSISENNTWSIQKRFENGSFVIPCPAYGYKNENKKMIIVPEQAKVVKEIFNMALSGMGGKAIARVLTDKKIPAKRGAKWSSTTVNAVLTNKTYTGDVIFQKTFTDDSFNRHKNCGEKKQYVIENHHEAIISHETFNLVHELRQKRKLKLNITSGSNKYLARYVFSGKLYCGNCHSRLKKHDRHKKDGAYVVWCCTKHIHDAKCCPMKAVKEEYVKLAFLQMLNKLKATYAQILTPFIKSLRNVNSKDGLNKVIELEEKIAKLQEQEQVLSKLLAGGYIEMDSYYLESNQLKTEIDTCLKEKLQLSNSLNGNLTHLNEAQKLQRFVSVTEVFSEFKDEDFLDFVDNVVVKSRKEFIFHLKCGLELEEEVKETWHTSHMVTE

SEQ ID NO: 18121 - protein, 475 aa, synthetic construct
MEINKLKAALYVRVSTTEQANEGYSIQAQTERLKNYAKAKDYFIIKTYTDPGFSGAILDRPALQEMITDIENNQLDIVLVYKLDRLSRSQKNTLFLIEDVFLKNNVDFVSMQESFDTTSAFGRAMIGILSVFAQLERDTITERMGMGRTERAKEGYFHGGGSARIPVGYDYVDGLLQVNEYEAEIVRSIFELYNSGKGVNSISNAIRDKFPSKRKFGVSLTRSILTNNLYVGLIKFNDGVYEGKHEPIISKDIFDKAQYEFKRRTTGKLKLFTSKYLLTGTTYCGHCGARVKGTGSSKLKDGTRLSYYSCYSRAGSPAHMVKDLNCPSKINRTEILDEYVISQMKEITKTDISIEIDSEFTDDSDIDNTVIQNEIKSIEERINKLLELYQFGNVPLDVLNSKINSLNSEKAKLNEILNESTTEIIDDTIDKVEIFNNLKKVDWNTITHEEIKAIISQSIEKITIFNEKIEIEWKF

SEQ ID NO: 18122 - protein, 584 aa, synthetic construct
MTKHQIHVYTRISKTSQQEGSGLDEQLSRIDAYIKSKPEFLGSEITYWQDVGVSAFKNKNIHDGQLAEFIKQVESGFIGSGHALVIYSLDRLSRRSSWDEDTIQKLVKNGVDIHDVSTPVVLKRDDPFSKIIMELIVARGNNESRVKSERSIAGWEKRLKETREQGKVFTRKLPRWLSTDKNGYVVITEQAELIKRIFLEYTNGLSSPMIARRLNEEGIKSTGRSMWRPNTITKLIKDERLRGYLRRSTDQTLIPDIFPVVIDEEIFVLANRILKNNASGIKGRPRENNITREVNNILTGIVRCGKCGARVTTSKNSRGVRYVVCLNRRNYEICGQKSIKLDEFEKIVISHAQQVDMSKVFSYDKVDTSHESTLNSELSNLEIDEKNCIIDIEARKKAKKTASLVLANTLVEIQDRIEEIKQQLLELKIKDPLPEIQHFSIDDLINPSNIELRMSLRKFLTQAVDKITFRSLDNNILIEIKYYNNVYRHILITDKKVKEVLHEVDIVKNGDVINYTTNGFLITENERENTCIFHGIYNVHYKDYFLLANYIGSLKNKHWIVDKMYETENMSIVMANEKQKSHFN

SEQ ID NO: 18123 - protein, 481 aa, synthetic construct
MITTNKVAIYVRVSTTSQVEEGYSIDEQKAKLSSYCDIKDWSVYKIYTDGGFSGSNTDRPALEGLIKDAKKRKFDTVLVYKLDRLSRSQKDTLYLIEDIFIKNNIAFLSLQENFDTSTPFGKAMIGLLSVFAQLEREQIKERMQLGKIGRAKSGKSMMWAKTSYGYDYHKETGTVTINPAQALTIKFIFESYLRGRSITKLRDDLNEKYPKHVPWSYRAVRTILDNPVYCGFNQYKGEIYPGNHEPIISKEEYDKTQSELKIRQRTAAENVNPRPFQAKYILSGIAQCGYCGAPLKIMLGVKRKDGSRLKKYECHQRHPRTLRGVTTYNDNKKCDSGFYYKDKLEAYVLTEISKLQDNAGYLDKIFSGDNAETIDRESYKKQIEELSKKLSRLNDLYIDDRITLEELQSKSAEFISMRGTLETELENDPALRKNKRKADMRKLLNAEKIFSMDYEGQKVLVRGLINKVQVTAEDIVINWKI

SEQ ID NO: 18124 - protein, 786 aa, synthetic construct
MFAGAHEAPFLSVGSGVSVSGSAAGLVGEVAAVRATSNNPAAAPHDFAGSPDPVAIAAQIVVLIYLRVSTARQATKNGEVEGYSLPAQRTANTKKARELGATSIEEFVDAGASARSADRDGLQAMLARLADPSLPKVDYVIVHKLDRLARDRADDVAILLDIKKAGATLVSVSEQIDETPAGTLMHGIVASFAEFYSRNLSTEAKKGLEEKVRRGGTPGQAPIGYLNVTRRIDGTDVKSVIVDEDRAPHIKWAYAQYATGDWSISSLRDALEERGLKTRETLKYHGQPLGQSQVHRLLSQPYYKGQIRFKNMLFDGKHEPLVDEVTWQQVQDILAGRRIAGDRSWRHGHYLKGSLVCARCGGRIGYGWSKGKGGRYDYFFCLGRHTGRTSCDLPYLPAAAIEKKIAAIWSRIRFTPKVLDDIQTQAVTDFDLLLGEKDKLAAEQRRRLIQLERQKTKLIDAYMADALPVEDLKARQSQLAAEIADARRLIAESDIERTDLRNRLQVVLTLLRRARHSYDAATGTTRQLLNSAMFERFEVDSRDNGPTANGWTPQEPLVQRAELTEVIDGVLNYHPDAALYGAPSGDPVAVAFGSPFASSTTPALTPANTDLSAGNDNGSSRTITTAIPAAGSSQIQHRGNGDKDTGTDRASASGSTTPAADPEQQSAPIPDPLALSTTPHLTSENAELMSANDSALQGTTTPHATTPHTGHFSGLGRFRRTKPTATQTNPPKRHTGAKTAKRRGHHEETPARQTSTGGSNKYNLAVAEGFEPPDGVSRLSLSRRVH

SEQ ID NO: 18125 - protein, 551 aa, synthetic construct
MVNFTNNKCTIYCRVSSDRDEQANSINNQTSGLIDYAEQNNMIIADSGVFCRRNQESEPFRGYIDEGFSGAQSAKYRRAFQQMIFDSKMGLFKTILTKSVARFGRNVKDMLITIDELEKQGVGVWFEDIKAYSLNGADKIRIQLFATLAEEESRAKSDSIQWAKKQAARKGIWAGREPYGYNIEKGKLVVDEYEKNIVIMIFDLYLKKGYGVSKIAKVLEAELKVPGKRGGRWTGSHVAGILQNSVYTGHTTLHRTRKSNINLGLIEKIPESDQIKLDDESLRIITDETFELAEIERNKRPKMKDCEKGIDTRYSNAHLFSNLIYCSNCGGSMRKKVQKTTRTTHHYYYCRNHEIYGNDICKYRNLQREEDLLEWVKEEFRTFIADTDDHEFNFNLLLETKYESEDFDTLIKEAKTKLLEVENEKEVNFRLLSKQIIDDEDFGARNTAIKLEIEKLKSEINRYSNINKEIELFHTEYKNFIKSLSEINLDNLDNMTLRKFISGISIATMWIPGEGDEEQTIRSIHWRFMEWDQLDIINDHVKKFVLDKQPK

SEQ ID NO: 18126 - protein, 548 aa, synthetic construct
MALLNREYLLSLGIEFIINYLRKSRADEEQERRTGEDVLTAQKELMDRVLEPVGLPYDQRPEVGSGDKISSRPVFQSVIEDLQAKKYQAIAVKEISRMGRGSYTDMGVIYDLIVDNRIFIITPYKVYDPRNPSDLRQIRFELFMSREEFETTRERLFGGRVNNAIEGRWVAGAAPYGFTYNKATKKLEIDEEQAREVRAIFDFFVNGVVEPGGHRRDVSYRALASYLSKKTSIKPPRGKGDWQPQVLRQLLCNERYIGVMRFRTTQRINGKAVARPEEEHIIIPDAIPAILDRDIWEKAQKKINDSSHKPRTKMDFSPCELAGLCICTKCGRRMVRQYSVQNYKKKSGEVIQYHKEFLWCTTAGCTFIKYRNVEEEIISVLSYLSDLDENELNNTFSTILASEQKSTEIAYDDEYIEKQTKTLKKRMDFIYEKYESGKYDDKMFDERKAEVDKQLEDLKKLKESFEEQADRTGENKVDTDLIRENISTVLDQYHATDNKTMKNSILRAAFDSIEVTLTEKGRGRIAAKFDLTVNLKANLAKLNFLVLS

SEQ ID NO: 18127 - protein, 540 aa, synthetic construct
MAQAATAKKVVVVPIKTMDIVEGIQSIQKKKVAAYCRVSTDSEEQKESYTNQVNHYTQYIQNNLEWEMADIYADEGITGTSTKNRTHFNRMIQDARNGKLDLILVKSISRFARNTLDLLKYVRELKSLGVAVFFERENINTLDTTGEVLLTILSSLAQDESRNISENSRWGILRGFQNGKVFCNTTRFLGYDKDEHGELVINEPEAEIVRRIYEEYLDGKSYQAIARGLMRDHIKTVTGGDTWWDSSITLILTNEKYYGALLQQKTVTVDFLTHKRIRNKGQEQQYLIEDNHEPIVSKEIFESVQKEKARRAKLKGNVMGESKRYSCKYALSSKVYCGCCGAIFKRRTWNSNNPSKKVVWQCKTYVNEGKAACDAKSIDEQVLHSAFVRLFNRMYENKKGFMKTLKGNIESVLSSKVGQEPLLDIEGQMQQLKSDLKELVNLKLRNQIDETVYDEETNRLSNELNELRQQKLTLEQEHEQQAKIKERVDEIIQVLSTQQDVLEQFDDNLFNALVEKITILSPAHFVFTLKSGMSIDEILD

SEQ ID NO: 18128 - protein, 538 aa, synthetic construct
MLRQATQNLITALYPRLSKDDELQGESNSISNQKRILEAYAKQNGFTNLRWYTDDGYSGANFQRPGFQSMLADIEAGKVGTVIVKDMSRLGRNYLQVGFYTEMLFPQKGVRFIAVNDNVDSANGGMDNDFTPLRNLFNEWLVRDTSKKIKAVKRSKGMSGKPVTSKPVYGYVMDEDENFIIDEEAAPVVQQIYQLCLAGNGPTKIARMLTEQQIPTPGTLEYQRTGSTRRYHPGYECKWATNTVVHILENREYTGCLVNFKTEKPSYKVKHSVENPIEKQAIFENHHEPLIDMETWERVQELRKQRKRPNRYDEVGLFSGILFCADCGHVLYQQRYQNKDRKQDCYICGSYKKRTRDCTAHFIRTDLLTAGVLANLRQVTEYAAKHESRFVKLLVQQNEIGGKRKTAAAIKQLEQAQERISEISRIIKRLYEDNVNGKISDERFMELSADYEAEQAELKKRAAALQAELDKSQAATVNAEKFMGIVRKHLAFEELTPTLLREMIEKIVVHECSYDENGTRRQDIEIYYSFVGKIDLPE

SEQ ID NO: 18129 - protein, 540 aa, synthetic construct
MKQPYNTTIYNTALYMRLSRDDENYGDSVSIETQRTILQQYAKEQGLHVVGEYVDDGWSGTNFERPDFQRMMDDVEAGKVNCIVTKDLSRFGREHVMMDYYLEFLFPEKRVRYIAVAENEDTEKGLSDFVPFKNLFNEWFAKDTSRKVKAAFKAKFATGQRIGAYAPIGYRKHPEIKNKLIIDEETRWIVEKIFDLAIHGRGAASITRILIAEKVPTPGFINFQRDGTFANIYAGAPEEKSYAWTIAQVKSIMKDETYIGHTIHYRETNISFKNKRRIRKPQSEWVRVENTQEPIISEQVFRQVQEQIANRRRKCKDGTTQIFSGLVKCSDCGWSLSYGENRQNSKPYGHYHCSKYGQGTRQCSMHYIRYDVLYAYVLSRLQYWSGLVQHDEERLLKRLLNANDKGQAAARKKQAAELNKAEKRKAEVDTLFARMYEDWAAGRITEYNFSMLSGKYQSEQAELDTKIEQLQSAIATESQNAADAEKWIALMKECVNPTELTAELLNTLIEKIVVHEAVKGEDGSREQEVEIFYRFIGKID

SEQ ID NO: 18130 - protein, 624 aa, synthetic construct
MDAQEVMHMTDYSKITALYSRLSVGDEDRDGGESNSIQNQKIFLENYARGQHLTNIRHYIDDDESGRFFDRSAYSRMMDDVENGKIGVCIMKDLTRWGRDYLQVGNAMEIFRRNNVRFIAVNNGIDSEKPDTLEFAPFINIMSEWYAKDISKKVKTGIKTKGMSGKPIATEAPYGYVKSPDNKDFWIIDEEAAGVVRLIFRLFLDGKNRNQIAVYLTQAQIPTPTFYMKERGRGTCKNRALNEANRYKWNKATLTHILTRQEYCGDVVNFKTTKHFRDKRNHYVDRSQWQITENVHEPIIDRTDFETVQRILENAPVKRPNGDGEIHPLSGLLFCKDCGAKMHIRIDYRNGGKRHVAYCSEYHKGKAKNPKCNSPHIIDADLLMQTIAEVLKKIEDYSISNWAEFEALVKKNLAMQQTDKTKKQQKRIPQITTRLEQIDKVLNKLYEDNALGTIPQDRYEQMSQKYSEEYYALKAELAELQEQLSAFENAGGRAQKFLKLTERYAAFTDLTPAILNEFISRIEVHERDKKRAKQAIQHIGIYFNYIGKFENEVTQLTEPTEQEIRQMREEIEEAKKEKSRAYHRQYSREYRARNLEKQREYDRIKAREYRARRKAQTAAAQPAQ

SEQ ID NO: 18131 - protein, 626 aa, synthetic construct
MKNEKITPLYERLSRDDELQGESNSISHQKQMLEEFARRNGLPNPTHFTDDGVSGTRFDRPGFLAMMEEVEAGRVEAIVIKDMSRLGRDYLKVGQVMEILRQRGVRLIAINDGVDSLKGDDDFTPFRNIMNEFYARDTSRKIRSVFKSKGMSGKHLTGTVIYGYLWDEKREHWLVDEEAAEVVRRIFSLTMEGYGPYQISKLLSEAKVEIPAVHLAHFDEGVNRTKPVKDPYGWGSSTIVNILKKREYLGHTINFKTRKHFKDKKSHYVDESEWTIFENTHEAIIDQETFDNVQRIRANVRRYPDGWGEAHPLTGLMYCADCGGKMYVHRVNNGKRDPQFTCSQYTKVPCGTLCGTQHRIRAEAVLTLITDMLRAIAEYSKNDRAEFIRTVQETQAAQQTADISKKRKRLAAAQKRAGELEKLICKIYEDNALGKLPDTRYEALDAQYAKEQDALNAEIAELEKAVTGYEQSRKSAEKFIALIDKYENFDTLTNTMLNEFVEKILVHERARKGSQDTTQEVEIYFNFVGRYIPPALQPVPLTPEEQEELRKKEERKDRLHQNYLRRKANGKQKEWEERYNARRKAKMEAAKAAIRAEDMEKGIFSTVSQLPRQEPRKATVSASAAV

SEQ ID NO: 18132 - protein, 539 aa, synthetic construct
MLRQATQNLITALYPRLSHEDELQGESNSISNQKRILETYAKQNGFTNLRWYTDDGFSGANFQRPGFQAMLADIEAGKVGTVIVKDMSRLGRNYLQVGFYTEMLFPQKGVRFIAVNDNVDSANGGMDNDFTPLRNLFNEWLVRDTSKKIKAVKRAKGMSGKPVTSKPVYGYLMDEDENYLVDEETAPVVQQIYQLCLAGNGPTKIARMLSEQQIPTPGTLEYRRTGSTRRYHPGYECKWATNTVVHILENREYTGCLVNFKTEKPSYKVKHSVENPVEKQAIFENHHEPIIDRETWERVQELRKQRKRPNRYDEVGLFSGMLFCADCGHVMYQQRYQNKNRKQDCYICGSYKKRTRDCTAHFIRTDLLTAGVLSNLRQVTEYAAKHESRFVKLLIQQNEIGGKRKTAAATKQLEQAQERISEVSRIIKRLYEDNVNGKISDERFMELSADYEQEQRELKDRAAALQEELDKSQAATVNAEKFMGIVRKHLAFEELTPTLLREMIEKIVVHECSYDENGTRRQDIEIYYSFVGKIDLPEA

SEQ ID NO: 18133 - protein, 554 aa, synthetic construct
MMNGYEYTGMDAILAGSFRAAIYCRLSKDDDLDGESASIANQRDMLESYCEKQGWEVVAVYQDDGYTGLNMERPDLKRMLKAIERRQINLVITKDLSRLGRNYLQTGTLIEDFFPRHGVRYIAMNDGIDTMRDNNDIAPFKNILNEMYSKDISKKVHSSYLLKAQQGQFTGCVAPFGYRKDPEDKNHLLVDEETAPIVRQIFLWALEGHGPNFIRRRLEEQKVPCPTWWNRERGFRNVRTKWEKKDPENGRYMWDFSVIKDILMNPVYTGAIASQKKDYRFKIGTIGEKKPQDWIVVEQRHEPLIDSKSFAIVQDKLKSRQRPRQDGETSLFAGLIKCGECGKSLTIRTTHAKHPQQIYACKTYGAFGKNHCSQHRVEYDTLYHLVLNKIRECARAALTDGEAIAGKLTNTCEAEQKGQREALERSLTKDEERIEVLEKMVLRLYEDMVAGRISEANFNLMLDKTQKEQAELKERVAQGRKKLADEMRLAMDAKQWVDAIQEYADITELDTATLNRLIKEIVVHEHIDSDKTRHISIEIHFNLKPIPEVEQVKG

SEQ ID NO: 18134 - protein, 522 aa, synthetic construct
MAVRRNVTVIPAIKRVGNNKNSESKPKIRVAAYCRVSTDSEEQASSYDIQIEHYTNYIKKNKEWELAGIFADDGITGTNTKKRDEFNRMIEECMAGNIDMIITKSISRFARNTLDCLKYIRQLKDKNVAVFFEKENINTMDSKGEILLTIMASLAQQESQSLSQNVKLGIQYRYQQGEVQVNHKRFLGYTKDENKQLVIDPKGAVVVKRIYREYLEGASLLQIARGLEADGILTAAGKAKWRPETLKKILQNEKYIGDALLQKTYTVDFLSKKRVKNNGIVPQYYVENSHEPIIPRELFMQVQEEMVRRANLRGGKNGKKRVYSSKYALSSIVYCGQCGDIYRRVHWNNRGYKSIVWRCVSRLEEKGSECTALTINEETLQTAVVKAINNLLAKKEPFLSTLQKNIATIFNEENDNVTDDIDSKLEELQQQLLIQAKSKNDYEDVADEIYRLRELKQNALVENAEREGKRQRIAEMTDFLNEQFCELEEYDEQLVRRLIEEITVFNDKFLVKFKSGIEVNQE

SEQ ID NO: 18135 - protein, 520 aa, synthetic construct
MKKITKIEGNTVNSFIKPKTRVVAYCRVSTDSDEQLVSLQAQKAHYETYIKANPEWEYAGLYYDEGISGTKKQNRSGLLRMLSDCETRSIDLIITKSISRFARNTTDCLEMVRKLIDIGVHIYFEKENINTGSMESELMLSILSGLAESESISISENTKWAIQRRFQNGTFKISYPPYGYQNIDGQMIVIPKQAEIVKYIFAEVLSGKGTQKIADDLNRKGIHSKRGGRWTATTIRGILTNEKYTGDVILQKTYTDSRFNRHTNYGEKNMYLVENHHEAIISHEDFEAVEAILNQRAKEKGIEKRNSKYLNRYAFSSKIICSECGSTFKRRIHSSGRKYIAWCCSKHISNITECSMQFIRDEDIKTAFVTMMNKLIFGQKFILRPLLNGLRNQNNAASFRRIEELETKIENNMEQSQMLTGLMAKGYLEPALFNKEKNSLEAERERLLAEKDQLTRSVNGNFAKVEEVDRLLKFATKSKMLTAHEDELFENYVEKIIAFSREEVGFELKCGITLKERLVN

SEQ ID NO: 18136 - protein, 543 aa, synthetic construct
MRALIVIRLSRVTDATTSPERQIAACQELCSQRGYDVVGVAEDLDVSAAKTTPFNRPQLGKWLADPTQYDVIVFFRVDRIVRRLFDLADLIRWSREHRVTLVSATEAHFDLSTDFGDIIALLVAKVAEMELEAISERNASAFRHNFSKGKYRGGIPPWGYLPERDENGEWRLVQDPGQVAVILEVVERVLAGEPLRAIAHDLTGRRVLTPKDRFAQSRGRKAQGYAWHSAPLKRALTSHTLLGRVVTREQALDAQGRPQRDAKGRKVFGGDVLVTADDGTPIVRAEPIISRDVFDRLGVELAGRENRKEPTKRTSGLLLRIIFCGVCGRPAYRLKGGAGRKPRYRCASAQYAETCGNKTIALDYADSEVERQILQNMGPLERKRRVWFAGNDHTDELGEINELLSDLTDQIGVGMFKRGTPQRAKLDQRIAALTTRQAELSSVPAQPAGWRYEPTGELFSDWWHEQDDEAKNIWLRQSGFRYEWSSHSDERGRVVVDSFRQVGDLEMDLDADQLFGPIADIVAALSDPTNLATWAALPDDDES

SEQ ID NO: 18137 - protein, 501 aa, synthetic construct
MRQQLRAVVGSRVSHLDDDKAATRKVSHKAQTEEGGRWAKSQGYEVVGAFEDLGVSAGKTTPFERPDLGKWLAPERLHEWDVLVFSKIDRAFRSTSDCVDFARWTKENRKILAFSGDGVVLDYLHPKGESLDQMMSEFFIYVGSFFAAIELNRFRTRATDRLSYLRMTDRVSHGVPPLGFRTVPHPSGQGKALERDPKGYALLHEIKDKLLHENYSLTGLVQWLNETGRQTAVAKARKGDAKWSVTSLKRTLTSERTQGLRMSGGKPVLDSQGTPIRMAEPTFTDDEWEQIQQALNQRSTSGRARYMTDNPFAGIVYCVCGYAVAQHRRKSSSGKEHTYVRCGQGCRGAWKLADVYEQLDLSFLAGYADQEMTKLVFVPGEDRSEELAGIERSITRLRWESDNDLVDDEDLYQSRMAALLSRKREIGQIVVPARWERRGTGKTYQELWADPETDRRQVMRDARIRLVLHFIPKGSDAPFVTHAHFEDMWNPAEEAKALSGN

SEQ ID NO: 18138 - protein, 515 aa, synthetic construct
MRKSKAPLTEVKRCAVYTRKSTAAGLEMEFNSLDAQRESCVSYVQRQPGWALMDESYDDGGFTGANMERPAFQRLLQDVDAGRVDVVVVYKVDRLSRSLLDFAKVMERFNAAGASFVSVTQNFSTADAMGRLTLNMLMSFAEFEREMISERTRDKVAAARRKGKWTGGRAPLGYEVKDKRLVVNEYEAVVVREAFELYLQHQQASVVSRLLNEAGRKTKRYEAQSGTTRAARKWTTQDVLRLLRSPLYAGFVPYGDETHPGEHPPIVERATFHRVQDMLEGPGIQYHGRNPDYVLRGLLRCGLCGEAMTPGSTRKGTREYRYYRCVTRDKQGKEGCRAAPLPAAALEDFIVARLREVSVGEGFAAQVHARLTARMQEKHKALRAERAQLPKDLAKRTRESTKWVDSLTKLEGPARRLLEEKLTAAEEEGAGMRKRLAEVERALDAIEGEKVEAAWVAQALGNFDAVWDALTSTNRGRLLRALVGRVVVNEATGKVDVHMAHAGEAAATGHEEVAA

SEQ ID NO: 18139 - protein, 538 aa, synthetic construct
MAKKVTVIKAAKAQKHTQEERRLKVCGYARVSTGGQAQATSYTAQVEYYTEKIGSNPLWEFAGVYADEGISGTNVKHRDEFQMMISDCEDGNIDLILTKSITRFARNTVECIQTIRKLKEIGVGIYFEKENINTLSEKSELFITILASVAQGESENISSNNRWAIQKRFQDGTYIISTPAYGYGKDEDGNLVIIESEAETVRWIYESYLNGMGVYVIAKALNQKGIPTIRGAEKWQDGVIQDILKNPIYEGDMLQQRTYTETRFPFVRRVNNGQRNQYLIKDSHPSIVTHEEAEAVRNLMAYRVDVLHMNKSDYTKRYLFSGRIICGECGRTFRRQKIYIGKPYEKIIWTCSGHVEDKESCCMKAIREDVLHRAFTDMWNKLYTNQGTILEPLLKGLTELVAARQDSEEIRQLDKEIKDISGQSQILNQVMRKGYMDSALFMESSSKLGWQLTECRRKKTLLTRKLRRTKEIVRTEQLIQLIAEQDGLREEFDEQLFKMTAEKIVVSKEHDITFCLHNGLKLTERGGGQDAVAHANRL

SEQ ID NO: 18140 - protein, 544 aa, synthetic construct
MAETAKKISMIPAKVQYDRNVKLSEKKMKVAAYCRVSTELEEQDSSYEAQVEYYTSKISENENWKNAGIYADDGKSGTNTKKRADFNAMIQDALAGKIDMILTKSVSRFARNTVDSLVTIRKLKEKNVAVVFEKEGINTLEGTGEILITILSSLAQEESRNISENIRWGVVRKFEKGKVIVNCTKFMGYTKNEDGDLVIVPEEAEIVKLIFRLYLEGYSTGKIAKHLEEQGIKTATGQDKWHSTVIDKMLRNEKYMGDALLQKTYTVDFMTKKKVKNTGLVPQYYVEDDHEAIIPKELFYRVQEEMMRRASLCKAAVTRKKNQRSRYSSTYALTGMLICGKCGQEYRRVTWARNGKKKVVWRCSNRLTNGVKKCGESETLEENALNRAVMEAIHRITSDDMEFMENFRQNIIHVIGNYSTAKESGEYEEKIKEKREEMVALIAENAKTGSYTPEFDERYRTIAEEINALKEAQKTARNEKRMADSYEQRIQDIDHYLSTSTCQIPEFDNDLVRRLISTIKVESSEKLLIQFQSGIVMEKEIRYE

SEQ ID NO: 18141 - protein, 541 aa, synthetic construct
MPKAISYIRFSTKIQSVGDSTKRQSKYINDWLKRNPDYWLDESLRFQDLGISGFSGANAKSGAFGEFLAAVESGYIEAGSVLLVESLDRVSRQDIDTAGEQLRKILRSGVEVVTLVDNEWYTKESLKDSLSMIKAMLVMERAHEESAMKSTRLRSVWAAKRERAAKGEIMSKRCVAWLKVSEDRSHFEFIPENVKAVQRVFQLRLEGLSHVKIAKQMNDGGFSTLNQFKSVTGGWSQSSVTELLSNRSVIGFKVPSKSMAVKGVAEIPNYYPSIISEQQFYAVQQLKQGSGRKPSSDLPLLTNLFKGVLRCSECGFIVVVAGVSAKRSGIYKCSMKSEGRCNSVGFSRLQTDKALVQGLLYNSNRLSLNRDSGSAIGTLQSELEQLHKQRERLIKLAMLADDTESMAKDLKALNSQIKDAEKAVSEVHQREQSSQLETISHLDLTVKKDRIEAQIIIKRIVKEIRLNTAGKKCDVFLHNGLKLLNFPLDRVVDGAQWLEVLPLIDGDEFDFEGFTTKPRHLVLEEAPEWVKEIEAQPNQPL

SEQ ID NO: 18142 - protein, 603 aa, synthetic construct
MARKNPKNPDATRPLSCVLYIRVSTKLQVEKGESIDAQRFELTRYAEAHGMRVLGEYVDAGFSGKNVRGRPQFRQMLDDIIKEQPGRRPTYVLVFKLSRFGRNAADTWNSLQMLQDYGVELCCVKDGIDSATTMGKAMLSIAAVFAEMERVNIRTQTMSGREEKARKGYWNGGQAPYGYRLVDRGGKFKELAVDEDEAKVVRKIFQMYAYENKGAMAIAAWLNNHGVRKDARGNATMETFGSTTIARMVVNPVYVGKIAYGRRRTEVIEGTRGETHVVKSDGYEVYDGRHEAIIDEATWAAAQAIVGTRKPNAKRHDDGHVNLLNGLLVCPECGRKMSSHPNRGKVKKDGTRGKTTYAYYCPHTSKARGATCTFSRQYPQEYVDAEVIEMVKLASRSDAFVEALRRRINDETDVEQLREDAERIGRERAANDKRMRMLMNQIDALDPADRSYERKFNDLQRRLDDLYDRDAGFQEALEETQAKIAAADKRRVGERKLLDELDRIPELLEEADEQTRFDIVHEAVSEVRILADRNPRKERVVQSVTFKCPVRFFWEEVPGVADGYTAVTPDSFDVDGNFRDDETHVETIALVERVEGFFERSDR

SEQ ID NO: 18143 - protein, 508 aa, synthetic construct
MKKALLYVRFSTAKQELGDSVERQTEKAESWCKDNNVELLDNRFHDLGVSAFKEGGKRPALADLIEVIESGKLSVDYCLFENADRLTRRGYAHALELVNKLVGLGVSLIILDGRYVYDKSTMGNGLTPILPLLFDADRAYNESLRKSNLIKSAKAKVVDGNIIKGKLPFWISLENEVPVLNDKAQHAELMLSGKLKGQSNQSIAKQLNAIHPEGLSGKGWGGSLVRQTIKNHALYGAKVYYSTGEDGRTLTPIKKVPDMFPALVDFDVWDSLQQKRKGRTSKKSAFTGLMKCGHCGSGMVQRTNTYKGKKLMYRKCIGATEGRCHNVHLIREPDVILEKMLSSMTYTVSQDYKSQTPELMSSLEFEKELLTDARQNKDLKAAKRANAEISQLEIQLDESRANDEKQSSEVEVEYRSIFDLPTEPEQNTMFKKLIDKVEVLFLRKYGKTGAVFKLTCIQANGHKIIRTLEQRHGFGNYRLMGTHDSEKLLNEIKAMAVGSHEDYEFYDE

SEQ ID NO: 18144 - protein, 507 aa, synthetic construct
MKRAISYIRFSSEKQSRGDSLRRQAKMVTDWLKAHPEYYLDESLTFRDLGVSGFTGKHLKGGLGDFLTAIEKGLVKAGDTLLIESLDRLSRQDVDQASELLRNILRSGVDVVTLSDGEHYTRESLKDPLALIKSILIMQRAHEESLRKAERIQAAWDAKKEAAKAGIKISRRCPAWLKLNDDRKSFSVIPEKVETVKRCFQLRLEGKSIWEIVRTLNAEGHQTLNQYKAGKFGQTSVQDLLKNRSVIGYFTPKGCEEISGYYPAIIDETTFYKVQQLSYARYGRKPASDKPMAVNLFKGVIRCSECGHALIITGFSDTRNGIYRCPLRNENRCSAKGLSRKQTDGTLLALLSRLDRFDSDMTNIIDTLKLHREHISSNIEKLVQLSLEIEDLSAITSKLRQLKNELSQVDADIEKETQRLKSIDVGCLSDCDLTTKAGRIEAQLIIKSAVKEVVLNTAKRRCKVTFHNGKAITLPITENPSDNVTEAIQSLSEVTERGLIDVDEVII

SEQ ID NO: 18145 - protein, 506 aa, synthetic construct
MRTVITYLRFSSATQGAEGADSTRRQNELFKQWLRKNSDAQVVASFSDEGLSGYKGKHLTGQFGDMLARIEAGEFPAGTILLVESIDRIGRLEHLETEALMNRILGNGIEIHTLQDGLIYTKDALADDLGISIIQRVKAYIAHQESKQKSFRVSQKWEQRAKLALAGEQRLTKMVPGWIDPDTFKCNEHAETVRLIFKLLLDGESLHNIARHLQANNISSFSRRKDANGFSVHSVRTILRSVTTIGTLPASQRNDRPAIPNYYEAAIDAATFNKAQEILDKNRKGRTPASDNPLTINIFKGLFRCQCGASVHPTGTKNKYAGVYRCNNHLDGRCDVPPLKRKPFDRWMIDNFLGMIDVGNDGEAEGKIAALQHEVEIVTTRIKKATALLLEMDDITELKAQVKELNQKRTELQTTIDSMRRKTSLTDKELPQLKDIDLTTKAGRVECQLILSKHLKGLTLGKDSVIVTLQNDTEITIPTNPLPLHDGTSIFEIAEKELLEIDAYQL

SEQ ID NO: 18146 - protein, 507 aa, synthetic construct
MKRVISYIRFSSERQAKGDSLRRQSKMVNDWLKAHPEYYLDQDLSFRDLGVSGFTGKHLKGGLGDFLTAIEKGLVKAGDTLLIESLDRLSRQDVDQASELLRNILRSGVDVVTLSDGEHYTKESLRDPLSLIKSILIMQRAHEESLRKAERIQAAWDAKKEAAKAGIKISRRCPAWLKLNDDRKSFSVIPEKVETVKRCFQLRLEGKSIWEIVRTLNDEGHQTLNQYKAGKFGQTSVQDLLKNRSVIGYFTPKGCEEISGYYPAIIDETTFYKVQQLSYARYGRKPASDKPMAVNLFKGVIRCSECGHALIITGFSDTRNGIYRCPLRNENRCSAKGLSRKQTDGTLLALLSRLDRFDSDMTNTIDTLKLHREHISSNIEKLVQLSLEIEDLSAITSKLRQLKNELSQVDADIEKETQRLKSIDVGCLSDCDLTTKAGRIEAQLIIKSAVKEVVLNTAKRRCKVTFHNGKVIDLSITEDPSEDVTEAIQSLSEVTERGLIDVDEVII

SEQ ID NO: 18147 - protein, 506 aa, synthetic construct
MRSVITYLRYSSAIQGAEGADSTRRQNDLFKQWLKKNSDAQVVASFSDEGLSGYKGKHLTGQFGDMLARIESGEFSKGTILLVESIDRIGRLEHLETEALMNRILGNGLEIHTLQDGLIYTKDALVDDLGISIIQRVKAYIAHQESKQKSFRVSEKWKQRAKLALAGEQRLTKMVPGWIDPDTLKLNEHAETVRLIFKLLLSGESLHNIARHLQSNGIKSFSRRKDANGFSVHSVRTILRSETTIGTLPASQRNDRPAIPNYYEAAIDAATFNKAQEILDKNRKGRTPASDNPLTINIFKGLFRCQCGASVHPTGTKNKYAGVYRCNNNPDGRCDVPPLKRKPFDRWMIDNFLGMIDVGNDGEAEGKIASLQHEVEIVTARIKKATALLLEMDDITELKTQVKGLNQKRTELQTTIDNMRRKASLTDKELPQLKDIDLTTKAGRVECQLILSKHLKGLTLGKDSVIVTLQNDTEITIPTNPLPLNDGTSIFEIAEKELLEIDAYQL

SEQ ID NO: 18148 - protein, 542 aa, synthetic construct
MQQLKTKRVGIYVRVSTEMQSTEGYSIDGQINQIKEYCDFHHFEVKDIYADRGISGKSMNRPELQRILKDAKEGYIDCVMVYKTNRLARNTSDLLKIVEDLHKQNVEFFSLSERMEINTSSGKLMLQILASFSEFERNNIVENVFMGQTRRAQEGYYQGNLPLGYDKIPNSKHELMINQHEANIVKYIFESYAKGHGYRKIANALNHKGYVTKKGKPFSISSITYILANPFYIGKIQFAKYKDWSEKRRKGLNDKPVIAEGKHSPIINQDLWDKVQMRKKQVSQKPQVHGKGTNLLTGIIHCPQCGAPMAASNTTNTLKDGTKKRIRYYSCSNFRNKGSKVCSANSVRADVIEDYVMKQILEIVKSDKVIQRVVTHVNQENQVDGAALHHDIAYKQQQYDEVQIKLNNLIKTIEDNPDLTSVIRPSIQKYEKQLNDITNQINQLKNQQNEDKPLFDAKEISKLLQHIFHDIKHIEKSRLKALYLSVIDRIDIKKDGNHKKQFYVTLKLNNEIIKQLFNNKQLDEVHLSTSSLFLPQTLYLTI

SEQ ID NO: 18149 - protein, 502 aa, synthetic construct
MSKEKIKVYLYTRVSTSIQIEGYSLEAQKSRMKAFAIYNDYEIVGEYEDAGKSGKSIEGRIQFNRMMEDIKSGKDGVSFVLVFKLSRFARNAADVLSTLQIMQDYGVNLICVEDGIDSSKDAGKLMISVLSAVAEIERENIRIQTMEGRIQKAREGKWNGGFAPYGYKLEDGKLFINEEEAVAIRTIFDQYVNTTIGANGISKYLENHGIRKIPRQNGKNPLFDAGLIRKILKNPVYNGKIAFGRRTLEKVHGTRNEYKQVEQDEYLISEGIHEAIVSDEVWQAAQVKLKSQAKKYEHVNKGKDTRTHLLSGIVKCPICGVGMFGNKCIKKKKDGTKYKDFYYYGCKHRQMIRGHKCTFSKQIREELLDDAVAEVIVKIVSNPKFASMMQEKINMKVDTSEIEKEIDNYQKELRKSHSTKFKLIEEIDNLDVEDKHYKRRKQDLDDRLYRMYDKIDELESSLIDAKAKKQTIEAEKLTGDNIYKVLIYFDKLYKVMNDVERR

SEQ ID NO: 18150 - protein, 608 aa, synthetic construct
MKKDVKVIKGDTTLKRTASGCVQRSIKRVAAYCRVSTDTEDQINSYNSQVEHYTEFIQKNKEWTLAGIYADEAITGTQVDRRIDFQRLINDCMNGDIDMIITKSISRFARNTLDTLKYVRKLKEFNVAVFFEEENINTLTMDGELLLTILSSVAQQEVENISANVKKGLRMKMERGEMVGFQGCLGYDYDPETKSISINEKEAEIVRYIFRRYIEGVGGMVISRELEEQGYLSPRGNKRWTETTVLGIIKNEKYKGDLMMGKTYTVDPISKRRLDNFGEQDKFYIENHHEPIISEEDFEKAQGIRLRRSKNRNTVANNGGKREKYSRKYAFSSMLECGFCGHNLSRRNWHSSSEYTKVIWQCVNATKNGKKYCPHSKGIEEEAIEKAFMESYRQVCHNNVEITNEFLKTVEEELKDNSLAKDLKKITNQLDKILKKEKDLVELRLNESISMDIYQDKYNEIAISKEKLLAEKRTLEVTLTDEKALKKRLEGFKKLLESNKYLEEFDRAVFESIVDKIIIGGTNDEGEIDPAMITIIYKTGKKDSQDGRLFKSRRKNAKEVNEETDNKLYPHSSDEVNNLYSYPIDNTRWCVVVQFGDDFLVCILIDDV

SEQ ID NO: 18151 - protein, 481 aa, synthetic construct
MKTMNKVAIYVRVSTTNQVEEGYSIDEQKDKLSSYCDIKDWNVYKVYTDGGFSGSNTDRPALESLIKDAKKRKFDTVLVYKLDRLSRSQKDTLHLIEDVFIKNGIEFLSLQENFDTSTPFGKAMIGLLSVFAQLEREQIKERMQLGKIGRAKAGKSMMWAKTSYGYDYHRETGTITINPAQALAIKFIFESYLRGRSITKLRDDLNEKYPKHVPWSYRAVRTILDNPVYCGFNQYKGEIYPGNHEPIISKEEYDKTQSELKIRQRTAAENVNPRPFQAKYILSGIAQCGYCGAPLKIMLGVKRKDGSRLKKYECHQRHPRTLRGVTTYNDNKKCDSGFYYKDKLEAYVLKEISKLQDDADYLDKIFSGDNAETIDRESYKKQIEELSKKLSRLNDLYIDDHITLEELQSKSAEFISMRGTLETELENDPALRKNKRKADMRKLLNAEKVFSMDYENQKVLVRRLINKVKVTAEDIVINWKI

SEQ ID NO: 18152 - protein, 481 aa, synthetic construct
MITTNKVAIYVRVSTTNQVEEGYSIDEQKDKLSSYCDIKDWNVYKVYTDGGFSGSNTDRPALESLIKDAKKRKFDTVLVYKLDRLSRSQKDTLHLIEDVFIKNGIEFLSLQENFDTSTPFGKAMIGLLSVFAQLEREQIKERMQLGKLGRAKSGKSMMWAKTSYGYDYHKETGTVTINPAQALTIKFIFESYLRGRSITKLRDDLNEKYPKHVPWSYRAVRTILDNPVYCGFNQYKGEIYPGNHEPIISKEEYDKTQSELKIRQRTAAENVNPRPFQAKYILSGIAQCGYCGAPLKIMLGVKRKDGSRLKKYECHQRHPRTLRGVTTYNDNKKCDSGFYYKDKLEASVLKEISKLQDDADYLDKIFSGDNAETIDRESYKKQIEELAKKLSRLNDLYIDDRITLEELQSKSAEFISMRGTLETELENDPALRKNKRKADMRKLLNAEKVFSMDYENQKVLVRRLINKVKVTAEDIVINWKI

SEQ ID NO: 18153 - protein, 452 aa, synthetic construct
MKAAIYIRVSTQEQIENYSIQAQTEKLTALCRSKDWDVYDIFIDGGYSGSNMNRPALNEMLSKLHEIDAVVVYRLDRLSRSQRDTITLIEEYFLKNNVEFVSLSETLDTSSPFGRAMIGILSVFAQLERETIRDRMVMGQIKRVESGLPLTTAKGRTFGYNVVDAKLYINEEEAKHLQLIYDIFEEEKSITFLQKKLKELGFKVKSYSSYNKWLMNDLYIGYVSYSDKVHVKGIHEPIISEDQFYRVQEIFSRMGKNPNMNKESSSLLNNLIVCEKCGLGYVHRAKDTVSRGKKYHYRYYSCKTYKHTHELEKCGNKIWRADKLEEIIISRVKNYSFATRNLDKEDELDSITEKLKTEHSKKKRLFDLYINGTYEVAELDKMMADIDAQINYYNSQIEANKELKRNKKVQESLAELATVDFDSLEFREKQIYLKSIINKIYIDGEQVTIEWI

SEQ ID NO: 18154 - protein, 517 aa, synthetic construct
MATITTIPARPAKSVTPTTVRSRRKVAAYARVSTDLEEQQSSYQAQIDYYTNYIQGRADWEFVGMYADEGISGTSTKHRQGFQTMITDALAGRIDLIVTKSVSRFARNTVDSLTSVRALKEAGVEVYFEKENIWTLDSKGELLITIMSSLAQEESRSISENVTWGHRRRFAEGKVMVPYASLLGYKKGDDGGLAIDEDQARIVRRIYREYLAGHSPKTIAAHLTKDGIPTPLGKKTWSVSTINSILRNEKYKGDALLQKTFTVDFLTKTTKRNDGEIPQYYVTGNHEPIIAPTVWDQVQSELARRSGRSRSFSHPFASKIECGCCGGWFGPKTWHAGSRYERRIWRCNRKYDPAGDQPCATKHVTEEELIAAFEQATSQLAPPPSAEVLEAVLDQLGDTHALEAELAQAITARDAVVDEINALIRSAANTDFNPDAFEADHARLEADYQHHLSTVETIEGQLRELEAKRAAITAFHQYRSENPAISYTPEAWRALVDHATIHPDGKITITVNDGTTI

SEQ ID NO: 18155 - protein, 412 aa, synthetic construct
MSPDFKTITPRRTPTSRIRVAAYCRVSTMSETQAGSLAAQVSAYSKLICSNPAWQFAGIYTDQGISGTTSNRPGFADMMDHARAGDFQILLVKSISRLARNTVDLLSCVRELAALGVAVRFERENIDTSSAEGELMLTLLASFAQEESRSLSQNVKWAIRNRYKTGVTNSHRIYGYTWAGGSLHINDDEAQVVRRVFDEYLAGVSPEAIADRLNAEGLRARAGGNFLGSVIRTWLENPRYVGNEMLQATYTDGPGGKLVVNDGALPKYWVEGANPPIIDEATWRQVQDELARRRQSGGRALTPSGGTCALTHRVVCSQCGRRFHRRTKTRKHISYKYWWCETATRGQGNPCRAPQIREAQLKSAITAHLGLGEWDDQQVIERLEQVTVYPSGKVTVTKRGAHTAEPVMAGKE

SEQ ID NO: 18156 - protein, 464 aa, synthetic construct
MKKRAGLYIRVSTEEQVDNYSIPEQKRRLEAYCQSHDWAIAEEYIDGGFSGAKLDRPAMQKMIADSKAGNLDVVVSIKLDRLSRSQKDTLHLIEDIFLPYHVDYVSVNESFDTGTSFGRAMVGILSVFAQLEREQILERMHSGMEARAKTGLYHGSKPPYGYALEKGVLKINPTEALAVRKVFDLWLKGYSYNKISEIMEETYHGEKAWMHPSAINQLLTNPAYTGKIRFAGEVIEGQHEPIIDEITFKKANLRLETRAANRGRQTTYLLTGVIWCGNCGSRFGINMSTCNGVRYTYYTCSPNRRKKGNEGIRCCGNKPIPTKKLDPLIIEKIKRLAISKDFFEEIQKPDASPSDAIASLESAAAEIDKRIGKLMELYSMDGIPTDTLSQQINTLYAQKKDLESQISEKQSGFKQTYEDYKEVFDKVDYAFKSGTIEEQKSIVRSLIKRIDILNQEITITWNFQ

SEQ ID NO: 18157 - protein, 531 aa, synthetic construct
MTSAQPLPRAFAEVFQGDDRINVYSYIRFSSKAQKLGFSEMRQIDQLNRFFEQYPQAQQVERYEDLGVSAFKGKNLKSGQLARFVERIKAKEIQPNSLLLVESFDRISRMGGYDALELIISIIQADCAIYTLFDNRLYSRRKTDSSADISLIQNILERANDESRSKSDRISDAKARNLLKGENGGIITKRCPFWISFADGKFVLNEHARAITRAVELCFDMGFQAIAKTLNDEIHPKKYTESIVGKFLRQPAIYGSFIAMEWDESGKPVQLKKEIKGYYPAVITEAEFHRISVKLQERQDPKLAGRKAAEFKNILRGLVYCVCGSGFRYHAQKSGYVDLVCSASLTGRCSAAKPGKGVRYRYARLEEIFLAYQAKIPFHRIIAKTEDIQALEKAHGEISGLLIQKEKALQNNFSILEKGSESAQKYILDRINEVSQELDQLKEQEQELSRRINTLHLASKSTLNVMEIYKLLLTEHGRMRVNNFLQGQSVKLIVTPIQKKYFYIDIFLGDEHIDRVHVTPDGYTAENKPSA

SEQ ID NO: 18158 - protein, 540 aa, synthetic construct
MKQPYNTTIYNTALYMRLSRDDENYGDSVSIETQRTILQQYAKEQGLHVVGEYVDDGWSGTNFERPDFQRMMDDVEAGKVNCIVTKDLSRFGREHVMMDYYLEFLFPEKRVRYIAVAENEDTEKGLSDFVPFKNLFNEWFAKDTSRKVKAAFKAKFATGQRIGAYAPIGYRKHPEIKNKLIIDEETRWIVEKIFDLAIHGRGAASITRILIEEKVPTPGFINFQRDGTFANIYAGAPEEKSYAWTIAQVKSIMKDETYIGHTIHYRETNISFKNKRRVRKPQSEWVRVENTQEPIISEQVFRQVQEQIANRRRKCKDGTTQIFSGLVKCADCGWSLSYGENRQNSKPYGHYHCSKYGQGTRQCSMHYIRYDVLYAYVLSRLQYWSGLVQHDEERLLKRLLNATDKGQAAARKKQAAELKKAEKRKAEVDTLFARMYEDWAAGRITEYNFSMLSGKYQSEQAELDTKIEQLQSAIATESQNAADAEKWIALMKECVNPTELTAELLNTLIEKIVVHEAVKGEDGSREQEVEIFYRFIGKID

SEQ ID NO: 18159 - protein, 620 aa, synthetic construct
MAGIRAKNMIYDVGNYCRLSKDDGTDNESASIATQKSILTDYVKKQGWNLVKTYVDDGYSGTNFQRPAFQEMLKDIENGLINCVITKDLSRLGRNYLDCGLYLEVFFPEHNVRYIAVNDGVDTLNKSAMDITPFRNILNEMYSADVSVKIKSAYRARFQQGKFMGTTAPYGYVKDPADHNHLLIDDKVAHVVREIFDLALAGNGISKIRKHINKQHILRPAAYAVTQGATGYERHFEDNEENRYIWSENSVRGILRSPIYAGNLAGYKRIAANMKSKKRPSKLPEEWEVIPDTHEGIVTQEEFDTVQQLITSRRLPENKGGFENIFAGVIKCADCGYAMRAMSANRRKRPDIIDCVQYSCNNYGRYGNIMCTAHSIEARDLFNAVLADINRFADMAVNDEKAVRAIEKRLTETDQSRAKALEKEQRKLNKRLAELDRLFSSLYEDKVMERITERNFEMMSGKYQKEQLEIEARLKEVTETLNDSYEKSQGVRDFLSLIRNYQGIKELDATIINALIDKILVSEREKLIDGTVRQEIKIYYKFIGFVGELHITPTKRWTALKPKNCTVCGIEYVPRSAISKYCPECRKRIRKVQGTETKRRSRERNRQACIELSAKNDRLM

SEQ ID NO: 18160 - protein, 524 aa, synthetic construct
MPKAISYIRFSSEKQAKGSSLERQQTMLAQWLDSNPEYVLSDLRFQDLGVSGFTGAHLENGFGQLLAAVENGSIEPGDVVLIEAIDRVGRLEPMEMLPLLARIVRTGVYIVTLDDGIKYDRESANSNHLFLLVAKVQQAHQYSETLSRRLKASYAARRKNAVEGVVPKRHTPVWLTSEGELIPEIAPLVKQAFEDYASGIGERRIFERIFKGNSNPLLARMAPSTVKRWMNNRTAIGEWDSIPNVYPAVVEPELFYRVQKRMEAKFSPRGTPNKHAYTGLVVCSECGKNFNTKYFKASDQTSMECSSRARRGAMGCSNNRSIPEPVIELAYLFTFTGHALKALEGQMLTASQKRAMELEGEIGEVNKKITRIVNAITVLEDDSEELTDKIRSLQAERKLLQAEMDGLTHTTISMRDKIVSTTHFNKDMMKANALLQSVGYQLVCHPDGTITFEDETGKQTFHYLGWGRSEDVHKVVLSDGKLVKLSINRPENKPMKKTVKATPVDRAALKGVKLSQVKVRLDRQ

SEQ ID NO: 18161 - protein, 548 aa, synthetic construct
MKPALRAYGYVRVSVDEEGGQNASISAQGAAIRAHAEREGIELVTIFEELNVSGRKLQRKQFDRMMTQATAPDRPVHMIIVYALSRFARRLLTQVVSEHRLAEAGVSLLSLTENFGNDSNGKMGRAMVAVMNEKYVHDASVFTTRDRRGNAISGHWNGGPIPLGYESRVVSVFDRKERKKLFIREDEARIVRLIFDLALQGLHGRPMGTRAIAAYLNDNGYSLRGRRFHNSNVDGILRRQHYAGAYLHRPTNAQALPAGGGDPVIVSCPQIIEPDLMAQVAATRAKSAPRVRAPRITNSPVLLGGVATCGHPGCGAGLVIRSGKAGAYRYYTCNAKATAGAERCKSKPIREEALDQIVLDGLLKRVLAPARLRILLADVLDRSDEAEERRRKDHDRVRRERIAAEGRLSRLLDLVAEEIMSPREPVFAAKLAEARASIAALSETERSLAKQIGRKAGRIDDAAVKRFGERLRAEITGANTELRRAYLRIFVSGVVVNDNEILVAGSRAALEAGAHKGETGSLTSVPSFDREWCPEEDSNLHGLATAST

SEQ ID NO: 18162 - protein, 557 aa, synthetic construct
MKNKKAYVYTRVSTSMQIDGYSLDAQEERIKQYAKAYGIEIIETYKDAGKSGTSISGRNEFIAMLNDIEAEKDKVDYVMVFKLSRFGRNAADVLQSLQVMENHNVNLICVDDSLDSSKDSGKLVITILSAVAEMERENILSQTMEGRKQKAREGKWNGGFAPIGYSLDNGELVVNEDEAKAVRMIFDLYANSDMGANGVSKYLVSLGINKPIRQNGKNPYFSASLIRQILDNPVYNGKIAYGRRKTIKDKTTGKIKLEKSDHYIIAQGNHEALIDDELWNTVQEKRKSQAKKYEKINRGKDERVHILSNLIKCPYCGAGLYGNKSRKRNKNKEGEHYKDYYYYGCKHRQMMNGHKCTFNKQIRAELIEKEVETIITQVVSNPTFAKKIEEKINIQIDTKEIDEVINKHLAKIRQLTGTKASLINQIDSLNFEDKHYDRKYTDLNLRLDAIYDQLEYAEMQLNDSRKRKEAILEEKITSDNIYKILVNFNSLYTVLSDIDKKRLLNEMIEEIQIYDEKTEKDTWIKSVVFKLPLIDNEIDFGLDNKDNVEAVVLMTRN

SEQ ID NO: 18163 - protein, 587 aa, synthetic construct
MSTDVQLKGDSLRRQQQSSKAYAEQNGLELIEHFKLEDIGVSAFKGANVSSGALGKFLALVKAGEIVRGSYLLVESLDRISRQQVLDSIPVFFDIIKSGINVVTLADRHLYRAGETNFADIMYSVMVLGRAYEESKTKSMRVGEAWRNKRNKASEKKLTKVAPAWLALREDRSSFDQIKERADIVRQIFDLADAGHGSFFIARRLNKSDVPTFTKSNGWHESYVTKILNNRAVLGEFQPHRYDEHGERIPSGDPIRNYFPQIIDEDQFLRIQAARRRRLVEGAGRKGPEYRNLFSKIARCDYCGAPMRFVHKGRPPKGTQALKCTNAVRNLGCESVGWKYSDFETSFLYFVKEIDLTAILQAAAHDSDRATLQQKMEALEEKLHQLQSKRERIFEMLVDPGSSTAFIKGKLEECESEIAGEQEQVEQLREQLIARQPLQPITSLQLKSMIDTIQDTTAPDIFDRRAAVANRLRTMIRSLRVASDGSRPKAKRIEHFLSSSGVDPAERGRLLDQIRSSNELAQRYQRTFSVVLADGISRHVIVTSDDPTDFIAEVLVDKDGAMSGSDRGMTIGSDGWDNVFDEPARAQ

SEQ ID NO: 18164 - protein, 593 aa, synthetic construct
MNQAHGAGSNSVRSESSTSITFAISYVRVSTKEQAERDGDPEGFSIPAQREANRRKAESLGSVIIDEFVDRGESARSSARPELQKMLAYVKAHPEISYVIVHKVDRLARNRMDDVEINLALQQSDVTLVSATENIDETPSGMLLHGIMSSIAEFYSRNLATEVTKGMNQKAMGGGTPGRAPLGYLNVRTTNADGREARTIALDPERADLIGWAFEAYATGDWSIVRLADELELRGLTNRPSPKFPARPVRTSHLYGILTHPYYKGEVVWRGARYPGRHPQLVDTATWNQVQSVLEAHAAAEKQRVHLHYLKSSVYCGDCGSRLVITNAKNRHGAVYPYFVCVGRHQKRTPCTRKAMLISVVEALIEDYYDQVQLAPELRAQIEAELLRDLSAARSETEAQERELHSQQQRLTHQQTKLLQAHYASAIPLDLLKSEQDRITAQLETIGNRLDASKTRFDEIERNLKTALDFASNCHAAYLRANDHTRRLLNQAFFEKLYIEEDGVRGYFAGPFKTLLGLAEGCETSDDSTQPRQREMSSSDHRSRSVVDSTEHHTSRHLVRRPRTTKPPHMGQKCGGLKQTSLVRPTGFEPVTS

SEQ ID NO: 18165 - protein, 592 aa, synthetic construct
MPSKPSVKPLKFMSRDGIDYEFPVYEDYVPAAIYLRISQDRTGDGDGVTRQLEDCVKYADLHRLTVIEVIEENDTSAYVAPHREDGVKPRKPKRPGFERLKAIATSGEIHAVVAWATDRLWRSVRDLDQLINIVETTPHGFTIHAVHGGIIGLGDANGQTVARILGAVAQGEVNIKAKRQARAHEQAFDRGKFPGGRVPFGYRLGEKPGELVLHEDRAEVLRDIADGIINDGWTITRATRFIREELPKRCGKMKPVALRGILTGPTVAGKRYYLPVAQKRSDPEAKGTWGPAGWEPVFDEVTWQLLRKALATTPRGRPTRPSLLGGLLLCAYCGSAMSYSTRTYKCTVTSGCGRISVSTPTVEAVVTDFITTLLTAQETQEFLKRMLNIGDGPPGTDDINIDAELEKIARKRRELTEAYDDEVLTMAELRHSLDRLKAKEQALLTKREENVEAALEWERSAMAFQAYEDLLDATDDDAIKKKNMIFRALLDGIVVSPREKNSCKFDTERLNFRLAGTSPYIPLNDREDISDDGVDWWTEDPGDLASHPSPRELVQAGVVKEPVPRRKNRKAARLINGAVEGNKNGATAKTAS

SEQ ID NO: 18166 - protein, 590 aa, synthetic construct
MNTKVKVIKASNTGARNRNSIHLDLKRVAAYCRVSTDSKDQLESYKSQVDYYTNLIKNNKSWTLAGIYADEATTGTTATKRADFIRLISDCQNGDIDMIITKSISRFARNTLDTLKYVRLLKENNVGVVFEEENIDTLTMDGELLLTILSSVAQQEVENTSAHVKKGLKMKMEKGELIGFQGCLGYDYDPTTKSISINEEEAKIVRYIFKRYLEGNGGSVIGRELEEQGYLTPRGKTKWSDTTVLGIIKNEKYIGDILMGKTFTVDPITKRRLANFGESDKYHIENHHEPIISREDFEKAQEIRLRRAQNRNTIANKDRKREKLSRQYAFSSMLECGFCGEILSRRTWHTSSIYKKINWQCVKSTKKGKKYCPHSKGIQEAAIEKAFVESYRQLCHADSTVIDDFLKIVEEEINDNTLVKDLKKLENQLNRIISQERKLVDLHLEDSIDEEVYAKKYKKLTKQKEELLDEKKTLELTIKDEDSIKERLKQFKKVLENKEIIEEFNRTVFESIVDKVVVGRIDKDGTVHPYDLTFYFKTGVKDSQDSNNFKDKRKNAKDNDINKLCSYKNDEDKKLCSQSKDNARGVCKFT

SEQ ID NO: 18167 - protein, 596 aa, synthetic construct
MQETDIRPTAYSYVRMSTQQQLKGDSLRRQLERSREYAAENNLRLDETLHDIGISAYTGANVRSGALGQFLQLVQNGQIKRGSYLLVESLDRLSRLQVRNALGPFIELINAGITIVTLADKQVYSDATVDENWTQLMMSLAIMSRAHEESQTKSDRLQRAAEGRRKRALAGETRFSHHMVRWLDQIEIAPDKYEYRLNKHADTVRQIYEWADAGIGQIVITRRLNEAKTPTLTGKGEWQQPTVGLILRNEAVIGTYQPVHRVNGKSQPYGEALRGYLPAVISEELFWRVQKNKRVRNSAGRKGERLTNLIGPLATCAHCQGRMLIKTGGAAKNPQKYIRCDNNYRGGPCTGPSGQFRYDKVENAILDHVREFHSFSAFARENNSAGKQQLQEKIASHETTLAELEKQRKNLMSVAAMAEDDATRADVMRALTERRSREDNTKAELEILRADLMTLDSAERNANSLAERIASERKMWETGSDEKVYESRSKIAQALTQIIDFISFDMDTRRFRVIIGAGIVAYEFDKQGRLTNKFDLATSPMRNGPSPLTVKHFAQADGTKYQRDENGLQSLTSETRDRFAARSEKLTKLMQDKQSS

SEQ ID NO: 18168 - protein, 506 aa, synthetic construct
MRSVITYLRYSSAIQGAEGADSTRRQNDLFKQWLKKNSDAQVVASFSDEGLSGYKGKHLTGQFGDMLARIESGEFPESTILLVESIDRIGRLEHLETEALMNRILGNGLEIHTLQDGLIYTKDALADDLGISIIQRVKAYIAHQESKQKSFRVSQKWEQRAKLALAGEQRLTKMVPGWIDPDTFKLNEHAETVRLIFKLLLSGESLHNIARHLQSNGIKSFSRRKDANGFSVHSVRTILRSETTIGTLPASQRNDRPAIPNYYEAAIDASTFNKAQEILGKNRIGRTPASDNPLTINIFKGLFRCQCGASVHPTGTKNKYAGVYRCNNHLDGRCDVPPLKRKPFDRWMIDNFLGMIDVGNDGEAEGKIASLQHEVEIVTTRIKKATALLLEMDDIDELKIQLKELNRKRTELQTTIDNMRRKTSLTDKELPQLKDIDLTTKAGRVECQLILSKHLKGLTLGKDSVIVTLQNDTEITIPTNPLPLHDGTSIFEIAEKELLEIDAYQL

SEQ ID NO: 18169 - protein, 559 aa, synthetic construct
MKTKLYSYIRFSSMRQNDGSSYERQIRMAREIAAKYDLELVNDYQDLGVSAFKGANSKTGALSRFLDAIGRSVPVGSWLFIENLDRLSRADIVSAQELFLSIIRRGITIVTGMDNKIYSLDTVTANPMDLMFSILLFIRGNEESQTKRNRTNSSALIKIKSHQENPQNPAVAIEEVGKNMWWTDTTSGYVLPHPTYFPVVQEIVELRKNGRSTAEILDHLNETYAPPPAVSNKKHSKWSRAMVERLFHTRALIGIKEVSVDGVNYELKDYYPRVIDDATFYHLKKNIGARAWNFGDKEEVKPIPLLSGIGLLKCDHCGCAMVKVKGTNKRSDQYRYTCDATRSRRLDCEHPNWSFRGDQLEKAVLQLLADKIWIAEDKANPVPALKVQVDEISRKIDNLIALSAMTGATKELADQITTLNSERETLYNQIKMAEEEMYSVDSQGWEKLAEFDLEDVYNEERLKVRFKIKQALKRIGCSRIDRNKNLFVLEYIDGKTQRVVIENSRGTRKGQIFVDLKTINDRQILESNGLVLHPCLDMLTDKNWKPEEEIPGPLQEFGI

SEQ ID NO: 18170 - protein, 638 aa, synthetic construct
MKPKLYSYVRFSSVKQREGNSLERQQDTALKIAARYNLELDTTAFHDLGMSAFKGKNAHEGKLSEFIKQIGAKVPVGSWLVVENLDRISRDDAWSALDIFKNILSKGIVVVTGMDEKVYKYADVKNNPTDLIISLLMFTRAHDESLTKKNRVEAQARSLIRHNLTREPGTPAKAIESVGQNVWWVDTKSGYVTPHPIYFTAAQKIIELKQNGETLLGIQRYLNEHYPAPKKRVYKDQTGQALAPKTEQWGKHLIRTFLNPTVHGQKTFTLDKRDESGVIIYDSESDEPLKETFIIPDYYPALMSEVDYLTLSKLDRHRAITRNSSKYPAGNPEPEIPLLSGIGILFCGKCGSFMFKSGSSENKYRYICGSKIVQGKPCGKKGFTSYQLEHTVLQLIADHVWNNHQEDKTAWYESEIEKASEAVKKLLKLATLTDDLEELADQINANKQKKITLEREFQQYKISRSEIQTTGWDQFRNFDVHDTKNPDRKRIRLKVKQAIKRIDCYDIDGRHGHFEVTFADETKQRIVIKFNRNRSPGVSYVEAQTVNDHDLLKMQGLVLHSFIDELISPEKFAQHIKDKHEVSILNPTFITRLEDGVNRDEGNELAIKVDSTTSKSYATVNGIKYEINSLEDLETLSK

SEQ ID NO: 18171 - protein, 508 aa, synthetic construct
MKKAIAYMRFSSPGQMSGDSLNRQRRLIAEWLKVNSDYYLDTITYEDLGLSAFKGKHAQSGAFSEFLDAIEHGYILPGTTLLVESLDRLSREKVGEAIERLKLILNHGIDVITLCDNTVYNIDSLNEPYSLIKAILIAQRANEESEIKSSRVKLSWKKKRQDALESGTIMTASCPRWLSLDDKRTAFVPDPDRVKTIELIFKLRMERRSLNAIAKYLNDHAVKNFSGKESAWGPSVIEKLLANKALIGICVPSYRARGKGISEIAGYYPRVISDDLFYAVQEIRLAPFGISNSSKNPMLINLLRTVMKCEACGNTMIVHAVSGSLHGYYVCPMRRLHRCDRPSIKRDLVDYNIINELLFNCSKIQPVENKKDANETLELKIIELQMKINNLIVALSVAPEVTAIAEKIRLLDKELRRASVSLKTLKSKGVNSSSDFYAIDLTSKNGRELCRTLAYKTFEKIIINTDNKTCDIYFMNGIVFKHYPLMKVISAQQAISALKYMVDGEIYF

SEQ ID NO: 18172 - protein, 559 aa, synthetic construct
MKTKLYSYIRFSSMKQADGSSYERQKRTAAEIAAKYDLELVTSYQDFGVSAFKGANSRTGALSRFLDEIGRSVPVGSWLVVENLDRISRQSIIEAQELFLSIIRRGITIVTGMDGKVYSKESVNANPIDLLLSVMLFARANEESQTKRNRTNSSALIKIKAHQENPQNPAVAIEEIGKNMWWTDTTSGYVLPHPVFFPIVQEVVELRRNGRSTAEILDHLNATYTPPPAASHKRHSNWSRAMIERLFHTRALIGIKEISVDGVKYELKDYYPRVLDDAEFYHLKKSIGVRACNYGDKEEVKPIPLLSGVGLLKCEHCGSAMVKVKGTNKRPNQYRYSCDAMRSSRIACVHTNWSFRGDQLEKAVLQLLADKIWIAEDKANPVPALKVQIDEISRKIDNLITLSAMTGATKELADQITTLNSERETLYNQLKMAEEEMYSVDSQGWEKLAEFDLEDVYNEDRIKVRFKIKQALKRIGCSRIDKYKNLFVLEYIDGKTQRVVIENSRGPRKGRIFVDLKTINDRQILESNGLVLHPCLDMLTDKNWKPEEEIPGPLQEFGI

SEQ ID NO: 18173 - protein, 507 aa, synthetic construct
MKRVISYIRFSSERQAKGDSLRRQSKMVNDWLKAHPEYYLDQDLSFRDLGVSGFTGKHLKGGLGDFLTAIEKGLVKAGDTLLIESLDRLSRQDVDQASELLRNILRSGVDVVTLSDGEHYTRESLKDPLALIKSILIMQRSHEESLRKSERIQAAWNRKKELISEGIKISKRCPAWLKLNDDRKSFSVIPEKVETVKRCFQLRLEGKSIWEIVRTLNDEGHQTLNQYKAGSFGQTSVQDLLKNRSVIGYFTPKGCEEIAGYYPAIIDETTFYKVQQLSYSRYGRKPASDKPMAVNLFKGVIRCSECGHALIITGFSDTRSGIYRCPLRNENRCSAKGLSRKQTDGTLLTLLSRLDRFDSDMTNTIDTLKLHREHISSNIEKLVQLSLEIEDLSAITIKLKQLKGELSQVDADIEKETQRLKSIDVGCLSDCDLTTKAGRIEAQLIIKSAVKEVVLNTAKRRCKVSFHNGKVIDLPITENPSDNVTEAIQSLSEVTERGLIDVDEVII

SEQ ID NO: 18174 - protein, 559 aa, synthetic construct
MKTKLYSYIRFSSMRQSDGSSYERQIRMAREIAAKYDLELVNDYQDLGVSAFKGANSKTGALSRFLDAIGRSVPVGSWLFIENLDRLSRADIVSAQELFLSIIRRGITIVTGMDNKIYSLDTVTANPMDLMFSILLFIRGNEESQTKRNRTNSSALIKIKSHQENPQNPAVAIEEVGKNMWWTDTTSGYVLPHPVYFPVVQEIVELRKNGRSTAEILDHLNETYTPPPAVSNKKHSKWSRAMVERLFHTRALIGIKEVSVDGVNYELKDYYPRVIDDPTFYHLKKNIGARAWNFGDKEEVKPIPLLSGIGLLKCDHCGCAMVKVKGTNKRSDQYRYTCDATRSRRLDCEHPNWSFRGDQLEKAVLQLLADKIWIAEDKANPVPALKVQVDEISRKIDNLIALSAMTGATKELADQITTLNSERETLYNQIKMAEEEMYSVDSQGWEKLAEFDLEDVYNEERLKVRFKIKQALKRIGCSRVDRNKNLFVLEYIDGKTQRVVIENSRGTRKGQIFVDLKTINDRQILESNGLVLHPCLDMLTDKNWKPEEEIPGPLQEFGI

SEQ ID NO: 18175 - protein, 507 aa, synthetic construct
MKRAISYIRFSSEKQSRGDSLRRQSKMVNDWLKAHPEYYLDQDLSFRDLGVSGFTGKHLKGGLGDFLTAIEKGLVKAGDTLLIESLDRLSRQNVDRASELLRNILRSGVDVVTLSDGEHYTKESLRDPLSLIKSILIMQRSHEESLRKSERIQAAWNRKKELISEGIKISKRCPAWLRLNDDRKSFSVIPEKVETVKRCFQLRLEGKSIWDIVRTLNDEGHLSLNQYKAGKFGQTSVQDLLKNRSVIGYFTPKGREEIAGYFPPIIPETDFYKVQQLSYSRYGRKPASDKPLSVNLFKGVIRCSECGHALIITGFSDTRSGIYRCPLRNENRCSAKGLSRKQTDGTLLTLLSRLDRFDSDTTNTIDTLKLHREHISSNIEKLVQLSLEIEDLSAITIKLKQLKGELSQVDADIEKETQRLKSIDVGCLSDCDLTTKAGRIEAQLIIKSAVKEVVLNTAKRRCKVTFHNSKSITLPITENPSEDVTEAIQSLSEVTERGLIDVDVVAI

SEQ ID NO: 18176 - protein, 508 aa, synthetic construct
MKKAIAYMRFSSLGQMSGDSLNRQRRLIAEWLKVNSDYYLDTITYEDLGLSAFKGKHAQSGAFSEFLDAIEHGYILPGTTLLVESLDRLSREKVGEAIERLKLILNHGIDVITLCDNTVYNIDSLNEPYSLIKAILIAQRANEESEIKSSRVKLSWKKKRQDALESGTIMTASCPRWLSLDDKRTAFVPDPDRVKTIELIFKLRMERRSLNAIAKYLNDHAVKNFSGKESAWGPSVIEKLLANKALIGICVPSYRARGKGISEIAGYYPRVISDDLFYAVQEIRLAPFGISNSSKNPMLINLLRTVMKCEACGNTMIVHAVSGSLHGYYVCPMRRLHRCDRPSIKRDLVDYNIINELLFNCSKIQPVENKKDANETLELKIIELQMKINNLIVALSVAPEVTAIAEKIRLLDKELRRALVSLKTLKSKGVNSFSDFYAIDLTSKNGRELCRTLAYKTFEKIIINTDNKTCDIYFMNGIVFKHYPLMKVISAQQAISALKYMVDGEVYF

SEQ ID NO: 18177 - protein, 449 aa, synthetic construct
MKQVIGYLRQSTMKQQSLAAQKQAIEAIAEKHHIQHINFYSDKQSGRKDNRSGYRQITQLIQQGQCDILCCYRLNRLHRNLKNALKLIKLCQTYHVHILSVHDGYFDMDQAFDRLKLNIFISLAELESDNIGEQVRNGLQEKAKQGRLITTHAPFGYEYHNGTFIINQNESPTVKAVFNYYIKGHGYKKIAQLLEEDNTYINRQPYQVRNIIINPNYCGRVNNQYGQFDNMFPSIVSTSIYEQAQRLRLQKQTKQTSSDNQLKQKINCPCCNATLTNMTVRKKNHILRYYVCPKNMNASRFVCDFKGINAQTFEDKVLEVCRDFYQNQRIYTKIKGAIDKRIKRQRNIEKHHTLTQEQLIEKLAQGIIDAETFREQTQSLRQQPQRTTSINGHQIQHTIQNIIQKRFTLNILYPYIETIHITKDKNLIGIYFKNEPLNIVNQTMQSSIA

SEQ ID NO: 18178 - protein, 449 aa, synthetic construct
MKQVIGYLRQSTMKQQSLAAQKQAIEAIAEKHHIQHINFYSDKQSGRKDNRSGYRQLTQLIQQGQCDILCCYRLNRLHRNLKNALKLIKLCQTYHVHILSVHDGYFDMDQAFDRLKLNIFISLAELESDNIGEQVRNGLQEKAKQGRLITTHAPFGYDYHNGTFIINQNESPTVKAVFNYYIKGHGYKKIAQLLEEDNTYINRQPYQVRNIIINPNYCGRVNNQYGQFDNMFPSIVSTSIYEQAQRLRSQKQTKQTSSDNQLKQKIKCPCCNATLTNMTVRKKNHILRYYVCPKNMNASRFVCDFKGINAQTLEDKVLKVCQDFYQDQHIYVKIKNAIDKRIKRQRNIEKHHTLTQEQLIEKLAQGIIDAETFRKQMQSLHQQPQRITSISEHQIQHTIQNIIQKRFTLNILYPYIETIHIAKDKNLIGIYFKNEPLNIVNQTMQSSIA

SEQ ID NO: 18179 - protein, 561 aa, synthetic construct
MKRKVAIYTRVSTKEQLKQGYSIQQQADLLIKKAKQIFPDDEYEIYSDEGISGKNIEARPGMKRLLEDIENRQIKVVMSWKLNRLSRSNRDIQNIIYEFRRGGAYYISISENIDTSTQNGEMMIGAFGLVAQIERETIVSNVKMGMNAKAKQGEAITGRVLGYVLKPNPLTGKNELVIDEFEDNIVRQIFDLYLNQNKGLKAIANYLNKQGYHTINKKPFSVYGVKYILNNPVYKGYVRFNNYQNWAVERRSGKNDKSKVILVQGKHKAIIDEEIFDKTHEKLAAKSFKPGRPIGGDFWLRGLIKCPECGNNMVCRRTYYNTKKSNERTIKRYYICSLFNRAGSAACHSNAIKAEVVERVVYFHLRRILSQPHVVKTIATQVIDAMEKKKANQTPMSIDTNSLENQKKKLQKRKERLIDLYLDEEIDKETMQNKQDKLNVQLEKIDEQLKQAEVMNKASQDIAIPNYKKIKGQLYVMLYRFTGYMKKANPEAKNKLMHMLIDSIELTTDKQVKLIKYKIDESLLPQSIKKDCGNFFMPKFNFVINVTKKNRIENLSLLPLF

SEQ ID NO: 18180 - protein, 449 aa, synthetic construct
MKQVIGYLRQSTMKQQSLAAQKQAIEAIAEKHHIQHINFYSDKQSGRKDNRSGYRQMTQLIQQGQCDILCCYRLNRLHRNLKNALKLIKLCQTYHVHILSVHDGYFDMDQAFDRLKLNIFISLAELESDNIGEQVKNGLQEKAKQGQLITTHAPFGYDYHNGTFIINQNESPTVKAVFNYYIKGHGYKKIAQLLEEDNTYINRQPYQVRNIIMNPNYCGRVINQYGQFDNMFPSIVSANVYEQAQRLRLQKQTKQTSSDNQLKQKIKCPCCNATLTNMTIRKKNHTLRYYVCPKNMNASRFVCDFKGINAQTLEDKVLEVCRDFYQNQRIYTKIKGAIDKRIKRQRNIEKHHILTQEQLIEKLAQGIIDAETFREQTQSLRQQPQRTTSINGHQIQHTIQNIIQKRFTLNILYPYIETIHITKDKNLIGIYFKNEPLNIVNQAMQSSIA

SEQ ID NO: 18181 - protein, 595 aa, synthetic construct
MNTKVKLIKASNTGARNRNALHLDLKRVAAYCRVSTDSKDQLESYKSQVDYYTNLIKNNKNWTLAGIYADEATTGTTATKRADFMRLISDCQNGDIDMIITKSISRFARNTLDTLKYVRLLKENNVGVVFEEENIDTLTMDGELLLTILSSVAQQEVENTSAHVKKGLKMKMEKGELIGFQGCLGYDYDPITKSISINEEESKIVRYIFKRYLEGNGGSVIGRELEEQGYLTPRGKTKWSDTTVLGIIKNEKYIGDILMGKTFTVDPITKRRLANFGESDKYHIENHHEPIISREDFEKAQEIRLRRAQNRNTIANKDRKREKLSRQYAFSSMLECGFCGEILSRRTWHTSSIYKKINWQCVRSTKKGKKYCPHSKGIQEAAIEKAFVESYRQLCHADSTVIDDFLKIVEEEINDNTLVKDLKKIENQLNRIISQERKLVDLHLEDNIDEEVYAKKYKKLTKQKEELLDEKKTLELTIKDEDSIKERLKQFKKVLENKEIIEEFNGTVFESIVDKVVVGRIDKDGTVHPYDLTFYFKTGVKDSQDSNNFKDKRKNAKDNDINKLCSYKNDEDKKLCSQSKDNARRVRSVANQGVR

SEQ ID NO: 18182 - protein, 590 aa, synthetic construct
MNTKVKLIKASNTGARNRNALHLDLKRVAAYCRVSTDSKDQLESYKSQVDYYTNLIKNNKNWTLAGIYADEATTGTTASKRADFMRLISDCQNGDIDMIITKSISRFARNTLDTLKYVRLLKENNVGVVFEEENIDTLTMDGELLLTILSSVAQQEVENTSAHVKKGLKMKMEKGELIGFQGCLGYDYDPITKSISINEEEAKIVRYIFKRYLEGNGGSVIGRELEEQGYLTPRGKTKWSDTTVLGVIKNEKYIGDILMGKTFTVDPITKRRLANFGESDKYHIENHHEPIISKEDFEKAQEIRLRRAQNRNTIANKDRKREKLSRQYAFSSMLVCGFCGEILSRRTWHTSSIYKKINWQCVKSTKKGKKYCPHSKGIQEAAIEKAFVESYRQLCHADSTVIDDFLKIVEEEINDDTLVKDLKKLENQLNRIISQERKLVDLHLEDSIDEEVYAKKYKKLTKQKEELLDEKKTLELTIKDENSIKERLKQFKKVLENKEIIEEFNRTVFESIVDKVVVGRIDKDGTVHPYDLTFYFKTGVKDSQDSNNFKDKRKNAKDNDINKLCSYKNDEDKKLCSQSKDNARGVCKFT

SEQ ID NO: 18183 - protein, 521 aa, synthetic construct
MKNVITIEANAPRNSELASISLPKKRRVAGYARVSTDHEDQTTSYESQMRYYAEYISTRSDWEFVKMYSDEGISGTNTKLRVGFKSMIEDALAGKIDLIITKSVSRFARNTVDSLTTVRKLKEVGVEIYFEKENIWTLDSKGELLITIMSSLAQEESRSISENVTWGLRKQFAEGKVHFPYTNVMGFEKGENGEIVVNQEDAKTVRYIFQQALLGKTPYSIAKDLTQQGILSPSGKNQWNSVTIKRMLRNEKYKGDALLQKTYTIDFLTKKKNINKGELPQYYVENNHEAIVDKETFDAVQAALDRKEKGKGSTTLFSSKLVCGDCGHYFGSKVWHSTSKYRRVIYQCNEKYKGEKKCTTPHVTENEIKDWFVSAINKVISNKDEIIQNLEMLLDVGESSDLERRLVELETEVEVVTQMVSNLVKENAIMPQDQDTYQKKYSNLVEWHDALVSEFESIEKQLLEAARHQKDLKEFLETLNQQSGLISEFDDLLWETMVDKVNVRHNRKVTFKLKNGSEVVA

SEQ ID NO: 18184 - protein, 412 aa, synthetic construct
MRIVRRIQPMMTPQKPKLRVAAYARVSDSRLHHSLSTQVSYYSRLIQSHPDWELVGVYYDEGISGKEQSNRQGLQDLLKACDDGKIDRILTKSIARFGRNTVDLLSTVRVLRQKNIGITFEKEGIDSLSSEGELMLTLLASVAQEESHNISENLRWQIKKKFEQGQPHTPQDIYGYRWNGENYVIEPDEAKVVRQVFQWFLDGDNAPMITKKLNEQGVLTRLGNPFTVSSVREFFKQEAYFGRLVLQKTYREPFSRNPKRNNGQKNKYIVEDAHEAIVSKSYFDVVLQEKERRYKVMYQESHMHKGTFRELIECSHCGKIMITRVDSKKVHRTIRYCCRTRDRFGTSSCPSKTLSEKRILATFEDKIGFKPDKNWVTENIKKVIYDSSVGLITVFPIKGRKYELKVRKEHFL

SEQ ID NO: 18185 - protein, 545 aa, synthetic construct
MEMIQTKRVALYIRVSTQEQALEGHSIQAQEQNGRQFAERMGYEVVEVYADEGISGKSTKNRFAYQRMMKDARNHRFDLLVIWKLTRLGRNMLDVLQTVEELLRYDVGLHSISEQFDVTTSTGKLMLQLLGSFGEFERNQIAENVQMSMQSLVKDKKRYAGGRRLGYVSGIDTNGQKQLVIEPEEAKIVRLIYAKYLGGAGYRAIANFLNRQGYQTVKKNAFSTTAVKDILRNKIYAGYLEYARYINWETKRRKGKNPKPILVKGTHEPIISEEDYQKVQERLALEGKQPKWNHTGENVLTGLLRCPECGSPMAASNVTNTLKDGTKKRIRYYSCSVFRNKGASVCHANSIRAEQAETFVADRLKEIVQLPEVLPRLVAALNEEIVRQSQPLEQELVVLLERKEELKTKIEKWEAALEDSPELFPMLKDRLDELTEKRRQLHIRENEILGIFQQQGEPIQVKDVQRILTSLDRFLAQSEKKQIKALYRTFIEKITFDPNHKEMLEITMKFTHAVVQQLNEQYQIAVSKTKDTAIFVLKTPFTLTI

SEQ ID NO: 18186 - protein, 457 aa, synthetic construct
MRVACYDRTSVYEEAKISNDAQYDAVKEYVLEKYEQIPQRFSDKGESGGKADRPAFRQLRAWVCASEEEGVIYVWRYDRLARQAKIALEFIELCQQHQVQVYSISEPLPASFSHASTNKLFVQLLFTFAEQQRNVIIENVRAGLAYKKQQRQYLSSAVPYGYRLVNGKIQQEAHEAKVVRHIFQLYLTKKYGYKKLCQRLTQQKFFFRERPFQPYHIYSILKNPLYYGEIKGGSLGKYLGTFEPILSKTIFLQVQEIRQSRCTAKKDTYPYLLRQKIRCPFCGRHLSSKYQWNTKKTKTLHYYHCTDRSCQGIFLRAERVESEVLEKIQAFFQYEGVYQALIAQLTQQLAEKRKDEKHKVIQQKKQEAQWLKAFEEGNCSLEELKQQLQALQKPRSTSSFLSLQQCEAKVKEWLQLKDLSSRQLLCDYVCRIEVTKEKTVCGIYFRQLTQNILERNE

SEQ ID NO: 18187 - protein, 520 aa, synthetic construct
MKKITKIDGNKGTSIIKPKLRVAAYCRVSTDNDEQLVSLQAQKSHYETYIKANPEWEYVGLYYDEGISGTKKENRSELLRMLSDCENKKIDLIITKSISRFARNTTDCLEMVRKLLDLGIYIYFEKENINTQSMESELMLSILSGLAESESISISENNKWAIQRRFQNGTFKISYPPYGYDNIDGQMVVNPEQAEIVKYIFAEVLSGKGTQKIADDLNQKGIPSKRGGRWTATTIRGILKNEKYTGDVILQKTYTDSRFNKRTNYGEKNRYLIENHHEAIISHEDFEAVDAVLNQRAKEKGIEKRNCKYLNRYAFSSKIICSECGSTFKRRIHSSGRKYIAWCCSKHISNITECSMQFIRDEDIKTAFVTMMNKLIFGQKFILRPLLNGLRSQNNAESFRRIEELETKIESNMEQSQMLTGLMAKGYLEPALFNKEKNSLETERERFLAEKYQLTRSVNGDFAKVEEVDRLLKFATKSKMLNAYEDEVFEDYVEKIIVFSREKVGFELKCGITLKERLVN

SEQ ID NO: 18188 - protein, 523 aa, synthetic construct
MAVSRNVTVIPAIKRIGNNKNSESKPKIRVAAYCRVSTDSEEQASSYEIQIEHYTNYIKRNKEWELAGIFADDGITGTNTKKRDEFNRMIEECMAGNIDMIITKSISRFARNTLDCLKYIRQLKDKNIAVFFEKENINTMDSKGEVLLTIMASLAQQESQSLSQNVRLGIQYRYQQGEVQVNHKRFLGYTKDENKQLVIDPEGAEVVKRIFREYLEGSSLLQIARGLEADGILTAAGKSKWRPETLKKILQNEKYIGDALLQKTYTIDFLSKKRVKNNGIVPQYYVENSHEPIIPRELFMQVQEEMVRRVNLRGGKGGKKRVYSSKYALSSIVYCGQCGDIYRRVHWNNRGYKSIVWRCVSRLEEKGSECTAPTINEETLQAAVVKAINELLTKKEPFLSTLQKNIATVLNEENDNTTDDIDRKLEELQQQLLIQAKSKNDYEDVADEIYRLRELKQNALVENAEREGKRQRIAEMTDFLNEQSCELEEYDEQLVRRLIEKVAVLEDKLVIEFKSGIEIEEEM

SEQ ID NO: 18189 - protein, 452 aa, synthetic construct
MKAAIYIRVSTQEQVENYSIQAQTEKLTALCRSKDWDVYDIFIDGGYSGSNMNRPALNEMLSKLHEIDAVVVYRLDRLSRSQRDTITLIEEYFLKNNVEFVSLSETLDTSSPFGRAMIGILSVFAQLERETIRDRMVMGKIKRIEAGLPLTTAKGRTFGYDVIDTKLYINEEEAKQLRLIYDIFEEEQSITFLQKRLKKLGFKVRTYNRYNNWLTNDLYCGYVSYKDKVHVKGIHEPIISEEQFYRVQEIFARMGKNPNMNRDSASLLNNLVVCSKCGLGFVHRRKDTMSRGKKYHYRYYSCKTYKHTHELEKCGNKIWRADKLEELIIDRVNNYSFASRNVDKEDELDSLNEKLKTEHTKKKRLFDLYISGSYEVSELDAMMSDIDAQINYYEAQIEANEELKKNKKIQENLADLATVDFDSLEFREKQLYLKSLINKIYIDGEQVTIEWL

SEQ ID NO: 18190 - protein, 516 aa, synthetic construct
MAGKKVTVIPMKPRQWAAENTEEKPKLKVAAYCRVSTEMEEQASSYEAQVQHYTDYIQRNPDWELAGIFADEGISGTGTKKRDGFNRMIEACQKGDVEYIITKSISRFARNTVDCLQYIRQLKDLHIAVFFEKENINTMDAKGEVLLTIMASLAQQESQSLSQNTKMGVQYRFQQGQLRINHNHFLGYTKDEDGNLVIEPKEAEVIKRIFREYLEGSSLQEIANGLMSDCILTGGKRKLWRGEGVRLILRNEKYMGDALLQKTYTTDFLTKKRVKNDGSYAQQYYVENSHPAIIPRDIFMQVQQELDRRKSMKNKHSQCFSGKYALSGITVCGDCGNAYRRVHWKNRGTVWRCKSRVDKREHNCSGRTIYEKDLHEAIIKAINETLVDREYFLQQLSENINSVLTDGLTGRLEELDSKLKELESEIISMAIGGQGYDELATKILALRNERDMVEREIAADANMQQRIDEMGDFVKNHDTISEYSEVLVRRLIEKVTIFEKDIVVDFKSGVNIAIEI

SEQ ID NO: 18191 - protein, 517 aa, synthetic construct
MKTIHKLARPQLPEPPKLKVAAYARVSTSSNEQLASLQTQITHYENHIQNNDQWEYVGVYYDEGISGTKVEKRDGLHRLIKDAELGKIDLILTKSISRFSRNTVDCLNLVRKLTDIGVTIFFEKENINTGDMESELLLSILSSLAESESYSHSENMKWANRKRMVKGIFKTVPPYGYQRRGADFYLIPDEAKVIEQIFKWALEGVSAYQVAKRLNEKNIFTRKGSKWQASGINNILHNIVYTGTMIHQRYFNDDQFRKKKNNGELPMYRIDNNHPPIISWEDYERVQELITLRANAKGTSKGSQKYSQRYAFTKRIICDKCGCNYKRVHTAGKGNTKVVKWSCTGHLKNKDGCDALPITDESLKTAYLTMLNKLILGHTIVLEPLINTPVEGKASKQELEKLSIEITKIDEKLEVLASLNASGVVSTKTALEEQGRLQMELNKLQEKQHKIMESVNGTSTQRIQLEQLHQFTKRSEMLTEWDEDLFLRFAERIVVYSRQEVSFELKCGLLLKERLEA

SEQ ID NO: 18192 - protein, 644 aa, synthetic construct
MKKDVKVIKGDTTLKRTASGCVQRSIKRVAAYCRVSTDTEDQINSYNSQVEHYTEFIQKNKEWTLAGIYADEAITGTQVDRRIDFQRLINDCMNGDIDMIITKSISRFARNTLDTLKYVRKLKEFNVAVFFEEENINTLTMDGELLLTILSSVAQQEVENISANVKKGLRMKMERGEMVGFQGCLGYDYDPETKSISINEKEAEIVRYIFRRYIEGVGGMVISRELEEQGYLSPRGNKRWTETTVLGIIKNEKYKGDLMMGKTYTVDPISKRRLDNFGEQDKFYIENHHEPIISEEDFEKAQGIRLRRSKNRNTVANNGGKREKYSRKYAFSSMLECGFCGHNLSRRNWHSSSEYTKVIWQCVNATKNGKKYCPHSKGIEEEAIEKAFMESYRQVCHNNVEITNEFLKTVEEELKDNSLAKDLKKITNQLDKILKKEKDLVELRLNESISMDIYQDKYNEIAISKEKLLAEKRTLEVTLTDEKALKKRLEGFKKLLESNKYLEEFDRSVFESIVDKIIIGGTNDEGEIDPAMITIIYKTGKKDSQDGRLFKSRRKNAKEVNEETDNKLYPHSSDEVNNLYSYPIDNTRGVRSVATTKQRVKILYFKHFFKHFVFIEKSDFDIKKVQKKYIDVNVCLDVDCVDKK

SEQ ID NO: 18193 - protein, 428 aa, synthetic construct
MSTDQDEQLSSYENQVNYYRDFISKHEDYELVDIYADEGISATNTKKRDAFNRLIQDCRDGKVDRILVKSISRFARNTLDCIKYVRELKDLGIGVTFEKENIDSLDSKGEVLLTILSSLAQDESRSISENATWGIRKRFERGEVRVNTTKFMGYDKDKNGNLIINREQAEVVRYIYERFLKGYTPESIARDLNDRDVPGWSGKANWYPSSILKMLQNEKYKGDALLQKTYTVDFLTKKRTENDGQVNQFYVANNHEGIIDHEMWETVQLEIARRKAFREEHGIPFYHLQNEDNPFMTKVFCAECGDAFGRKNWTTSRGKRKVWQCNNRYRVTGVMGCSNNHIDEEMLEKAFMKAVNILQDHKADVLDKLERLRKGDNLLHKHYAKFMKQLLDIDHFDCTIMCQVLDNITISESGQITVAFLEGTEVDL

SEQ ID NO: 18194 - protein, 413 aa, synthetic construct
MAVRLIKAKQDHKKKRICAYVRVSTTNSSQLDSLENQKTYFETLYANREDVDFLGVYYDKGISGSKEKRPSFQAMLEVCRQGQIDLIHTKSISRFARNTMTVLEVSRELKVLGVGIYFEEQNINTLSNEGEVMLSVLASLAEEELESMSTNQRWAFQKKFQRGEVVINTKRFMGYDVDGDGELVINGAEAQIVRRIFHLYLDGMGMHRIAKLLNEEGVPTVSNAKWHDTTVGHMLRNEKYKGAALLQKTYLHGVNGKRRLNQGEVAQYLIEDNHEPIVSKEVWQAVQDKLDSNTWKQGPNKHYRFTSMLRCQYCGSTLKRQVSYKKQIVWCCSKYIKEGKASCQGMRVPEKAIEDWRLKTPVTVIERTEYGQKHYSYSSQENAADGHPSASHQNQSGRLLSGVNRPRRTAIKL

SEQ ID NO: 18195 - protein, 452 aa, synthetic construct
MKAAIYIRVSTQEQVENYSIQAQTEKLTALCRSKDWDVYDTFIDGGYSGSNMNRPALNEMLSKLHEIDAVVVYRLDRLSRSQRDTITLIEEYFLKNNVEFVSLSETLDTSSPFGRAMIGILSVFAQLERETIRDRMVMGKIKRIEAGLPLTTAKGRTFGYDVIDTKLYINEEEAKQLQMIYDIFEEEKSITTLQKRLKKIGFKVKSYSSYNNWLTNDLYCGYVSYADKVHTKGVHEPIISEEQFYRVQEIFSRMGKNPNMNRDSASLLNNLVVCGKCGLGFVHRRKDTVSRGKKYHYRYYSCKTYKHTHELEKCGNKIWRADKLEELIIDRVNNYSFASRNVDKEDELDSLNEKLKIEHTKKKRLFDLYISGSYEVSELDAMMSDIDAQINYYEAQIEANEELKKNKKIQENLADLATVDFNSLEFREKQLYLKSLINKIYIDDEQVTIEWL

SEQ ID NO: 18196 - protein, 452 aa, synthetic construct
MKAAIYIRVSTQEQIENYSIQAQTEKLTALCRSKDWDVYDIFIDGGYSGSNMNRPALNEMLSKLHEIDAVVVYRLDRLSRSQRDTITLIEEYFLKNNVEFVSLSETLDTSSPFGRAMIGILSVFAQLERETIRDRMVMGKIKRIEAGLPLTTAKGRTFGYDVIDTKLYINEEEAKQLRLIYDIFEEEQSITFLQKRLKKLGFKVRTYNRYNNWLTNDLYCGYVSYKDKVHVKGIHEPIISEEQFYRVQEIFSRMGKNPNMNRDSASLLNNLVVCGKCGLGFVHRRKDTVSRGKKYHYRYYSCKTYKHTHELEKCGNKIWRADKLEELIIDRVNNYSFASRNVDKEDELDSLNEKLKIEHTKKKRLFDLYISGSYEVSELDAMMSDIDAQINYYEAQIEANEELKKNKKIQENLADLATVDFNSLEFREKQLYLKSLINKIYIDDEQVTIEWL

SEQ ID NO: 18197 - protein, 524 aa, synthetic construct
MAKKVTTIPATITKFSQTPINRVTKRRVAAYARVSTEQEEQQTSYEAQIDYYTNYISDRDDWEFAGMYSDEGISATNTKKRVGFQTMVTDALAGKIDLIVTKSVSRFARNTVDSLTTVRQLKEKGVEIYFEKENIWTLDSKGELLITIMSSLAQEESRSISENVVWGQRKRFADGKVTVPFKRFLGYDMGEDRNLVVNPEQAKLVKRIYGMFLQGKAPHTIARILTVEAETLTPAGKQKWNPSTIKSILTNEKYKGDALLQKSYTVDFLTKEKKANEGEIPQYYVKGNHEAIIQPEIFDMVQKQMALRTKGNNRRRSTSIFSSKLICGDCGNFYGSKVWHSNTKYRRTVWRCNHKYGNDEKCQTPHLTEDEIKEIFIKATDQLVDIKDEVISNYEEMKEMLFGTVELESEQRELEDELNEVAGLIEDCIKENARVALDQAEYEKRYNGLVERFDKANERLEEIKAQIAERQARGQQIEMFLKDLEKVGVVKEFDDDLFLALVERIEVGREKVVVRFKDGTKVEG

SEQ ID NO: 18198 - protein, 483 aa, synthetic construct
MDIILTKSISRFARNTVDLLETVRKLRAINVEVRFEKENIHSLSGDGELMLSILASFAQEESRSISNNIKWSIQKRFKEGKHNGRFHIYGYRWEGQELVVEPKEAEMVRLMYANYMNGLSAEFTVKQLTKMGVMAMKGGPFKATSVRQILANITYTGNLLLQKEYTADPVTGKSKLNKGELPQYFVENHHEAIIPMDEWQAVQDERQRRRKLGAHANKAINTSCFTSKIKCGNCGISFRRSGKKQPKGKPTYYIWTCRNKSENGVKACDARNIPEKLLKKACAEVLGLEEFEEEVFKDKVELLTPLEGDILRIKMKDSTTVDKQWTGNLRKDYWTPEVRRAWSERNKRKESSIFNGRFTEFTGFVICGRCGANYRRQSVTYADGTVSRKWHCSNFASECKPGERRNSIEEDILKAMVAEVLHIPAFDEPTMDEHLTRISIIDTEVTFHFKDGHTEVRAYEIPKKKSYAQSDEVRAKQSKARKK

SEQ ID NO: 18199 - protein, 452 aa, synthetic construct
MKAAIYIRVSTQEQVENYSIQAQTEKLTALCRSKDWDVYDTFIDGGYSGSNMNRPALNEMLSKLHEIDAVVVYRLDRLSRSQKDTITLIEEYFLKNNVEFVSLSETLDTSSPFGRAMIGILSVFAQLERETIRDRMVMGKIKRIEAGLPLTTAKGRTFGYDVIDTKLYINEEEAKQLRLIYDIFEEEQSITFLQKRLKKLGFKVRTYNRYNNWLTNDLYCGYVSYKDKVHVKGIHEPIISEEQFYRVQEIFSRMGKNPNMNRDSASLLNNLVVCGKCGLGFVHRRKDTVSRGKKYHYRYYSCKTYKHTHELEKCGNKIWRADKLEELIIDRVNNYSFASRNVDKEDELDSLNEKLKIEHTKKKRLFDLYISGSYEVSELDAMMSDIDAQINYYEAQIEANEELKKNKKIQENLADLATVDFNSLEFREKQLYLKSLINKIYIDDEQVTIEWL

SEQ ID NO: 18200 - protein, 452 aa, synthetic construct
MKAAIYIRVSTQEQIENYSIQAQTEKLTALCRSKDWDVYDIFIDGGYSGSNMNRPALNEMLSKLHEIDAVVVYRLDRLSRSQRDTITLIEEYFLKNNVEFVSLSETLDTSSPFGRAMIGILSVFAQLERETIRDRMVMGKIKRIEAGLPLTTAKGRTFGYDVIDTKLYINEEEAKQLRLIYDIFEEEQSITFLQKRLKKLGFKVRTYNRYNNWLTNDLYCGYVSYKDKVHVKGIHEPIISEEQFYRVQEIFSHMGKNPNMNKESASLLNNLVVCSKCGLGFVHRRKDTVSRGKKYHYRYYSCKTYKHTHELEKCGNKIWRADKLEELIIDRVNNYSFASRNIDKEDELDSLNEKLKIEHTKKKRLFDLYISGSYEVSELDAMMNDIDAQINYYEAQIEANEELKKNKKIQENLADLATVDFNSLEFREKQLYLKSLINKIYIDDEQVTIEWL

SEQ ID NO: 18201 - protein, 452 aa, synthetic construct
MKAAIYIRVSTQEQIENYSIQAQTEKLTALCRSKDWDVYDIFIDGGYSGSNMNRPALNEMLSKLHEIDAVVVYRLDRLSRSQRDTITLIEEYFLKNNVEFVSLSETLDTSSPFGRAMIGILSVFAQLERETIRDRMVMGKIKRIEAGLPLTTAKGRTFGYDVIDTKLYINEEEAKQLQMIYDIFEEEKSITTLQKRLKKLGFKVKSYSSYNNWLTNDLYCGYVSYADKVHTKGVHEPIISEEQFYRVQEIFSRMGKNPNMNRDSASLLNNLVVCGKCGLGFVHRRKDTVSRGKKYHYRYYSCKTYKHTHELEKCGNKIWRADKLEELIIDRVNNYSFASRNVDKEDELDSLNEKLKTEHTKKKRLFDLYISGSYEVSELDGMMADIDARINYYEAQIEANEELKKNKKIQENLADLATVDFDSLEFREKQLYLKSLINKIYIDGEQVTIEWL

SEQ ID NO: 18202 - protein, 452 aa, synthetic construct
MKAAIYIRVSTQEQVENYSIQAQTEKLTALCRSKDWDVYDIFIDGGYSGSNMNRPALNEMLSKLHEIDAVVVYRLDRLSRSQKDTITLIEEYFLKNNVEFVSLSETLDTSSPFGRAMIGILSVFAQLERETIRDRMVMGQIKRVESGLPLTTAKGRTFGYDVVDTKLYINEEEAKHLQLIYDIFEEEKSITFLQKRLKELGFIVKSYSSYNKWLMNDLYIGYVSYSDKVHVKGIHEPIISEDQFYRVQEIFSRMGKNPNMNKESSSLLNNLIVCEKCGLGYVHRAKDTVSRGKKYHYRYYSCKTYKHTHELEKCGNKIWRADKLEEIIISRVKNYSFATRNLDKEDELDSITEKLKTEHSKKKRLFDLYINGTYEVAELDKMMADIDAQINYYNSQIEANKELKRNKKVQESLAELATVDFDSLEFREKQIYLKSIINKIYIDGEQVTIEWI

SEQ ID NO: 18203 - protein, 452 aa, synthetic construct
MKAAIYIRVSTQEQIENYSIQAQTEKLTALCRSKDWDVYDIFIDGGYSGSNMNRPALNEMLSKLHEIDAVVVYRLDRLSRSQRDTITLIEEYFLKNNVEFVSLSETLDTSSPFGRAMIGILSVFAQLERETIRDRMVMGKIKRIEAGLPLTTAKGRTFGYDVIDTKLYINEEEAKQLQMIYDIFEEEKSITSLQKRLKKIGFKVKSYSSYNNWLTNDLYCGYVSYADKVHTKGVHEPIISEEQFYRVQEIFSRMGKNPNMNRDSASLLNNLVVCSKCGLGFVHRRKDTVSRGKKYHYRYYSCKTYKHTHELEKCGNKIWRADKLEELIIDRVNNYSFASRNVDKEDELDNLNEKLKTEHTKKKRLFDLYISGSYEVSELDAMMADIDAQINYYEAQIEANEELKKNKKIQENLADLATVDFDSLEFREKQLYLKSLINKIYIDGEQVTIEWL

SEQ ID NO: 18204 - protein, 481 aa, synthetic construct
MKTMNKVAIYVRVSTTSQVEEGYSIDEQKAKLSSYCDIKDWNVYKIYTDGGFSGSNTDRPALESLIKDAKKRKFDTVLVYKLDRLSRSQKDTLHLIEDVFIKNGIEFLSLQENFDTSTPFGKAMIGLLSVFAQLEREQIKERMQLGKIGRAKAGKSMMWAKTSYGYNYHKETGTVTINPAQALAVKFIFESYLRGRSITKLRDDLNEKYPKHVPWSYRAVRTILDNPVYCGFNQYKGEIYPGNHEPIISKEEYDKTQSELKIRQRTAAENVNPRPFQAKYILSGIAQCGYCGAPLKIMLGVKRKDGSRLKKYECHQRHPRTLRGVTTYNDNKKCDSGFYYKDKLEASVLKEISKLQDDADYLDKIFSGDNAETIDRESYKKQIEELSKKLSRLNDLYIDDRITLEELQSKSAEFISMRATLETELENNSALRKNKRKADMRKLLNAEKVFSMDYEKQKVLVRGLINKVQVTAEDIVIKWKI

SEQ ID NO: 18205 - protein, 526 aa, synthetic construct
MKALIVIRLSRVTDATTSPERQLQACKELCATRGYEVVGIAEDLDISAGKTTPFNRPELGQWLKRPGEFDVIVVYRVDRIVRRLFDLSDLIKWCQEHRVALVSATEAFLDLTAPFGDIVALLVAKVAEMELAAISERNRSAAQHNLRAGKYRGGPPPWGYLPQQNDAGVWTYVQDPVQVEVILEVVERVLKGEPLRAIAHDLTERGVPTPRDRFAEVRGRPVRGYAFHPGGLKRALTSPTLLGRVVISDTTKDAQDRTEALLVGDDGAPVVRAEPIISRDVFDRLGVELAGRENRKEPTKRTTSLLLGVIFCGECGKPAYKLKGGTGRKPRYRCASAQYKNPCSNRSIPLEWAEEELERRILQNLGSFERRQRVWVPGEDHSSELQEVNDLLADLTDQIGVGQFKRGTPQRARLDSRIAALSARQAELSASPTEPAGWRYEPTGELFSEWWEASDTEARNVWLRQMDFRVVWKSHSEGTRTVVDEFKLDGDLTMDLDADWLFGPMADIVSVLSDPANIEAYNALSK

SEQ ID NO: 18206 - protein, 640 aa, synthetic construct
MRRKKDRSNGITALYERLSRDDDNAGESNSIVHQKQMLEDYAMKHGFTNLVHFTDDGWSGATFDRPSWNRLVEGVKNGEITACICKDMSRIGRDHLQVGFFTDILFREKEVRFIAINNGIDSDRQETSEFAPFLNIMNEWFVRDTSKKIKAVLKSRGSSGNAHTSNIPPYGYLKDPENPDHWIIDEEAAEVVRRIYRMTIEGKGPYQIARELSEEKIERPSYYLGKKGLGNHASNYDKENPYMWRGNQVTTLIARPEYIGKTVNFRTFKNSYKDKKTKRADKEDWVVFDDTQEPIVDEETWLLAQKLRQNVRKADPMGEPNVLTGKIYCADCGAPMYNHRQRKGRERIYYTTKGEKRISHSNPADCYECSTYNLAYQKYDRHCTCHHISTKALKSIILKTIQETCHYVSLNEQGFVYSLQEESAMKDIAVSETVKNRIERNQKRVHELDMLIRKIYEDNVIGRLPDRLFQSMLTDYENEQNELNKIIETDTADMQRIIGGQNNVERFIKLVKKYENITELTPTMINEFIDKILVHEPQGKGADRTTEVEIYLNYVGQFQVPVEQHEPTEEERIAAEKEAERLRRKRESNRKYMKKIREKSKEFAEHELIAEEKSSDSNVCVEQNATSKSNRQKVKGEKIA

SEQ ID NO: 18207 - protein, 565 aa, synthetic construct
MNNRYMSNNIERNATWRVGVYCRLSKDDELTGESASISNQRDILVNYCQSQGWQVVDVFQDDGYTGLNTDRPDLQRLLKACEKGLVNLVITKDQSRLGRNHVQTGFLMEEFFPKHGVRYIALYDNVDTFAGDNEIAPFKNVLNEMYSRDISKKVHASYHLQATKGKFTGVVPPLGYQKDPEEKGHLLIDDETAPIVRKIFQWAVDGHGINFISRELERQQIPCPSWWHRKRGLRTYYTKWEKKDPENGKYVWDESYLKSLLMNPVYCGDMASQKRYYRFKIGNQGDKAPEDWITVRDTHEAIIPQDVFDLVQAKMKGRKRQTEQGEYSMFAGLLRCAECGGALTLKKTHTKDQHEVYTCSTYIHKGKAHCTQHRVDADDLYDAVLTRIQECAKAVTGDGTELENRVKELCEEDTQGHRESLEKLVSKQKDRLETLDRLIAKLYDDLINDKITESVFDKMLEKTQKEQTDIKKELFQNESVLNTEEKLDAQSQQWIDDISEYADIKELDANLLNRLISKIVISEPQEKDGTENYCRTPETVTMEIHFNLKPIPELGTIERGSGSHK

SEQ ID NO: 18208 - protein, 525 aa, synthetic construct
MNANVTIIPPRKIAGNTVDQHKDKPKLRVVAYCRVSTDSEEQATSYDTQVQHYTDYISRNPLWEFAGIYADDGISGTSTKKRVGFNDMIHDCMSGKVDMVITKSISRFARNTIDCLKFVRQLKDKNIPIIFEKENINTMEASGELLLTIMASLAQQESASLSQNVKLGLKFRYQEGKVQINHNWFLGYTKDDEGNLVILEQEAKVVRRIYREYLEGASLRDIAEGLEKDGIKNGAGHLKWHLSNIKTILQNEKYIGDALLQKTITTDFINHVRIKNDGTEPQYYVKDSHASIIPRDIFFKVQEEMVRRANMFSGEENKKRRVYSSKYALSSLCVCSKCGDVYRRIAWNNRGVHSVVWRCCTRVENGPSACDAPTVQENELQSAIVKAINKVFSIPDEVLDTLNNNIREIIAGNNLSEIETVDKKIADKQAILLTLLKAKKDYTKIADEIDELKAKKQQLLIEKAGQEDAKRRIREMEDFLKSERHELSEYDEKLVRKYIKKIKVYEDRFSVTFKSEISVDIERAS

SEQ ID NO: 18209 - protein, 531 aa, synthetic construct
MKEIIKIDSTMRKTGFEKKTRVAAYARVSSDSDEQLLSLEVQKEHYENYIKSNPCWEYAGLYFDEGISGTKIGKRESLKQLLKDCQSGQIDRIITKSISRLARNTVDCLEIVRKLTGLGIYLYFEKENIDTEHMSSELMLSILSSIAQSESRSISENNTWAIQKRFENGTFVISCPAYGYKNENKKMIIVPEQARVVKEIFNMALSGMGGEAIARVLTDKKIPTKKGGSWTSSTVNAILTNKTYTGDVIFQKTFTDDNFNRHKNCGEKQQYVIENHHEAIISHETFNLVKEIIAWRRSENNIVCGSGKYNKLYAFSGKIRCGECGSKCKRRIIYQHNKAYGIWVCITHLEDIHACSQKSVMESYLKISFLQMLNKLKAGYVQMLTPLVESLRGVNNKDGLNKVIGLEEKIAKLQEQEQVLSKLFAGGYIEMDSYYLESNQLKTEIDTCLKEKLQLSNSLNGNLTHLNEAQKLQRFVSVTEVFSEFKDEDFLDFVDNVVVKSRTEFIFHLKCGLELEEEVKETWHTSHMVTE

SEQ ID NO: 18210 - protein, 525 aa, synthetic construct
MSANVTIIPPRKIAGNTVDKHKDKPKLRVVAYCRVSTDSEEQATSYDTQVQHYTDYISRNPLWEFAGIYADDGISGTSTKKRVGFNDMIHDCMSGKVDMVITKSISRFARNTIDCLKFVRQLKDKNIPIIFEKENINTMEASGELLLTIMASLAQQESASLSQNVKLGLKFRYQEGKVQINHNWFLGYTKDDEGNLVILEKEAQVVRRIYREYLEGASLRDIAEGLEKDGVKNGAGHLKWHLSNIKTILQNEKYIGDALLQKTITTDFINHVRIKNDGTEPQYYVKDSHASIIPRDIFFKVQEEMVRRANMFSGEENKKRRVYSSKYALSSLCVCSKCGDVYRRIAWNNRGVRSVVWRCCTRWENGPSACDAPTVKEEELQSATVKAINKVFSIPDEVLDTLNNNIREIIAGNNLSELETVDKKIADKQAILLTLLKAKKDYTKIANEIDELKGKKQQLLIEKAGQEDAKRRIREMEDFLKSERHELSEYDEKLVRKYIKKIKVYEDRFSVTFKSEFSVNIERAS

SEQ ID NO: 18211 - protein, 530 aa, synthetic construct
MKMITKLEAKQPDNSLRKIRVAAYARVSTDSDEQLLSLEVQKEHYENYIKSNPCWEYAGLYFDEGISGTKIDKRESLKQLLKDCESGQIDRIITKSISRLARNTVDCLEIVRKLTGLGIYLYFEKENIDTERMSSELMLSILSSIAQSESRSISENSMWSIQKRFENGSYVISSPSYGYKNENGKMIIVPKEAEVIKDIFSMALLGKGGHVIANELTAKKIPAKRGAKWSSTTVNAILNNKTYTGDVIFQKTFTDDNFNRHKNRGEKKQYVIENHHEAIISHETFNNVHELRQKRKLKLNITGGSNKYLARYVFSGKLYCGNCHSRLKKHDRHKKDGAYVVWCCTKHIRETKCCPMKAVKEEYVKLAFLQMLNKFKATSAQILTPFIKSLRNVNNKDGLNKVIELEEKIAKLQEQEQVLSKLFAGGYIEMDSYYLESNQLKTEMDTCLKEKLQLSNSLNGNLTHLNEAQKLQRFVSVTEVFSEFKDEDFLDFVDSVVVKSRTEFIFRLKCGLELEEEVKETWHTSHMVTE

SEQ ID NO: 18212 - protein, 562 aa, synthetic construct
MEKRKLYSYIRWSSDKQAKGSSLQRQLETARRVAHENDLELVEIIDAGLSAFRSKHLEKGSLGAFIEAVKVGQIASDSWLTVESLDRISRDAILKAQGLFMELLELGITIYTGMDNRIYTKSSVTDNPMELMLSIMTFSRANQESMVKSQRQKSATQLKINKFNASVRADNGYPHAIRNSGANVFWSDVSDGTVRPHEYYFPIAKLIVSLRLKGWGYMRIAKHLNENYTPPKGTAKRKHFKDLWSPKLICNFLQSRTLMGEKSIRVDGVEHILKGYYPQVISENEFYSLQNVINRKLANEPNNYIPLLTGIRRFKCGCGAAMVAFFQYDKIRYRCDGMKSLDKRMHCGAKSFNGASIENAIVQICADKIFKDVKTHTSNVGAIQAMLVEAKRKYNRGMDMLLEDTAPQGLNIKLIELEKQIEELQKKLNDELVTEAGVNSSVSWGAVPKDYRDVFNTERLEIKQKIQASTLSIVCTTIKTKGHLFEIKFNDGDVIRFFSDKRRVHVDVHSINNAEIMQSEGIILHDHLDYLVGPEEFIERIRQKHLQMKALQERTLDDIFDI

SEQ ID NO: 18213 - protein, 558 aa, synthetic construct
MAGNGFEGKRVVIYARVSTSRQEKNDLSLPDQIGTNERWIEGNGAIQTRTYSEFGSAMDDSRPKFQEMIAWAESEEHPVDIVLVHSLSRLFRNALHFMQYRDRLRRRKVRIVSVTQNFGDDPASDMAIGMLAISDEYHSAENAKHVKRTMIANAAAGFWNGQTPPLGFRTYAVPQPRGKDRTKLEHDPETVDLVRYMFKTYLEGTADGPVGVTTLAAHLNQRGERIGGKKFSHSRVHDILTNTAYIGYVLYNRRCSRTGELRPETEWIPIPVPPVVSEETFYAVRKQMAERDPKMGIDAEKTNTNLLTKRAVCGCGGDGCGSTMGARTGKSGNHSYYACLGRANKGSTKCLGRWVPRMELDTIVTEAVAEHLTQPERLNALLQTWLDRSAGAVTERKAELKRLRARVTALDGESALVIKLVRNKTFSPDDPHIASEIANIRAQRISAQADIDVIERQLEAGDRRITPEIVTNFGDLLRRKLRGPDPQARREYVQLLVERVEVGDRAIRITGKNAALERAVIASQNSGAAVPKADRKWCRLRDSNPRPSVYKTAALPLC

SEQ ID NO: 18214 - protein, 583 aa, synthetic construct
MVLTMRKCFLYSRVSSDAQISGDGLVRQEDKLKQYLLQNAERLNLSTIDYEILVDSGISGWKGSNMGDTAALGQLFMRVESDEIDDSVLIVESLDRFSRENPFRVAGYISKLAEHGIDIIDVENNLVIGPSNPWSSTISSIIANRAHEESTLKSKRIKAAWDSRRKKAKESGQYMIKNTPFWIDVLDDKYVVNANASIVREIFDLYLQGYGSFTIAKKMNEVGKIIRDKRWSTPKICALLRNPRCNGDFISNSLERNYEKGTSTSTEHVIKGLYPKIVTDDEFALVLNRLDGNHKNRRVRNDRKVTILNGLLKCSICGGALTVRSAGAYRYVGCLKTIEKGGCYAKPMRYDVLEKIIIEHIRNMDIGQVYESNDSKEFQLQSRIKNLASHIDEFTNGIASIRAKNKKPSFEMLSELQQSEEELESLKKEQEQYKLSKIDLGEFKVSTELLDVTQVALRSRLESTISNLLNKIKIHHTKDMSFSLIELVYVNDVVKHILVADKKGLVSGDVIIRQDDDLTIYESRSVKIIKDEGRIFSLDCSISEIALNDYLFLMNIVDFIDSDAKEFLNLHLNAVLQHESQQK

SEQ ID NO: 18215 - protein, 674 aa, synthetic construct
MKLSKIASSIGVKPVVITYTRFSSSMQKDGLSEYRQDELTQRHVIDFCEEHDVDLDEVISLRDRGVSAYRGKNMTQGSLSEIISKFKSGELPKVYNEKGEINTFLFIESLDRLTRAKLFKANKLFLDLVEYCNIVVVAESEQKIYSMNQLSSDTGMLDLFSALLTMSRSHNESRMKELRTKANWNKKRQSVIDYFDLPEEERKKAEYPLNATKTCPWWLKPKSDNRGFEFIEENRKAMMFFLNLMLEGYGLTSAIRRLNEEIEAKTFKVVFSAKQKNIKGFATHTFYQLLTNDSNETLIGNLIFHQDFYPEESDVAQETFEAKDLGKRIRVPIYNAKGYYPALLSEIEYETLQYKISQRKQSQSKPTKKVANIAQGILKCPKCGYSYVHNVDNRQGRHPHLVCRSSRSKLCRAFTYRYEFLEHNFLTFCRNLNIAKVLGKDMPDDSVERMILETESKIEKLKIVRNKQDHDMELLVSNIARLTIPSLVEKMQDEYVNFEIKIKQTQQELESAFRDLETLRVKTVSLNNVSLTINELIDAMKDKSDVQLRETLNVELKKIIKGMGILHHSDHNNPFGRNVIYVEFFDGYLRFIAIDKKLDSDELYNLLPVVELSKIDESFDFSENVILPSDYITGLEKGKYPPVEEMAKYYHENPAKLLIVMDEMKSSDVVMNFE

SEQ ID NO: 18216 - protein, 558 aa, synthetic construct
MTKLYSYIRFSSMRQSDGSSYERQIRMAKEIADRYNLELVNDYQDLGVSAFKGANSKTGALSRFLDEIGRSIPVGSWLFIENLDRLSRQDIISAQELFLSIIRRGITIVTGMDNKIYSIETVTANPMDLMFSILLFIRGNEESQTKRNRTNSSALLKIKAHQQNPQSPAVAIEEIGKNMWWTDTTSGRVLPHPVYFPVLQKIVQLRQEGHSAGVILDYLNEHHEPPAPTSNKKHGKWSRAMVSRLFNTKALIGVKTVNVDGVEYELRDYYPRVLSDSEFYFLRKNIVKKAWDYSHDKEKVIPLLSGIGVLRCVHCGATMVKQTAANGKREQYRYCCDGRKSGRTDCPYPNWGFRAVTLEGAVLQLLADKIWIAEDKTNPIPEIQVKIDEISRKIDNLINLSAMTGATKELANQITDLNSQREALHEEIRLFEREMYSVDSQGWDKLAQFDLSDVQNEERLKVRLKIKGALHEIECSRIDSKKNLFVLVYLDGLRQRLVIENNRGLKKGQIFVDLKTINDRQILESAGMVLHPCIEMIIDSDWKAPEEIPGLLSEEFGI

SEQ ID NO: 18217 - protein, 544 aa, synthetic construct
MIKIAIYSRKSKFTGKGDSIENQVQMCKDYANTHFNDKNLEFDIYEDEGFTGENLNRPKFKMLMSKLKEYDVLICYRLDRISRTVSDFSSTLEILDSHNCDFVSIKEQFDTSTPMGRAMIYIASVFAQLERETIAERVKDNMLELAKNGRWSGGRMPLGYKSEYESYIDAEGNERKVVKLIKSDKELELVNLIYKTYLEQGSLHKTEVWFTQKGIKSNADILLEKTSLKVILQNPVYVKANKEVVDFMKKEQWNVYGEPDGVHSLLSYNKTEAVRVNGKKTKRAKEKSLWIAAISSCEGVIDPEMWLAVQKQFSKNKDTFPHLGKTHNGILTGRLKCKNCGSNMIIQHGTVSVKTGQKLFYYICSMKKRSKGEVCNTKNLRAFDIEESTINELESLAERKLNFLSTLKKKNNYTLSTKNIKSKKLLLEKQLLEKQKQIDNLVNKLSLDDDIADILIVKIKSLKKETASISEDLEKLNNDIKISDTEEFNISFIESVLNRCVNIRDLSKEEQKQIIDVLIIDILYDGSIGEAEMNLIGSDTGKKK

SEQ ID NO: 18218 - protein, 582 aa, synthetic construct
MTSPSPAAYAYIRHSTKRQGAEDKDSVTRQKESIRVLAEQYKVQIPDENFFYENGVSAYNGKNRTHGKLKELIDQIDSLRIRPGDIVFVESIDRLSRQRLLQAKELVNGILEKGIVLVTTIDNQRYEKASDKNGIDDLSQDILLSVISKRSHEESKTKSVRRLSAWAKAKKDAVEKSIPFNKKRPPFGIQYNELTQKFEPHPEQAEELNRIFESLRLQGVTATIKEINKTSSVKWTQNRVKDIFEKKYPLGYMYSQVKKDGKMQFDKYIENYYPQIISFELFEQARQAMQGRKVNRRAGRSSQDNSNIFRHTAMCGICGESMFFMNNFGSQTKRYFYMSCRSNFEQNNKCKNRFRYDFGVSVLFHIIASSFFWNMLSKRPALFEAVKKSTFYSEGDFGTKVETADDMTSYAKVGEHFIRFLEGNTDNKSQNKERIEKEILLSKKKMTLENLEKSVETIQDGAIPASILKMLMNAEEEVSRLKEELEELTVNSIDTKTTLHVKTVEEFVELFKKEHGRLQIINFLASNGITFFFTYNKDAKTLNTKVAIDGEVVCTYNTLYEINALEKYGIGNIAEEFKLPDA

SEQ ID NO: 18219 - protein, 510 aa, synthetic construct
MRPTGLDVFIYLRKSRKDLEREQNGEYDTLERHRKQLLELVKKENHNLVAPPFEEVVSGEYINERPKIQELLREVENSAADAVLVMDLDRLGRGDMFDMGLIYRAFAYSETLVITPTEVIDPTEEGAELLFGVKSILSREELKNINKRLQRGRRASASEGKFIGKKPPYGYLRNEKMKLVPDPETAWVVKLIFEKMSEGYGRHALARYLDEHKIPPPERANQWEHSTLTAIVKNEVYTGTIIWGKTKQYKRNGKRVRKKMPRENWIIKENAHEPIVSKELFDRANEAHSSRWRPPMVEPNTLTNPLAGLLRCSICGRVMKYQPNRDRPNHHIRCYTRTCAPFHKGAGLHLVMDKVIESLSDILESIEFEGELLERKKVSLIPEKERALKEQQTVLKKAQTQKDNLHDLLEQGIYTIDVFMERQQAITERIKNAQEKIAQLKKEIDIEQEKEKHYDQFLPKARNALKAFYETDNAFEENKLLKSIIEKIEYTRKKDWVEPDHFEIKIYLKI

SEQ ID NO: 18220 - protein, 526 aa, synthetic construct
MISLAKNVTVIPAKKIIGTQKPTEKVQKTRVAAYCRVSTDSDEQESSYDTQIEHYTTYIKSHPEWTLAGIYADDGISGMNTKKRDEFQRMINDCNDGKIDMIITKSISRFARNTVDCLNYTRALKNKNIGVYFEKENINTLDAKGEVLMTIMASLAQQESESLSANVRLGLQFRYQQGKVQVNHNWFLGYTKDEDGHLIIDPEQAEVVKRIYREYLEGKSFLQIKRSLEADEIRNGAGNKKWHESNIRQILTNEKYIGDALLQKTYTVDILDKKREANKGQVPKYYVEDSHEAIIPKDIFLKVQEEIARRANLTNGTTKRKRIYSGRYALSGMVFCAHCSDIFRRIKWNNRGCKSTVWRCVSRVEKDGPDCPARTVHEELIHEVVIKAINEAFREKETILPLLRENIESSLEEINLSQIATIDDQMKSMQQELLATVNSKNTGDELGMEIRRLRDEKQALQNEQALRQDLKTRIDEMMRFLNDLPCELTDYEEEYVRTLLERITVYDDHIIVEFKSGIEIQIDKEV

SEQ ID NO: 18221 - protein, 526 aa, synthetic construct
MIAIYARQSLDKKDSLSIESQIDKCIALCQYNEWDYVVYSDKGYSGKNLERPQFKKMLKDIKDGKIEKIICYRLDRMSRSMADFSNLIIELESYGCKFVSATENFDTSTPLGRAMVNIIMTFAQLERETVVERVTDNYYYRTALGHWGGGPAPYGYKLKRVNGGGKNYTILEINQEEAEVIRKIYDWYLEPDGSTTTIIEKLNLCGYKSRGNKTGKRVWTQRVISDYLCRALYTQNDIKIYGYFKSNGANFVNDVSDFDGTKSINIYGKTSKGLSKHKRCRKIEEQYLCIMEHEPIIDSETWIKVQHKLGRIKPIPSRSGTSGKSQFSGLLKCGYCGYSISTSGSGNGTMYYVCSSKKNRGKDSCNAKTTRLDMLDNTVINKLIDHIHNKDFIEFVENTKLDNSVPLEYIHKKKDIEMKLVKIETEIENLITSIATGNNTLIKYLEERITLLDTEKKVLSNELNELEGNVIEGNEDLINIRNELRENNDIEYQLRNGDIETRKRLSKLFISQITIYNDEIVVDYRI

SEQ ID NO: 18222 - protein, 436 aa, synthetic construct
MAEIKIIKKQTELPKLVKVAAYTRVSSDKDAMLHSLSTQVSYYSNYIQSNKNWIYAGVYSDEGQTGTKSKRNAFQRMIQDAKDGKIDIIITKSISRFARNTETLLQTIRELREINVDVYFQEQNIHSLSNDGELLISILASYAQEESRISSENSLWRVKKNFSEGKIYGGKNCLGYKIVGGQFVVVPEEAEIVRLIFNLYEQGYGEDKIAKTLNNNGIKSYFGKLWYRSSVRGILTNYNYTGDLILQKTYRENHITKTTKINYGELDKYHVSNNHEPIISKEQFENTERIRAERLSKNHKVTFTLYPFTGLLRCGVCGRSYKHKKNKYLEYWVCSTYEQLGKAYCNSKQVRDDVLRNATCQALNIDEFDSHKLDQLVSQIEIFNGNKLIFKMNNGEQKEVIWETPKRSDCWTEAMREKARLDGMKRKKKSNIGGNK

SEQ ID NO: 18223 - protein, 529 aa, synthetic construct
MAKVTIIPSKLNPITQLPNNALYKRKVAAYARVSTLQDEQLSSYDAQVDYYKKYITDKPEWEYVGIYTDKGISGTNRKNRAGFNQMIADALNGKIDLIITKSVTRFARNTLDTISVTRELKSHGVEVFFEEQNVYTFDSSGELMLTIMASIAQEESRNISENVKWGKRKKYNDGIASLAYKHFLGYDKHPTDPKKGFVINEEQAEVVRLIYKLFMKGKTLTYIAKFLEDNGYKTPMGKDKWRISTLESILRNEKYKGDALICKTYVKDFLEHKLVKNNGEVDQVYVEAHHDPIIEPHQWDLVQVELDRRKNLSLGYKCKSAFSSKLICSHCGSFYGQKVWHSTSKYRRLVYQCNDKFNKNHSKCQTPTLNEEDVITKFLNAYTTFMGDKGKVISNCRDMIKILDNSSELENEIEHLKIRSNEIIILVQNLIDRNSTEPISQEEYQAKYDEYDKEYAEIINKVNELEDEVRNKKAQAKNLNAFIADLAYRPNVLSEWDEDVWNYLVDKATVHEDKSITFLFRNGQEINVK

SEQ ID NO: 18224 - protein, 547 aa, synthetic construct
MAKVFSYVRFSSAKQSAGDSYERQTKAAKAFAASKGLELADPKEYLFFDAGRSAYKGKHVDDTSELARFLSYVEDGTIPTGSFLVIESLDRLSREKVRDALPRFLDLLAKGINVFTSLDQRLYTKDFDVTDLLVSIISMSRAHEESATKGSRVSSAWRKKQADARATGKPLGKLRPLWLDVTPDGYALNTDHAQVVRRIFDLSTQGHGSRNIAATLNQEGIPAFSAGRKNFSGLWGFSTVRHILDSRTTLGEYQPHFFIDGVRTPDGEPIKGFFPAVVDEETFYRAQAARGSRRLHKITKQTANFNVMAGIFFCFDCGAAMHLQSQRGHKYYKCSHSIRGMCSAGVVSATRTETVFREILAKLDSLSLVQGSSGAIAKKLDVAEGRSEELRAKFAAAEDAHNEYPSRTTAKLLHELESQLSTIDAEKNSLRQQMAVDRVVSKSDFFEKLDLTTFEGRAAANNLTKRLGTQIYVRKNGRCNETYLIAMKTADDPEPSVIGVITHYNKQIRIDSASEAFEELQKVHGDLPKWQLTSRHLMKEIKVPARP

SEQ ID NO: 18225 - protein, 523 aa, synthetic construct
MTHIKQNRKRTAVIYTRVSTDEQKENGFSLQDQHSKLLTDCERNNIEVLKHYQDDHSAKDFNRPEFKNFLKDVESKKLKPDLFICVRPDRFSRNLQNTMGMLTKFKSLGIEFKTLENHTDLDSPESLLPFLIYNLMPQIDNERRGLNTKQGMRQAQREGRTMGRPPLGYLNEKFTKTIVFDPNNAPLIKLGFEELSKGIYTIEEVRKKLIKHGLKNCCKQSFLNHVRNPYYFGLIKVLAWKNEPEEEIIGQHPPLISKELFEEVQTVLFGKRRKLPVALTRKDELPLRGYLTCNKCGGNLTGSPSTSGNGCSKTFYYHCQKGCKERFRADLANDCFENYLDSFKVDPAVLNLYKIILEDVFNQDEQERFKNIKQVEDMIALVKIKLNSLEDKMLDNVVSSEDYHSIKTRINGELSDWKFKKEDLSIDKSAYQKYFEFGLSFLSNAKEYYQKADLEIKQKIVGSIFPEKIIFSNNKYRTSQTNELLKLLTFNINELGNIKNEKATPKSGLSNYAPSLGLEPRTL

SEQ ID NO: 18226 - protein, 491 aa, synthetic construct
MYLRKSRAEEGQSTEEVLAKHRAALEELADRLGLPVDGVYEEVASGEKLYARPEMLKLLERIRAGEVEAVLCMDIDRLGRGGMADQGTILDAFRESGTLIITPEKTYDLTNDVDIEMTEFKAFFARAEWRAIRKRMRRGLMQTIEAGGYTANAPYGYRRCRIGKLPSLEVIPEEARFVRYIYERYLAGIGAQTIAQELNAMGSIPRRGAEWNRNTVRHVLRNPTFAGKVAWNRVKHYRPGAHGKDKHHVVYTPEGEWLMVDGVHEAIIPWDTWLEAQERRKQRYIPPSNTGQRANPFAGIIRCSKCGNNMQRMGTNKGEPYLLCTTKGCTAGAKFEYVEERMVELLYDELARLRLLIDSGAAPNIDALEAALAAAQREQERVQARIPRLYEFLEDGTYDRATFRSRLEAAEKELAELANKRADLERHIDERRRSDPRKAAAALENLVQLYPTMSPADKNSALKALGVEVTYTKGKKTKPRDFTLELQLRDF

SEQ ID NO: 18227 - protein, 472 aa, synthetic construct
MMEQINYNLKNTFQTYLDEYSPIIKKVRVAIYIRVSTEEQKINGLSVETQKDALTEHALQNNMEIVDYYIDAGLTARKKLSHRKELLRLLKDVEKGLIDVIIFTKLDRWFRNIADYYKVQEKLDKYKVNWKTIYEIYDTSTANGRLHINIMLSIAQDEADRTSERIKAVFENKRSKGETPANRAPLGYKIENSKLFIDEDTSQIALDIFNYYDTHHSLLGCVRLAKEKYDYKIYDYSVRRMFVNTIYIGEFRGHKDFCEPLIDRDMFYRIQNYRGVREFKNQLTAGRTYLFSTLILCKECKHTMTASFTIQKQKHGPKEFHYYRCREAVVNYACNHTKCINEEALENYLLNNIKCEMQETLVAMEKRRLSASVKKNDTAKTKKRMEKLKDLYLDDLIDKDSYKQEYALLTAQLDSIVPVQPAATEKYKAYLEQDINSLYEEMSPAERKIFWLGIIDRIVIDRENNIDFFLRE

SEQ ID NO: 18228 - protein, 519 aa, synthetic construct
MKRITKIEANEKLQKAPKKLRVAAYARVSTDSREQLVSLEAQRSHYETCIKSNPNWEYVGLYYDEGVSGTSMAKRDGLIKMLDDCEAGKIDFIIIKSISRFARNTTECLEAVRKLIKLKVFIYFEKENINTGDMENELLLTIFSSLAESESISFSENEKWSIEKRFQNGTYIVASPPYGYKNEDGLMVINEDEVDVVRYIFAECLAGKGGHVIARDLNDKRIPTRRKREWTPGTVNAILRNEKYKGDVLFQKTFTDETFVRHINNGEKAQYYVTEHHEAIISVEDFEAAQTMIDQRSKDMKIQQGDAKYQNRYPFSGKIVCGECGATWKRRTHSESKVKYYAYACNTHLKKKDQCSMQFIREKSFEVAFLNMINKLAFTKKVLLQPLLASLKAINQEAAIARINKLEAALEANFNKRQQLMNLFTKEYLEPAVFNDQNSGLLAEAKSLSDEKEALYASVNHEYEHVEALNKLIKYVNSARIFTEFDADAFEEHVDYIIVFKRYEIGFVLKCGLTLRERL

SEQ ID NO: 18229 - protein, 524 aa, synthetic construct
MISLASNVTVIPAKKTIGTQKATDKKQKTRVAAYCRVSTDSDEQETSYDAQIQHYTSYIESHPDWVLAGVYADDGISGMNTKKRDEFQRMINDCNDGKIDMVITKSISRFARNTVDCLNYTRALKNKNIGIYFEKENINTLDAKGEVLMTIMASLAQQESESLSANVRLGLQFRYQQGKVQVNHNWFLGYTKDEEGHLIIDPEQAEVVKRIYREYLSGKSFLQIKRSLEADGILNGAGNEKWHESNIKQILTNEKYIGDALLQKTYTVDILEKKREANKGQVPKYYVEDSHEAIIPKDIFLKVQEEIARRANLTKGATKRKRIYSGRYALSGIVFCAYCGDIFRRIKWNNRGCKSTVWRCVSRVEKDGPDCPARTVHEKLLQEVVIKAINEAFREKEAILPLLRENIESSLEEVTSNQIAAIDEQMKSMQQELMATVNSKNTGDELGLEIRRLRDEKQSLQNEQASRQDLKKRIDELMRFLNDLPCELTEYEEDYVRTLLEKITVYDDHIIVEFKSGIEIQIDE

SEQ ID NO: 18230 - protein, 665 aa, synthetic construct
MKYKKVRSGIRIWTKKKAALYVRVSTRYQVDKDSLPFQRKKLKEYCDFLGIDEFVIFEDDGYSAKNTDRPHFQEMMNRVRAGEFSHLIVYKVDRVSRNLLDFAAMYQELKDHKVTFISMNEQFDTSSAIGEAMLKIILIFAELERNMTSERVTGIMLDRAENGLWNGARMPVGYRWNEETRFPEPDPEEVKIVQFIFDEYERTRSAMKVTRYLNNNHVKSKRGGQWTSKLVHDIIRNPFYIGTYRYNMREAGRGPLKPESEWIVRKNNHEGIILGEQFDRCNKIMDENASTRDSSDLRARKYIHTFSGHLVCGKCGANMIASKDRARANGFRPSMYRCAQRSKMLDCDNSKTINESYIGPFIFNYVANLARIQKNSGQIDSIEKLQKELLKGEEFESVSSIMPDGLKETFAALKYSTNGSYLPSLGFSGDDSDYSTAEQLSLLRGEKDKCKNAITRLTDLYLYDPESMTKEEFSSRKKDLTKKVLDFEKQIEELEDGSAAGDDLADLSFIKKASAFLVAQRIVSKKHVDYMQMVLDLDNEILKDFVDQVIDQIVVEDGRVQSITFVNGLKHEFSYSRPAEMPVCKVCGGRIGSTIGCRTRTFSFQNKRYQRIKVGDPGDDFAGKKNPVCPDCFAQEGRWHHWNCSVERCPICGEYLSKCEHGPNK

SEQ ID NO: 18231 - protein, 543 aa, synthetic construct
MSSKPIERKALIYCRVSDPKQKRDGHGLESQQHRCFQFAAQHNMLVERVFHDDVTGGGDFKKRPAMTELLDYLKHNRHTKYAIVFDDIKRASRDVYFYWALIRELEQYDAIPMSPNFVFEKTPEGRLQQSITVAAGEYERESNARQTLQKTKSRLEKGYHTFTAPAGYKYIKHKIEGKILVKDERIALVVKEMIEGYASGRFQTKQEARFFLEASVDFPKGKSGRIGNSQVDKILTNPLYAGMIEYKPWDVSMRKGRHESLISYDTFCQIQDRLKGSAYAPTRKNISEDFPLRGSVECKCGRALTACWSKSRSGTLHPYYLCQNRKCELKGKSIRRDLLEGAFESMLRQLTPRHNLITLAEKMFSKLWEHRERSAQEHKSSLEKSMKKLDREIEQYLDRIIDTQSSTVIKALEKRIEQMEQRKLLLEEQFTNAGQPMKPVDEMYRTALEFLSSPYKIWENGGLAEKRAVLKLTLNQRLSWDEKGMYRTPNFSLPFKVLGDFFMYKREMVPRGGIEPPTRGFSTLNACASNILFLLHKPTKYFL

SEQ ID NO: 18232 - protein, 593 aa, synthetic construct
MPHDYIKARAAALAKAAQPPRIELWVDYARKSTVGLERQALSIPSQIEQMNAAFPDLPRFGKPVTESKSAFKPGRKKFNWIIERVEAGEISGIISWHPNRLSRNMEDASTIVRLVGAGKLDLKFVTFTFEKTPEGLMLLRTMLSQGQYESERLARDVRRGTDKKAEQGWYPGPVPLGYNTDGDRKKKGSRTIVEDQARLPIIERGMAYALTGNYTTAELRRLMAEEWGLTIRETEKRPSRPIGYGGVWAMLRNVFYTGHFIWNGELRQGSHKAVISLDQYERLQEIFRGHTSGDTRRLVTRAYVKFSGILNCGRCGRVVTCTEKRKYYATTNREAIYVYYHCSRNSRRRCAERPISEPKLVSAILEALSSYRLISEFRDMAYDVLIKDFRSKRQGQAAELEGQKAELLSLEKKDRGLVEMRASGEIDRDDYKLYHGGYKKRMAQLKRLVGRPAELDWSKLVGSIKAIHFAASLREPFLQADGVAQRRLLIELADKVVIERGKVLIEAKKWLRPLGDSFLLREANYELDRTSDFGSTKQKAETFASAFSLWYARVNTMADLIEEEVKSGRTVHAEVRLPAELQARLDALRQPER

SEQ ID NO: 18233 - protein, 490 aa, synthetic construct
MTDTSPTSPRGVCNTAIYARLSRDRRGLSENVSIQVSECRDYADENAWPVVGVFPDNDISASKYSKKPREHYDLLLNAVKQGQVNIILITEMPRLYRRLEELLELIKLAETTKLQRIQTTDAISYNLDSAEGIHAAINAVNNAMLEAARLSKRIKRKQRARAIEGKFHGGGRPFGYEPGGLVIRESEAGVVRECARRFIAGESIGDITRDLNERGVPTATGKQWRIENLQRTIMKKRNIGVREYEGQEYPAEWPAILTREQWDRMEAQRLSKEWRWPKTQTGVRKYLLTGFIYCGRCGSRMYSGGRGPEGGRPSQRRYRCRPHDNYGNASGCSKTFRIAEPVELLVTQAVWQVFDDPKVAVFLSPQVDEDKVRRLVQEFERRKGKLDQLVTDYATDVLSRDQFIQAKGIAEASVQEAREALSHYQSETSLAHVPATQTIRDAWETSGLEWRRNILRLVVDRVIVHPGRPGTKRWHGYHFDPEKIEIKWKF

SEQ ID NO: 18234 - protein, 478 aa, synthetic construct
MNKVAIYVRVSTTNQADEGYSIDEQIDKLKAYCEIKDWVVYKVFTDAGFTGSNIDRPAMTNLISAAKKRQFDTILVYKLDRLSRSQKDTLYLIEEIFIKNGIDFLSLSENFDTSSAFGKAMIGILSVFAQLEREQIKERMMLGKVGRAKSGKTMMWAHPAYGYTYNKETSSLDIVPAEAALIKKIYELYIKGKSISKLRDYLNDNKIFVNKSVPWSHRTISYALTNPVYCGMIRYEGKLYDGLHEPIITKELFNKTQEVLAERRMEASKKNPRPFQSKYMLSGIIRCGCCNAPMKSLLGMPRKDGTRTRRYQCINRFPRKTKPVTVYNDNKKCDSGYYYMEDVEHAVLHRISTLYSDEIEASEFFEDEITFDIQKVKDEITKIESKINKLNDLYINDFISLDSLKKQSANLINEKKIIENEIEKENSKQVNNLKEDALKILATNNIHDLDYEMQSYVVKSLIDKVFVTKEDMEILFKK

SEQ ID NO: 18235 - protein, 506 aa, synthetic construct
MRSVITYLRFSSAIQGAEGADSTRRQNDLFKQWLKKNSDAQVVASFSDEGLSGYKGKHLTGQFGDMLARIESGEFSEGTVLLVEAIDRIGRLEHLETEALMNRIIAHGIEIHTLQDGLIYTRDALSDDLGISIIQRVKSYVAHQESKQKSFRVSQKWKQRAKLALAGEQRLTRNVPGWIDPDTFKCNEHAETVRLIFKLLLDGESLHNIARHLQSNDIKSFSRRKDANGFSVHSVRTILRSETTIGTLPASQRNDRPAIPNYYEAAIDASTFNKAQEILDKNRKGRTPASDNPLTINIFKGLFRCQCGASVHPTGTKNKYQGVYRCNNHLDGRCDVPPLKRKPFDRWMIDNFLGMIDVGNDGESERKIAALQHEVEIVTARIKKATALLLEMDDITELKTQVKGLNQKRTEIQTTIDTLKRKTSLSDKGLPQLKDIDLMTKAGRVECQLILSKHLKGLTLGKDSVTVTLQNDTEITIPTDPLPLNDGTSIFEIADKELLDIDAYRL

SEQ ID NO: 18236 - protein, 478 aa, synthetic construct
MNKVAIYVRVSTTNQADEGYSIDEQIDKLKAYCKIKDWTVYKVFTDAGFTGSNIDRPAMTNLISAAKKRQFDTILVYKLDRLSRSQKDTLYLIEEIFIKNGIDFLSLSENFDTSSAFGKAMIGILSVFAQLEREQIKERMMLGKVGRAKSGKTMMWAHPAYGYTYNKETSSLDIVPAEAALIKKIYELYIKGKSISKLRDYLNDNKIFVNKSVPWSHRTISYALTNPVYCGMIRYEGKLYDGLHEPIITKELFNKTQEVLAERRMEASKKNPRPFQSKYMLSGIIRCGCCNAPMKSLLGMPRKDGTRTRRYQCVNRFPRKTKPTTVYNDNKKCDSGYYYMQDLENIVLNKISLMQMDKANIDEIFDEKSDFDIEKAKISIAKIENKINKLNDLYINDLISLDLLKKQSNNLLKEKKIIENEMDEEKVKQSSSLKDDAIKILNTKDIFSMSYEDQSYIVKSLINKVFATDKEVKILFKK

SEQ ID NO: 18237 - protein, 575 aa, synthetic construct
MAHGVQLQSSSLLRAVGYCRVSTDKQLERDLSVPDQQRQINQHCEKNGWRLVNHYIEGGLTATDDNRPEFQRMIERATDDDHPFDVIVVHSFSRFFRDLIGLELYIRRLAKSKVQVVSITQPLGSGPEHDMLRQMIGLFDEYTSKEISKHVRRGLKENARQGFWNGSRPPLGYRLEEAERRGERIKKRLAVDEIEAETVRLIFRLYRVGDGKSGPIGIKSIAKYLNAAGHRTRQGGYFGSSLIQVMLRNTTYKGEFLYNKRNYKTEEENPVEETVLVAVPVIIDPTEFGVVQALLSARNRLVTPPRIVTGPILLTGLTFCSKCGGAMTMSSGTSHTKKVYNFYSCLAFRKKGKLACDGCNVSMPALDKLVVGRLTERLFTKERIAEIIREIAQRRATKSTQADKRAAELRRRALDGEVRLNRLYRSIEEGIVELDDLLREKVAALQSDRRKAQDALDRLTEATIPAPEVSEGMIDEFVKVMRESISEGSVPFRKAYIRSVVERIEVSDDTITIVGAKLKIDQAVKAKELPLSSVRGFEPKWYALGESNPSLQNENIFFARAKTCKEASKSPNTLK

SEQ ID NO: 18238 - protein, 547 aa, synthetic construct
MKLLVTYIRWSTREQDSGDSLRRQTNLIDAFYSKHKNDYYLLPAHRYVDKGKSGFHQQHKAQGSDFRRMFENVMSGAIPEGSLIVVENFDRFSRADIDTAIDDVRQILRKGVSILTLGDGELYDKSALTDPVKLIKHIIIAERAHQESLVKQKRIAQVWNHKTQLARELKKPMGKQAPGWLELSEDGSHYIVDEDKASLVNIIYDKRLSGMSMFAICKWLNEQGYPTINQRKVRISKTKKPDGNWSALSVKHILTSRSVLGYLPAKISTEDRKTVLREEIESFYPQIVTDSKFYAVQQLLEETGKGKTSSGEHWLYVNILKGLIRCKCGLVMTPTGIRKPVYQGTYRCNGNKESRCSYGTVSRKLLDTQLCSRLFSKLSQLHDEATDTAKLDELQRRLNTVDSELEKLTETLIQLPNITQIQEALRVKQEEKDELIVQLSREKARVKSVSSLDLSGLDMESVEGRTEAQIIIKRLVKEIVVSGNEKLVDIYLHNGNMIRGFPLDGKDDHTLTLEEATDEMQSLDDMLIFGEPVTRIYPAGDMEEVDA

SEQ ID NO: 18239 - protein, 524 aa, synthetic construct
MKNKSIELTRTPKAIVYCRVSSTRQKTEGSGLESQEHRCRQYADQKGYEVEAVFPDDASGGGDFMKRPGMVALLSYLAAQPKKSYVVIFDDLKRFARDVEFHMKLRREFEKLGAQIECLNLMLEDTPEGKFLETIVAATGELERSANRRQVIQKMIARLEMGFAVFAPPLGYKYAAERGRGKILVRVEPVASIVCEALEGFASKRFLSHGEVKRFLEAQPSFPKNARGEVYFSRVERMLSHLVYTGYVEFPEWGVSRRKGHHEPIISLETFERIQMRLHEGTTAAVRKDLNEDFPLRGFVLCDDCGQPMTAGWSKGRSKHYPYYLCDTRGCECCRKSVRRDEIEDGFAELLRTLQPTQELYGLAKAMFTDAWKMRASEAIRDKSELENQVRGVEKQIQTLLERIIETASDTVIKAYEGKIEKLERQKLLLEEKVDRISPPTRKLDDFIEPALALLSSPWNIYENGNLPFKRAVLRLVFADPIRYSLKYGYRTANTTIPFKMLASISSVNGEMVRPRGVEPLFTE

SEQ ID NO: 18240 - protein, 595 aa, synthetic construct
MREPLPKTGLRRASVDERRKRLEADTVVSISPPKETVAVIYCRVSDSKSVKSDLSIPDQEKQGLAKAAENGWTVAYVYKELGVSAKTDQRPQFQKMLTLALSEQRPIQKIIVHSISRFARSVADYNSLTNQLYINGVEIVSVTQKFSNDTGGFIAETTSAVFDEYHVHRTSTDVIRAMTSMAKDGYAVGGVQPLGYKLEPDSINPRRKRVVINELERPLVVRIFRLALYGDGDSPPMGTKAIITKLNREGELTRSGSRFSSNLLHSMLTNPIYMGRKIYNENAVAKRWSPVPPERVEIPVPAIISQEEFDELQALLRSKNPRKGVGKARVLSSPMLLAGLAYCKCGAAMTLRTGTGKLGTVYRYYHCARVSRQGFQDCSGPCIPQAQLDEVVAEAVISQVLQEDRLATILNVMREKISSAVLQREERAIEIRKELELSERAFRNLMTIIASAEALASEPILLKKLVETEQDLTRNRNALKLLLSQGQPQAEITSEKIKFFSHLVTERLRDPDKVKMKAYLMSVVARVEVGEEYIKIVGRLADLQKCVADEANMASGESDGSTVRRYKRNWCPRQGSNPGPPDYKSGALPTELQGQ

SEQ ID NO: 18241 - protein, 518 aa, synthetic construct
MQKTVYCYARVSSRGQAKDGYGMPRQQTMLRDYVAAYDDSLHNRGYELGSVNWLYAEGISAYNGKNIEDGSVLKSFIDDVLERKIINAVLVIENLDRFSRAEPIKAANLFLNLITAGCDIHEVETETIHHSSSDLSIITGGLQRAHNESKRKARLSIKNWDERIKNAIDGKAVLTNRVPSWLEVKDNGYVIKEGEKEKYNLIFQMYADGFGPAAIRDVLKERNMLINDSEPTIAHLNKIIKDERLIGKFNSTGRKKLSGLVIYPVVVDLSLFHIVDQLRKQRNPVGKIHRKANNLFAGLCICMECGRYVQVNSVEPSGESYFRCGGSLVKIDRCQERGFKYKLFENALLQHIRNFDFSSLNANESEVQIRVNHLSIELLTHIKYRDEILQDIEKEDIPDPNDRRILKNIQKKIGEIESEISNLKRLNVNVSTFDELKKYSEELRDPLNVDLRLDFNIKVKRVIKSIIIKRYSDTIFLVVNYIAINEKQAIVINSKSGEVLYMGVQNDDLKKVEHLIRN

SEQ ID NO: 18242 - protein, 449 aa, synthetic construct
MKQVIGYLRQSTMKQQSLAAQKQAIEAIAEKHHIQHINFYSDKQSGRKDNRSGYRQITQLIQQGQCDILCCYRLNRLHRNLKNALKLIKLCQTYHVHILSVHDGYFDMDQAFDRLKLNIFISLAELESDNIGEQVRNGLQEKAKQGRLITTHAPFGYEYHNGTFIINQNESPTVKAVFNYYIKGHGYKKIAQLLEEDNTYINRQPYQVRNIIINPNYYGRVNNQYGQFDNMFPSIVSTSIYEQAQRLRLQKQTKQTPSDNQLKQKIKCPCCNATLTNMTIRKKNHTLRYYVCPKNMNASRFVCDFKGINAQTLEDKVLEVCRDFYQNQRIYTKIKSAIDKRIKRQRNIEKHHTLTQEQLIEKLAQGIIDAETFREQTQSLRQQPQRTTSINGHQIQHIIQNIIQKRFTLNILYPYIETIHITKDKNLIGIYFKNEPLNIVNQTMQSSIA

SEQ ID NO: 18243 - protein, 539 aa, synthetic construct
MGRTKKYVAGLYCRLSKDDGNSVESMSIWSQKVMLKQYAESNSIAIYDYYVDDGYSGTNFERPSFKKMITDIENRKINCVITKDLSRLGRNYLQSGAYIEMYFPQKNIRYIAITDGIDTLNSNQNDIMPFKNILNEMYAKDTSKKVKSAIQSRMREGTYIGSKAPFGYLKDPNNKRRLIIDEKTKPIIELIYKLCLEGKGTQLISQELMNRKIPRPSAFVENAEKLYGLTEENKYQWSHRMVLNVLRDPVYCGNMARNKRPTLSFKTSKRLYIPKDEYILVRDTHEGIISEEVWKQVQDMIDKRKCNNKSGITYDNIFKGLVKCPTCGYALTPKADYRLNKKETMDFVHFSCSSYKKHGINACSSHRINARDLYNIVLEDIGYHGNMALSAKEDFVEKIIEKIEVEKIDEGKEISNKLEIKKNQLAELDRSYEQLYEDRLEGNITERNFNLMNVSISKKQDKLIEEIKVLEGDIEVSLETEDNYKKFMDNISKYAKIKSLNRYILNQVIDKIYVYDKEEIDGQISQKVEIHYKFIGKLN

SEQ ID NO: 18244 - protein, 548 aa, synthetic construct
MIQSNSNHFSYRTAIYCRLSKDDEQKGESASIQNQRDMLEHYVKSKGWNIVDVYVDDGYTGLNTNRPSFQRLIRDVENKKIDIVITKDLSRLGRNYLQTGYYTENFFPKNGVRYIAVNDGVDTLQDNNEIVPFKNVLNEFYSRDVSKKMKSAYLTRARQGKFTGCLAPFGYMKNPDDTHTLMIDEETSWIVEKIYDLAISGYGVQAIRRILFDEKIPTPTWWNRKKGLRNKTTKLEQTVKDGEYWWDCTTIKEIIENPAYLGHTASQKANYQFKIGWLSDKPKNDWIVVENTHEAIISEDTYKMANEKLQSRKRPFKTGEESIFAGLVRCPDCGKALNLGRNNSKNKEKILTCNTYRRYGKNLCSQHRIYFDTLYEIVLADIRKNADFALNDEKAVVKALEKSRDSEAEEEQIYIAKKIEEDSKRVVELSNKIEKLYDDWMDKRISEINFQRILEKSQAEQDLLTKRIEEMEKKVVTSKVDEVNIYKWIKLIKKHKNIKKLDKETLNELISKIYVHEKEVVDGEITQIIEIHYNFIGNTDNLQVSYNL

SEQ ID NO: 18245 - protein, 591 aa, synthetic construct
MKKVQKIDVKKPLIETRKKVAAYARVSMETDRLKHSLSAQISYYSKLIQNNPEWEFKGVYSDYGISGTSTAKRPGFMEMMEECEKGNIDIILTKSIKRFARNTVDLLEVVRHLKSKGIEVIFENENINSLSGDGELMLSILASFAQEESRSISENVKWGTVKRFKQGIPNGRFNVFGYVWEGDKLVIVEEEAEIVKRIYSEYLSGKSRMKIEKMFAEEGITTRRGYRWVDSNIKVILRNITYTGNLLFQKEYVVDPITKKRKLNRGELPQYYVENTHEAIIPKETYDKVQVEMERRRTAGAIGNPAIPTTEMTGKIRCPHCGKNFQSSVRNLVNGKNKYWVCATRKAGHGNPCHTGDINDRLIKEIICEVLEIEDYAPEIFTKEIDHIDVIKKEKFIFYLTNGRIVEKAYRKIDRKKYFTEEVRAKISEQRKNKHNYHRKNPATPFTGLIECDRCGNSFNALKTTLKTGEKITYLSCRTKRSECPHNSIQEGTLKKLLCEVLELDEFDEKVMDEKIQRIYIADNKVRFKFKDDHEEIRTYLEKKRGTPWTKERHEKQILQMHEYWKNEEHRKEASERMKKIRSEKKWSIRK

SEQ ID NO: 18246 - protein, 525 aa, synthetic construct
MVNKKVTTIPATISKFNLTPINEVKKRRVAGYARVSTDSEEQQTSYEAQVDYYTNYIKSREDWEFVQVYTDEGISATNTKKRDGFKRMVKDALDGKIDLIVTKSVSRFARNTVDSLSTIRKLKEHGTEVFFEKENIWTFDSKGELLITIMSSLAQEESRSISENCTWGQRKRFADGKVTVPFERFLGYDRGEDGNLVVNPEQAKVVKKIYRLFLQGYSPFGIAKELTEEGILTPGGKKKWSAGTVNAILRNEKYKGDALLQKSFTVDFLTKEKKKNEGEIPQYYVTGNHEAIIPTSTFDRVQRLLERRKAGKNRISSVSIYSSKIKCGDCGSWYGSKTWHSTSKYRQKIWQCNHKFEEKCSTPHLTEEEIQNLFLQAVNKLVKNKKEIISNHKEMAKIIFDTSVLEKEKIELEEELNIVAEQVNDCINENARKVQNQDEYEVRYTSLVNRFNTTKTRLDEIKQTIIEKQSKRDEVEDFIQELEKQELMPEFDKNVWLSMVDCLTIHHDGKVEFTFLDGSQVELNS

SEQ ID NO: 18247 - protein, 610 aa, synthetic construct
MRNFEKITALYERLSRDDELQGESNSIINQKKILEEYASKNNLSNIIHFTDDGISGTQFDRPGFMAMMNGVNQGNIGCIIVKDMSRLGRDYLKVGQCMEILRQKGVRLIAINDNVDSFYREDDFTPFRNIMNEWYARDTSRKIQSTFRSKGESGKHTASTPPYGYIKDEKDKNKWIVDEKAAEIVRRIFNLTMQGNGPYRIAKILESEKVDIPAYHQQKLGYGLYQSKNFEHPYRWCSSTIASILKKQEYLGHTVNFKTRKHFKDKKSKYVSEDNWLIFENTHEPIIDQETFDNVQRIRGNVKRYPDGWGEYHPLTGLMYCADCGSKMYVHRTSNYKNIPYYTCSAYTKTPCGMLCPSAHRIKAEVVLNLIQDTLKDIKKYLDEDNEAFIRSIQNEMEEKEKVEIERQRARLIDNKARIQELERLMCRIYEDMILEKIPSSRYEILNSQYETEQRALSTEIKELEQQVSRYEKETDRARKFISLISRYENFDELTNTMINEFVEKIIIHERDRKGSQNSKQKIEIYFNFIGNYEPPKEELTEEKQKFEEEERKINERKDRLHQNYLKRKANGKQQEYEERYKERYKERREQKKQEKLKVLKRVGIPLCEM

SEQ ID NO: 18248 - protein, 517 aa, synthetic construct
MNVIKIPAKPQKGNNAAKQEVKKLRVAAYCRVSTDNEEQATSYETQIEHYTEFINKNPEWELVRVYADDGISATSTKGREQFNAMIEDCKKGLIDMIFTKSISRFARNTVDCLNYIRMLKEMNIPVFFEKESINTMDSKGEVLLTIMASLAQQESESLSQNVKIGVQYRFQQGKVMVNARRFLGYDKDDEGHLIINPEQAEIVKRIFREYLEGASCKKIAQGLQRDGIPNARGSTKWHDNSIRLILGNEKYMGDALLQKTYTVDCLSKKRVKNSGIVPQYYVEDDHEAIISKETFLMVQEEMARRARTQLPFGGKKGYSANHAFSQIIFCAGCGEQFRRIHWNNRGKKSVVWRCITRLKEKDKCRARTVSEETLKAAFLEALNEMVCDSDVYLNRLRENLEAAINSANPMSAEALSAKMAELQRELINRTERRENYDDITEEILRLRELQEQKGMDDATQKEHTKRIRELQKFIQSQPSEITEFDDSLVKKLLEKVTVHDDYLEFRFKSGVTISIEM

SEQ ID NO: 18249 - protein, 515 aa, synthetic construct
MKIKKIEAQPAVVKKLRVAAYCRVSTENEDQKESLEAQREHYESWIRMHDDWECAGVFYDFGISGTKADAREGLQALLYACRTGSVDYVLTKSISRFSRNTSDCLSLVRELLSYNIPIYFEKENIDTGSMESELILSVLSSMAQSESESISKNVKWSVKKRMEEGTFVFGYLPYGYTKDAAGNMVIDPVESEIVRLIFDLALNGMGTYKIAQLLDKRKVPTRKGGKWSGSTVKGILVNEKYYGAAAFQKTYTDSNFRRHNNHGEVDSFIAEDHHEAIISKEDFDRVQVMIQKHIDEHGIVKDMGKYHNKYPFSGIIICGECGGKFKRQTQSGGIAWACSTHLYNKDACSMMFIKDEAIKAAFLTMMNKLIFGCKQVLVPYYDALRLADTDESLQGILDLKNELQRNSDRKNDLRKLRVKGFLDAAMYNQELRRVEKESEEIRAKMKCIDRAGENGDIKETKKLLRFAESAEMLTEFSDELFTEYVDSIIVYTRTCIGFRLRCGLTLKEEVCTGTR

SEQ ID NO: 18250 - protein, 559 aa, synthetic construct
MKGKIALYSRVSTSEQSEHGYSEKEQEQLLIKEVMKNFPGYDYETYTDSGISGKNIEGRPAMKRLLQDVKDNKIEMVLSWKLNRISRSMRDVFNIIHEFKEHDVGYKSISENIDTSNASGEVLVTMFGLIGSIERQTLISNVKLSMNAKARSGEAITGRVLGYKLSLNPLTQKNDLVIDENEAHIVREIFDLYLNHNKGFKAITTILNQKGYRTINQKPFSVFGVKYILNNPVYKGYVRFNNHQNWAVQRRSGKSDKNDVILVKGKHEAIISEDVFDQVHEKLASKSFKPGRPIGGDFYLRGLIKCPECGNNMVCRRTYYKTKKSKERTIKRYYICSLFNRSGSSACHSNAINAEVVERVINVHLNRILSQPNVIKQIASSVIEELKQKHSKQTEIKYDIDSLEKQKAKVKTQQERLLELFLDDEMDSEMLKAKQSEMNQQLEVLDQQIKEAKQANQSQDDIPNFDKLKARLILMITRFSVYLRKATPEAKNQLMKMLIDSIEITTDKQVKLVRYKIDESLIPQSLKKDWGSFFIPKFNFVINVTKKNRIENLSLLPLF

SEQ ID NO: 18251 - protein, 604 aa, synthetic construct
MKKVFVYHRVSSDQQLDGSGIARQAELLEGYLERTGICTDMDDPAPVVLSDQGVSAFKGLNISEGELGAWMEQVRNGMWDSSILVVESIDRFSRQNPFDVMGYINALMTHNVAIHDVMANIVISRSNSKDLPFVMMNAQRAYDESKYKSDRIRKGWAKKREQAFNKGTIVTNKRPQWIEVEKDKYVLNEKSAVVKEIFALYQTGMGCPTIAKQLQRKEGKQYKFNRPWTGELVHKILTNRRVTGKIFISEIIRNHDDIENPVTQKKYDMDVYPVVINEEEFELVQELLKSRRPNAGRVTVKKDGQEEVLIKSNLFSGIARCTECGGPMYHNVVRAKRTPKKGDPKIEEYRYIRCLNERDGLCENKAMTYETVERFVVEHLLGIDLSTVMKEQEFNPEIEVLRIQIDQVKDQITNYENGIERRKSAGKPITFDMREDLDDAKFELEQLLARQASLATVQVDVPVLQDINVTELYDVNNVDIRTRYENELNKIVSNIRLKRNGTSYTIDISYKQNELKRHVLFVENKKKEQTLISEVIIEDVDGGKFYYTPSFMIRLEDGEISFQQTNKDLSIVDYSLLLNYVDAVDRNDTVGVWMRNQFNFLTSN

SEQ ID NO: 18252 - protein, 611 aa, synthetic construct
MRTVKAYIYSRVSSLQQVDAFGLDRQISTVLDFLENAKLPAELGYQLDPSNHEVLDSDKGLSGYAGHNFTKGSLGRFKERVRSGEITEGCLLIESVDRFSRKQGYDAIDEFTFLIKRNIDIVEVETGQIYSYKLDHKLSTLSTSIERAYQESKRKARISKKSWQKRKKDSVDTGIALNNNTPDWLSLSQDKKSYELDVQKVQTITKIFELYRDGYGVTQIVNLLNKEGERYNGKGWNTVTVYNKLRDRRLNGYLVGKYTTIPKKDNESTNDAEKRILENTKIKKEANDNAKRIYPVVIEDDLFSRVQSMMDRNVSSKKQKSTTTKQRNLFNGLTKCNECGSPMIVQSMSNGGQYLRCYRQRTKDEKCNSKMLRYFETEKVLLQHIKNLNLDEIYGDEKSNQSLDTLKRLLSDVNGKIALLNEKVQSANDESELFAIMEFKRKRILEKDELIAKINSLENQCEAVTLNYTYDIEQLTNQDNTVIRRKANEHIAKVISSVKCRRIDSSYIGAYYLYDITYHRDILKHILITDNSGKLISEITISEKDNERTYLVREEDQTVFKVESNGNAWVMYASRTKTIDDLLYYINTMMVGREPDDFTYLLNEDHIEWID

SEQ ID NO: 18253 - protein, 508 aa, synthetic construct
MKKAIAYMRFSSPGQMSGDSLNRQRRLIAEWLKVNSDYYLDTITYEDLGLSAFKGKHAQSGAFSEFLDAIEHGYILPGTTLLVESLDRLSREKVGEAIERLKLILNHGIDVITLCDNTVYNIDSLNEPYSLIKAILIAQRANEESEIKSSRVKLSWKKKRQDALESGTIMTASCPRWLSLDDKRTAFVPDPDRVKTIELIFKLRMERRSLNAIAKYLNDHAVKNFSGKESAWGPSVIEKLLANKALIGICVPSYRARGKGISEIAGYYPRVISDDLFYAVQEIRLAPFGISNSSKNPMLINLLRTVMKCEACGNTMIVHAVSGSLHGYYVCPMRRLHRCDRPSIKRDLVDYNVINELLFNCSKIQPVENKKDANETLELKIIELQMKINNLIVALSVAPEVTAIAEKIRLLDKELRRASVSLKTLKSKGVNSFSDFYAIDLTSKNGRELCRTLAYKTFEKIIINTDNKTCDIYFMNGIVFKHYPLMKVISAQQAISALKYMVDGEIYF

SEQ ID NO: 18254 - protein, 507 aa, synthetic construct
MKRVISYIRFSSERQAKGDSLRRQSKMVNDWLKAHPEYYLDQDLSFRDLGVSGFTGKHLKGGLGDFLTAIEKGLVKAGDTLLIESLDRLSRQDVDQASELLRNILRSGVDVVTLSDGEHYTRESLKDPLALIKSILIMQRSHEESLRKSERIQAAWNRKKELISEGIKISKRCPAWLKLNDDRKSFSVIPEKVETVKRCFQLRLEGKSIWEIVRTLNDEGHQTLNQYKAGSFGQTSVQDLLKNRSVIGYFTPKGCEEIADYYPAIIDETTFYKVQQLSYARYGRKPASDKPMAVNLFKGVICCSECGHALIITGFSDTRNGIYRCPLRNENRCSAKGLSRKQTDGTLLTLLSRLDRFDSDTTNTIDTLKLHREHISSNIEKLVQLSLEIEDLSAITSKLKQLKNELSQVDADIEKETQRLKSIDVGCLSDCDLTTKAGRIEAQLIIKSAVKEVVLNTAKRRCKVTFHNGKVIDLPITENPSDNVTEAIQSLSEVTERGLIDVDEVII

SEQ ID NO: 18255 - protein, 506 aa, synthetic construct
MRSVITYLRFSSAIQGAEGADSTRRQNDLFKQWLKKNSDAQVVASFSDEGLSGYKGKHLTGQFGDMLARIESGEFSEGTVLLVEAIDRIGRLEHLETEALMNRIIAHGIEIHTLQDGLIYTRDALSDDLGISIIQRVKSYVAHQESKQKSFRVSQKWEQRAKLALAGEQRLTRNVPGWIDPDTFKCNEHAETVRLIFKLLLDGESLHNIARHLQSNDIKSFSRRKDANGFSVHSVRTILRSETTIGTLPASQRNDRPAIPNYYEAAIDASTFNKAQEILDKNRKGRTPASDNPLTINIFKGLFRCQCGASVHPTGTKNKYQGVYRCNNHLDGRCDVPPLKRKPFDRWMIDNFLGMIDVGNDGESERKIAALQHEVEIVTARIKKATALLLEMDDITELKAQVKGLNQKRTEIQTTIDTLKRKTSLTDKELPQLKDIDLTTKAGRVECQLILSKHLKGLTLGKDSVTVTLQNDTEITIPTNPLPLNDGSPIFEIADKELLDIDAYQL

SEQ ID NO: 18256 - protein, 514 aa, synthetic construct
MKKVYSYIRFSSTKQAFGDSHRRQSKAIQDWLANHPDHILDESLSFEDLGRSAFHGDHLKEGGALRAFLEAVKQGLIPSDSVLLVESLDRVSRQSISHAQETIRGILEQGITVVTLSDGETYNRQSLDDSLALIRMIILQERSHNESVIKSDRIKKAWSHKRQQFEQDGTKITGNCPGWLKLNSDKKSFSLIPHHIETIHRIFDEKLSGKSLHAIARDLNLENIPTITNKRVDTGWTPTRVRDLLLKESLIGVAYGVSDYFPPAISKEKFHAVQMIRGQGKGKKPTSRQPSSIDILKGICKCAECGSTLRQRNTKKTPEGRYPRGYLECRNRQLGRCNSKAFNRSLIEDILIQKIFPTLQYLSLKSNGDNISVTTLKADITSLEKGINNLISLAEKGLGDLDTLAQRITNNRVELESKKKDLRQAEAILSLRSDNDIQDSDRKTVEGRIKLQLAIKSFVKEIIFDYDKQEITIRLLNGKSFSGISVAREDKDFDHSSMFEVLQKSLLDVDGVCL

SEQ ID NO: 18257 - protein, 507 aa, synthetic construct
MKRVISYIRFSSEKQAKGDSLRRQSKMVTDWLKAHPEYYLDQDLSFRDLGVSGFTGKHLKGGLGDFLTAIEKGLVKAGDTLLIESLDRLSRQDIDIASELLRNILRSGVDVVTLSDGEHYTRESLRDPLALIKSILIMQRAHEESLRKAERIQAAWDAKKEAAKAGIKVSKRCPAWLKLNDDRKSFSVIPEKVETVKRCFQLRLEGKSIWEIVRTLNDEGHQSMSQYKPGSFGQTSVQDLLKNRSVIGYFTPKGCEEISGYYPAIIDETTFYKVQQLSHYRYGRKPVSDKPLSVNLFKGVIRCSECGHALIITGFSDTRSGIYRCPLRNENRCSAKGLSRKQTDGTLLTLLSRLDRFDSDTTNTIDTLKLHREHISSNIEKLVQLSLEIEDLSAITSKLKQLKGELSQVDADIEKETQRLKSIDVGCLSDCDLTTKAGRIEAQLIIKSAVKEVVLNTAKRRCKVTFHNGKVIDLPITENPSEDVTEAIQSLSEVIERGLIDADVVEI

SEQ ID NO: 18258 - protein, 559 aa, synthetic construct
MKTKLYSYIRFSSMRQSDGSSYERQIRMAREIAAKYDLELVNDYQDLGVSAFKGANSKTGALSRFLDAIGRSVPVGSWLFIENLDRLSRADIVSAQELFLSIIRRGITIVTGMDNKIYSLDTVTANPMDLMFSILLFIRGNEESQTKRNRTNSSALIKIKAHQENPQNPAVAIEEVGKNMWWTDTTSGYVLPHPVYFPVVQEIVELRKNGRSTAEILDHLNETYAPPPAVSNKKHSKWSRAMVERLFHTRALIGIKEVSVDGVNYELKDYYPRVIDDATFYHLKKNIGARAWNFGDKEEAKPIPLLSGIGLLKCDHCGCAMVKVKGTNKRSDQYRYTCDATRSRRLDCEHPNWSFRGDQLEKAVLQLLADKIWIAEDKANPVPALKVQVDEISRKIDNLIALSAMTGATKELADQITTLNSERETLYNQIKMAEEEMYSVDSQGWEKLAEFDLEDVYNEERLKVRFKIKQALKRIGCSRIDRNKNLFVLEYIDGKTQRVVIENSRGTRKGRIFIDLKTINDRQILESNGLVLHPCLDMLTDKNWKPEEEIPGPLQEFGI

SEQ ID NO: 18259 - protein, 611 aa, synthetic construct
MRTVKAYIYSRVSSLQQVDAFGLDRQISTVLDFLENAKLPAELGYQLDPSNHEVLESDKGLSGYAGHNFTKGSLGRFKERVRSGEITEGCLLIESVDRFSRKQGYDAIDEFTFLIKRNIDIVEVETGQIYSYKLDHKLSALSTSIERAHQESKRKARISMKSWKHRKEASLANGVALNNNTPDWLSLSTDKLSYEIDYHKVETIKRIFQMYRDGYGVTHIVKVLNDEGNRYNGKGWNTVTVYNKLRDRRLNGFLVGKYKTIPKKINESTNEAEKRILENLKIKKEAHDNAKRIYPVVVDDDLFLKIQSLMDRNVSNKKQRSTTTKQRNLFNGLTKCYECGSPMIVQSMSNGGQYLRCYRQRTKDEKCNSKMLRYSVTEKVLLEHIKGLDLDDIYGDKTQNYSVDTLKNLLQQTNNKLLELNEKIKSANDEEELFAIMEFKRKRNIEKEDLIAKINSIENASEVVRLSYNYDIGEISNQDNTVLRRKTNDNISKVVASIKCLRTDSSYIGAYYSYDITYHKDILKHLLLTDNNGALLSEISIYQKNNERTYIVKEDKEMVFRVESNGDVWVLYASRKKSINDLLHYINVMMVGREPDSFAYVLNEDMIEWID

SEQ ID NO: 18260 - protein, 502 aa, synthetic construct
MTLAFSYARFSTKSQAIGTSLERQLNASRLFCSERSLTLSPKGYHDLGVSGFKQVKRPELEQMLHAIQSGDIPSGSYILIEAIDRLSRKGISHTQDVLKQILQYKVKVAFVGEDAKTLNGQVLDEHSLNDLSSVILVALAADLAHKESVRKSKLVKAAKLIIRKKATEGHKVRGHTMFWIDWSDKKQDFVLNERVKDVQTIIQLRREGQGPRKIAKTMNELGIKGPRGNLWNHMSVTIVLKSPVLYGAYQTHQIIEGQKVPDVLLENHYPALLTKEEYIKIQADSSKANKGRPSKANPFSGVLRCECGQAMLFSKRTNLDKNGDPLEYEYHFCIGSTEGRCKNKKRIRDLVPLLASIMDKLVINQTPTKNLNAELIKATEQKIEKLNNMLVELDNPPMSVLKTIQKLEQELDILLNTHIEEPVQADVKTLSSISDAQEYNQHLKRLVKQIVVYQINGPRNLRIKVHKTDGHYQNFLVKDNKILFKSDTKALKELIDEFNKAR

SEQ ID NO: 18261 - protein, 509 aa, synthetic construct
MRRAISYIRFSSERQLKGDSVRRQSKLVTDWLDKNPEFYLDSSLSFKDLGKSAFSGKHLKGGLGDFLTAIEKGLVKAGDTLLIESLDRLSRQDIDIASELLRRILRAGVDVVTLSDGEHYTKESLKDPLSLIKSILIMQRAHEESLRKSERVQAAWNRKKELISEGIKISRRCPAWLKLNDDRRTFTIIPDKVEVVKRAFDLRLQGLSFWAITRTLNDEGHLSLNQYTPKQKGWSDTAVKKLLRNRAVIGCFTPAGREEVQGYYPAIISESLFYRVQQLNTGQYGRASVSSNPLSVNLFRGIIKCSECGATIVLGGYALKRFGMYRCPNRSANRCSAKAISRKQTDATILYMLALCDRFETENTDTIDSLKLQREDLQRKISKMAELAIELDDMTIITEKLRDMKNALSKLNHDIEEETKRIKAITTGSLKDIDRTTKEGMIETQLLIKGVLKEIVIDAAKRRCKVTFHNGKVIDLPITENPSEDVTEAIQSLSEVTERGLIDVDEVII

SEQ ID NO: 18262 - protein, 507 aa, synthetic construct
MKRVISYIRFSSEKQAKGDSLRRQSKMVTDWLKAHPEYYLDQDLSFRDLGVSGFTGKHLKGGLGDFLTAIEKGLVKAGDTLLIESLDRLSRQAVDRASELLRNILRSGVDVVTLSDGEHYTSESLKDPLALIKSILIMQRAHEESLRKSERIQAAWDAKKEAAKAGIKVSKRCPAWLKLNDDRKSFSVIPEKVETVKRCFQLRLEGKSIWEIVRTLNDEGHQSMSQYKPGKFGQTSVQDLLKNRSVIGYFTPKGCEEIAGYYPAIIDETTFYKVQQLSHSRYGRKPASAKPLSVNLFKGVIRCSECGHALIITGFSDTRSGIYRCPLRNENRCSAKGLSRKQTDGTLLTLLSRLDRFDSDTTNNIDTLKLHREHISSNIEKLVQLSLEIEDLNAITNKLKQLKNELSQVDADIEKETQRLKSIDVGCLSDCDLTTKAGRIEAQLIIKSAVKEVVLNTAKRRCKVTFHNSKSITLPITENPSDNVTEAIQSLSEVTERGLIDVDEVII

SEQ ID NO: 18263 - protein, 507 aa, synthetic construct
MKRVISYIRFSSEKQSRGDSLRRQSKMVTDWLKAHPEYYLDQDLSFRDLGVSGFTGKHLKGGLGDFLTAIEKGLVKAGDTLLIESLDRLSRQNVDRASELLRNILRSGVDVVTLSDGEHYTRESLKDPLALIKSILIMQRSHEESLRKSERIQAAWNRKKELISEGIKISKRCPAWLKLNDDRKSFSVIPDKVETVKRCFQLRLEGKSIWEIVRTLNAEGHRSMNQYKPGKFGQTSVQDLLKNRSVIGYFTPKGCEEISGYYPAIIDETTFYKVQQLSYARYGRKPASDKPMAVNLFKGVIRCSECGHALIITGFSDTRNGIYRCPLRNENRCSAKGLSRKQTDGTLLALLSRLDRFDSDMTNTIDTLKLHREHISSNIEKLVQLSLEIEDLSAITSKLRQLKNELSQVDADIEKETQRLKSIDVGCLSDCDLTTKAGRIEAQLIIKSAVKEVVLNTAKRRCKVTFHNGKAITLPITETPSEDVTEAIQSLSEVTERGLIDVDEVII

SEQ ID NO: 18264 - protein, 507 aa, synthetic construct
MKRVISYIRFSSEKQAKGDSLRRQSKMVTDWLKAHPEYYLDQDLSFRDLGVSGFTGKHLKGGLGDFLTAIEKGLVKAGDTLLIESLDRLSRQNVDRASELLRNILRSGVDVVTLSDGEHYTKESLRDPLSLIKSILIMQRSHEESLRKSERIQAAWNRKKELISEGIKVSRRCPAWLRLNDDRKSFSVIPEKVETVKRCFQLRLEGKSIWEIVRTLNDEGHQSMSQYKPGKFGQTSVQDLLKNRSVIGYFTPKGCEEIAGYYPAIIDETTFYKVQQLSYARYGRKPASDKPLSVNLFKGVIRCSECGHALIITGFSDTRSGIYRCPLRNENRCSAKGLSRKQTDGTLLALLSRLDRFDSDTTNTIDTLKLHREHISSNIEKLVQLSLEIEDLSAITSKLKQLKGELSQVDADIEKETQRLKSIDVGCLSDCDLTTKAGRIEAQLIIKSAVKEVVLNTAKRRCKVTFHNGKVIDLSITENPSEDVTEAIQSLSEVTERGLIDVDEVII

SEQ ID NO: 18265 - protein, 506 aa, synthetic construct
MRTVITYLRFSSATQGAEGADSTRRQNDLFKQWLKKNSDAQVVASFSDEGLSGYKGKHLTGQFGDMLARIEAGEFPGGTILLVESIDRIGRLEHLETEALMNRIIAHGIEIHTLQDGLIYTRDALSDDLGISIIQRVKSYLAHQESKQKSFRVSQKWEQRAKLALAGEQRLTKMVPGWIDPDTLKLNEHAETVRLIFKLLLSGESLHNIARHLQSNGIKSFSRRKDANGFSVHSVRTILRSETTIGTLPASQRNDRPAIPNYYEAAIDAATFNKAQEILDKNRKGRTPASDNPLTINIFKGLFRCQCGASVHPTGTKNKYAGVYRCNNHLDGRCDVPPLKRKPFDKWMIDNFLGMIDVGNDGEAEGKIASLQHEVEIVTARIKKATALLLEMDDIDELKTQVKELNQKRTELQTTIDSMRRKTSLSDKGLPQLKDIDLMTKEGRVECQLILSKHLKGLTLGKDSVTVTLQNDTEITIPTNPLPLNDGTSIFEIADKELLDIDAYQL

SEQ ID NO: 18266 - protein, 507 aa, synthetic construct
MKRVISYIRFSSEKQAKGDSLRRQSKMVTDWLKAHPEYYLDQDLSFRDLGVSGFTGKHLKGGLGDFLTAIEKGLVKAGDTLLIESLDRLSRQDVDQASELLRNILRSGVDVVTLSDGEHYTSESLKDPLALIKSILIMQRAHEESLRKSERIQAAWDAKKEAAKAGIKVSKRCPAWLRLNDDRKSFSVIPEKVETVKRCFQLRLEGKSIWEIVRTLNAEGHRSMNQYKPGKFGQTSVQDLLKNRSVIGYFTPKGCEEISGYYPAIIDETTFYKVQQLSYARYGRKPASDKPMAVNLFKGVIRCSECGHALIITGFSDTRNGIYRCPLRNENRCNAKGLSRKQTDGTLLALLSRLDRFDSDMTNVIDALKLHREHISNNIEKLVQLSLEIEDLSAITIKLKQLKGELSQVDADIEKETQRLKSIDVGCLSDCDLTTKAGRIEAQLIIKSAVKEVVLNTAKRRCKVTFHNGKVIDLSITENPSEDVTEAIQSLSEVTERGLIDVDEVII

SEQ ID NO: 18267 - protein, 481 aa, synthetic construct
MKTMNKVAIYVRVSTTSQVEEGYSIDEQKAKLSSYCDIKDWNVYKIYTDGGFSGSNTDRPALESLIKDAKKRKFDTVLVYKLDRLSRSQKDTLHLIEDVFIKNGIEFLSLQENFDTSTPFGKAMIGLLSVFAQLEREQIKERMQLGKIGRAKAGKSMMWAKTSYGYNYHKETGTVTINPAQALAVKFIFESYLRGRSITKLRDDLNEKYPKHVPWSYRAVRTILDNPVYCGFNQYKGEIYPGNHEPIISKEEYDKTQSELKIRQRTAAENVNPRPFQAKYILSGIAQCGYCGAPLKIMLGVKRKDGSRLKKYECHQRHPRTLRGVTTYNDNKKCDSGFYYKDKLEASVLKEISKLQDDADYLDKIFSGDNAETIDRESYKKQIEELSKKLSRLNDLYIDDRITLEELQSKSAEFISMRATLETELENDSALRKNKRKADMRKLLNAEKVFSMDYEKQKVLVRELINKVQVTAEDIVIKWKI

SEQ ID NO: 18268 - protein, 478 aa, synthetic construct
MQKFKREPLGFSFYRKKERMCERRTEMKAAIYIRVSTQEQIENYSIQAQTEKLTALCRSKDWDVYDIFIDGGYSGSNMNRPALNEMLSKLHEIDAVVVYRLDRLSRSQRDTITLIEEYFLKNNVEFVSLSETLDTSSPFGRAMIGILSVFAQLERETIRDRMVMGKIKRIEAGLPLTTAKGRTFGYDVIDTKLYINEEEAKQLQMIYDIFEEEKSITTLQKRLKKLGFKVKSYSSYNNWLTNDLYCGYVSYADKVHTKGVHEPIISEEQFYRVQEIFSRMGKNPNMNRDSASLLNNLVVCGKCGLGYVHRRKDTVSRGKKYHYRYYSCKTYKHTHELEKCGNKIWRADKLEELIIDRVNNYSFASRNVDKEDELDSLNEKLKTEHAKKKRLFDLYISGSYEVSELDGMMADIDARINYYEAQIEANEELKKNKKIQENLADLATVDFDSLEFREKQLYLKSLINKIYIDGEQVTIEWL

SEQ ID NO: 18269 - protein, 452 aa, synthetic construct
MKAAIYIRVSTQEQVENYSIQAQTEKLTALCRSKDWDVYDIFIDGGYSGSNMNRPALNEMLSKLHEIDAVVVYRLDRLSRSQRDTITLIEEYFLKNNVEFVSLSETLDTSSPFGRAMIGILSVFAQLERETIRDRMVMGKIKRIEAGLPLTTAKGRTFGYDVIDTKLYINEEEAKQLRLIYDIFEEEQSITFLQKRLKKLGFKVRTYNRYNNWLTNDLYCGYVSYKDKVHVKGIHEPIISEEQFYRVQEIFARMGKNPNMNRDSASLLNNLVVCGKCGLGFVHRRKDTVSRGKKYHYRYYSCKTYKHTHELEKCGNKIWRADKLEELIIDRVNNYSFASRNVDKEDELDSLNEKLKIEHTKKKRLFDLYISGSYEVSELDSMMSDIDAQINYYEAQIEANEELKKNKKIQENLADLATVDFNSLEFREKQLYLKSLINKIYIDDEQVTIEWL

SEQ ID NO: 18270 - protein, 459 aa, synthetic construct
MCERRTEMKAAIYIRVSTQEQIENYSIQAQTEKLTALCRSKDWDVYDIFIDGGYSGSNMKRPALNEMLSKLHEIDAVVVYRLDRLSRSQRDTITLIEEYFLKNNVEFVSLSETLDTSSPFGRAMIGILSVFAQLERETIRDRMVMGKIKRIESGLPLTTAKGRTFGYDVVDTKLYINEEEAKQLQMIYDIFEEEKSITFLQKRLKKLGFKVKSYSSYNNWLTNDLYCGYVSYKDKVHTKGIHEPIISEEQFYRVQEIFSRMGKNPNMNKESASLLNNLVVCSKCGLSFVHRRKDTVSRGKKYHYRYYSCKTYKHTHELEKCGNKIWRADKLEELIIDRVNNYSFASRNVDKEDELDNLNEKLKTEHTKKKRLFDLYISGSYEVSELDAMMADIDAQINYYEAQIEANEELKKNKKIQENLADLATVDFDSLEFREKQLYLKSLINKIYIDGEQVTIEWL

SEQ ID NO: 18271 - protein, 452 aa, synthetic construct
MKAAIYIRVSTQEQIENYSIQAQTEKLTALCRSKDWDVYDIFIDGGYSGSNMNRPALNEMLSKLHEIDAVVVYRLDRLSRSQRDTITLIEEYFLKNNVEFVSLSETLDTSSPFGRAMIGILSVFAQLERETIRDRMVMGKIKRIEAGLPLTTAKGRTFGYDVIDTKLYINEEEAKQLQMIYDIFEEEKSITTLQKRLKKIGFKVKSYSSYNNWLTNDLYCGYVSYADKVHTKGVHEPIISEEQFYRVQEIFSRMGKNPNMNRDSASLLNNLVVCSKCGLGFVHRRKDTVSRGKKYHYRYYSCKTYKHTHELEKCGNKIWRADKLEELIIDRVNNYSFASRNVDKEDELDNLNEKLKTEHTKKKRLFDLYISGSYEVSELDAMMADIDAQINYYEAQIEANEELKKNKKIQENLADLATVDFDSLEFREKQLYLKSLINKIYIDGEQVTIEWL

SEQ ID NO: 18272 - protein, 452 aa, synthetic construct
MKAAIYIRVSTQEQVENYSIQAQTEKLTALCRSKDWDVYDIFIDGGYSGSNMNRPALNEMLSKLHEIDAVVVYRLDRLSRSQRDTITLIEEYFLKNNVEFVSLSETLDTSSPFGRAMIGILSVFAQLERETIRDRMVMGKIKRIEAGLPLTTAKGRTFGYDVIDTKLYINEEEAKQLQMIYDIFEEEKSITTLQKRLKKLGFKVKSYSSYNNWLTNDLYCGYVSYADKVHTKGIHEPIISEEQFYRVQEIFSRMGKNPNMNRDSASLLNNLVVCGKCGLGYVHRRKDTVSRGKKYHYRYYSCKTYKHTHELEKCGNKIWRADKLEELIIDRVNNYSFASRNVDKEDELDSLNEKLKTEHTKKKRLFDLYISGSYEVSELDAMMSDIDAQINYYEAQIEANEELKKNKKIQENLADLATVDFDSLEFREKQLYLKSLINKIYIDGEQVTIEWL

SEQ ID NO: 18273 - protein, 478 aa, synthetic construct
MQKFKREPLGFSFYRKKERMCERRTEMKAAIYIRVSTQEQIENYSIQAQTEKLTALCRSKDWDVYDIFIDGGYSGSNMNRPALNEMLSKLHEIDAVVVYRLDRLSRSQRDTITLIEEYFLKNNVEFVSLSETLDTSSPFGRAMIGILSVFAQLERETIRDRMVMGKIKRIEAGLPLTTAKGRTFGYDVIDTKLYINEEEAKQLQMIYDIFEEEKSITTLQKRLKKLGFKVKSYSSYNNWLTNDLYCGYVSYADKVHTKGVHEPIISEEQFYRVQEIFSRMGKNPNMNRDSASLLNNLVVCGKCGLGYVHRRKDTVSRGKKYHYRYYSCKTYKHTHELEKCGNKIWRADKLEELIIDRVNNYSFASRNVDKEDELDSLNEKLKTEHAKKKRLFDLYISGSYEVSELDGMMADIDAQINYYEAQIEANEELKKNKKIQENLADLATVDFDSLEFREKQLYLKSLINKIYIDGEQVTIEWL

SEQ ID NO: 18274 - protein, 517 aa, synthetic construct
MKTIHKLARPQLPEPPKLKVAAYARASTSSNEQLASLQTQITHYENHIQNNDQWEYVGVYYDEGTSGTKVEKRDGLHRLIKDAELGKIDLILTKSISRFSRNTVDCLNLVRKLTDIGVTIFFEKENINTGDMESELLLSILSSLAESESYSHSENMKWANRKRMAKGIFKTVPPYGYQRKGADFYLIPDEAKVIEQIFKWALEGVSAYQVAKRLNEKNIFTRKGSKWQDSGINNILHNIVYTGTMIHQRYFNDDQFRKKKNNGELPMYRIDNNHPPIISWEDYERVQELITLRANAKGTSKGSQKSSQRYVFTKRIICDKCGCNYKRVHIAGKGNTKVVKWSCTGHLKNKDGCDALPITDESLKTAYLTMLNKLILGHTIVLEPLINTPVEGKASKQELEKLSIEITKIDEKLEVLASLNASGVVSTKTALEEQGRLQMELNKLQEKQHKIMESVNGTSTQRIQLEQLHQFTKRSEMLTEWDEDLFLRFAELIVVYSRQEVSFELKCGLLLKERLEA

SEQ ID NO: 18275 - protein, 478 aa, synthetic construct
MQKFKREPPGFSFYRKKERMCERRTEMKAAIYIRVSTQEQIENYSIQAQTEKLTALCRSKDWDVYDIFIDGGYSGSNMNRPALNEMLSKLHEIDAVVVYRLDRLSRSQRDTITLIEEYFLKNNVEFVSLSETLDTSSPFGRAMIGILSVFAQLERETIRDRMVMGKIKRIEAGLPLTTAKGRTFGYDVIDTKLYINEEEAKQLQMIYDIFEEEKSITSLQKRLKKLGFKVKSYSSYNNWLTNDLYCGYVSYADKVHTKGVHEPIISEEQFYRVQEIFSRMGKNPNMNRDSASLLNNLVVCSKCGLGFVHRRKDTVSRGKKYHYRYYSCKTYKHTHELEKCGNKIWRADKLEELIIDRVNNYSFASRNVDKEDELDNLNEKLKTEHTKKKRLFDLYISGSYEVSELDAMMADIDAQINYYEAQIEANEELKKNKKIQENLADLATVDFDSLEFREKQLYLKSLINKIYIDGEQVTIEWL

SEQ ID NO: 18276 - protein, 519 aa, synthetic construct
MKKITKIDTVAQVKPAKLKVAAYARVSTSSEEQLLSLENQKLHYEQRILANSNWEFVEMYFDEGISGTKIDKRNGLKRLLQDCETGKVDFILTKSISRFSRNALDCLEIVRRLIDLNIFIEFEKENINTQTMDGELMLSILSSLAESESRSLSQNTKWGIEKRFQNGTYKIGYPPFGYDWLDGAMVINKEQAVVVKDIFADILKGTSTGDIAEKLNQQGVTTKRRKTWHGTTIRGIIKNEKYIGDALFGKTFTDDSFKRKVNRGDKNQYFMEGHHSAIIDKETFEQAQQMLVQNAKSKNIVQDDDKYQNRYSFSGILKCGECGGTFKRRIQTKNKNEKYVAWACTNHLKDKHSCRMKFIKDEQIKLAYITIMNKLIFSHRILLKPLLSEVRDTTYAIDDSTIANLDAELEKLKQQQDNLVQFVANGYIERPTFVKEQNQLTKQMDDLGNKRKMLTGSISKGFDSLKSLEELVKFTKQGQMLTTFEDSHFETFTCEVVILSRTELLFKFKCGLKLMERLV

SEQ ID NO: 18277 - protein, 520 aa, synthetic construct
MMTKSVTMIPATKRVGTLRIDAEEKPKLRVAAYCRVSTDSDEQASSYEVQVEHYTNFINNNSEWKLAGIYADDGISGTSTKNREEFNRLIQDCMDNKVDRIITKSISRFARNTLDCLKYIRQLKENNIPVFFEKENIDTMDSKGEIMLTIMASLAQQESQSLSQNVKLGFQYRYQQGELTINHNRFLGYTKDEDGHLIIEPTEAEVIKRIFKAYLEGASLIQIARNLEADGILTGAGNKKWAGTTVKGILVNEKYMGDALLAKTHTVDFLTKKRVKNNGIVPQYYVENSHEPIIPKTLFLQVQEEITRRANLKKKKGSITYSSKYALSGITYCGKCGEIYRRLHWNNRGKKSIVWRCYSRLDKTKDCDARTVLEEDLKQAVVVGINRVFADEGRIKGILNSSIRKLLKVDNTTEVESIDSQLQVLQQQLLEQSIKNQDVTGIGEQIIQIKEQKQNVLLGKAVDDNSKQRMEEMLEFIEQNEHSGLEYDEVLVRRLVEQVQVYDSYITIKFKSGIEIEVQS

SEQ ID NO: 18278 - protein, 520 aa, synthetic construct
MTEKNIMVIPARKRVGSTAAKEKIKKLRVAAYCRVSTETEEQNSSYEVQVAHYTEFIKKNNEWEFAGIFADDGISGTNTKKRDEFNRMIAECMDGNIDMVITKSISRFARNTLDCLQYIRQLKDKNISVYFEKENINTMDAKGEVLLTIMASLAQQESQSLSQNVKLGLQYRYQQGKVQVNHKRFMGYTKDEDGNLIIVPEEAEIIKRIYREYLEGQSLVGIGRGLEKDGILTAAGKRRWRPESVKKILQNEKYIGDALLQKTVTVDFLTKKRVKNEGHVPQYYVENSHEAIIPKELYLQVQEEIHRRSNIYTGAGKNKRIYSSKYALSAITFCGECGDIYRRTYWNIHGRKEFVWRCVTRIEQGPEVCKNRTVKEDELYGAVMTAINRLLAGGNNMIKTLEENIHAVIGETTEYQISEINNLLEEKQKELIKQANKGQDYEHLADEIDGLRDKRQTLLVEDASLSGENERINELIAFIRINKYRTLRYDDTLVRKIIQNVTVYDDHFVICFKSGIEIEV

SEQ ID NO: 18279 - protein, 520 aa, synthetic construct
MKKITKIDELSQGQLPTTKLRVAAYARVSTDSDEQLESLKAQREHYERYIKSNPEWEFAGLYYDEGISGTKMEKRTELLRMIRDCKQGRIDFIITKSISRFARNTVDCLELVRKLIDIDVYIYFEKENLNTGDMESELMLSILSGFAAEESASISQNSTWSIQKRFQNGSYVGTPPYGYTNIYGEIVIVPEEAEIIKRIFAECLSGKGGGTIARGLNKDKIPARRGNHWSAGTVIDMLRNEKYMGDVLLQKTYTDSNYNRHSNTGEKDQYYYKDNHEPIISREDFAKAQDLIDERAKMKCKGVKKNVYLNRYALSGKIVCGECGRNFRRKTNYSAGRSYIAWSCIGHIEDKESCSMLFLRDGEIKATFTTMMNKLAFSHKLILEPLFKSISQIDEESDRERMDAIDKRMEQLMEERNTLITLMAKGFLEPALFNQERNVLDNEIRNFSTEKTNLVKNSTSGVLRANDIKDLIDYVSADNFNGDYTEELFEEFVENIIVNSRDELTFNLKCGLSLKEKVVR

SEQ ID NO: 18280 - protein, 452 aa, synthetic construct
MKAAIYIRVSTQEQIENYSIQAQTEKLTALCRSKDWDVYDIFIDGGYSGSNMNRPALNEMLSKLHEIDAVVVYRLDRLSRSQRDTITLIEEYFLKNNVEFVSLSETLDTSSPFGRAMIGILSVFAQLERETIRDRMVMGKIKRIEAGLPLTTAKGRTFGYDVIDTKLYINEEEAKQLQMIYDIFEEEKSITTLQKRLKKIGFKVKSYSSYNNWLTNDLYCGYVSYADKVHTKGVHEPIISEEQFYRVQEIFSRMGKNPNMNRDSASLLNNLVVCGKCGLGFVHRRKDTVSRGKKYHYRYYSCKTYKHTHELEKCGNKIWRADKLEELIIDRVNNYSFASRNIDKEDELDSLNEKLKIEHTKKKRLFDLYISGSYEVSELDAMMSDIDAQINYYEAQIEANEELKKNKKIQENLADLATVDFNSLEFREKQLYLKSLINKIYIDDEQVTIEWL

SEQ ID NO: 18281 - protein, 520 aa, synthetic construct
MKKITKIDELTQGQLPTTKLRVAAYARVSTDSDEQLESLKAQREHYERYIKSNPEWEFAGLYYDEGISGTKMEKRTELLRMIRDCKQGRIDFIITKSISRFARNTVDCLELVRKLIDIGVYIYFEKENLNTGDMESELMLSILSGFAAEESASISQNSTWSIQKRFQNGSYVGTPPYGYTNIDGEMVIVPEEAEIIKRIFAECLSGKGGGTIARGLNKDKIPARRGNHWSAGTVIDMLRNEKYMGDVLLQKTYTDSNYNRHPNTGEKDQYYYKDNHEAIISREDFAKTQDLIDERAKMKCKGVKKNVYLNRYALSGKIVCGECGRNFRRKTNYSAGRSYIAWSCIGHIEDKESCSMLFLRDGEIKATFTTMMNKLAFSHKLILEPLFKSISQIDEESDRERMDAIDNRMEQLMEERNTLITLMAKGFLEPALFNQERNVLDSEMKNLSTEKTNLVSNSTSGVLRANDIKDLIDYVSADNFNGDYTEELFEEFVVNIIVNSRDELTFNLKCGLSLKEKVVR

SEQ ID NO: 18282 - protein, 471 aa, synthetic construct
MEQVVGYVRQSTKIQKSLDAQEEVLRKEAEKRHHQIAHVFSDKASGKNLDRKGIQFLKQLLVKKQFKYLYVWRMDRISRNTSDMLNFYDFCQDYGVKIISIADPINVTTETMTRFHISVIGSVAEMQRELLRENKLEGNRQKHSQGLALSAHVAYGYRYKDKLMEIDPGEAKIVEKVYELYLTGYGYRKISNLLNADQVTFKGKMFNSGHIRNMLTNPIYTGIIDNHFGIVKGQHEAIVSPQLFEKAKGIRESKRLMRKDWRRSFLVKKIKCPYCNKALTIQYAQDLNKLSKIYYYTCSSYIANGKSVCRGYRLNTRKIETEVVKDIMRFLLNTTILEQIGASVDQKIEYIKKSKTLDKQQQAKDKRLLFCEFELGRLSQEKLREEIAYLNKQSLKLSTEELPNIVDVKELSIRLQQLGEPEAMPTVLQYQFFQEIIDRIVVNEYKVLTGLYLKGMDKNIISILEGEIEQI

SEQ ID NO: 18283 - protein, 548 aa, synthetic construct
MMNPGISEKKRAVGYIRVSTTEQADKGYSLDAQTQTIREYCLRENLDLKFVYADRGKSGKSIKGRNEMQRLLEDAEEGNYDCVVVWKISRVARNLVDLLEIVNLLQKKNIAFYSISEQFQVDTSSGRFMLQIMAATNEMERNQIAENVKLSMTKLSHEGYWVSGKAPLGFDNIELSNEKKGLAINKKESSIIQLIFQEASKGKGYRSIANQLNRIGYKTKLSNSFSSVAVRDILKNPVYIGKIRYNKYEKWSDKRRNGLSKNVFIVDGKHEGIIDNELWEKVQDKLALSSKNPAWNHKGASILTGILKCPECSSPMVINNVTNTLKDGTKKIIRYYSCSQFRNKGAAVCHANSIRADRAEEQVASKLSSVIQQPEILDAVIEKMNKKMIEEKEPFEKNRKSIQSKIEVTEKNIQRFLELITQAPEIAEDLNVRIKELENNRYELLNQEREMENRLNQTRKSISKKETQRVLALLGLAIKDKEKKELKEIYKTFIDKITFNKSTKEVNVHLVFNKEILKKLNSNLEIEPSSSLEDEGSIILSKNTYLIL

SEQ ID NO: 18284 - protein, 452 aa, synthetic construct
MKAAIYIRVSTQEQVENYSIQAQTEKLTALCRSKDWDVYDTFIDGGYSGSNMNRPALNEMLSKLHEIDAVVVYRLDRLSRSQRDTITLIEEYFLKNNVEFVSLSETLDTSSPFGRAMIGILSVFAQLERETIRDRMVMGKIKRIEAGLPLTTAKGRTFGYDVIDTKLYINEEEAKQLRLIYDIFEEEQSITFLQKRLKKLGFKVRTYNRYNNWLTNDLYCGYVSYADKVHVRGIHEPIISEEQFYRVQEIFSRMGKNPNMNKESASLLNNLVVCSKCGLGFVHRRKDTVSRGKKYHYRYYSCKTYKHTHELEKCGNKIWRADKLEELIIDRVNNYSFASRNIDKEDELDSLNEKLKIEHAKKKRLFDLYINGSYEVSELDSMMNDIDAQINYYEAQIEANEELKKNKKIQENLADLATVDFNSLEFREKQLYLKSLINKIYIDGEQVTIEWL

SEQ ID NO: 18285 - protein, 560 aa, synthetic construct
MTKLYSYIRFSSMRQGEGSSYERQIKMAKEIADRYGLELVNDYQDLGVSAFKGANSKTGALSRFLDEIGRSIPVGSWLFIENLDRLSRQDIISAQELFLSIIRRGITIVTGMDNKIYSIETVTANPMDLMFSILLFIRGNEESQTKRNRTNSSALLKIKAHQQNPQSPAVAIEEIGKNMWWTDTTSGYVLPHPVYFPILQKIVKMKQEGHSTGSVLDYLNEHHTPPAPTSNKQHRKWSIAMVSRLFKTKALIGVKEVNVDGVQYELKDYYPRVLSDSEYYFLKNNLIKKAWSFGHAQEKTIPLLSGIGLLKCAHCGSPMVKRKAANGKVEQYRYTCDGEGSGRTDCLYPNWGFRASSLEGAVLQLLADKVWVAEDKANPIPEIQVQIDEISRKIDNLINLSAMTGATKELANQITDLNTQREALHEEIRLFEREMYSVDSQGWEKLAQFDLSDVQNEERLQIRLKIKGALRSIECARIDRNKNLFTLVYLDGLRQRLVIENNRGIRKGQIFVDLKTINDRQILESAGMVLHDHIDILIDEKAFYDGLPKEEDGPLSKFGI

SEQ ID NO: 18286 - protein, 620 aa, synthetic construct
MLGIYCRTSKNRKDKYTIDDQRDGGIKCAKKLGLEYEVYVDDGISGTLDESVRDGLSDLFRDIRKDKITHIYSIDQSRIERRSRTWDFFVAECLNKKVKYYPNGEFFDLNNSANRMLASLMSVVNAYYAEITSKKVRLANARKAKEGKTHGIKPYGYKKSSNNDYVVDEEEAVHVRRMFELSLEGRGAYTIANIFNKEGIPTKYSRNFKGKITRKDSYTGITTTHDKSSIKWRGNVISDILRNKIYKGIREWNRYEDKIENVNGKSVKSKIKAELIISQVPNIVEPELWEKVQDNLAVNKINVGKKSHYNYLLNGLITCNHCGRLFVGKRRKTSRDNAYKCKGKVYPNSNCKASRSINISKLDSFIIKHLFKSKDLKRYLKSLPKPESKHEKIKENLEKEKKVLKRIEKQLDKGYKLLFDEESEFKDDEVVKSRVLVLKEKKEEQIELIDTLEEEFVLSESNFRANRTERLLNEYTEESSFEDIKRIIHSLIENINIKHYKEEGKMGVFFLNVKYKGYDEVSTFMTNWKANKWCWMSKYRKKSKTNEELEEDREMDIALLEYYGIDKDNIDIKGLQKERKLPIGEIDKMNPFSIEYQGAEIKEFKYELIELSKDEIIDFN

SEQ ID NO: 18287 - protein, 537 aa, synthetic construct
MNPSASPIPRRKAYSYLRFSTPEQSKGDSRRRQTDMAAKYAREHDLELDTVLTFHDEGISGFRGRNAEAGRLADFLEAVKVGLVPQGSVLLVEQLDRLSRLVPRKAMRVLEDIVEAGVSVVTLNDGREYTPASLDRDPTDLLVAVLTFMRANDESATKAKRLSAAWEAKRANVAAKPLTGIVPAWLELDKQTQQIKVIPERAAIVRRIFSMTLDGTGQHSIAATLNGEGVEPWGTGKRKGLHWHRSYIAKILTNPAVIGVLHPHRTEYADGKKRRIPLDTVPHYFPAVISPETWADAQALLTAKGAPRGRQAVAPLSNILSRLATCPKCEGTMTRVQKGSSTKAGYPSLVCATAKAGAGCEYKSVRYETIERRLLQVLPGVIQDREGIDESEDIEAQIAQLEDVLLAQRQDIDVLVDELLEGPSPALAARVREKERAVSEMQSHLAGLKEHRDIMAGPLVGSRIEKAVGALQPTEDGDLDRVAANAALRGIFKRAIINWPAGTIDLEWHVGGLCRVTFGWTEGPWPPPASTEIPPSA

SEQ ID NO: 18288 - protein, 523 aa, synthetic construct
MSRPTELNIYLYLRKSRKDIEEEKKAQGSGETYDTLQRHRQTLFAVAKKERHNIVAIYEEVVSGESVTERPRIQEMLRSVEAGSVDAVLVMDLDRLGRGDMLDQGLLDRAFRYSATKILTPTESYDPSSETWELVFGIKSLVAREELKAITRRMQRGRVASASEGKSISKIPPYGYLRDENLRLYPDVDTAWVVKKMFEMMRDGHGRQAIAQELDRLGIKPPNKRRETWSPSSITAIIKNEVYIGTIIWGQVKYVKQNGKYQKKKVPRENWTIKENAHEPIVSPELFEAANLAHSGRWRPSTVTTKKLRNPMAGVLKCAVCGYSMLYQPRPKRPNDVVRCVQPGCKGVQKGSSINIVESYLLDGLAKIAEQLEAQAEAEVPSNVDDISYKRLLIEKKTQEVSELDTQKSRLHDFLERGVYDIDTFMERQKNLTDRIDGVETEIRNLQREIQKDDLRNRSVDEYLPKLRDVINAYHRADIERKNALLKSVLESVTYLRKKEWTKQDEFVLQFNPIVWPDEVGPS

SEQ ID NO: 18289 - protein, 467 aa, synthetic construct
MTVALYCRVSTDEQAMHGFSLEAQKDRLIAYCQSQGWKDYEVYSDDGYSGTNLDRPALRRLIRHIGSGLIQSVVVYRLDRLSRRQRHVLYLLEEVFERHGVTFKSATEPFDTSTPLGKAMIGILAVFAQLERDTIIERTKEGHHKRARQGLWGGGPQPFGYRWNKEAGRLETVPSEARIVREMYRRFLQGCSLVEIADWAASQYSDRWWDHHVVKDMLQRPIYAGHVHYGTAMAKGNHEPIIDEVTFQSAQKEMKRREGRLPARGEYLLSGLLRCGECGEPMLHHLVHRNRGKPKDHHYYVCARKMKGSRYRKPVGPCPSHHIQMEWLDDQVTQLVRSIATSPEDLISQTEEPQAADEIMALEAELASVERKLRRWYDAFEEEAIDARELRRRVADLERERGRIELALDEAQERLRRPDPEPMLDAFHAIRDAWDRMELSEKKTLLRATIRQIVVYKDSSFHIEWNL

SEQ ID NO: 18290 - protein, 698 aa, synthetic construct
MSAVMVGRSRQHSEKVTGVHLERLALVYVRQSTLQQLERHQESTRLQYGLVERAWSLGWERHQIEVIDEDLGKSGTSVEGRDGFQRLLSKVALDQVGIVLGIEMSRLARSCRDCYQLLEVCGLFGTLIGDLDGVYDPTDYNDRLLLGLKGTMSEAELHMLKQRMLAGKRAKAARGELGVLVPIGYIRLPSGEVVKDPDEQAQSVVALIFEQFARCGTINGVLQYLVRNHIDLPCRVLSGKDQGQLQWHAPSRVTLSCLLHNPIYAGAYVYGRRRIDPRRQQPGRPSTGRQVVAMGEWDVLLKDRLPAYISWEQFEANVRQIESNLAQVKGTIRHGPSLLSGLVVCGRCGLRMAARYCNNGHDLRYCCITMMVEHAQPLCQSLVGQPLDDWVCRQVLAALQPAALEVSLKAIEDVQAERAQLHRHWQQRLERARHEAGRAQRQYDAIEPENRLVARTLERQWEQALQTELQLQAEYARFEAQQPATLGEAERQAIRRLAVDIPALWHAPTTTAAERQAIIRQLVERVVVTVLGESELVDVQLHWVGGHATGATLVRPVARLDQLSYYPQLLQRVADLHAEHETITAIASRLNAEGWRPAKRRSTFNESMVQTLLVAQGLRSPRRCNRDKIEDRGANEWTIAELAHRLSIPQPTLFSWLRRGWLQGRRADQTAHRMWLIQADEAELARLRALRSRSRAWH

SEQ ID NO: 18291 - protein, 512 aa, synthetic construct
MKRCALYTRVSTEEQVERYSLEAQREVLERWAGALGYEVADTYTDPGYSGAQEDRPALTRLLADAQEGRFAVVLVYRLDRLARKVRLAYDLIERLERCGVGLMSYSEPNINTTTSIGKAVLGIMAVFAEWERDTFAERSRLGMHKAARMGKYLGGIVPYGYTVEDGRLAPLPEEAAVVQQMFAWVAERGWSTERVAQELNRLGIPPKYRREGRGVRGKRTAGVWRGGGVLRILKNRTYIGEYVYGKRTRKPQPELVSVPVPPLVEPVLFEAAQEQLSRNALFALRNARSVYLLKGLIRCGMCGRAYVGSAGYYACVGRTNRQASPIPEMRCTAPHVRRGELEERIWHDIRSFLLNPGEALQAFINEESPESNEVSLLERRLQALLEARARLLDLYLEGGVEKETYYARLEDLDTRVREVQVSVEAARQRSIAERQRKEALHSLESLSARLRDRIDRLTPEEKQAVARELVEGVTVRPGKGEVEVEVRYRFGQIAPHTGRGSWPPPGGTERDR

SEQ ID NO: 18292 - protein, 540 aa, synthetic construct
MAGSYLKEDKSMSQLGSDNYQRENYHVGIYCRLSHEDGETGESNSIGNQKAMLTKYVMDKGWSIADIYIDDGYTGVSFERPGFMRLLQDIKAKKISMVITKDMSRLGRDYIQVGHYIEKFFPENRVRFIAVNDNIDTGNLEGNDMTPFKAVINDMYCKDISKKVRSVFNHKRHEGKFIGAFAPYGYEKDPKDNSHLIIDKEIAPTVRRMFQLYISGYGFTAIAKKLNEEGIPSPAYYKNRKYETFNVGKARVPKWSHSSVKAILKNPVYTGVMAQNKSRKINYKSRKTENLQEKDWIVVEGTHEAIISPEDFKKVKTLMKHKNNDFSGAKKAVKLFSGFAFCGDCGEYMTYTKAPSGNYFLICSGYKRFGKSHCTRHSILEEKLEEMILKDFRKLVRKFADRERLKKKAEQVVNKRKTSKNMYEDELTSVDKRLGDIQVMLKSLYEDKVKGVIDEEQFLEFYNAFNKEKVGLNNRYDELKKFLNITEKQEDKQKKVEQLVDDTLNLKKLNRLILAEMIEKVEVLEFEDIKINYKIKNPCQ

SEQ ID NO: 18293 - protein, 603 aa, synthetic construct
MVKIIGYARVSTTKQDLSRQKLKIKEFCEKNNYELIEIIEDFGISGVVADRKGYIELQSKTYKDADMIVISELSRLSRQEDVTETVYNIQQIINKGLSVILLDSPNKIYEANKLLDITEILILTIKAWAAAQERLDIKKKNQDGKQALFQANPYAVVDQKIPYGYRAIPNPNGKRPKYILEEVPEEVENIKKLFDLVNSGKTLGAVARYFNERNITFRGYYSTVAILSNYIHSDIYRGIRRRTQKLGREEPYTIEVRIKPIISEEDFMMAQELVKRNYKSTPTGKVNHNPLKGILRCRCGRAMTVKDKKPAAGISKLTYRCSCVERKSHPDFCKYNIDEVSYDLTNEILYSLFKSMHTTEYINFFKNQTDYRITELQEEITGIENRLTTLYLDKENLLNESKDNANKFLITTNHTLLDSIQNKQNIIDEKIKSIDKEITKYKKSQSKKIADIERIKDYNAKEKLQNLTIEEQGELYHKYLERVNYIPVTTMKGYYIVQFLNGVKFYIVITKVRSTAMASLLLDNWTIDEKGIITANYDIFKSSDMKNFSIEMVRKTKTMTLQEYLKSDLAKERALHLDLSYRERYLEKLHEAGLDGRHRPLKK

SEQ ID NO: 18294 - protein, 485 aa, synthetic construct
MTTPQQNKRQKPRAVLYLRQSTFREESISLELQETAGRDYAAKSGYEVVGVESDPGISGRTWNRPAVQRVMSMVADGTVDVIVLWKWSRLSRSRLDWAVAADKVETAGGRIESATEPLDVSTSTGRLARGMLTEFAAFESERIGDVWKEAHERRVRSGRPANGKPRFGYQYTKEDGFIPDPVTGPVLAEMYARYNAGQSVYSLVAWANEGPTRPATGYGVSADGLWSARTIRRMLDTGFGAGYFTRHGERVKGVHEPVISEEMFQEYLARRETRRTRRRGEKSPYLLSGLIRCECGSTMHAGLFGSARKPKYRCKAAAEKRSHSGGYVTAPVVEVAVLGWLQEVQAEITTAAGTVKRPTRTASAGPSEAVLARRMIKLENRLDNLTTRYMDDEVSREVYERLKASTDAEFKEAETALRAVRVTVSRPAEQLVPDLLRDWDVLPVEVRRDMLSRLIHPVLVRPGRPVAEVLVAGLWEEPPAFGERG

SEQ ID NO: 18295 - protein, 497 aa, synthetic construct
MPNAIIYTRQSKHRDESITHENQEDACRKYAASKGYDVVEVVNEKGKSGRTIDKRTEFRRTLKLIEDGHAEIMLVWRWSRFARNTLDGLITLKSVEEEAGGKVESALEPIDRSAMGKFQLTILLAMAELESEQKSEDWKSYLNSRLDSGTAPAGRNYFGYRRVMDATGKKHVGYEIVPEQAEAIREAAKRVVAGHSLRKVAFWLNEQGFRTTQGKPFVSIQVRRVLLQPFVRGKIGWKGKEVDGAHEAILSEGTYRKVAAELSDNTMPRRSEVPSSRLRGIVECAKCGRKLSYQRGHNKDRPKAPSRFRCPTRVSKGTSICDFGSVLAEEVGNALAWAAQRRWNDVEKAVPQQDVQQKLDDKRAQVDSLQHQITQMLLTAQAAGLSTEQVQEALTTLREQSETAQTELSELEAAALTQARPWHEIEDVIHGDDVGAANATIKQFVRRIVADAETLSIEFVEGLPYVWYLGSGPSPGAKDRFKDYADKQGLTPPIPEP

SEQ ID NO: 18296 - protein, 573 aa, synthetic construct
MKKAVIYTRVSTGKKSQLQSYDNQREHYTNWCARNNYKLVHIYPEKGLSGTNARRPQFKQMLEDSGVLWRPNDKGVDYFERIDEKQPDFNYIIVKDPSRFSRNSIVGMQVLQLLRDKGVYVIFENAGASTEESNWKRYLEMLFSMAEAESENISKRIRFAKKLNADKQLYKPARLPYGYTKDQDGNIIIDKEQAKIVRFIYDNYVEQGSHVLSKRLNEDNIPTQQGAKWSNDKIGRIIRNSIYYGEASAGRSMKRNVTDIYRIDIPKDKWIPIPNAVPPIVTKQEWENVNKIRESRINRSGKRGRRPSTNDPYFEKIYCESCGSRFVRHIGHNDKITYMCQNRRKAQGCKVRGISINNIEKLVEQININQIINSMGSHGYYTVLTKRIESETRLLQKRRADITTQIVELNKDHKNWLNALSTKLKDSPKSVIESITDEMAEIKDTVKDLEAQREGINIEALQAIKYKVEEKKKLIDIVNSSKKLNKQAKRNLLKRITVGDYQCSLEFLLPTFEDEVNEFNELYIQAPIETELEFRPFIKTYRREHKEARSYWKIVDEEAIDQQDYFRDNPTFK

SEQ ID NO: 18297 - protein, 696 aa, synthetic construct
MMNDPHQKVQASHLKRNAYVYVRQSTLRQVFENTESTKRQYGLRQRAVALGWTEERIIVIDSDLGQSGASSDREGFQRLVAEVGMGHAGIVLGLEVSRLARNSMDWHRLLEICALTGTLICDEDGAYDPAHFNDRLLLGLKGTMSEAELHVLRARLQGGILNKARRGELEMRPPVGMVYDSEGVLGLDPDRQVQHCLRWLFATFARTGSARATVKAAQREHLAFPRRCGKGAHKGELLWGELCHDQVLRVLHNPRYAGAFVYGRSHTRRSVDGVARLQRMPREQWITLIPETHAGYISWDEYEHNQRRLHESAQAMGADRRRGPAREGPALLQGLVLCGRCGMRMTVGYHSRHGQLCPEYVCQREGISRGEAVCQRIPGSGIDEVIGALLVEAVNPVALEVTLAVQRELQSRFEEADRLRHAQVERAQYECELAQRRYLRVDPDNRLVADSLEAHWNDKLRALAEAHEEYARRCKQDAHVLTQEHCSAILALASDFPRLWSDPATPDRERKRMVRLLLEDVTLNRDEQISVQIRFKGGARRSLHLPLPLCSWKLHVTPSTVVEEIDRLLNDHTPLQIAAILNERGVTSGAGAAFHPQLVARLARNYQLKPRYERLRERGLLTLEEMADKLQVTPTTVKIWLRHGLLRGHAYSDKNECLYEEPGDDAPRKTLGAKLSQRRLDATVLSDRTKGVQYEA

SEQ ID NO: 18298 - protein, 472 aa, synthetic construct
MEESRNKSVGIYVRVSTDEQAKEGYSISAQKEKLKAYCVSQGWASFKFYIDEGKSAKDTHRPSLELLLRHIEQGIIDTVLVYRLDRLTRSVRDLYTLLDYFDKYNAVFRSATEVYDTGSATGRLFITLVAAMAQWERENLGERVKMGQNEKARQGQFSAPAPFGFIKKGKSLVKNHEQGEILLEIIDKVKKGYSTRQIANYLDDSGILPRRGYRWHPGTILTLLKNPILYGSFRWGDEIIEDTHEGYISKDEFDHLQDILKERSIVKKRDSYSVFIFQSKIVCASCGNRLASERSGYLRKKDKKYVENINYRCQTCAQNRKPSIMGSEKKFQKALVKYMQNVTPKLEPVIPEEKKHDYEKVHQKILNLEKQRKKYQKAWSLDLMTDEEFEQLMHETKEALKSAQNELAEAHSADYQNPQIDIERAKEIVKMFNENWSVLTNEEKRSIVQELIKHINFTKEDGEIIITHIEFY

SEQ ID NO: 18299 - protein, 579 aa, synthetic construct
MEIPEWADPCQKPRLFARVRSLFGGTSLSRRSRAKKVGKAAASPLDLDTVRVGVYMRRSTDDENQPYSIEAQDTRLEAYVASQPGWKIVKKFQDDASGKTTDRPDLQKAMQWAKSNMIDVLLVYRVDRFSRSLRDTVSLLEELDKVGVAFRSATEPFDTSTPVGRMMVNLLAMFAQFERDLIVDRVTAGMERAADNGQWKGGPPPYGYKTDPVTHRLLCDEAEAVIIRLIFDLYTQDRLGSRAIANELNERGHRTRSGGLWAFKRILSILENDAYVGEIHYRDIVTKDAHKPIISREQFTEAVRLMDQRGDSHSHRAASGSDYIATGRLPCPKCKHAMIGTRATGKTKTYRYYTCMKRLKYGKDSCDQDRINADALDQAILDSVASFYSNQHDLIREAVDAARKVYESSHDGVAAELKTVKTEISRVTAKIDKYLDAFEADAFDAHDDAAKERMRQHRTTQKQLRAREAELLEELENEPTMPDAATLDTVNHNIREIIKAGNPNQRKAIVETFVVKIKITGPGRITPVFRVPQAATAPALANAEGAEPGISDSAPLGVRACSSLVELRGLEPLTLTLPV

SEQ ID NO: 18300 - protein, 604 aa, synthetic construct
MIKIIGYARVSTTKQDLSRQKLKIKEFCENNNYELIEIIEDFGISGVVADRKGYIELQSKTYKDADMIVISELSRLSRQEDVTETVYNIQQIINKGLSVILLDSPSKIYEANKLLDITEILILTIKAWAAAQERLDIKKKNQDGKQALFQAYPYAVVDQKIPYGYKAVPNPNGKRPKYILEEVPEEVENIKRLFALVNSGKTLGAVARYFNERNITFRGYYSTVAILSNYIHSDIYRGIRRRTQRLGREEPYTIEVRIKPIISEEDFMKAQELIKNNYKSTPTGKVNHNPLKGIIRCRCGRAMTVKDKKPAAGISKLTYRCSCVDRKSHPDFCKYNIDEVSYDLTNEILYSLFKSMHTAEYINFFRNQTDNRVTELQEEIAGIEKRLSALYLDKENLSNESQDNANKFLLTTNPTLLNIIQEKQNQLDEKIKSIDKEIIRYKKSQSKKMADIERIKDNNGKEKLQNLSIEEQGELYHKYLERVNYIPVTTMQGYYIVQFLNGIKFYIAITKVRSIAMASLLLDNWTIDEKGIITANYDTLKSSDMKNFSIEMIRKTKTMTLQEYLKSDLAKERALHLDLSYREKYLEELHKAGLDGRLRPFKKE

SEQ ID NO: 18301 - protein, 532 aa, synthetic construct
MNEQTAISGSLALNSAPHVIMIPASGPVRTRKLRVAAYARVSSNSEDQIHSFAAQNAYYTELITGNPEWEFVDVYADEGITGTSAEKRDDFQRLLKDCRRGRIDKVLTKSTARFARNTSESLMAVRELRDLGIGVCFEEQGIGTAQMSGELLTAIFSMIAQKESEAISENIRWTYQKKMKKGSFITCKAPFGYRLVKGGLEIVEAEAEIIRLIFQRYLNGRSMEDIAKEITRYGIPTRDKTPYWQTTSIQYVLHNEKYAGDSLAQKTYTTRTLPHRKKRNQGEYDQYFVPGSHPAIIDRELFDRAQALLKQKGAVIHPKSGVTYPWTGTVICGQCGSIFKRKKCRESAYWTCRLHDKSPDKCQITQIPESEFERAFLRLYYKLRHHGMPVLSQLLTDLQTVQNGKLLWSLDIVEANKQIADIVRQERLLAELKQQGLVDPDIYITRSSTLAEQLRTAKLEKERFLESEEDQTIRQTQVLLEILETGPEFLEAFDEELFSELVAKIIVENNECLRFRLINGLELTETIERTVR

SEQ ID NO: 18302 - protein, 549 aa, synthetic construct
MTETAPKVIVIPAKKETPQEQAQKRHLRVAAYCRVSTNSKEQLTSYENQLAYYTEKIMKNPSWTMVKVFADEGKTGTSTCKRKEFLQMIRMCRQGKIDMILAKAVSRFARNTVDTLNYTRELRELGIPVIFEEQNINSIYPESEFLIAIHGAFAQSESENTSANVRWGKRRSMKAGHVTMQYKWMLGYEKGPDGRPVINEEQAETVRFIYQRYLAGDTLRAIKSKLEAQGALNAIGKQEWTIKNLLSILSNEKYCGDALLQKTFIQDCISKKVIQNNGQLPKYLVQDHHEGIVSRDVFYAAQLEIARRRAQTGGTSKSAPTGRSKYSGKYILTNLMFCGHCGTGYRRCVWNKGGVKRAVWRCGSRLDYGSKYCKHSETLEEKPLQQAILNAINSVMDSRDALAVQLMGAMEQELAPIPGETMSLADIDQMLEELEKQFNSLLAEASAAGGTEDYAERFRMISNAMADLKEHKSRIKQVYQENELVSQRLKAASIAMSAYAAELTEWDQSVVYQLVEKVTVLAKDKIRVTFRNGTEVEQEIEQLDWRNAS

SEQ ID NO: 18303 - protein, 520 aa, synthetic construct
MKKITKIEGNLANSFIKPKTRVVAYCRVSTDSNEQLVSLQAQKAHYETYIKANPEWEYAGLYYDEGISGTKKENRSDLLRMLSDCETGRIDLIITKSISRFARNTTDCLEMVRKLIGLGVHIYFEKENINTGTMESELMLSILSGLAESESISISENTKWAIQRRFQNGTFKISYPPYGYQNMDGQMIVIPKQAEIVKYIFAEVLSGKGTQKVANDLNQKGIPSKRGGRWTATTIRGILTNEKYTGDVLLQKTYTDSHFNRHTNYGEKNMYLVENHHEAIISHEDFEAVDVVLNQRAKEKGIEKRNSKYQNRYSFSGKIICSECGSTFKRRIHSSGRKYVAWCCSKHIGNITECSMQFIRDEDIKTAFVTMMNKLIYGQKFILRPLLNGLRNQNNVASFRRIEELETKIENNMEQSQMLTGLMAKGYLEPALFNKEKNSLEAERERLLVEKDQLTRSVNGNFTKVEEVDRLLKFATKSQMLTAYEDELFENYVEKIMVFSREEVGFELKCGITLKERLVN

SEQ ID NO: 18304 - protein, 445 aa, synthetic construct
MIVTKSISRFARNTADCLETVRKLKLLGIAVQFEKEQINTLTAESELMLSILSSVAEEELASISQNMHWSNQRRFKKGKFSVNTKRFLGYDKNHDGNLVINDEQAAIVRRIFKDYLSGLGVSRIAKGLEADRVKNISGKIKWAESSIRDILKNEKYCGDAHLQKTITTGLYNRKRNSGEAPMYYVKDSHPVIISREDFEKVQELMTERAKSKGNIQGNREKYTNRYTLTGTIVCGHCGNTFKRHIDNCGTVAESVCWICNTYIIGRKNSCGVGRIKEETIKGLFVRVFNRLCTDRAKLLGDYKAKLEREKLTELDNERIAKLDEEIEKLIKQERALFLIEAKGYADHNLVKSEHEELVKTLTQIQTERSDRIAEINKRDNRMARTLELEAVLEAQGGNLTEFSDDLYRNMVEKIVVKERTKLIFHLKNGLAFEETYALKRGHDIF

SEQ ID NO: 18305 - protein, 510 aa, synthetic construct
MATVTVIPAKPMQELKGLEATAKLRVCAYARVSTDNEEQLSSYQAQVEHYTSYIQNNPAWEFVEIFSDEGISGTNTKKREGFNRMIDECMAGKIDMVITKSISRFARNTLDTLKYVRQLKEKGVAIFFEKEVVNTLDSKGEFLITLLGSLAQEESSNLSQITKMGISYRFQEGKVLVNHNKFLGYTKDEQGQLVIVPEEAEVVRRIYREFLDGKSPYKIASNLQKDGLITGAGGTKWYDSTVIGILKNVKYMGDALLQKTYTVDFLTKKRVKNTGHAAQYYVEDSHEAIISKEEFAAVQAEFERRANMRGYSKTGKSKFTSDYAFSGKLFCGNCGSKFRRSKWGSGKNLQIVWICINHQTGGDCDMKPVKEKALEQAFVRAMNRIIANKEAYLTEETTGPQFDFEAIDSKIDELQQELIDAVRNNQEYSTAEIERLQAHKQRRKNDEAERAWKGRLVEDFKSYLDARDGKPLDKFDGDLFRKLVEKVRVVSMVEVDFVFRTVMELREVLS

SEQ ID NO: 18306 - protein, 514 aa, synthetic construct
MIVAIYVRVSTDQQAEKGYSIETQLTECRKKAHEIPNVLSVEEFIEDGYSGAYLERPALDELRNALREKRFGAVIVYDPDRLARNLTHQLLITDEIESSGAQLHFVNFEWQNTPEGKLFYSIQGAVSAYEREKIRERMQRGKRGKALSGKVIKNNHPYGYNWDAERSVYTINDDEAKMIRQIFSWVVEDHLGIRAIATRLAQLQYPTRTDINSWNIGTVHDIITRETYAGIHWVNKEYKTKIGQNKFKRGTRKPSEWIAVPIPPIITREIWEAAQRQLQLNKRITKQPFDYQYLCRNLIVCPLCGQHMRSVHSGSRRKQYYACKTGRAMSGKSHLGETNKCPARQIPAKDLDESIWQYISNMLKNPSIMSEELSKTNKSNDTIGLQEAGIRLKNKEDKLLQERDKVTLLFRQDLIDLNMAEKQLTEIKNSLAEIKVQRLQLEKELENNLLPSASENFLNKLNELALLADTEDPKLRRHVITSVVKEIQAQRMDTRNVGATFGAEIRTHITFGVN

SEQ ID NO: 18307 - protein, 692 aa, synthetic construct
MSSVSIVKSIHLNRTALVYIRQSTLAQVRFHKESTERQYALREKALNLGWSENLVQVIDEDLDISGAHKSNRQGFQRLVGQVSLGQVGAIFGLEVSRLARSSADLLQLLEICALYDTIVIDEDGFYDLNEFNDRLILGFKGTMSEAELHFLRARLIGGKKNKAHKGELHFPLPVGYCFDSDGNTSLDPDEAVQAAVRNVFTSFQASGSAYGVVKFFSTNGLQFPKRAYGGVWAGKLIWGTLTHSRVLGVLSNPAYAGAYCFGRYKYRKKIDNQGAFKTQMVRLPRDQWEVLIHDHHPSYISWAQYEENLHQLQQNRTNVAVSGAAREGSTLLQGLLICGKCGRHMTVRYTGNGGIQPRYECKQRWELGKACTCSSIRAEPLDQAVTKRIMELLQPAELELALLSLDRLSDEDHAANKSWRLALEQSQFEVERAYRQYDLSEPENRLVVRTLEAKWNEKLLALDQLKEEYEQFKANRAWSPTSEDRHMILRLAEDIPRIWNAPTTLMKDRKRLVRLLIEDVTVTCQPLDQNVQLGIRWRSRHSELIYTKKSLPPSITRKHVPETVELVKELAKTMSSAEIADSFNKNGYRTPEGRTFTESSIAWLRYRYKIPGLVKQSNELSVKDVASKFNVSPGVVYYWLETGKIQGKQLGPGRPYSIIIDETTEKVLSTYADTSTKIIKARGLNVIEEGAL

SEQ ID NO: 18308 - protein, 517 aa, synthetic construct
METENEIEKVAIYLRKSRGDEEEDVLSKHRQRLLEFAEQKGWSYEIFQEKIGTGDGVEHRPELKRLLDFVEDGLYDGVLVVEYERLSRAGTKDLDEIIKVFHYNDTYLITPEKIYDPNNTGDLTLLGILSVLSNAELRTIVKRLVDGKKDGAIKGNWTNGKPPYPYEYITEVGVDKRGRNKIIGHITVNEEKKTVYTRIKKMYLSGKFGTEEISFILNREGISSPNGSTWHNNTVKRLLVHPFHMGQVIYGKNQWKKRRDNKRKITRHKNESEWSVGEGQHPRLKTPEEHEKILELLAKNRKVPHKSKAGCFPTTGLLYCRKCGYRMVYSVGRIEVKSGKSYNYTKCAHHSPVGTKCPQTGVKMDEDFYGALFQAIVSDYLDKGHLIKLQQNCNFNMELERNIKQKRDTLIKAEKALIRIKDAYEAEIYTLAEFSERKKAQETLIESLKAEIQELKNTPQREFNLPPEELENRICEFKSLWEKGASPKEINTLMKSIVKKIFYDRTDNEVTFEIEYL

SEQ ID NO: 18309 - protein, 503 aa, synthetic construct
MKSAWAYIRVSTQEQGEFSPDAQLREIKQKAKGQGHSIVQVFQDIGESAKMADRPEFQRMINEAKRLEKGSVDAIYVHKIDRFARNREDSVVYKAMLRREYGIQVLSAKEDLDDGPVGRLIEGILECIAEWYSLNLAQEVRKGMTEKAMKGGNLTRPAFGYVLPEAGERFEIVPEQAEIVQLIYKLYTEDNWGRRKIAKYLNENIKIRQPERVAKKGKKKGQRIGGNPWNDTRIKYILNNPLYIGKTRWNVHDSTSGYEKKPEEDWIISDGQHEPIINIDVWEKAQMKTKRKKVSPGESSNYLLSGLLRCADCGSSLSANRKREIRQDTEFFFPYYNCDKYKNGSGCRSQFVSVRRIESAILAHIKKTSETIENISVEVLKDNSNEVAELTLLERSLESYKERYLRIKHAFESGVDTLEEYKENKLRLKHEEEEIENRIKQLKTIKPTCDSTDFRMQLKNVHTLLNDPTVSMNEKKQAIRKYIKSIEFSRHNNILRINYCIRD

SEQ ID NO: 18310 - protein, 527 aa, synthetic construct
MRRHLLRVSSAAQTKRGDGLGSQKTRCIEYANARGYKVIETFMDDASGSLIERPGMKSMLAFLKKHRQAGLAVLIDDISRLARGMKAHIELRAAISLAGGTLESPSVEFGDDADSELQEYILATVAQHQRRKNAEQTKNRMRARVMNGYWPFACPVGYRYQRVPGHGNVLIRNEPLASIIQEALEGFASGRFQIQAEVGRFLESFPEFPRDRKGNVRSQQVTDILTRPVYAGYVAAPKWDISQRKGYHEALISYETLIKIQDRINGKARVPNRKDLSADFPLRGAVACGDCGTPLTACWSKGNTAYHPYYLCRLRGCDSYGKSIRRSVIEADFEELLRKMQPSANLFKAARAMFKDLWDHRLATGATRTKTLKAELAKVSEQVEQFLDRIADASVPSVIAAYETRIKTLEDRKIVLAENIANCGRPVRSFDETLRTAFDFLASPWKLWTSERLEDKRIVLKLAFVEQLAYTRNEGFRTPNFSLLFKALDRFKGGNLVVARPTGIEPVSRASETLILSIELRAQGTTL

SEQ ID NO: 18311 - protein, 538 aa, synthetic construct
MSRTSASAMQSVEDLKATIRCAIYTRKSTDEGLDQDFNSLDAQRESAEAYIASQRHEKWLCISERYDDGGFTGGNMERPALKRLIADIESGGIDCVVVYKVDRLSRSLLDFSRLMELFDKHAVSFVSVTQQFNTTSSMGRLTLNILFSFAQFEREIISERTRDKMSAARKKGKWIGGTPVLGYDLDPKGGRLIVNEDEAARVRAIFDLYMDRKALMPVVSELERRKWGKKQWTTKRGDIRGGNPFTKNSLYRLLTGVVYTGNVDYKGTIYKGEHEGIVDPDLWQQVQDILRHNGRSGAKDVRNKYGALLRGLLYCAPCRAAMVHSYTVRNGKCYRYYVCLTAQQRGWTACPTKSVNAHEMEVAVIDYIRGLGSNIDIFSETVSAVRDQNENRLHDLETERRANERELKRLDDRLHALVSDNSALRTDSRLVTDQMADLQDRISFLEQRMTVIREEIILIQRKTLDEEDLKKALNAFDPVWESLAPREQARILKTLIERVAYDGRDGKVTVTFRSPGIKALCMGDEVRMLEEHELKEKL

SEQ ID NO: 18312 - protein, 623 aa, synthetic construct
MKAAFLIRCSTKNQDLDRQTRDLTRLAKSLGYEYDIENLVFGEKITGKDDVTIKNRESIDKLLRAAKEQKFDVVLVAEVSRMSRDPASGRVYVRQLINMSIPVYFRDIDTWTINPDNGKRVRDAEQVIGAAFDAAWKYLRSLKTQVASGRRNELDNNQISVGQPFFGYTRYGGKDKSKKNCWIVDEVAAEVVVFVFNEYIKDGSTLKSTALATTAKYGELLGKKFSVGSIEHILTYESYHTGIKKISLTDPDTEEIEVFDVKVPILVDTELFEKATAKRKNNRVKSEPYPKQTTYILSKLLKCPYCGYTMTPRTKGNDSKGKTTNERYRIINGRKALSWLCMSGINNATSCSNRISVANEKAEPIIWELVKKELIVFANLNNEERELKVEELTEKISHLASNIDNYNTHKSSLQKQLSKAYTVATMADESVLEMAMTEFNKTARTIRKEMSDCDSAIEQIKGEIENLANLKIFYSQPNLPSDIIEKAETDEAEKRKLVKELINKIVPYKITTFKKRHRDKGLVTLNFGVVLLEVYTVNGIYYVFYNANDRGDIRQAYYISGVFAKFQNSINKFDAYKEGEYFVISNADMVMETKEIDELITVNQMVEIAINNGWVLSYSYKQK

SEQ ID NO: 18313 - protein, 522 aa, synthetic construct
MKRAIIYARVSSKRQADDGLPVESQIDHCRSKAAALGATVVKVFTDGGISGTTDRRPSFQDALNFCAVADIDYFITWSSSRFARNHLDAGHYKAVLQRYNTRLIYSSTEVDIGTDDGWFIDAIGSVIDERYSRQVASDTRRSMLKAAKDGYFLGGRVPFGYVVVSDGKRKRLGQHPTEANTVRQIFTMALQGCGTKTIALHLNGTGLTLRGQSFSKNTLTYILKNEVYAGWTIFNRTNKRTPNPPEDWIKVKSHSALVSEEDFERVQKVLEKRKPANVGGQPRSNFAFTGLLKCGLCDASLQTCSGTGRSKVYHYYGCRNSLVGKHRCGFGKVRAELFDEWMLAELLDQVMTPERMADVVAQAYQTRETWAKDRSDRRKTIVAELRVAEKARSNLFSVLELHGQDAPNLGDITQRLREWNDRIRSLEASLVDLENERMSANEQPEVDPAEAAEVLRDIVLNCEDPKKLREFVGSFVREITVTDSEVVVDYHPECLVRHNHRAKIHSAEKWLLDLGSNQGPTD

SEQ ID NO: 18314 - protein, 533 aa, synthetic construct
MPYAVGYARFSSTKQGKGSSLSRQQELISEWIENNKGYQIYPKKFEDLGRSASKGDHLKHGFGKLLEAIEQGEIKEGDVILVEAIDRIGRLPEMQMISLIDQIVSAKVQIITLQDGCTYGPIIKSEQIWSLVGKVQQAYMYSASLSERVKASYKRREALAMNGIIPKRRTPIWLNSDGTVKPDIAEAMKGAFEDALSGIGERRILKRLIQSNTAFETINPSTIRRWLTNRIAIGYWKDYKIYPSIVSDELFYQVQKRFNDEYKPPTAPRTHFLSGLIKCGDCGANMQVKINKNSPFTMRCTTRCVYGDLRCKNSKSFPVPVLLHVCYDTATGAVEKAMQNIELSSSQKKLIVIDGQLRDVGEKINNIVQSLEKYGPLPELDRKIVSLSEQRNKLEREKLLITNDTVENVSKYDTAWDYQHELIADHPMRLNALLQSSGYQIDCYSGGLMVANTSGNDFSKCVYEGYNRKIQAYKISARGNVHHITNRDGSLTKERLERFKTMLARQRTGDTTTFKAIETSAAELEMYEFYSTI

SEQ ID NO: 18315 - protein, 555 aa, synthetic construct
MGKAQSSLVARNDVLATGHRKRVLGAVRESRERDTSTSPETQRRKITGWTDIHDGDLIHVAVDRDVSGKTVSPWERPDLGDWMAHPEKFDVLCAAKLDRICRNAEDFFRLIRWSKEHSIALVFIEEGFDLTTPAGTMAAKILAVVAEFEWDSIRGRTLDGQQTAIQQGRWRGGVAPYGYRPVKETRNGVLGWYLEIDPDTSAVLREVVGRVILGEESVSKIVEDLNRRTVLTSADAHRVRQGKEPKGSRWHPASLIQLLRSRALLGEYQTADNGTLRDENTSLPLVKAEPLISRAEWTELQEALDRMSRKKLQTRQGTSMLHDVAFCAVCQRKMHHFQSGPRPYYRCSSYNNAKGRCDNSMASAPVLETHLWNVLLSAFGDQPRMEREVVPGEDYSEELAILDEEIANLAGNLAKVKPGSIAAQMTLKRLEERESRREEIASLPSRESQVVYLPTGETLREAYLSWSDSERGKFLRDHEVKIRVNVPKGQAKSPQIDLLLGDITQAYKLASGGIEDSLTAFKMLTYILDRPGISNEPGPEAVRVFVHIGRFHSEN

SEQ ID NO: 18316 - protein, 373 aa, synthetic construct
MPQRNNGIAYSYVRFSSKRQELGDSLRRQTEMAEEYAIKNGLKLSSKNFQDLGISAFREGKRASLVDMLAAIEEGQITAGSTIIIEALDRLSRRGIDATLETVKEILRKDVQVVSLSDGLLLTKNSLNDLQSVIRIAIAADLAHKESERKALRLRETKGQQREAALSGKPINKILPFWLQRTEAGYAFSDKAGVARQIVQLKQEGKGSNMIAKTLNRLGIAGVRTAQWNHASITKMLKNPALYGAYQTGETTKDRELIKLELVEAYYPALINKEEWLLLQSDQSKSKRGRRSANNPYSGLLRCECGGALVKRQHTVKGKLYVYHGCLNAKDGRCTQKYFNQRIRWRTNHHSWPVGIQEETDAEPIHSSRKATT

SEQ ID NO: 18317 - protein, 538 aa, synthetic construct
MAKNGARVYSYLRFSDPRQATGSSADRQLQYAQRWAAEKGLVLDESLSLRDEGLSAYHQRHVKQGALGVFLQAVEDGRIADGSVLVVEGLDRLSRAEPIQAQAQLAQIINAGITVVTASDGREYNRAGLKAQPMDLVYSLLVMIRAHEESDTKSKRVKAAIRRQCEGWIAGTYRGVIRNGKDPQWLRWDGQEFRLIPERAEGVRFVIELFRRGYGSVRIIREMAQRGLALTDKGVTALQVHRLARLPALMGVKVLELEGESYRLDGYYPPILTADEFAELSALVDGRVKRKGRGEIPGLVTGLGISYCGYCGTAVVGQNMMFKARPDGSLADGHRRLICVGYSHNEGCPVGGSCSVVPIEKALMSYCTDRMNLSGLLEGSDQTQAIQARLAKAKAEVVLIEQQLERVSEALLAAEGGAAPLIFVRKARELEEQHADKRKEVAQAERELVAISSHDQPGLAEAWAQLASGVESLDYDARMRVRQLVRDTFERIVVYHHGMQASGREGKVIDLLLVGKGGQPRLLRIDRKTGDWQLGFGA

SEQ ID NO: 18318 - protein, 513 aa, synthetic construct
MERVCMYLRKSRADIEAESRGEGETLTKHKKALLKVAQHQKLNIIKIRQEIVSGESLMHRPEMLELLKEVEERKYDAVLVMDMDRLGRGNMREQGLILETFQQAKTKIVTPRKTYDLSDEWDEEYSEFEAFMARKELKLITRRLQGGRLRSIEEGNYIATNPPYGYILKDLQNGRTLEPHPEQADVVKLIFDLYTKQKMGGSKVALELNRLGYKTYTGRNWAAHSILNILKNEVYIGKVVWKKKQITKSAVLGKSKDTKTRPRNEWVVVDGKHEALVSDETFYTAQQILKGKYHVPYQLASGVTNPLAGIIICKKCSMKMVRRPYTKQSEHLICYNRSCNCKSTRLSLVEEKLIQALRDWLSNYKATWEEEQPETKEERPLLEVKKQALLNLEKQHEELLLQKGKLHDFLERGIYDEETFIERSQTLVKKIEEFTQLIKRTKKDITTEMERETAQQQIIPQLTYVIQVYNKLQDVEKKNELLKSVLEKAEYKKEKHQKLDDFELVLYPRLPFG

SEQ ID NO: 18319 - protein, 563 aa, synthetic construct
MTQRISIYARYSSDLQSDASIEDQIRLCSERADSENWKVVNCYTDAGISGASLMRPGIQSLLSAAMNGEFDILLAEALDRLSRDQEDIAGIFKRMEFAGVKIITLSEGEISSLHIGLKGTMNAMFLKDLADKTRRGLRGRVENGKSGGGLAFGYQVVKQFNAQGEAIRGDRTIDEDQAEIVRRIFHEYAHENRSPKAIASGLNEDGIPCPSGKAWGQSTINGNRKRGTGILNNHLYIGELIWNRQRFIKDPATGRRVPRFNAESEWIRQSVPDLRIVPQPLWEAAKARQKELDKRSGNLGSRKRPQYLLSGLLVCGNCGGGFSKINSERYGCSSARNKGESVCTNKKTIKRDLLEGKVLNALQSHLMRDELVQVFCEEYARHMNALRAAQNAALASRKTEAAKLAKEKENIIQAIKDGFPASMVKDELERVAKRQDELAALMDSQDEEPRPLIHSTMSRRYRSEISALTSALTNGGAAEAREEVRGLIEKIVLTPKDGEDQLSIDLHGDLAGILRIAAEDKSMKDKGKIEKRLEVMAVNDNDSFEPSIQLVAGAGFEPTTFGL

SEQ ID NO: 18320 - protein, 596 aa, synthetic construct
MARRRRTASEDAPSGPDRVVLYIRVSTDKQAENRLSLEEQELQMRDHCERQGWTVVGLYCDAGESASSLQRPEFQKMLARCLDGTRSIDAVLVHSISRAFRNLLDQERTVLDLKSHGIATRSMTENIVARDGGKLMRLALGFANELKSHDAHVGTMRGMSATARLGFSNGGTAPFGYRSVAAETIGRTTKRKLEIDPVEADIVRLVFRLALEGDGSSGPMGVRNIVQYLNAAGYRTRRGGEFYHSTIHEMLLRKAYAGDGSWNVFDKHGNQNPDREIVDYKVPAIIDSEAYDAVQAQLGERQPSRRGPRLDSAPSLFGGLIHCGCCKRAMSPSSGTGRHGKIYYYYKCAGSINKGAGACRNKPVGRGLAEARVMSELVQWLTTPDRLAGILAALHERKASKQQSVIVRIAQLQREAAEAEKALQNVYAAIEASILDPTEPSLQSRVRSLREKRDLASAALERAKATMVEQPALDSQIVETFRRALVERLSDGPIEGRKAWLSAIVDAIVVEPGNIRVIGKNDNFEKNLRSHAAGRGPVRSSVRKWWAGPDSNRHRRCYEQRALTIELPARPSPSIAIPRQASVAKLRSETERGPAA

SEQ ID NO: 18321 - protein, 545 aa, synthetic construct
MTSEHSEDVVIYSRVSSLGQRNDGHGLSSQESRCRDFAASKGWNVVASFPDTISGGIDFMKRPGMVALLSFLDAQPNRSFIVLFDDPKRFARSTKYHLELREALRARGARIACLNFKFEEDSPEGEFIETIIAAQGELERKQNGRQVAQKMRARMENGYWIHNAPIGYRYETIKGRGKVLVLEEPAAGIIRQAFEGYASGRFETQAEVKRFLEGFPDLLNKRKGKITQQRVTDILTQPVYTGHICSEVYDLNWLKAQHQPLVSLDVFDKVQDRRKGTAKAPKRKNIGDAFALRGVAVCRGCNVPLRSSITKGNGGSYHYYLCQTKGCDHYGKSIKRDKIEGDVGELIKSLQPSEGLMDAAKAMFRHIWDAKEHQAKDVLLSGKRKIAALDKDIDRLLDTITSVSRASVIARCEDKIDMLEREKTKISQEMAERAKPKGSFEEKLEPVLVFLANPFKLWASSNITLRRLILKLAFADRIRYDRFEGARTPEIAFPFKALRYVTDPKLCFGAVEKTRTSTGVTPQRPQRCASTNSATTARLGWCAAV

SEQ ID NO: 18322 - protein, 525 aa, synthetic construct
MANKKVTTIPATITKFAQKPINKISKRKVAGYARVSTDSEEQQTSYEAQVDYYTNYIKSRDDWEFVEVYTDEGITATNTKKRDGFKRMVNDALAGRIDLIVTKSVSRFARNTVDSLSTIRKLKEHGTEVYFEKENIWTFDSKGELLITIMSSLAQEESRSISENCTWGQRKRFADGKVTVPFEHFLGYDRGEDGNLVVNKEQAVTVKKIYRLFLQGYSPFGIAKALTADGILTPGGKNKWSARTVAAILSNEKYKGDALLQKSFTVDFLTKEKKKNEGEIPQYYVTGNHEAIIPPSTFERVQKLLAQRKGGKNRISSVSIYSSKIKCGDCGSWYGSKTWHSTDKYRTRIWQCNHKFEEHCATPHLKEDEIQTLFIKSVNMLVKDKQEIIATHKEMVKTVFDTSSLENEQVKLEEELNIVADKVNNCINENARKLQDQDEYEKKYASLVNRFNTVESRLKEVKACIVEKQARRDEVKYFIEDLKKQDLLTAFDENVWLSMVDYLAVHKDGKVEFIFLDGSVIKIDW

SEQ ID NO: 18323 - protein, 588 aa, synthetic construct
MKKIEKIEAKKPAILERKKVCAYARVSMETDRLKHSLSAQISYYSKLIQNHPEWEFKGVYSDYGITGTSTVKRAGFREMLEECEKGNIDLILTKSIKRFARNTVDLLKVVRHLKSKGIEVRFENENINSLSGDGELMLSILASFAQEESRSISENVKWGTRKRFEQGIPNGKFSIYGYRWEGDHLVIIEEEAKIIRRIYDEYLSGKSRIQIEKQFNAEGIRTRAGYKWMDSNIKVILTNIHYTGNLLFQKEYVVDPISGTTRKNRGQLPQYFVENTHEAIIPMETFKQVEAEMKRRREAGAIGNPAIATTEMTSKIRCAHCGRSFHKCRRRTVNRGSVFWQCATRKAAQGNPCHTGDLNDIALKELICKVLGIDEYDPDAFAQRIDHIDVIRKEKLIFHLADGNVVETQYPKLNRKEYFTDEIRANLSKQRRDKHRYHRKNSVTPFTGIIECAKCANSFNALTRVLKTGEKIAYLSCRTNRSECPHNSIQDVTLKALVCEVLKLDEFDEQVMDEQIKRIYIAEGKATFKLKDGREIVKEYSERKRGTPWSKERREKQLPKMHEYWANEDNRKAAGERCKKMWREKNGK

SEQ ID NO: 18324 - protein, 415 aa, synthetic construct
MEIRKLPPHPALTKRLRVAAYVRVSRESERLTHSFSAQVSYYNQLISSTPDWEYAGVYSDYAATGTSTTGRDEFKEMITTALGGGIDIILTKSISRFARNTVDLLKTVRELSAAGVSVRFEREQIDTATAQGEILITLLASFAQAESESISANAKWGIRKKYADGHLHSRQPYGYHYTNGHLSIVEEEAAIVRRIFTDYLAGISPEKIATRLNNEGVCARHGGRFHASMLRRILENETYTGDAICQKQYRPRIGDKRCEANTGQLTKYLIEDSHQPIIERAVFDAVQAELHKRRNSGGLAATPGCGTGLTHKILCTTCTRHYHRRTKTKNGQSYKYWWCETATKGHGNPCKAHQLREEKIRAIICSALGLSDWDDETIIEQIARIEATPDWLLTIHHTDGRSMTIDYRTGSEVNH

SEQ ID NO: 18325 - protein, 501 aa, synthetic construct
MAKHGLEVDRHLEDAGTSAFHGKHAGSDGVLGQFLKEVRKGEIEKGSYLLIENFDRLSRDKIVRSNKIFTDLLFSGIKIVILDKNKIYDADNLDFGDWITALVEFERANAESQRKSDFSSKAWKLNRDKMHNGEIVTKKVPTWLKVENNTFIIDEVKIDRIRTLFRLSLSKGLQEATKEYNSLYGEKLAIHQAQYLLSNRKLIGEHQPQKIHYNENGRLIRKDEGNPIPNYYPQVIDEDLFLKVQSVITSRKPFSGRYSAQRYNVFRDLIFCRFCGGTIRYMNKGERDYFICTNSMTGKCGLKGQQSIRGKKVFGRFFKFTNGINIGTLLEENTNADEIKNELMKLENQKNKISNRLDDFKSQIKKMVMEGETIPETYNEIIVDLENSIIKYDAEIEIKNKELDKIISSFRSFYDLQGIDIEKIIYDKSQEAIEKRVQYNNELKNIIKKIQIDYLNDILHVEFSNGVNRHILNDELANEYNKDEIENSWASVVKSIAQKTN

SEQ ID NO: 18326 - protein, 543 aa, synthetic construct
MGKNGARVYSYLRFSDPRQATGSSADRQLAYASAWASKHGMELDATLTLRDEGLSAYHETHVKQGALGAFLRAVDEGRILAGSVLIVEGLDRLSRAEPLLAQAQLGQIVNAGITVVTASDGREYNREGLKAEPMNLVYSLLVMIRAHEESDTKSKRVKAAVRRQCEAWVAGSYRGRIVSGKDPQWLAWDGDSWQFIPERVEAVRFALDAYRSGIGAARLVRLMHEKGMVLSDWGIAAQQVYRLVRLPALRGAKRISIDGENFMLEDYYPRLLSDEEFSELETLVGQRYRRRGKDEIVGIVTGIGITRCGYCGTALVAQNLMQRVKADGSLEDGHRRLHCVSYSKNGGCNGGSCSSVPIERAVLAYCSDQMNLQRLLEPSSAGEDLRPRLVEAQKGVAEIERQLERVTDALLADDSGAAPLAFVRKARELEEDLERRRSAVQALEQELVAKSASAPAAGASKWAELAERAKSMADVDAREQARQLVMDTFETLVVYMRGVIPNPKGRYIDVMMKSRAGQTRWIRVDRRTGVWKKGADRPTTRRP

SEQ ID NO: 18327 - protein, 533 aa, synthetic construct
MTKKCFPYVRFSSTRQEDGSTRTRQNGLIEAFVAKHGLEVDRHLEDAGTSAFHGKHAGSDGVLGQFLKEVRKGEIEKGSYLLIENFDRLSRDKIVRSNKIFTDLLFSGIKIVILDKNKVYDADNLDFGDWITALVEFERANAESQRKSDFSSKAWKLNRDKMHNGEIVTRKVPTWLKVENNTFIIDEVKIDRIRTLFRLSLSKGLQEATKEYNTLYGEKLAIHQAQYLLSNRKLIGEHQPQKIHYNENGRLIRKDEGNPIPNYYPQVIDEDLFLKVQSVITSRKPFSGRYSAQRYNVFRDLIFCRFCGGTIRYMNKGERDYFICTNSMTGNCGLKGQQSIRGKKVFSRFFKFTNGINIGTLLEENTNADEIKNELMKLENQKTKISNRLYDFKSQIKKMIMEGETIPETYNEIIVDLENSIIKLDDEIEIKNKELNKIISSFKSFYDLKEIDIEKIIYDKSQEAIEKRVQYNNELKNIIKKIQIDYLNDILHVEFSNGVNRHILNDELANEYNKDEIENSWASVVKSIAQKTN

SEQ ID NO: 18328 - protein, 481 aa, synthetic construct
MITTNKVAIYVRVSTTNQVEEGYSIDEQKDKLSSYCDIKDWNVYKVYTDGGFSGSNTDRPALESLIKDAKKRKFDTVLVYKLDRLSRSQKDTLHLIEDVFIKNGIEFLSLQENFDTSTPFGKAMIGLLSVFAQLEREQIKERMQLGKLGRAKAGKSMMWAKTSYGYDYHRETGTITINPAQALAIKFIFESYLRGRSITKLRDDLNEKYPKHVPWSYRAVRTILDNPVYCGFNQYKGEIYPGNHEPIISKEEYDKTQSELKIRQRTAAENVNPRPFQAKYILSGIAQCGYCGAPLKIMLGVKRKDGSRLKKYECHQRHPRTLRGVTTYNDNKKCDSGFYYKDKLEASVLKEISKLQDDADYLDKIFSGDNAETIDRESYKKQIEELSKKLSRLNDLYIDDRITLEELQSKSAEFISMRGTLETELENDPALRKNKRKADMRKLLNAEKVFSMDYENQKVLVRRLINKVKVTAEDIVINWKI

SEQ ID NO: 18329 - protein, 481 aa, synthetic construct
MITTNKVAIYVRVSTTNQVEEGYSIDEQKDKLSSYCDIKDWNVYKVYTDGGFSGSNTDRPALESLIKDAKKRKFDTVLVYKLDRLSRSQKDTLHLIEDVFIKNGIEFLSLQENFDTSTPFGKAMIGLLSVFAQLEREQIKERMQLGKLGRAKSGKSMMWAKTSYGYDYHKETGTVTINPAQALAIKFIFESYLRGRSITKLRDDLNEKYPKHVPWSYRAVRTILDNPVYCGFNQYKGEIYPGNHEPIISKEEYDKTQSELKIRQRTAAENVNPRPFQAKYILSGIAQCGYCGAPLKIMLGVKRKDGSRLKKYECHQRHPRTLRGVTTYNDNKKCDSGFYYKDKLEAYVLKEISKLQDDADYLDKIFSGDNAETIDRESYKKQIEELSKKLSRLNDLYIDDRITLEELQSKSAEFISMRGTLETELENDPALRKNKRKADMRKLLNAEKVFSMDYESQKVLVRRLINKVKVTAEDIVINWKI

SEQ ID NO: 18330 - protein, 517 aa, synthetic construct
MKTIHKLARPQLPEPPKLKVAAYARVSTSSNEQLASLQTQITHYENHIQNNDQWEYVGVYYDEGTSGTKVEKRDGLHRLIKDAELGKIDLILTKSISRFSRNTVDCLNLVRKLTDIGVTIFFEKENINTGDMESELLLSILSSLAESESYSHSENMKWANRKRMAKGIFKTVPPYGYQRKGADFYLIPDEAKVIEQIFKWALEGVSAYQVAKRLNEKNIFTRKGSKWQDSGINNILHNIVYTGTMIHQRYFNDDQFRKKKNNGELPMYRIDNNHPPIISWEDYERVQELITLRANAKGTSKGSQKYSQRYVFTKRIICDKCGCNYKRVHIAGKGNTKVVKWSCTGHLKNKDGCDALPITDESLKTAYLTMLNKLILGHTIVLEPLINTPVEGKASKQELEKLSIEITKIDEKLEVLASLNASGVVSTKTALEEQGRLQMELNKLQEKQHKIMESVNGTSTQRIQLEQLHQFTKRSEMLTEWDEDLFLRFAERIVVYSRQEVSFELKCGLLLKERLEA

SEQ ID NO: 18331 - protein, 516 aa, synthetic construct
MAGKKVTVIPMKPRQWAAENTEEKPKLKVAAYCRVSTEMEEQASSYEAQVQHYTDYIQRNPDWELAGIFADEGISGTGTKKRDGFNRMIEACQKGDVEYIITKSISRFARNTVDCLQYIRQLKDLHIAVFFEKENINTMDAKGEVLLTIMASLAQQESQSLSQNTKMGVQYRFQQGQLRINHNHFLGYTKDEDGNLVIEPKEAEVIKRIFREYLEGSSLQEIANGLMSDGILTGGKRKLWRGEGVRLILRNEKYMGDALLQKTYTTDFLTKKRVKNDGSYAQQYYVENSHPAIIPRDIFMQVQQELDRRKSMKNKHSQCFSGKYALSGITVCGDCGNAYRRVHWKNRGTVWRCKSRVDKREHNCSGRTIYEKDLHEAIIKAINETLVDREYFLQQLSENINSVLTDGLTGRLEELDSKLKELESEIISMAIGGQGYDELATKILALRNERDMVGREIAADANMQQRIDEMGDFVKNHDTISEYSEVLVRRLIEKVTIFEKDIVVDFKSGVNIAIEI

SEQ ID NO: 18332 - protein, 473 aa, synthetic construct
MPADRPLRAAIYCRISLARFDDTLKVDDQERVCRELAAARGWTVAAHHVFKDNSKSAWRRDRKRPGWDAMLAAVKGGEVGAIVVYHGDRLVRQMSDLEALIDLADTKGIRLASPTGERDLDNADDRYILRIEAAGNTREVDATSRRLKRHYDRLAEKGIVRLGGRGGRAFGFEPDGLTVRETDAEVVREVARRILSGEPVGAIARALNDRGVTTTTGGPWDHGALKKLMLRPRLAGLVARHGRIVGSAAWPAILDRSTWETVCATLERKAAAFDYTTNARRYLLTGIARCGTCTEPLVVRHNTRPGLTGYGCINRDCERKVHRAIHHLDPYVTGAVIALLNDPKVREAMQPAAAVDTAPLVAQLEAQQASRQRWLLAAAENPELGPDVLAVTVRRIDQLIAELREQITAAQRPTVLDGLWGIDKAGWGELGLARQRGAVAALLRITVFASGRRGPGFDPKTVRLDPAWLDAQP

SEQ ID NO: 18333 - protein, 607 aa, synthetic construct
MKKAYSYIRYSSPQQAKGDSFRRQFSATQAYCEKNGYELDTELAVYQELGVSGVDGDQENLKRFIDDCETGKVKKGSLLIVENLDRLSRKKINKAMRQFLHLLDYVDIYTLQDQKLYSQNDDVDSETQLLDVMTSLIVMSRAYEESATKKKRLKESWDSKRKNIDNKKLTSLIPHWLELSEDRTEFRLKKDKIEIIKYIYKKSIDGMGVSQLIRHLNENLTQFPTPTHKSKLWARTSLSRILTDRSVLGEYQPHIGKHNGIGENKRKPLGDPIPDYYPQIIDEETFLKAQIARKSRVIGRGKVNRNKFSNLFRNILRCGYCDGKIEYVDKGDGSRGGKYLTCSNAKRGGDCSHNKHYKYLPLELMLLHLTTENGFMPKPEAPTDLNLRLSKLQDLNEKAESKLSFLLEEDFSIPTIREKTRELSKEIERYRSEIEELENKILTFKPDYTYSDLYQNVILEKDSVLLSSNRMTYNSYLSKKIESAYLFNDYSHFILFKMKDQHVHTVIIDEQYNFGGCSLPNNNMTHKRLNGEKTPIDEMIWQIQQNFLILIESCKDIQDKKLVNYLNRINKLISKIIVNQEIELFNQVLFQIEKAHTILEKIQTNNK

SEQ ID NO: 18334 - protein, 563 aa, synthetic construct
MMPNSARQLHDQLDQFSRTGTQKRAAIYARVSTLEQAEEGYSIDEQVRVLREMCKREGYVVHKEYVDRGKSGKNIKGRPALQQLLHDANSKDFELVLVWKVNRFSRKTKDLLNIVEELEGKNIVFRSYTENYETATPAGKMQFRMLAVIAEFERDNIAQNVKMGMLARAKEGSWNGGQVLGYDVVSVPGENRKRKLSTLVINPTEAQTVRKVFDLYVEGNGYKSIANKLNNEGHRTKKNKDFSINGVKTILSNPLYAGFIRYNVRRDWNEKRRNNINPNPVIEKGQHEAIISEETWEKAKNIMASRSGKPNRIHDGEFPLTGIMKCPACGAGMVIGRTTNTLKDGTKKVLEYYVCGAWKNKGSAVCRSNGVRTDYADPYVLEKLSNIATSDALIEQIVERINNKKERDSSPLQHEYETLKKALESNQQKKEKVLGLYEDDLIQKADLVQRLSTLNEEKERLEERLSPIELQMGQGGTQLINFSMVKQVMQNFKSAYKESLTREQRKRLMHLLIRQITISEDRKIDTIQIQLNKEVAKHFTFKGGEDSSITDEFSPPFSILINL

SEQ ID NO: 18335 - protein, 556 aa, synthetic construct
MTKAYAYIRYSRAIQATGDSENRQLTALELFETSTGTNVVEVVYDKGKSAFRGDNARSGNFKEMLDRMQSGAIRRGDYLVVESIDRITRQRVLDGVELLQGILKKGINIYTTVDKKTYSYNDPSRDFENLLMISLIAKRANEESETKSGRLLSAWKARKAKAENGEVIIKKGKSIPYGLRVEEGKFVIHKEEQEEIKQLFELLLQFGINTAITKINETSLKKWNNGTLNKVIKHKTVIGCMATHRVEYTADGKAKKILTGFIENYYPNLIEPKLFYKAIDVMANRKQKNWSGRRTEQDFNIFKHCIFCAECGGKLYYDHRGSRYKGKIYPFFKCDNARVQKHVCTADNIRFEYVLGSLLDSMKMINRIATEFKRDFKGISTQARFINPKINSLLKADGENNNLVLEEKQKQLISRRTKLDNMNTQMVEADYNVPTKFIQEISKTEKEIEALNKEILLIHSALADEGTIDVQDTKTVIDLFMTDEGRAKLNYFFKTNDIIFLVSHKKATRETRFSMRRKNELIDEKICNNYIKFPLKDILGSYGLGDLQTMFDLSVS

SEQ ID NO: 18336 - protein, 500 aa, synthetic construct
MREAAIYARVSSNEQANKDISIPAQLEKLHEYASKNNIMVVKKYIDDGISGKSTEKREQFLKMIAEAKQDPKPFDTIIYHKNDRMFRNMYDAVVYKKLLREDRNIDLICISQDIDTNTPHGMFAERMMDAVAEYYSANLAEEVMKGMNQQAKKGVALGEPPYGYSIDRETGKYKVYEPEAEVLKYVFQQYIKGNSLREIGVDLRANGVNLFGDSALLKVSKAIDNKGKHNDQKISWAPKTVRNTLSNEVYIGNYIWNDTQIENNHPAIIDKDQFELVQELLKRNKKSKKNASKDYLLKGLVTCIECEGNLSQLTQRYKPVGADKEQITRKLRCTRHVRFKDCYPNYWSMEEVEQGLVSYLKEIIRDKVDISTLQINKSNNNDFVKELNRLEKKYKNFDSRFDKQMQAFEAGVIDLEQLQGYKKRLKEEKEEIEDRIAELEETINNTSTDHEGFKQQINRLIHTLENDDTPLNKKKNILIQAITEVQLSKRQDLMRIIFKF

SEQ ID NO: 18337 - protein, 549 aa, synthetic construct
MENFDLKGFAKGKKQQKEQIGGNAIIYTRVSSSEQVDGQSLEVQIDKCREYAKVRSYTVVGEFGGTYESAKSDKERKEFNRMLAFIKQSNKKGSSQPVKTVIVFSTSRFSRTGSTTIIEEVEARGAYVVSATSNYDPRTPVGKYMQLMELANARFQNDEKRATTIENSVKALLKGRWIGKAPRGYDQKTTKKEQIITINEEGKLIRKAFLWKANNKLSNEEIRHRLEAEGLHICKQKLSELFKNPFYCGYMAHKFLQGDIVQGNHPPLISKEIFLKVNGELSKNHSGYEQKIDKEYAPLLGSIKCPCCGKNLSASISTKMRKRFGRTDIGYYVCSRKGCKYNSSTKKVHEAFEEEVNRYALSDKVSELLKMQLTITFEYMNQENRERAKSIKANIKAKEKELEQVETNYALCTDAKKQSICEKVMTKLEKEVRDLKTEFSKVNTEILNLDKFIDFAFKMRSNLFELWELQGLEGRRRLQKLVFPDGFIYDKNNEHIEPKKVNQFFLLKYSYPTGNGDKKKETNREKHDSSLRVLEAGLEPAQPLLAKGF

SEQ ID NO: 18338 - protein, 509 aa, synthetic construct
MVQRKQAISYQRFSSARQRNNSSLDRQSDSIKHWLKQNPDVDLIDQYVDEAMSGWSGKHIEQGSLGKLLQAIEEGIVQAETLILVEHFSRLSRQNIDKTEELLRKIWQHGITIVTIRDNGLYPPSTINDMPLRIRLIVEIEQAFKESEWRSAKVKGSYVKREKDAKNGVTPRMRRPFWLNKDGTLNDHHLVIKDIFNWYMEGLGQQRIIVKLKEKYQSVPSVQKMNPQTVMRWLTSDIVRGLWRGCKVYEAAVDDTLYFNVQTVHNSRMYHNVKPDRNWPLSGLLQCGVCGRGMSIQKSKDSLPVIRCSSKQRDQSCQRKTTFPYALVHLYMFNTVRKRASRLYTQKTVTKENALRLGHIDNDLVKLRKQIKEEKQLYDEASSEGKSGRLILKIMLETDERIQDLERERDSIQSSIEASNNLFISDEANNLVLTPRNFNLEMHKLGFKIVVGEYSLNTEGLSDKAPEWQYLGYSRKKRAYEWEVLGKTYFMPTASFNEDVLMLEDKEEI

SEQ ID NO: 18339 - protein, 593 aa, synthetic construct
MARKKSKLNDNNLAIAYYRYSSHSQNEASIEQQRELAHEWADAHGLKIVREYEDAAISGTKEDRPGFQLMLSEVAKIRPNTLIAWKTDRLGRDKYVLAMAKKTIRDAGCEIHLLAENIPTDTAEGILIEGLMEALAEYYSRNLSVHIQRGMDFNAEHANFNGHKVFGFKTEKVDKKRKYVIDPDTAPFVQLMFTKYAEGEPMQSICDEFNEAGLRTSRGNPFGVKTMHRMLKNRAYIGEYRHGEFVVPGGMPALVDGETFDRAQKRLAENKRKGSQRARGMDEDGAPRYWLTGKLYCGECGETMQGVSGTSKTGRTYYYYYCSAQRKKLCTKKKVKKDWIEDLVTDVLRHIIDDSENLMSLAVDAAVYYKEHYKETGYLEGLEAKRKEVEKGIANLMKAIEGGALSDTLIERLNQLEAQKASLNDAIQAENVKVSLCEDEHSIKAYFEKFLHADFDNPETRDKILEYFVDKIYLYDEKLVVTSWYSEDKTEITWDMLKGADGDPFVKGEAAEFDCFPLGSTKKVPCLRHFLLYDNKFYGRGLLGFPFFYYIFQHVDEIMNRVQLYIALENTVFKIDGQRFKFIPNLWSYIRRH

SEQ ID NO: 18340 - protein, 537 aa, synthetic construct
MKQQIYNTALYLRLSRDDELQGESSSITTQRSMLRSYAREHHLNVIDEYIDDGWSGTNFDRPDFQRMIADIEAGKINCVVTKDLSRLGRNYIMTGQYTELYFPSHNVRYIAVDDGVDSEKGESEIAPFKNIINEWVARDTSRKVKSAFKTKFAEGAHYGAYAPIGYKKHPEIKGKIIPDDDTRWIVEKIFSLAYQGNGGAKITKTLIEEKVPTPSWINYQRYGTFAHIFANAPESKRYAWTIAQVKTILKNEVYIGNSVHNKQSTISFKNKKKVRKPESEWFRVENTHEAIIDKDVFYRVQELIKSRRRQRKNKETQIFAGLVKCADCGWSMRFGTNTANKTPYSYYACSFYGQFGKGYCSMHYIRYDVLYQAVLERLQFWARAVQQDEEMVLKKIQKAGNAQRLQTKKKAETALKKAESRQKEVDRLFLKMYEDRASGKITERNFVMLSSRYQQEQIELEEQTASLSEEIRKMEQEMIGAEKWVELIKENAVPKELTATLLNAMIEKILIHAPEIDDKGERTQEIEIYYRFIGKID

SEQ ID NO: 18341 - protein, 520 aa, synthetic construct
MPYLMYLRKSRADVEAEAHGAGDTLARHQDELLRAAKRLNLPVSKIYREIVSGDSIAARPVMQQLLDEVERGMWEGVLVVEVERLARGDTIDQGIVAQAFKLSHTKIVTPAKIYDPNNEFDEEYFEFGLFMSRREYKTINRRLQRGRVASVMEGKYTGNIPPYGYTRVKLQNEKGWTLEPDPDEAETVRLIFELYTLGATDSDGTTTRLGSKKIANRLNDLHIPTRKGGLWTYNSVVAILENPVYCGQLRWNRRPGVKSISGGDVKISRPKKRDYIVTQGRHEPIISRETWDAAQENIAHNPPIRFDAHKQMRNPLAGLLVCGVCGHMMVRRPYANRQASMICQYPGCPNVSADLPLILAKVRTSLQEWLEEYRLSIEGVHDKKPAGIEAAEKSVRRLEKELATLDHQLSKAHDLLEQEIYSVEIFLSRTQSISSRRQELQNQLDELQHEADTYRQAEAGRKKIIPKVENLLNVFDSTMDPAQLNQLLKEVIDKIVYTKARGGRHGDPSDFKVDLFMRLP

SEQ ID NO: 18342 - protein, 496 aa, synthetic construct
MEEIDLYLRKSIIVREGTKALTFRTQEERGRGWAARNGYTVRKVWKDNLSAWTDTKRPDFDKALTALRRKEVPALWCYAVDRFDRKGAGSVIRILDAGARLIFDYERLDSADPRDRERIISDAERAKAASDLLSHRVRDTKQGQRRRGEWVGAAPYGLRKDKSGKLHHGAHWGKIIRVLTEVAEGRAPRSVARRMTTDKIPSPKGGQWGASTVRRIVYNPVYEGWQVVALSRAYTWPVAYRNEDGERVRVFADGVEPVPADLVAKARRVHAGHQRGALGPRSGKATHLLTDLLRCAGCGARMPTSGRSYVCNSHAMGKLCPAPASAMRQLIEEYVYGEWLHTVSRADVEAGDPLMIAVAERWAALTAPEETEEAHEALAAVKAAEAALERLANDRAKGLYDGAMGKHFPRLVTEAEETLTNAQTRYGQFSGGVVDLTMFDDTEMLAEAWSAADLPMRRDLIRVAVDRITVTQAPRRGGTFNGDARCAIRWAAPEET

SEQ ID NO: 18343 - protein, 608 aa, synthetic construct
MNKTAVIYLRVSTKEQAERGGEIEGFSIPAQRDACLRKAASLGAEVVAQFVDAGESARSADRPELQKMLRFLREQSCDFVVVHKVDRLARNRVDDVTINVAIRKAHAELVSATENIDETPSGMLLHGIMSSIAEIYSQNLANEVLKGMEQKAKTGGTPGKAPLGYLNVRVTTDDGRELRTVKVDPDRAPMITWAFKAYATGDWTLKRLATELERRGLTTRTTPRSPARPIKFNSLHKILCTPYYKGEVTYRGVRYAGRHEPIIDEATWMRVQDVLSSHAVGEKQREHPHYLKSSVFCGICGSRLIVTMSKNRYGDVYPYFICLGRHQKTTDCTQRAVLIPVVEEGVEEEYRHRRLDPGLRDQIEAMLRDELSEAQRSAEAENSQLVPQKERLTNERSRLLQAHYAGAVPLDLLKSEQDRISRQLSEVDARLASVNAEFDQIESALHRALDYAVNGYQAYMRAMPHERRLLNQAFFTRIEVRDDDTDAELAEPFRALLSPEVAHAARRHAESVEMPSRGDEVGESVSLTDILERETNKPAPSGAGLKDTTLVLLMGFKPILDGPLNRCLCQGGLEGACGSCTRTCRRESAIALNASRFLPPSAYCCGAC

SEQ ID NO: 18344 - protein, 503 aa, synthetic construct
MTDPKPLRAVLYVRLSKESARSTSITGQTDDLSVIAERAGWDVVATFTDNGKSGGKERENAQAAYDLWARGDADILAVYAYDRWSRMGIKTLAALIEVVDARAKTPHPATFIAAREGIESTQPDWQLRAAFAADMAKRERDLVSSRQTAARDRMRRQGRNAGHGVPPFGYRTGPHPTLPVGRGLHVIPEEADVVRELAERLIAGESTVKLADELTKRGVATAHSEARRAALAGLPVDGLDRGRWKAGRLGKTWTSDHLLGRISNNGAPLLDESGEPLAPFEPILTLETVLAIRDRFTPDKQGQLYRRASGLLSRMAFCSGCDRPLYPRRTSVSERNPDGYINYGCSAQAAGVSCAAKVTISARKLEAEVVSRYLAARGELPETRVVSYLSGGAPAGELSALEARLKELAGRLAAADDEEELEALTSAMATLRARRKSLRGQLAIPAERVEATGRTWAEAWNESPERETRRRMLLHLIDHVVVHPVSASKRVVIYWQPERQPPE

SEQ ID NO: 18345 - protein, 528 aa, synthetic construct
MRTVIYARFSSDNQNPRSTADQIALCRKRAADEGWTVIGAFEDAAISGAAGIGADQRPGLNAMMRMVEAGGVDQVLAESTDRISRHVADAHILRERIEFAGARLFTLFDGAVTPMIGLIKGFTDAQFRTDLAKRVRRGQIGTLKQGRIPGSIAYGYRQANRLDDRGQIVRGLREIDPDKADIVRRIFREYAAGRSPNAIAAGLNADGVAGSRGGIWHETAISGDTRHKRGILRNETYVGVVTYGRSRTVVNPQTRQRLMRPNGEDVVERQEIAHLRIIDDDLWQQVQARLASNQGVRPERQRRPKHILSGLGVCEACGARWVLRSSKFWGCSNYRYGKACTNNRLVGTHIFERMVLDDLKEGMLSPDVVSAYVREYHRDFARQSADMGRDRAKLERKLEEAERRMKRMLQAFTDGGSEFEEIRDMLTSARADKEALQRQLASMDAVPNVLALHPHVEEVYRRQVEELEAALADPEAQLEAIPRLRSIISSIIVRPRLDRQRGVVVQVVRQMDEILSIATGGQQFSQLR

SEQ ID NO: 18346 - protein, 508 aa, synthetic construct
MKKAIAYMRFSSPGQMSGDSLNRQRRLIAEWLKVNSDYYLDTITYEDLGLSAFKGKHAQSGAFSEFLDAIEHGYILPGTTLLVESLDRLSREKVGEAIERLKLILNHGIDVITLCDNTVYNIDSLNVPYSLIKAILIAQRANEESEIKSSRVKLSWKKKRQDALESGTIMTASCPRWLSLDDKRTAFVPDPDRVKTIELIFKLRMERRSLNAIAKYLNDHAVKNFSGKESAWGPSVIEKLLANKALIGICVPSYRARGKGISEIAGYYPRVISDDLFYAVQEIRLAPFGISNSSKNPMLINLLRTVMKCEACGNTMIVHAVSGSLHGYYVCPMRRLHRCDRPSIKRDLVDYNIINELLFNCSKIQPVENKKDANETLELKIIELQMKINNLIAALSVAPEVTAIAEKIRVLDKELRRASVSLKTLKSKAVSSLGDFHAIDLTSKNGRELCRTLAYKTFEKIIINTDNKTCDIYFMNGIVFKHYPLMKTISAQQAISTLKYMVDGEVYF

SEQ ID NO: 18347 - protein, 345 aa, synthetic construct
MRRGISYIRFSSERQLKGDSVRRQSKLVTDWLDKNPEFYLDSSLSFKDLGKSAFSGKHLKGGLGDFLTAIEKGLVKAGDTLLIESLDRLSRQDIDIASELLRRILRAGVDVVTLSDGEHYTKESLKDPLSLIKSILIMQRAHEESLRKSERVQAAWNRKKELISEGIKISRRCPAWLKLNDDRRTFTIIPDKVEVVKRAFDLRLQGLSFWAITRTLNDEGHLSLNQYTPKQKGWSDTAVKKLLRNRAVIGCFTPAGREEVQGYYPAIISESLFYRVQQLNTGQYGRASVSSNLNRPGFPGECFICELRLPDHRFRWKHNKLFLLLPEEYGPAFPAIVDCYTSPPT

SEQ ID NO: 18348 - protein, 508 aa, synthetic construct
MKKAIAYMRFSSPGQMSGDSLNRQRRLIAEWLKVNSDYYLDTITYEDLGLSAFKGKHAQSGAFSEFLDAIEHGYILPGTTLLVESLDRLSREKVGEAIERLKLILNHGIDVITLCDNTVYNIDSLNEPYSLIKAILIAQRANEESEIKSSRVKLSWKKKRQDALESGTIMTASCPRWLSLDDKRTAFVPDPDRVKTIELIFKLRMERRSLNAIAKYLNDHAVKNFSGKESAWGPSVIEKLLANKALIGICVPSYRARGKGISEIAGYYPRVISDDLFYAVQEIRLAPFGISNSSKNPMLINLLRTVMKCEACGNTMIVHAVSGSLHGYYVCPMRRLHRCDRPSIKRDLVDYNIINELLFNCSKIQPVENKKDANETLELKIIELQMKINNLIVALSVAPEVTAIAEKIRLLDKELRRALVSLKTLKSKAVSSLGDFHAIDLTSKNGRELCRTLAYKTFEKIIINTDNKTCDIYFMNGIVFKHYPLMKVISAQQAISALKYMVDGEVYF

SEQ ID NO: 18349 - protein, 506 aa, synthetic construct
MRHVITYLRYSSATQGAEGADSTRRQNELFKQWLRKNSDAQVVASFNDEGLSGYKGKHLSGQFGDMLSRIESGEFSKGTILLVEAIDRIGRLEHLETEALMNRIIAHGIEIHTLQDGLIYTRDALSDDLGISIIQRVKSYIAHQESKQKSFRVSQKWEQRAKLALAGEQRLTKMVPGWIDPDTFKCNEHAETVRLIFKLLLDGESLHNIARHLQSNDIKSFSRRKDANGFSVHSVRTVLRSESVIGTLPASQRNDRPAIPNYYEAAIDAATFNKAQEILGKNRIGRTPASDNPLTINIFKGLFRCQCGASVHPTGTKNKYQGVYRCNNHLDGRCDVPPLKRKPFDKWMIDNFLGMIDVGNDGEAEGKIASLQHEVEIVTTRIKKATALLLEMDDITELKAQVKELNQKRTELQTTIDSMRRKTSLSDKGLPQLKDIDLMTKAGRVECQLILSKHLKGLTLGKDTVTVTLQNDTEITIPTDPLPLNDGTSIFEIAEKNLLNIDTFQL

SEQ ID NO: 18350 - protein, 506 aa, synthetic construct
MRTVITYLRFSSAIQGAEGADSTRRQNDLFKQWLRKNSDAQVVASFSDEGLSGYKGKHLTGQFGDMLARIEAGEFPAGAILLVESIDRIGRLEHLETEALMNRIIAHGIEIHTLQDGLIYTRDALSDDLGISIIQRVKSYLAHQESKQKSFRVSEKWKQRAKLALAGEQRLTKMVPGWIDPDTFKCNKHAETVRLIFKLLLDGESLHNIARHLQSNDIKSFSRRKDANGFSVHSVRTVLRSESVIGTLPASQRNDRPAIPNYYEAAIDASTFNKAQEILDKNRKGRTPASDNPLTINIFKGLFRCQCGASVHPTGTKNKYQGVYRCNSHLDGRCDVPPLKRKPFDKWMIDNFLGMIDVGNDGEAEGKIASLQHEVEIVTARIKKATALLLEMDDIDELKIQIKELNQRRTELQTTIDSMRRKASLTDKELSQLKDIDLTTKAGRVECQLILSKHLKGLTLGKDTVTVTLQNDTEITIPTDPLPLNDGTSIFEIAEKNLLNIDTFQL

SEQ ID NO: 18351 - protein, 558 aa, synthetic construct
MSKEKIKVYLYTRVSTSIQIDGYSLEAQKSRMKAFALYNDYEIVGEYEDAGKSGKSIEGRVQFTRMMEDIKSGKDGVSFVLVFKLSRFARNAADVLSTLQIMQDFGVNLICVEDGIDSSKDAGKLMISVLSAVAEIERENIRVQTMEGRIQKAREGKWNGGFAPYGYQLIDGKLLINEEEAIAIRTIFDQYVNTSIGANGLSKYLENHGIRKIPRQNGKNPLFDAGLIRKILKNPVYNGKIAFGRRTLEKVHGTRNEYRQVEQDDYLVAEGIHEAIIPDELWQAAQVKLKAQAKKYEHVNKGKNMRTHLLSGIVKCPICGAGMFGNKSIKYKKDGTKYKDFYYYGCKHRLMNRGHKCTYNKQIREELLDDAVAEVIIKLVSNPKFASMMQEKINMKVDTSAIENEIDNYQKELRKSHSTKFKLIEEIDNLDVDDKHYKRRKQDLDDRLYRMYDKIEELEGQLIEAKAKKETIEAEKLTGDNIYKVLIYFDKLYKVMNDVERRQLIEALISEIQIYEEKQPNGQWLKSITFKLPIIDEDLNISLDNDEQVECVVLLIKE

SEQ ID NO: 18352 - protein, 558 aa, synthetic construct
MSKDKIKVYLYTRVSTSIQIDGYSLEAQKTRMKAFALYNDYEIVGEYEDAGKSGKSIEGRAQFTRMMEDIKSGKDGVSFVLVFKLSRFARNAADVLSTLQTMQDFGVNLICVEDGIDSSKDAGKLMISVLSAVAEIERENIRVQTMEGRIQKAREGKWNGGFAPYGYQLVDGKLFINEEEAVAIRTIFEQYVNTAIGANGLSKYLENHGIRKIPRQNGKNPLFDAGLIRKILKNPVYKGKIAFGRRTLEKVHGTRNEYKQVEQDEYLIAEGIHEAIISDELWQAAQVKLKSQAKKYEHVNKGKDVRTHLLSGIVKCPICGVGMFGNKCIKKKKDGTKYKDFYYYGCKHRQMIRGHKCTFSKQIREELLDDAVAELIIKIVSNPKFASIMQEKINMKVDTSEIEKEIDNYQKELRKSHSIKFKLIEEIDNLNVDDKHYKRRKQDLDDRLYRMYDKIEELESLLIDAKAKKQTIEAEKLTGDNIYKVLIYFDKLYNVMNDVERRQLITALISEIQIYEEKQPNGQWLKSITFKLPIIDEDLNISLDNDKQVECVVLLIKE

SEQ ID NO: 18353 - protein, 452 aa, synthetic construct
MKAAIYIRVSTQEQVENYSIQAQTEKLTALCRSKDWDVYDIFIDGGYSGSNMNRPALNEMLSKLHEIDAVVVYRLDRLSRSQRDTITLIEEYFLKNNVEFVSLSETLDTSSPFGRAMIGILSVFAQLERETIRDRMVMGKIKRIEAGLPLTTAKGRTFGYDVIDTKLYINEEEAKQLRLIYDIFEEEQSITFLQKRLKKLGFKVRTYNRYNNWLTNDLYCGYVSYKDKVHVKGIHEPIISEEQFYRVQEIFSRMGKNPNMNKESASLLNNLVVCSKCGLGFVHRRKDTVSRGKKYHYRYYSCKTYKHTHELEKCGNKIWRADKLEELIIDRVNNYSFASRNVDKEDELDYLNEKLKIEHAKKKRLFDLYINGSYEVSELDAMMADIDAQINYYEAQIEANEELKKNKKIQENLADLATVDFDSLEFREKQLYLKSLINKIYIDDEQVTIEWL

SEQ ID NO: 18354 - protein, 516 aa, synthetic construct
MAGKKVTVIPMKPRQWAAENTEEKPKLKVAAYCRVSTEMEEQASSYEAQVQHYTDYIQRNPDWELAGIFADEGISGTGTKKRDGFNRMIEACQKGDVEYIITKSISRFARNTVDCLQYIRQLKDLHIAVFFEKENINTMDAKGEVLLTIMASLAQQESQSLSQNTKMGVQYRFQQGQLRINHNHFLGYTKDKDGNLVIEPKEAEVIKRIFREYLEGSSLQEIANGLMSDGILTGGKRKLWRGEGVRLILRNEKYMGDALLQKTYTTDFLTKKRVKNDGSYAQQYYVENSHPAIIPRDIFMQVQQELDRRKSMKNKHSQCFSGKYALSGITVCGDCGNAYRRVHWKNRGTVWRCKSRVDKREHNCSGRTIYEKDLHEAIIKAINETVVDREDFLQQLSENINSVLTDGLTGRLEELDSKLKELESEIISMAIGGQGYDELASQIFSLRDERDAVAKQIAANTNLQQRVDEMVVFVKEHDVINEYSEVLVRRLIEKVTIFEKNIVVDFKSGVRVTVEI

SEQ ID NO: 18355 - protein, 452 aa, synthetic construct
MKAAIYIRVSTQEQIENYSIQAQTEKLTALCRSKDWDVYDIFIDGGYSGSNMNRPALNEMLSKLHEIDAVVVYRLDRLSRSQRDTITLIEEYFLKNNVEFVSLSETLDTSSPFGRAMIGILSVFAQLERETIRDRMVMGKIKRIEAGLPLTTAKGRTFGYDVIDTKLYINEEEAKQLQMIYDIFEEEKSITTLQKRLKKLGFKVKSYSSYNNWLTNDLYCGYVSYADKVHTKGVHEPIISEEQFYRVQEIFSRMGKNPNMNRDSASLLNNLVVCGKCGLGYVHRRKDTVSRGKKYHYRYYSCKTYKHTHELEKCGNKIWRADKLEELIIDRVNNYSFASRNVDKEDELDSLNKKLKREHTKKKRLFDLYINGSYEVSELDAMMSDIDAQINYYEAQIEANEELKKNKKIQGNLADLATVDFDSLEFREKQLYLKSLINKIYIDGEQVTIEWL

SEQ ID NO: 18356 - protein, 452 aa, synthetic construct
MKAAIYIRVSTQEQIENYSIQAQTEKLTALCRSKDWDVYDIFIDGGYSGSNMNRPALNEMLSKLHEIDAVVVYRLDRLSRSQRDTITLIEEYFLKNNVEFVSLSETLDTSSPFGRAMIGILSVFAQLERETIRDRMVMGKIKRIEAGLPLTTAKGRTFGYDVIDTKLYINEEEAKQLQMIYDIFEEEKSITTLQKRLKKLGFKVKSYSSYNNWLTNDLYCGYVSYADKVHTKGVHEPIISEEQFYRVQEIFSRMGKNPNMNRDSASLLNNLVVCGKCGLGYVHRRKDTVSRGKKYHYRYYSCKTYKHTHELEKCGNKIWRADKLEELIIDRVNNYSFASRNVDKEDELDSLNEKLKTEHTKKKRLFDLYISGSYEVSELDAMMADIDAQINYYEAQIEANEELKKNKKIQENLADLATVDFDSLEFREKQLYLKSLINKIYIDGEQVTIEWL

SEQ ID NO: 18357 - protein, 556 aa, synthetic construct
MATAVIYLRVSTKDQAQRGGESEGFSIPAQRDACEKHAKTLGAEVIMEFIDAGESARSADRPELQLMLKFLQRQACDYVIVHKVDRLARNRVDDVEINLAIQRSGAKLVSVTENIDETPSGMLMHGIMSSIAEFYSRNLATETRKGLAQKVKNGGTPGMVPFGYLNIRTRTPEGYEVRTVTVDPDRAEHVRWIYDAYGSGEWTMTQIREELERRGVTSLPRPKRPAKPMTVSHIENILSNRYYLGFVKFEGAWHPGRHEPLIDEETWERVQAVRAGRVRTREKPQQHPHYLKGTLFCGHCGDMLGVEIVRNSTGTRYPYFYCLGRKTRRRECSFKAVAISAVEALIEEHWATRELPATMQTAIREDVVAYLDVLLPYRDKRVRAAERQMKRLTDERDALLRAHYAGAVPLDQLRSEQERISSALASAQRELTDRQLTRDQLQGSLNNAIGLLNDSHSLYLGSHSRERRAMNQAVFDRLYIYDEAVDAQLSDLFELLLAPDLKERLDEELTYLTAQDRESTANTSKSSNLRPDYQDTSSNFRTLVAGTGFEPATSGL

SEQ ID NO: 18358 - protein, 479 aa, synthetic construct
MAKMKSAGQRAGVRSAAIYARISADVEGTGLGVARQLEDCRKLSADRGWPVGDEYVDNDVSAFSGKPRRQYARMLADLASGARDAVIVYNLDRLHRRPVELEEFVALCESVGVRDVATVTADIDLGNDDGLFMARIFAAFAAKESGRKSARIRRKMLQNAEQGLPHGSVRPFGYEDDKITLRTSEAAVVREMVDRYLAGQSLLSLTVWLNDSGVSPAVAKSWQTSAVRQILCSGRIAGLREHRGEVIGPAKWPAIITPAERDRILARIAARSVTKTRAARTYVLSGMLRCGRCGNRLYSQARHSNPDHRVRRYVCLKGPDHGGCGRLTVVAEPVEALLTDAVLTRLDSRDLAKVLAGKASPNHDVAALAAAVEADQSRLDELAGLYADGAISAREWIAARDPITSRIQQARRHIAEATDTSEVYELAGTGGALRGQWPDLDVERQRSIVKSILDHAVIAPGTPGSRSLDINRVQPHWRI

SEQ ID NO: 18359 - protein, 454 aa, synthetic construct
MYTALYLRVSTMEQADNNFSLAAQESKLRAYAEAKTLSNIKVFTDPGYSGSNMNRPALAQLLESVKRNQVSNILVYKLDRLSRSQKDTLNIIEDYLLPHDTNLISLSESFDTSTSFGRAMIGILSVFAQLERENFKERSRMGMIQRAKEGKISGYGGKVFGYDYVNGELIINDYEAMIVRKIYDYYVKGSGVTKIFMRLQKEHPNVIKSSHHIWQILRRRTYTGDFDYMDESYEGIHEAIIDKSIYDQVQVLRDSRNSKQKSDAVYMLTGLTYCKCCGYKMQGTVSSSTYKDKRYERRYYKCNTNKRNKVNHNPFRCNTKSIKKDELEHAVISQIKALDIDLKIDDIQTNTIDDKAIDKRLNELEKQSEKLLNLYIEDSISKSILDKKLEEINAEKEALQNTEIEENQSKLQALELAKEFNFDEATDYELQNLIHLLVKRIDVDNSSVDIQFVV

SEQ ID NO: 18360 - protein, 479 aa, synthetic construct
MGVAEDLDISAGKTTPFNRPQLGKWLKRPGDFDVIVFYRVDRIVRRLFDLSDLIKWTRDHRVTLVSATESHFDLSTEWGDVIALLVAKVAEMELAAISERNRSAAQHNLRVGKYRGGPAPWGYMPVHTDEGWKLVQDPEQVVVIHEVVERVLSGEPLRSVAHDLTERAVLTPRDRFAQLRGREVKGYTWHPGGLKRALTSPTLLGRIAVTDTSKGAEDRSEAALIVSDDGTPFTRCEPILSRDVFDRVGVELAGRENRKEPTKRSTSLLLGIIHCDVCGKPAYKLKGGEGRKPRYRCASAQYKNPCANRSIPLDLAEHHVEQNIMSAFGDMPRMVRVWSPGSDHSPELAEVNATLADLTDQLGTPAFRRGTPQRARLDARIEALTTRQAELSSKPTHPAGWTYEPTDDLVKDWWASASIEERNVWLRQMGFRVVWRSHSEGTRTVVDDFKMSGSVADLERFVEDSEWTVDVESLTAGRG

SEQ ID NO: 18361 - protein, 498 aa, synthetic construct
MKQQLRAVVGSRVSHLDDDKATTRKVSHKAQTEEGERWAKTQGYEVVGAFEDLGVSAGKTTPFERPDLGKWLAPERLHEWDVLVFSKIDRAFRSTSDCVDFARWTKENRKILAFSGDGVVLDYLHPKGESLDQMMSEFFIYVGSFFAAIELNRFRTRATDRLSYLRMTDRVSHGVPPLGFRTVPHPSGQGKALERDPEGYALLHEIKDKLLHENYSLTGVVQWLNETGRQTAVAKARKGDAKWSVTSLKRTLTNERTQGLRMSGGKAVLDSQGIPIRMAEPTFTDDEWEQIQQAVNQRSTSGRARYMTDNPFAGIVYCVCGYAVAQHRRKSSSGKEHTYVRCGQGCRGAWKLADVHEQLDISFLAGYGEQEMSKLVFVPGEDRSDELAGIERSITRLRWESDNDLVDDEDLYQSRMASLLSRKREIGQIVVPARWERQGTGKTYRELWADPDTDRRQVMRDARIRLVLHFIPKGSDVPFVTHAHFVDMWNPKEEPKAL

SEQ ID NO: 18362 - protein, 402 aa, synthetic construct
MKQIKTIQAQKVTTIKRLKVAAYTRVSHTSLLQSLSNQISHYSQMIQANPEWDYVGVYSDSAISGRSQAHRRDFQQLLEDCHKGKIDLILTKSISRFGRNTVELLETVRELKRLGISVRFEKEKIDTLTAEGELLLTLLASMAQEESQSISQNIRWRVKKRFEEGKPYIPQDIFGYRWNGEEYMIEPHEASIVRQVFEWYMEGLSAPKIAKRLDDRGERTRLGNRFTQRVIYNMFDQEAYCGRLILQKTFRDHFSSRSIPNDGQMAKYIVENAHEAIVTPEYFQLVNQEKKRRARRRVSKHDALARLQGKVYCEHCGLDMILTLETKSNQEKRVRYYCRTRDGKGVEACLGRTVTEEQLFQAFGESINIEDIHHISFNSVTNEAKVTYRNGKEKHVIIQKGR

SEQ ID NO: 18363 - protein, 523 aa, synthetic construct
MNENVTLIPARIRAGNRITRQENKPKLRVAAYCRVSTDSDEQAGSYDVQVKHYTEYIGRNKEWELAGIYADDGISGTNIKKREGFIEMIDDCMEGKVDMIITKSISRFARNTIDCLKYVRKLKEKNIAIIFEKENINTLEASGELLLTIMASLAQQESASLSQNIKLGLQFRYQEGKVQPNHEHFLGYTKDEDGKLIVDENEAKIVRRIFREYLEGASFRDIANGLEKDKIRTGGKRYKWHLSTIRGILRNEKYMGDALLQKTITTDFIEKIRIKNDGTVPQYYVKDSQEPIIARDIFMLVQEEMIRRANLTSGVDGKKKRVYSSKYALSSICTCTKCGDIYRRIAWNNRGKKSTVWRCCTRVEHGPSACNALTIQESELQDATVKAINKILICSDRMLQILSDNIEMAIADDNSVEMEKLNGILKGKQKELVKLAHAKKDYTALADEIDILRDKKKELQVQRAETEGVKKRIEELTDFLKGENHQLIEYDECMVRKYIEEIKVYEDKFTICFKAKVEIEVVR

SEQ ID NO: 18364 - protein, 637 aa, synthetic construct
MDKDWNGLADLIANLITKYAGVLDLDNLPDPMPVDNNIENKNIFDIAKTQIDKNKSDIIYLIYKSKLFWKYKDIEKYIEVNAMSKEKIKVYLYTRVSTSIQIDGYSLEAQKTRMKAFALYNDYEIVGEYEDAGKSGKSIEGRVQFTRMMEDIKSGKDGVSFVLVFKLSRFARNAADVLSTLQTMQDFGVNLICVEDGIDSSKDAGKLMISVLSAVAEIERENIRVQTMEGRIQKAREGKWNGGFAPYGYQLVDGKLFINEEEAVAIRTIFEQYVNTTIGANGLSKYLENHGIRKIPRQNGKNPLFDAGLIRKILKNPVYKGKIAFGRRTLEKVHGTRNEYKQVEQDEYLIAEGIHEAIISDELWQAAQVKLKSQAKKYEHVNKGKDVRTHLLSGIVKCPICGVGMFGNKCIKKKKDGTKYKDFYYYGCKHRQMIRGHKCTFSKQIREELLDDAVAELIIKIVSNPKFASIMQEKINMKVDTSEIEKEIDNYQKELRKSHSIKFKLIEEIDNLNVDDKHYKRRKQDLDDRLYRMYDKIEELESLLIDAKAKKQTIEAEKLTGDNIYKVLIYFDKLYNVMNDVERRQLITALISEIQIYEEKQPNGQWLKSITFKLPVIDEDLNISLDNDKQVECVVLM

SEQ ID NO: 18365 - protein, 476 aa, synthetic construct
MTTERTAIVYVRLSSHRGEADPSTSPERQEAACRAYAAAKGWHVIDVVRDLDVSGSDKGLRLDRPGLHAIRDRWADVDVVIFAKLDRLARNVIDFRAFADEAEQHGAALVSVAESLDLTTPSGRFVATILAAFAEMEAATIAARVADGIDGVRRAGRFAGGNVPYGYRTAANPDGPGRVLVPDPDESAVVRQLVATVLDGGSLYAAAQDLNARGIRPRRAKEWSIQSVRQLLVGDAILGRVVHRGDVLRGDDGLPVVAWTPLVTVDEAMRLRAALAPKPAGERRRRAARLASGLLRCSGCDAPLRVGVNGAGVPTYRCATRSSGRLCPSPVSVNADAVDDLLTAELLATVGRFEVVDVITSAPEVAGLAEVEEAIRATAARMADPSADVPALVERLTALRARREELAAQPAAPTTTAVPSGETFAERWARVDVDGRRALLADAIAAVVVRPGVRGRRGVDASRLRIDWREGGGDAD

SEQ ID NO: 18366 - protein, 626 aa, synthetic construct
MRNEKITPLYERLSRDDELQGESNSISNQKQMLEDFARRNGLPNPTHFTDDGISGTRFDRPGFLAMMEEVEAGRVEAIVIKDMSRLGRDYLKVGQVMEVLRQRGVRLIAINDGVDSLKGDDDFTPFRNIMNEFYARDTSRKIRSVFKSKGMSGKHLTGTVIYGYLWDEKRKHWLVDEEAAEVVRRIFSLTLEGYGPYQIACKLSTDRIEIPVVHLARFNEGVNRSKPVKDPYGWGSSTIVNILKKREYLGHTINFKTRKHFKDKKSHYVSEDEWTIFENTHEAIIDQQTFDLAQKIRSNVRRYPNGWGEAAPLTGLLYCADCGGKMYVHRTNNGRRISQYTCSNYTKVPCGTLCPTQHRINESAVLTLVSDTLRAIAEYSRNDRTEFIHTVQETQVAQQSADISKKRRRLAAAQKRAGELEKLICKIYEDNALGKLPDARYRALDAQYAKEQDALEIEIAELEKAVTGYEQSQKSAEKFIALIDKYENFDTLTNTMLNEFVEKILVHERARKGSQDTTQEIEIYFNFLGRYIPPSLQPVPLTPEEQEELQKKEERKDRLHQNYLKRKASGAQKRYEDKIKAKKKAEMDAKKALIRAEDMKKGVFSTVGQLPKEEPRKGSIAASAAV

SEQ ID NO: 18367 - protein, 514 aa, synthetic construct
MHIRRYTNELPTHKYCIIFGQPLQAEHSFLAGCIFYTHFVRRRTYTKEGDMMTNKIIRCALYIRVSTAEQCMHGKSLDAQESYLQQYASDHNMIVVGVYADEGKTARKELKKRKAIHSLLEDVKAGKIDVILFWRLDRWFRNMSDFYKVQDILDEYGVRWMSASEPGINMETRDGRLQLNVVLSIGQNEVDTTSERIKFVNEASIRQGKLIFGDANMGYGYKSGIVDGRKCMVKDPEREETVNAFYKYFFKHQNKCATLRYIQDNYDPNFSWAIMRTLLSSEFYKGTYRGFPYCPPYLTEDQWNELQKIAHKNIKRAKSGRIYLFTSLIRCPVCGQLLCGTGCKSIINRKTREKRDYCYYRCSRAHNDRICTYRHRLSQNLIEQYLLDNLDTEYRKYQIRVKKIEEKKKKIAQTKTPEKLNAELERLNLLFQKGRVEWDYYSSEYDRIEQELKCLSKIKPEVKRDLSFLEDLLQSDFKTLYASLSPENRRAFWRSTIKQIHLNEDSTIKFVDFL

SEQ ID NO: 18368 - protein, 544 aa, synthetic construct
MAETAKKISMIPAKVQYDRNVKLSEKKMKVAAYCRVSTELEEQDSSYEAQLEYYTSKISENENWKNAGIYADDGKSGTNTKKRADFNAMIQDALAGKIDMILTKSVSRFARNTVDSLVTIRKLKEKNVAVVFEKEGINTLEGTGEILITILSSLAQEESRNISENIRWGVVRKFEKGKVIVNCTKFMGYTKNEDGDLVIVPEEAEIVKLIFRLYLEGYSTGKIAKHLEEQGIKTATGQDKWHSTVIDKMLRNEKYMGDALLQKTYTVDFMTKKKVKNTGIVPQYYVEDDHEAIIPKELFYRVQEEMMRRASLCKAAVIRKKNQRSRYSSTYALTGMLICGKCGQEYRRVTWARNGKKKVVWRCSNRLTNGVKKCGESETLEENALNRAVMEAIHRITSDDMEFMENFRQNIIHVIGNYSTAKESEEYEEKIKEKQEEMVALIAENAKTGSYTPEFDERYRTIAEEINALKEAQKTARNEKWMADSYEQRIQDIDHYLSTSTCQIQEFDNDLVRRLISTIKVESSEKLLIQFQSGIVMEQEIRYE

SEQ ID NO: 18369 - protein, 538 aa, synthetic construct
MAKKVTVIKAAKEQKHTQEERRLKVCGYARVSTGSQAQATSYTAQVEYYTEKIESNPLWEFAGVYADEGISGTNVKHRDEFQMMISDCEDGNIDLILTKSITRFARNTVECIQTIRKLKEIGVGIYFEKENINTLSEKSELFITILASVAQGESENISSNNRWAIQKRFQDGTYIISTPAYGYGKDEDGNLVIIESEAETVRWIYESYLNGMGVYVIAKALNQKGIPTIRGAEKWQDGVIQDILKNPIYEGDMLQQRTYTETRFPFVRRVNNGQRNQYLIKDSHPPIVTHEEAEAVRNLMAYRVDVLHMNKSDYTKRYLFSGRIICGECGRTFRRQKIYIGKPYEKIIWTCSGHVEDKESCCMKAIREDVLHRAFTDMWNKLYTNQGTILEPLLKELTELVAARQDSEEIRQLDKEIKDISEQSQILNQVMRKGYMDSALFMESSNKLGWQLTECRRKKTLLTRKLRRTKEIVRTEQLIQLIAEQDGLREEFDEQLFKMTAEKIVVSKEHDITFCLHNGLKLTERGGGQDAVAHANRL

SEQ ID NO: 18370 - protein, 576 aa, synthetic construct
MKRVRVLLRVSSNQQLDADGDLDIQRQIDLDYIREHKDWVLDKKEYFEGSNSGYKNAVEKRDILKEILEDAKNGEYDILVVYKDDRVGRRMWEIGSYVMTLKRYGVDIYTVKDGCISPETDDIMGQMVLALRYGNAQKSSSDTGMRVKDTAKKLVQKGRFMGGKAPYGYSLEYSGEISKHGRALKHLVIISEQTEVVVFIYDLAFYKEYGSVKIAKILNTHEKYKDMAPNDIWKAGTITSILTNPIYAGYTAYNRRTRTDGVYHKLGSDNWIVAEECNPEIAIVEVYIWNGVQDLRKKRADNIAKTDEHKDPNITVMISNRGTLALMDVLYCGYCGCKMTNGSRYNYWTIKGTGEKRSGKVGIYKCQDAWSGAVHPGRGFYRADKIEPIVFNSISEYIGRLQENDDVFQEIEINKQKEKKAVRTELEKEKQELLKIQKKIDVMEENIPQAMTGEYPLSLDDLVRLIDKQKETYSKQQEIIKQKEEKLKNMDVSISEWGYLREQIPTWQQVFLDADSHTKRVLVDKLVERIDVMEEQITIRFRIRLEDFISNPEKTSQNLLATASDKSIILNNIKIK

SEQ ID NO: 18371 - protein, 517 aa, synthetic construct
MKRITKIDKVETLIPKKLRVAAYCRVSTGSDEQLVSLEAQKSHYESFIKANPEWEFAGVYYDEGITGTKKEKRTQLLRLISDCEAHKVDFIVVKSISRFARNTTDCLELVRKLTDLGVFIYFDKENINTQSMESELMLSILSSLAESESVSISENSKWGVKRRFQNGTYKISYPPYGYDYVDGGMEINPEQAEIVKYIFAQVLSGIGTHQIADELNARRVPTKKGGKWTASTVRGMIYNEKYVGDVIFQKTYTDEHFNRHTNYGEKDQYLMECHHEPIISREDFEAAGAVLNQRRLEKGITKGGGKYLNRYPFSGKIICSECGGKFKRRIHSKNGGKYVAWCCGKHIDDVTACSMKFIRNADVEKAFVTMMNKLVYGRRFVLRPLLESLREMDRSDSFGMIQELELKMEKNAEQRQILTGLMAKGYLEPALFNKENNELLQEAAELEMQKNGLSHSVNGEMVKTGEVEALLKFAEKSEMLTAFDGELFGRFVEQITVYSRTEVGFQMKCGLTLRERM

SEQ ID NO: 18372 - protein, 520 aa, synthetic construct
MQYEEYLIYLRKSRSDASLEAMGVDVLERHEQILLDLAKRMNLSIGGIYREVVSGESISARPEMQKLLSEVESGRWEGVLVMEVERLARGDTVDQGIVQRAFQYSGTKIITPTKTYNPNNEFDEEYFEFGLFMSRREYKTIRRRMRAGVTAAVKEGKWPFNQAPYGWQRVKLEHGRGWVLAPDPDEAPVVKLIFRLYTGPDRIGITHICRYLDNRGIKPRNGDTWLECSVMGILRNVVNDQRVGIGRRKVVKQVQNGSVSKVRPHSDYDFTAPGLQPRLIDHDVFLEAQEYLAKNSHKLPESYGIKNPLAGILVCSCCGKKMQRRPASRDGSSGRCPYDVLMCNTRGCPTIGSTLELVERELIQALSDWVAGYQLDPTLEVENKVPEKEQLLSSAVNNHDLLLKQNGNLYDLLEQGVYTTEIFLERSHELQKRIKESEAHIEILKKDLKYEKEKIANIENFIPSCKELLSCYWDLSAQDRNKALKMLLESVEYTKTKRNRKGDKDNPTFTLNLKPRIPRI

SEQ ID NO: 18373 - protein, 464 aa, synthetic construct
MNSTYFRPQPELFGLRVVKYIRCSHDGQVLHGDTLEAQDALLDEFIKVNHMILVDTFVDEALTARKKFTRRKEFVRLLDGVRAHNFDMILFTKLDRWFRNIGDYHKIQEILEANGVQWKAITESYDTTTTNGRLHINIRLSVAQDECDRDSDRIKDVFSYKLKNKTYLSGSLPRGLKLDAEKHVVIDPEWHQFALDMFDHFESTCSKRGTQLFLQEKYGIRVCYDTVVRYLRNPLFMGQYRDDPEFCEKTISRERFEHIQNLAIRNVRIRHTQQFYIFSGLLICSSCNHYMTGTVTYRTLADGKEKTYKSYRCNFKAQSKLCDRSKHYREEYVEEYMLQHIRPALSSYVADFEVTAAAAAKKDPAIEIAKVERKMKKLYDLFMDDLIDKASYRNEYEKFQSQIDKLRSCPAAPVRNLDSIKKMLSDDWETVYHTFSDQEKNVFWKSFVQSITVHEDGEMDIVFL

SEQ ID NO: 18374 - protein, 501 aa, synthetic construct
MKPNIKDVAIYLRKSRDDSDGQEDVLAKHESLLLEYAKSHNLKYKIYKEIGSSEYIDWRPEMVRLLTDVEQDLYDAVLVVDLDRLSRGDLEEMGRISRVFRNSKTLVLTPSKTYDFNNEDQALINNFEMVFANHEFRMINKRMIRGKKQGAKAGRWTNGTPPFPYVYNRLTRELDVDPDKVKVYNLMKKMFLEDMKATYEIAWKLNELGFKTNRNGYWYENTVRRILINEVHLGKVVYGKTSGSVSKKRPNANGVQIKDRSEWIIAEASHRSLKTEEEHQRILAILESRRFTPKGTRTNVQVLSKLIYCGKCKRVMSFTGKASGKRYVKTCLTTDRFGNRCRNRSLNVEVIYAQLFLDLEQYEQQLLNHEPKEEQGDNSTLQLALHNKREELERLGKGINRIKDLFIDEVIDKSEMKKRIEKQQQLMQTKKEEIRSIEQSFAVIENVRTDADRLYAIKEFKKAWNTEGVSKKELNIIAKRLIGKIEYIREGNNVQINIKFL

SEQ ID NO: 18375 - protein, 539 aa, synthetic construct
MLRQATQNLITALYPRLSHEDELQGESNSISNQKRILEAFAKQNGFTNLRWYTDDGFSGANFQRPGFQAMLADIEAGKVGTVIVKDMSRLGRNYLQVGFYTEMLFPQKGVRFIAVNDNVDSANGGMDNDFTPLRNLFNEWLVRDTSKKIKAVKRAKGMSGKPVTSKPVYGYLMDEDENYLVDEETAPVVQQIYQLCLAGNGPTKIARMLTEQQIPTPGTLEYRRTGSTRRYHPGYECKWATNTVVHILENREYTGCLVNFKTEKPSYKVKHSVENPVEKQAIFENHHEPIIDREIWERVQELRKQRKRPNRYDEVGLFSGMLFCADCGHVMYQQRYQNKNRKQDCYICGSYKKRTRDCTAHFIRTDLLTAGVLSNLRQVTEYAAKHESRFVKLLIQQNEIGGKRKTAAATKQLEQAQERIAEVSRIIKRLYEDNVNGKISDERFMELSADYEQEQRELKDRAAALQAELDKSQAATVNAEKFMGIVRKHLAFEELTPTLLREMIEKIVVHECSYDENGTRRQDIEIYYSFVGKIDLPEA

SEQ ID NO: 18376 - protein, 518 aa, synthetic construct
MPKAISYIRFSTKIQSVGDSTKRQSKYINDWLKRNPDYYLDESLRFQDLGISGFSGANAKSGAFGEFLAAVESGYIEAGSVLLVESLDRVSRQDIDTAGEQLRKILRSGVEVVTLVDNEWYTKESLKDSLSMIKAMLVMERAHEESAMKSTRLRSMWAAKRERAANGEIMSKRCAAWLKVSEDRSHFEFIPENVKAVQRVFQLRLEGLSHVKIAKQMNDEGFSTLNQFKSVTGGWSQSSVTELLSNRSVIGFKVPSKSMAVKGVSEIPNYYPSIITDEQFYAVQQLKQGSGRKPSSDLPLLTNLFKGVLRCSECGFIMVVAGVSAKRSGIYKCSMKSEGRCNSVGFSRLQTDRALVQGLLYNTNRLSLNRDNGSAIGSLQSDLEKLHNQRERLIKLAMLADDTESMAKDLKALNSQIKDAEKAVSEVHQREQSSQLETISHLDLTVKKDRIEAQIIIKRIVKEIRLNTARKKCDVFLHNGLRLLNFPLDRVVDGEIFLEVLPVLEADEFDFDTYRMIE

SEQ ID NO: 18377 - protein, 519 aa, synthetic construct
MRKVTKIEQATSAKVKLKKIKVAAYCRVSTDSDAQLESLEAQKTHYENYITSRDDWEFAGLYYDEGITGTKKDKRPELLRLIDDCKAGKVDFIITKSISRFSRNTTDCLELVRKLLALRIPIFFEKENINTGSMESELFLAILSSMAEGESVSISENSKWSIQKRFENGTFKCSYPPYGYDWNGEQMVVNPEQAAVVKEIFTALLSGKGTHAIADDLNQRGVPSKRGGRWTATTIRGMLSNEKYVGDCLFQKTYSDSQFVRHSNHGEQAQYMVRDHHEPIISREDFEAAQAFVKQRASEKGVVKGTEKYQNRYVFSGKIICGECDDTFKRRIHSCTGYKYAAWCCNTHIVDKNRCHMLFVKDEALKLAFITMMNKLIFSHRLILKPYLEAIKNVSTDDSLRRIQQIQTLLTQNTEKRETLTKLMTQGIIDPVLYSQETNELLSQADTFRDEIDALKNTVSGDVTKVTEATALMHFAEKSAMLHEFDVDLFERFVKRIIVHSRNDIRFELKCGLTLRERK

SEQ ID NO: 18378 - protein, 520 aa, synthetic construct
MKKVMIIPARKRMGNIEKEPEQKKLRVAAYCRVSTDSDEQETSYETQVSHYKEFISSHPDWVLAGIFADDGISGTNTKKRNEFNRMIQECMAGNIDMIITKSISRFARNTLDCLKYIRQLKEKNIPVLFEKESINTMDAKGEVLITIMASLAQQESESLSQNVKLGLQYRYQQGKVQVNHKHFLGYTKDENGHLIIDPEQAEVVKRIYREYLEGYSMKKIGKHLEADGILTGAGRKKWHDSTINKILRNEKYMGDALLQKTYTVDFLTKKRVKNNGFVPQYYVENDHEAIIPKDIFLQVQAELVRRRIVHISPSGQRHSFSSNNCFAQITYCGVCGELYRRVHWNNRGHKSIVWRCISRLDPRGAEINCTNRTVNENLLKEITMKAMNHILSDSHTFLLQMQKNITKTIIKNDTLSPECIQKRLDELQQELIQHATNRQNYNAIANEIFRLREQQEEAEQNNLSQQANIKRLEDLKKFIREHPTQITEFNEITIRKIIEKITIFPDHFLVKFKSGIEVTV

SEQ ID NO: 18379 - protein, 520 aa, synthetic construct
MNNKVIVIPAKKKKGNSIKESEKKKLRVAAYARVSTDSDEQATSYDTQVDHYTNYIKRNPDWEFAGVFSDEGISGTYTKKRAGFNKMIEEAMEGNIDYIITKSISRFARNTLDCLKYIRKLKENNIPVYFEKENINTMDAKGEVLLTIMASLAQQESQSLSQNVKLGFQYRFQQGQVQVNHNRFLGYTKDEDGKLVIVPEEAKIIKRIYREYLEGASLRDIKEGLEKDKIVNGAGNKKWHVSNLNQILTNEKYMGDALLQKTYTVDFLNKKRVKNDGIAPQYYVENNHEAIIPKEIFMRVGEEMYRRANMVSGKGKRRIYSSKYALSSIVYCSKCGDIYRRIAWNNRGKKYTVWRCCTRVTHGPDACHARTIKEEDLQEAVVEAINKLISESNELKEIIKENIEKAITGDGSSGIEEIDKEMLKVQEELLKVANAKKDYTDLAGRVEELRNEKEKILLDLAEEKNEQSRLKELEEFLDNQELEIESYDEDLVRKLVDKVVVYDEELKIVLKSGVEVNVCV

SEQ ID NO: 18380 - protein, 520 aa, synthetic construct
MKKITKIEANQKEESILRVAAYARVSTDEEAQLVSLKTQKAHYEKMIAENKSYTFAGLYFDEGITGTKKECRDGLLKMLKDCEDGKIDFILTKSISRLARNTTDCLEIVRRLLDLNIGIYFEKENIDTRTMESELMLSILSSLAESESRSISENNKWSIKKRFQNGTFIISSPPYGYENIDGKMVVNEVEGKIIKEIFEQYLSGKGTHKIADDLNKRKIKGQKGASWHGSTINGILKNEKYTGDVIYQKTYTDDSYKRHKNKGEEDQYKIIDNHEAIVSREDFEKVQDLIKIRAIAKGNGENTKRYQNRYSLSGKIKCGECGSTFKRRHHYNGKEKYIAWTCSEHLKDIHKCSMKFIKDKDIKLAFVTLVNKLVFGKDSILTPLLESLKRVDSKKEVEKINKIEEGLEKLKERKEVLSKLITSGVLDASVYAKESSEISSEESYLLKEKERSKKAILGNDEEIRELEKLIGILGKSKMLDHFEGDLFEEIIVHIQVVNRETLDFHLKCGLVLREEVKEDV

SEQ ID NO: 18381 - protein, 515 aa, synthetic construct
MKTAIYLRKSRADLEAEARGEGETLAKHRSTLLKIAKEMNLNVLSVREEIVSGESLVKRPEMLALLEEIEDNKYDVVLCMDMDRLGRGGMKEQGIILETFKRSNTKIMTPRKTYDLNDEWDEEYSEFEAFMARKELKIITRRMQRGRIASVEAGNYLGTHAPYGYDIHRLNKRERTLTINSEEASVVRMIFDWYANDDMGASAIRNKLNELGYKSKLSNEWNPYSILDILKNNVYIGKVTWQKRKEVKRPDAVKRSCARQDKSDWIIADGKHEPIIPESLFEQVQEKLNSRYHIPYNTNGIKNPLAGIIKCAKCGYSMVQRYPKNRKETMDCKHRGCENKSSYTELIEKRLLEALKEWYINYKADFEKHKQDDKLKETQVIQMNEAALRKLEKELVDVQKQKNNLHDLLERGVYTVDMFLERSNVVSDRITEITSTMENLKKEIKTEIKKEKVKKDTIPQVEHVLDLYFKTNDPKKKNSLLKSVLEKAVYKKEKWQRLDDFELVLYPKLPQDGDI

SEQ ID NO: 18382 - protein, 485 aa, synthetic construct
MSKKVAIYTRVSTTNQAEEGYSIDEQIDKLKMYCEAMDWKVSEIYTDAGFTGSKLTRPAMEKMITDIGLKKFDTVIVYKLDRLSRSVRDTLYLVKDVFTKNEIDFISLSESIDTSSAMGSLFLTILSAINEFERENIKERMTMGKIGRAKSGKSMMWAKTAFGYSHNQETGILEINPLEASIVEQIFNEYLKGTSITKLRDKLNEDGHIAKELPWSYRTIRQTLDNPVYCGYIKYKNNTFEGLHKPIISHETYLSVQKELEARQQQTYEKNNNPRPFQAKYLLSGIARCGYCGAPLRIVLGHRRKDGSRTMKYQCVNRFPRKTKGVTTYNDNKKCDSGAYDMQWIEDIVLKTLNGFQKSDKKLRKILNIKEESKVDTSGFQKQLKSINNKIQKNSDLYLNDFITMDDLKKRTEMLQGEKKLIQARINEVDKPSTSEIFDLVKSELGETTISKISYEDKKKIVNNLISKVDVTADNIDIIFKFQLA

SEQ ID NO: 18383 - protein, 488 aa, synthetic construct
MSKKVAIYCRVSTTNQAEDGYSIGEQEDKLKKYCEIMGWQVSEIYTDAGFSGSNIERPAIQNMIYDAKSHNFDTVLVYKLDRLSRSTRDNLFLIQDVFKNNNVEFISLNENIDTSSAMGGFFLTILAAFAELERETIKERMQLGKLGRIKSGKSSAVNNAALGYKYDKSTDSRVIVPTEAKLVQEIFERYASGDSISRIVRDFLARGITGKNGGHITPTRIRNILSNEVYIGKQRYQDKIYDATHEPIITEEMFYSVQKELEIKQNDAYKKGNSRPFQAKYMLSGLLKCGYCGSRFDTYVGKPNKAGEKTVRYVCRNRKTARAKFSRKDIYDGLGYSSCPYDGFYYKQDLEDIVINEILELQYDKDKIKNLISEKKVKAVDEKQVKSDIQAIQKKISRLNDLYLVDAIDLDELKVKVKDLKQKEKNLEQLLTSNSNKQQELKMKEAKEKILLSTDISSSDYEVQKSIVRTLISSINVKENELDIVWNL

SEQ ID NO: 18384 - protein, 487 aa, synthetic construct
MKAAIYVRVSTAEQAAEGYSIRAQTDRLKAYCVSQGWEILEFYVDDGYSAKDTNRPNLKRMMKHIEEGLIDCVLVYRLDRLTRSVRDLYTILETFDKYDCKFKSATEVYDTTTAMGRMFITIVAALAQWERENTGERIRMGMEQKAREGNWVINQAPYGYEIDKENKTLIINDREAMLVKRIYDDYLSGKTMRNIAIDFNKSNITTKSGAIWNDFKIKYILSNPLYIGTMRYNYRTNKENYFEVEDAHPAIISKETFENVQKIKESRRIVHPRSATSKFIFSGIAKCARCGSPLAGKYGYYKSKTKKDHISRPRSYYCTKRRLGKCDLPNIGENHLEVQFLNYLNTFKIDPDIIEDVSHEKEDNANEQQKKALQKELKEIDNRRKKWQYAWVNEMISDEDFSNRIEEENSKENDIKNQLTSLEPRGEKMNTEDLYGILLDIKSNWNQLEALEKKTLLQMFMKKIVVNRDKKSSGDPNSISILDVEFY

SEQ ID NO: 18385 - protein, 515 aa, synthetic construct
MKTAIYLRKSRADLEAEARGEGETLAKHRTTLLKIAKEMNLNVLAVREEIVSGESLVKRPEMLALLEEIEDNKYDVVLCMDMDRLGRGGMKEQGIILETFKRSNTKIMTPRKTYDLNDEWDEEYSEFEAFMARKELKIITRRMQRGRVASVEAGNYLGTHAPFGYNIHRLNKRERTLIINSEEASVVRMIFDWYANEDMGANAIRSKLNDLGYTSKLGNEWNPYSILDILKNNVYIGKVTWQKRKEVKRPDAVKRSCARQDKSDWIIADGKHEPIIPESLFEQVQEKLNSRYHVPYNTNGIKNPLAGIIKCSKCGYSMVQRYPKNRKETMDCKHRGCENKSSYTELIEKRLLEALKEWYINYKADFEKHKQDDKLKETQVIQMNETALRKLEKELVDVQKQKSNLHDLLERGVYTVDMFLERSNVVSDRITEITSTMENLKKEIKTEIKKEKVKKDTIPQVEHVLDLYFKTDDPKKKNSLLKSVLEKAVYKKEKWQRLDDFELVLYPKLPQDGDI

SEQ ID NO: 18386 - protein, 487 aa, synthetic construct
MAYAVYVRVSSDKDEQVSSVENQIDICRYWLENNGFEWDENAVYFDDGISGTAWLERHAIQLVLEKARKKEIDTVVFKSIHRLARDLKDALEIKEILLGHGVRLITIEEGYDSHYEGKNDMKFEMYAMFASQLPKTLSVSITAALAAKVRRGGYTGGFVPYGYEIIDGKYAINEEEAALVKEIFELYAQGFGYIKIANTINDKGARTRKGAPWTFSTLSKMIKNPAYKGTYIMQKYGTVKVNGRKKKVINPKEKWVIFEDHHPAIISHELWEKVNNKDPNKFKKKRRVSTTNELRGITVCAHCGTAMSKRNSINVSKNGTETEYSYMICNWSRITARRECVRHVPIHYKDLRALVLSKLKEKEKELDKEFGSDENQLQVKLRKLKKDINDLKFKRERLLDLYLEDERIDKDTFTIRNAKIEKEIGLKEMEIRKASNIEIQMKEKQEVRDAFALLEESKDLHSVFQKLIKRIEVAQDGAIDIYYRFEE

SEQ ID NO: 18387 - protein, 558 aa, synthetic construct
MTKLYSYIRFSSMRQSDGSSYERQIRMAKEIADRYNLELVNDYQDLGVSAFKGANSKTGALSRFLDEIGRSIPVGSWLFIENLDRLSRQDIISAQELFLSIIRRGITIVTGMDNKIYSIETVTANPMDLMFSILLFIRGNEESQTKRNRTNSSALLKIKAHQQNPQSPAVAIEEIGKNMWWTDTTSGRVLPHPVYFPVLQKIVQLRQEGHSAGAILDYLNEHHEPPAPTSNKKHGKWSRAMVSRLFHTKALIGVKTVNVDGVEYELRDYYPRVLSDSEFYFLRKNIIKKAWDYSHDKEKVIPLLSGIGVLRCVHCGATMVKQTAANGKREQYRYCCDGRKSGRTDCPYPNWGFRAVTLEGAVLQLLADKIWIAEDKTNPIPEIQVKIDEISRKIDNLINLSAMTGATKELANQITDLNSQREALHEEIRLFEREMYSVDSQGWDKLAQFDLSDVQNEERLKVRMKIKGALHEIECSRIDSKKNLFVLVYLDGLRQRLVIENNRGLKKGQIFVDLKTINDRQILESAGMVLHPCIEMIIDSDWKAPEEIPSLLSEEFGI

SEQ ID NO: 18388 - protein, 496 aa, synthetic construct
MKRFVALARVSSREQEREGFSLEVQEEALRRYALQHGGEIVRFFKIAETASKTDERKAFRELVRYAKQNAPGLDGLLFYKVDRAARNLFDYVELERLESEYNVPFISVSQPTENTPSGRMMRRTMANMASFYTEQQSVDVREGLARRVQEGWFVGKAPYGYRNVRKDGRSVVEVDPHAADNIRRMFHLYAYEPLTLDKLIDRLTEEGRVYRLPAMPFAKGSVHNILRDRAYIGEVEFRGNWYPGKQEPIVDRGTWDRVQAIVRGCVYHSHEMTYAGEFMTCGHCGHPITGERKTRQTKNGTREYVYYRCSRYTAVGHPRTRVPEAEFDRQILELFRRMKIQDPEVVEWFRAVLRSQSKDAQEESQAQNSELQRQRTLLITQQSRLIDMRIAEEIDQETFARKQTELRDRLASITLQLEVVDRSRSELADLAVKVFELSQTLSEKWLTADYATKRRILEIVCLNCRLDSGSLCPQMRKPFDVLAEGLLVPSSRGDRI

SEQ ID NO: 18389 - protein, 645 aa, synthetic construct
MRRNNHQSPSWKHSDRVWVIIVARISTEKQDERSLDDQIAYCRKRLEELTDRPVKIHVIKSQDSGEYLDRVELRQLEDLIESGDWDFVITEDLGRICRRSHALTICEMCEDAETRLIAINDHIDMAEEGWRLCSYFAAFRHEQYNRDTALRIQRSQKNRFLNGGALPRPFWGYLGWDKAKTDSELRKDPEAEELIRETFRRLDDGASFAEIADWFNDLGIPTGPSCRRKKWTTMSIQRLVRNPILKGIRIRNRLVSKRINKTGRRRAELAPQDEWLVREVPHLAYFESAYYDHVIHVVSERNKNIGRPANRDRLSRLGVPRKRTTWPLQHARCGICGHTIWKAGTHGERLACCSGALQYRCWNGMMIQVDNTQKWILGAVLDRIRQCTDFAKVVRERIEQARKENDLSEQRRLYERQITRHQNEVTNLTDAIVVGGDIPELVRQLQKARSALNEATYQLDRIKSQEREAPRALPDAECLYQLVEETMRLVVNEDDQASRLLCRILPRMTLYPVILCDGRAVEVQAEVEFDLSAAASALVGMSVDMPSEVVTVDLFDRPPYVEHAERLGTVEQRGETVVATAKALGMSLTMAAWARRLYRRMQELGIQEPYMRVDMPPARGWRCRRHKHPRYHFEPQKNDVPPEAA

SEQ ID NO: 18390 - protein, 563 aa, synthetic construct
MNQSNQIRKTALYCRLSQDDGIEGDSNSIQNQKAILQKFAEDHHFPSPCFYVDDGFSGGNFQRPAFQQMISDMENGEIGIIVTKDLSRLGRNQLHTGLYIEERFPMFGVRYIAINDNVDTDSSESNDLMPFKNLFNEWFIRDTSRKIRAVLKAKAERGERLGTRAPYGYRKDPDTKKLIVDEEAAAIVRRIFAMCAAGKGPSQIARILKKEQILTPTMYAYTRYGITHTCLDTAHPYSWSDSAIANLLENEIYLGNTVNMKYSTKSYKDKRRAEHSREECLVFENTHPALITREIWDIVQRVRKNKRRLTKMEEQNKYSGLVFCADCGSNMVLHRAHTMSASYNHFTCRTYKKDGEACTGHYIRECALDEIVLEDLCRVTSAAREHPEKFAAYIGSKQSTELQREIRRQEKELAAVRKRKAELDAIFKKLYEDSVLGRITTEQFQMLSGSYTEEQNRITAGIPQQENEIQRLRETAIGTDSFLDKAKRYTDITELTPELLRLFIEKIVVHEKEVKWSKHAPQTVEIYYNGIGYVGSGQQDAEETPEAADPLQTQDTAEPRQAS

SEQ ID NO: 18391 - protein, 609 aa, synthetic construct
MGASVLVKGETSGNVLVPTGDMTTTRNPLAGSVFQTETLRGVRCVRLSVLTDETTSPERQRDADDAIAAELNISFGEGDALREAVDLDVSASKIAPFDRPALGSWLARPDDYDALVWWRFDRAIRSMSDMHDLAKWAKAHRKMLVFAEGIGGGKLVFDFRNPMDPVSELMMTFFAFAAQVESQSISDRVTGAMAAIRRMPLRWRGGGRPPYGYMPAPMPKEHGGTGWTLVPDPDAVKVIERIVRELLEGLTVSAIAVGLNADIIPSPRDHWAVKQGRKTGGKTGGVKGLVKDAFLWNPAVITRMLRNETLLGWKMHQGKPVRDGEGNPVMATAEPIMTREEFDRIGAVLDSRSIDNKERTDTDALLLRVIHCDACGGRMYLNKQESQKNQRPTYKCNPYSRGFKCEESAHIRGDWADEHVEAEFLRLVGSVQTTHVVEIPGYDPEPELLATLAEFNEHQAQQGRQKSRHAAAAWQERADALDARIATLENSEKREGQRIVTPTGRTFADEWAAADTAGRRAMLIEAGVRLDVRRGVRGGWRKLDTRRVDFTMRGELDPAAEAATDTAGDQDAESRNDAPPAPGSVARLVSESATKSAPVAEPVRELVAA

SEQ ID NO: 18392 - protein, 545 aa, synthetic construct
MQDDFPGNQHSSGPVRAYSYVRMSTRKQLRGDSLRRQLERSKAFADEHSLLLDDSLQDLGVSAWRGRNFKTGALGKFLAMVESGEIPKGSYLLIESLDRLSREAVPDALTLFMAIINAGIVIVTLGEDRQIYSRDRLNGDWTKLIIGLAVMSRGHEESQTKSERISAVAKRKREQAREGKGHITSITPAWIDSKRIDANRYEFTLNHHAETVRAIYEMAMRGLGATAIARTLNADGVPAFKSKDGWYQSIIKALLTRHDVIGRFQPHRMQDGKRVPDGDPIEGYFPAAIDKDLFLRVQATRRNPGRPGRKGNTFANLFTGLCHCGHCGGPMTMKMSRVKGNENGRYLVCANYVRGHRCTEGKRHFRYEPLEAVILDNVKEINLAETLQAPRFDTVLDAIDETIAALTLQLEGLSKKEQRLALAVEDESQPLETILDLLKTRQTERRAVEAELRYQQAERQRRSIRHDNSANMDVRIAKLRVAWEQAKDATRYELRSEAHAAIRDLIIEISFDSTSYSAVIVVENGVSAYRVNDGQIMGLFRAFAT

SEQ ID NO: 18393 - protein, 606 aa, synthetic construct
MEQSEIRQTAYSYIRMSSQQQIKGDSLRRQLELSRKYAAENNLLLDESLTDIGISAWTGANVQDGALGRFLQLAQSGLIKRGSYLLVESLDRLSRQQVRNAIGPFIDIINAGVTIVTLADNQVYSETTVDENWTQLMMSLAIMSRAHEESQTKSKRLKEAHANKKKLAAQGIGRYTHNMWGWIDQIEVATNKFEYRLNQHAATIRKIYEMADAGLGQLVITRKLNDKGIPTFRTSKNGWQQPNVGSILRNEAVIGTYQPTHAINGKATPNGPPIKNYLPAAVPEELFWRVQRNKQRRVSSGRKGKQLTNLFTSLCVCQHCNGPIRVRLAGRSGKTHKHLHCDNRYRAVGCPSVGGGFRYDIMEAAILDKIKEFDIDIGTGRQTADRETLLHEIRTKEAQYDEMEKRKNKLLRALELSEDDAAMSDVLSQLSERRIAVEQLATQIAEMKGDLARIAAEEKELASAVERLQMERLIWTTGADEEVYASRSRASAMMHSYIDVIAFDFNRKTYRVSIGGHLILYEFYRDGRLLQKIDNRSLMRKHGVPVIWNDRDETGHAVEGTGEKVIPMGWSSETLTTTIPQSRQDPNAHLVDKRKRIVRTLINKKH

SEQ ID NO: 18394 - protein, 508 aa, synthetic construct
MKKAIAYMRFSSPGQMSGDSLNRQRRLIAEWLKVNSDYYLDTITYEDLGLSAFKGKHAQSGAFSEFLDAIEHGYILPGTTLLVESLDRLSREKVGEAIERLKLILNHGIDVITLCDNTVYNIDSLNEPYSLIKAILIAQRANEESEIKSSRVKLSWKKKRQDALESGTIMTASCPRWLSLDDKRTAFVPDPDRVKTIELIFKLRMERRSLNAIAKYLNDHAVKNFSGKESAWGPSVIEKLLANKALIGICVPSYRARGKGISEIAGYYPRVISDDLFYAVQEIRLAPFGISNSSKNPMLINLLRTVMKCEACGNTMIVHAVSGSLHGYYVCPMRRLHRCDRPSIKRDLVDYNIINELLFNCSKIQPVENKKDANETLELKIIELQMKINNLIVALSVAPEVTAIAEKIRLLDKELRRALVSLKTLKSKGVNSFSDFYAIDLTSKNGRELCRTLAYKIFEKIIINTDNKTCDIYFMNGIVFKHYPLMKVISAQQAISALKYMVDGEVYF

SEQ ID NO: 18395 - protein, 525 aa, synthetic construct
MKTIRDVLEKGKKGAFYARVSSDRQTIDAQRHHVYEFIKNYECEIVKEYVDHGESAFKKKLIKRPQIMALLRDVEQGKYDFVITYADDRLARSEIEHVQIRVIMKEAKTDVILTSTGELYTERDIITQLIREGGTRYEVERISARTKDAYGQRTDYGQWMGGPVPFGYVQDENTKNFSIVEDEKEIVLNIYRLYQNGEGFAGIAKKLNEQKVKTNTIHWKKERVKHILTNPIYAGYVTFGRLKPGSGNSIEDLSKWKMAKCEEIPAIMTKEEWLATFQMFEKKRNKELSPKQLKTEYVLRDLIYCKSCDAPLLPKNQETRAKNGKKYGMKKYMCSNKLCNVWFSTDKLHALVFDSVIKEITDKVISKSQTELMYEMEQILEKDIKQIKKEIQRLKKQVDNCLVWTKDAEREIDELYNQKKKLVEVDPEVDPLLDVMLDYRLHLLHEIRETEELIAKKEAEMKHIEEVDSNQSMLQKNVLQAFRIEFANLQKEMKRVRQFLVYLIDKIIIDQNGKTEYILKINLEC

SEQ ID NO: 18396 - protein, 490 aa, synthetic construct
MKVLESYAVYVRVSTDRDEQVSSVENQIDICRNWLERNGFNWDEKLVFKDEGISGTLFVDRPSIQLLLQKAKAKEINMVVFKSISRLARDLKDSLEIREVFLAHRVRIISVEEGYDSVKAGKNDMAFELWSLFSAQYSRTLSSSITAALAVKVRRGEHIGKIPYGYNREEQKLVINEEEAQVVKMMYKWYCEGWGYKKITNELNRLGIKSKTKKNWQMTSVQRILQSAIYKGTFILNQYTSVKVGGKKKQIRNPKEKWFVFPNHHPKIVEEEIWNQANHKKNKKNKTKITAWNEFRNLAKCAVCGSNMIIVQSHLKKKSGERTEWKYLKCSQYRRAGKHGCVNHVPIQYKDFRQFIINLLVKKGESVTLSLQNNVEQGQKKTIKKLQKLVDTNEQKKKALLDLYLEGIIDKREFEKKRNDLEIEVKRANQELFTLKSNNVVYTDVKSIQEAFEQLQQERQDLLVVFQTLIEGIVIHQDGTVDIRYTFVIS

SEQ ID NO: 18397 - protein, 491 aa, synthetic construct
MGLAAIYLRLSRNEEQLNIDEILLNHRNALTKLANQQKLTYDIYQEISSGVNTERPELNLLLSRLDDYDALLVMDIDRISRDNAHAEEIKKMLIIHDIKILTPQGAIDLSQESNEMLFSFQAMMANFEYKQIRKRLGRGRLAAAEQGKWTMSNRVPLGYKKNEEKRLEVVEEEAKIIRFIFQKTLERVSANEIAKQLDILGWRSRQGKVLTSAHISNMRRNVVYYGVVKAGRKVNGRVVDEVFVEDAHEPIVSKQMFLEAQKILEENTTGNFFNKLKATRKLQNLIYCNCCKRKRYIQCDGNGVDYIKSCIYKVDNNKCRDRGYKYEPIEQFVLQKVKEKKPDFEQELQMLKSLDTTEVEKKLSIQRESLEKQINRFNKRQRNLKEMRMDGEISKAEFYEMRDENEEQIKQVKQQMELIDIKLENLSNTDEEQARLQDAIKTLDKLEELKAESCNTFLKKFIKKIWFSSNTEANHDTTRPKEDATIEIEWL

SEQ ID NO: 18398 - protein, 515 aa, synthetic construct
MKTAIYLRKSRADLEAEARGEGETLAKHRTTLLKIAKEMNLNVLAVREEIVSGESLVKRPEMLALLEEIEDNKYDVVLCMDMDRLGRGGMKEQGIILETFKRSNTKIMTPRKTYDLNDEWDEEYSEFEAFMARKELKIITRRMQRGRIASVEAGNYLGTHAPYGYDIHRLNKRERTLTINSEEASVVRMIFDWYANEDMGANAIRSKLNDLGYKSKLGNEWNPYSILDILKNNVYIGKVTWQKRKEIKRPDAVKRSCARQEKSDWIIADGKHEPIIPESLFEQVQEKLNSRYHVPYNTNGIKNPLAGIIKCSKCGYSMVQRYPKNRKETMDCKHRGCENKSSYTELIEKRLLDALKEWYINYKADFEKHKQDDKLKETQVIQMNEAALRKLEKELVDVQKQKNNLHDLLERSVYTVDMFLERSNVVSDRITEITSTMENLKKEIKTEIKKEKVKKDTIPQVEHVLDLYFKTDDPQKKNSLLKSVLEKAVYKKEKWQRLDDFELVLYPKLPQDGDI

SEQ ID NO: 18399 - protein, 501 aa, synthetic construct
MKPNIKEVAIYLRKSRDESDGKEDVLAKHESLLLEYAKNHNLKYRIYKEIGSSEYIDSRPKMVRLLSDVSQKLYDAVLVVDLDRLSRGDLEEMGRISRVFRDSKTIVITPTKTYDFNNEDQALINNFEMVFANHEFRMIRKRMIRGKQQGTKAGKWTNGRPPFPYVYNRLTKELDVDPDKVKVYELMKKMFLEDMKATYEIAWRLNELGFKTNRNSYWYENTVRRILKNEVHLGKVVYGKTSGSGSKKKLNANGVQIKDRSEWIIAEGSHQPLKTEEEHQRILAILESRRYTPKGTRTNVQVLSKLIYCGKCNRVMSFTGKASGKRYVKTCLTTDRFGYRCHNRSLNVEVIYAQLFLDLERYEQQLLGHEPKEKQDDSSTLQLALQNKDEELERLEKGIDRIKDLFIDEIIDKLEMQKRIEKHKKLMQTKKEEIRSIEQSLAVIESVRTDNDRINAIREFKKAWNTEGITKRELNTLAKQLIERIEYVREGNNINMKIQFL

SEQ ID NO: 18400 - protein, 509 aa, synthetic construct
MNVCIYLRKSRADEEIEKEFGQGETLAKHRKTLLKYAKEKNLSIVKIHEEVVSGESLIHRPEMLELLKEVEQGMYDAVLCMDLQRLGRGNMQEQGLILETFKKSNTKIITLNKAYDLNDDFDEEYSEFEAFMSRKELKMINRRLQRGRIRSIEDGNYLSPLPPYGYNIKEGKFIRTLTPNSVQAAVVKLIFDMYVNKQMGGTIIAEELNRMGYKSYTGIGWTSNAVLNILKNPVYIGKITWKKKDIKKSEDPNKKRDTKQRPKSEWIVVDGKHPAIIKKNVFYKAQEILNGKYHVPYKLVNGPKNPLAGLIVCEKCGSKMVYRPYGKNVDPHIICPNKCGNKSSKFIYVEQKLLNSLKEWLRNYELEIKNNGIPNRSSAMPAYNKQLKNLEKELQELQEQKLNLYDLLERNIYDVNTFVERSKNISERIDNTNKNIEVIKTKIKNEEKRKRDINIIPKIKMAMDAYYNTDDVLQKNMLLKNILEKVEYNKEKDQRNDNFTLTLYPKLPE

SEQ ID NO: 18401 - protein, 488 aa, synthetic construct
MKYAVYVRVSTDKDEQVASIQNQIDICRYWIEKNGFEWDEDAVYKDEAVSGTEWFKRQAIQLILAKARKRELDTVIFKSIHRLARDLRDALEIKSILLGHGVRLVTIEEGYDSYYEGNNDMKFEMYAMFAAQYPKTMSVSISAALNAKVRRGEYNGGRVPYGYRVVDQKYVIDDEESENVKELFDLYNQGLGYLKVALYMNDKGLRFVDGKLWRDYHIRHIINNPFYVGDYIAQKYTKVKVDGRRKQTVNPKEKWVAYKNHHPAIIERDLWDKIHSFEKKGQNRTKRRVSVDNELRGLVYCAHCGQPMKAEAVKKTQRDGVIKYVYMRCSKYRRTGGRECVKHVPLYYSQVRELIVEKLKEKEQDLEKQISGEHKNKNKQKISKVNKEIKEWERKKEKLLDLYLDGQNISKEVFTQRDKKIDKIIREKNMELLKLNSLEEQIKEDNATKKAFDLLKNSENLYECFNTLIKRIDITQNGGLDIYYRFEE

SEQ ID NO: 18402 - protein, 445 aa, synthetic construct
MRTIRKIEQSIPNLRQRKKVAAYARVSVESERMHHSLSAQVSYYSRLIQKNPEWEYAGVYADYGISGTGIKKRQEFQRMLKDVEKGRIDIILTKSIQRFSRNTVDLLNTVRHLKEIGVDVWFEKENIHTMSGEGELMLTILASFAQEESRSISDNIKWRFHKKIEQGIPHAKFLVYGYRWEHNNLVIQPEEAKIIRKIFDDYLSGKTRKELIRDLEKNGIRTRYGYFFRDSSIRQILTNRIYTGILEIQKTFVTDPITKHQVANNGEKSKYIVERHHKAIITAATFEKAQQELKRRKEMGKRQGGYAREFLNTSCFTGIIKCGICGKSYTHVKRKYKGECHEYWTCESHKGKGTNCGAYGSVPQPVLEEICATILGTDSFNKNTFFQQVKKIVVPAYKVLVFHLKDGRIIEKQWNSTARKECWTDELKEKQRQWMKKYHQNDASK

SEQ ID NO: 18403 - protein, 608 aa, synthetic construct
MRDFEKITALYERLSRDDELQGESNSIVNQKKILEEYASKNNLSNIIHFTDDGISGTQFDRPGFMAMMNGVNQGNIGCIIVKDMSRLGRDYLKVGQCMEILRQKGVRLIAINDNVDSFYREDDFTPFRNIMNEWYARDTSRKIQSTFRSKGESGKHTASTPPYGYIKDEKDKNKWIVDEKAAEVVRRIFNMTMQGNGPYRIAKILESEKVDIPAYHQQKLGYGLYQSKNFEHPYRWCSSTIASILKKQEYLGHTVNFKTRKHFKDKKSKYVSEDNWLIFENTHEPIIDQETFDNVQRIRGNVKRYPDGWGEYHPLTGLMYCADCGSKMYVHRKSNYKNVPYYVCSNYKKVPCGTLCPSAHRIKAEVVLNLIQETLKDIKKYLDEDNEAFIRSIQNEMEEKEKIEIEKKRTRLIDSKGRLQELERLMCRIYEDMILNKIPNSRYEILNNQYETEQVALSKEIKDLEQQVARYEKETDRAKKFISLISRYENIDELTTTMINEFVEKIIVHERDRKGSQTSKQKIEIYFNFIGNYELPQAELSDEEKQKLEEEERKIKERKDKLHQNYLKRKASGKQKEYEDKYKARREQKKQEKLKVLKRVGIPARDFQ

SEQ ID NO: 18404 - protein, 478 aa, synthetic construct
MESTLKMIRAAGYGRVSTEEQANEGHSLDAQREYNLKYIENEKWILSGYFEDPGYSGKNLNRPDMKRLIQEINDKNIDALVVHKLDRLTRDIKDLYEMLQMFEKHNIKFVSISEKIDTDTAMGRMFVFMLGIFAQWYRENLSEEVTKGMRARAKKGIPNVFVNMFGYTRTPDGELIINEEEAKWVRWIFEQYLNGKGTPTIAKELNNMNIRRTRGGRWSQTKVMDVLENQHYVGNITWKSRKDDEEDRIIRKGTHIGIIDQETFDKVQRWIQRRRDGFRSRNSYNYAFGGVLRCGKCGGRYKGKYSVSGGTITYNYVCSNKERYHTCDQSSISETKLVKMLFKSLDMDNQNLFWKDDVKESINSEEDQIRRAIKASEERRERWQMAYGDGFMPYQDFSKRMKEEMQRVVELEEKLSGLPGAVVSTLDPTEVISIMQDIQDNWWYMERSTQKQLIQELFQDILILKDGKEWGIKGIAFA

SEQ ID NO: 18405 - protein, 566 aa, synthetic construct
MKVAIYARKSKMSEKGESIDNQINTCKEYISRWSTYSNNEGEFVVYKDEGFSGGNTDRPEFQRMLNDAKNNRFNMLICYRLDRVSRNIADFANTYQMLQENSIEFISVKEQFDTSTPIGRAMLNIAMVFAQLERETIAERVRDNMLSLARTGRWLGGTTPTGFNSEPIEYLDQSMNTKKMYKLTEDQEELEKVKLIFSKFLEIKSLRGTESYLLIQDIVTKRSCKYTAATIKDILINPVYVAADSHIYDYLSSIGCQICNQEKEFNGKCGLMVYNKTSQSGKSASSKDYSDWIVSIGKHKPIVSGNEWILVQELLASNTSKSFYTKDTMQYGLLTNLIKCTHCGSNMKIKKGKINADGSLAYTYVCTTKEMSRRTKCSVKNIIGQEADKDVLDYLLKLAEDDSFMQSTLSLNKVTITRSIEQTSKKLTELKESLIENESSINNLMNQLAKLPPESGLIDRYMKQLNDLDTLNKSIKDNIEKLQSEETAHHTINLNLDLVKKALSDLIGLKDSDDIHVQRSLVRTVIESVTWDGENLHIDLFGQKKLDAEQWNSTHLCRDSKCNPYC

SEQ ID NO: 18406 - protein, 508 aa, synthetic construct
MKKAIAYMRFSSPGQMSGDSLNRQRRLIAEWLKVNSDYYLDTITYEDLGLSAFKGKHAQSGAFSEFLDAIEHGYILPGTTLLVESLDRLSREKVGEAIERLKLILNHGIDIITLCDNTVYNIDSLNEPYSLIKAILIAQRANEESEIKSSRVKLSWKKKRQDALESGTIMTASCPRWLSLDDKRTAFVPDPDRVKTIELIFKLRMERRSLNAIAKYLNDHAVKNFSGKESAWGPSVIEKLLANKALIGICVPSYRARGKGISEIAGYYPRVISDDLFYAVQEIRLAPFGISNSSKNPMLINLLRTVMKCEACGNTMIVHAVSGSLHGYYVCPMRRLHRCDRPSIKRDLVDYNIINELLFNCSKIQPVENKKDANETLELKIIELQMKINNLIVALSVAPEVTAIAEKIRLLDKELRRASVSLKTLKSKGVNSFSNFYAIDLTSKNGRELCRTLAYKTFEKIIINTDNKTCDIYFMNGIVFKHYPLMKVISAQQAISALKYMVDGEVYF

SEQ ID NO: 18407 - protein, 520 aa, synthetic construct
MKKAVYCYARVSSRGQAKDGYGMSRQQTMLRDYVAAYDDSQHNRGYEFGDISWLYAEGVSAYSGKNIEDGSVLKNFIDDVLQKKITNSVLVIENLDRFSRAAPNRAAGLFLSLINAGCDIHEVETEMIHHQYSDLNIISGGLQRAHNESKRKARLSIKNWDERIKNTIEGTSVLTHRVPSWIEVKNNKYVIKEGEAEKFNLIFKMYADGFGPAAIRDELKKKKMQINESEPTINHLVKIIKDQRLIGKFNSTGRKILDGMIIYPVVVEQSLFETVNDLRKQRNPLGKVNVKANNLFAGLCICMNCGRYVQVNSVDKKGDTYFRCGGSLLKIDKCKERGFKYKIIENALLEHIRNFDFSMLRSNDDDIQIKINYLSIELATKENYSSEILADMEKEYIPDPNDRRILKNLQRRISEIRTEITRLKQSNVGYEKFSDLKESCTDDLLDSKNTNVRLNFNVKIKRVIKNIKMKRLGNAIMLVVNYIGVNEKQAMVIDSKTGDVKFMAVQNDDLKSVEYLINKS

SEQ ID NO: 18408 - protein, 559 aa, synthetic construct
MKTKLYSYIRFSSMKQADGSSYERQKRTAAEIAAKYDLELVTSYQDFGVSAFKGANSRTGALSRFLDEIGRSVPVGSWLVVENLDRISRQSIIEAQELFLSIIRRGITIVTGMDGKVYSKESVNANPIDLLLSVMLFARANEESQTKRNRTNSSALIKIKAHQENPQNPAVAIEEIGKNMWWTDTTSGYVLPHPVFFPIVQEVVELRRNGRSTAEILDHLNATYTPPPAASHKRHSNWSRAMIERLFHTRALIGIKEISVDGVKYELKDYYPRVLDDAEFYHLKKSIGVRACNYGDKEEVKPIPLLSGVGLLKCEHCGSAMVKVKGTNKRPNQYRYSCDAMRSSRIACVHTNWSFRGDQLEKAVLQLLADKIWIAEDKANPVPALKVQIDEISRKIDNLIALSAMTGATKELADQITTLNSERETLYNQIKMAEEEMYSVDSQGWEKLAEFDLEDVYNEDRIKVRFKIKQALKRIGCSRIDKYKNLFVLEYIDGKTQRVVIENSRGPRKGRIFVDLKTINDRQILESNGLVLHPCLDMLTDKNWKPEEEIPGPLQEFGI

SEQ ID NO: 18409 - protein, 559 aa, synthetic construct
MKTKLYSYIRFSSMRQNDGSSYERQIRMAREIAAKYDLELVNDYQDLGVSAFKGANSKTGALSRFLDAIGRSVPVGSWLFIENLDRLSRADIVSAQELFLSIIRRGITIVTGMDNKIYSLDTVTANPMDLMFSILLFIRGNEESQTKRNRTNSSALIKIKAHQENPQNPAVAIEEVGKNMWWTDTTSGYVLPHPTYFPVVQEIVELRKNGRSTAEILDHLNETYAPPPAVSNKKHSKWSRAMVERLFHTRALIGIKEVSVDGVNYELKDYYPRVIDDATFYHLKKNIGARAWNFGDKEEVKPIPLLSGIGLLKCDHCGCAMVKVKGTNKRSDQYRYTCDATRSRRLDCEHPNWSFRGDQLEKAVLQLLADKIWIAEDKANPVPALKVQVDEISRKIDNLIALSAMTGATKELADQITTLNSERETLYNQIKMAEEEMYSVDSQGWEKLAEFDLEDVYNEERLKVRFKIKQALKRIGCSRIDRNKNLFVLEYIDGKTQRVVIENSRGTRKGRIFIDLKTINDRQILESNGLVLHPCLDMLTDKNWKPEEEIPGPLQEFGI

SEQ ID NO: 18410 - protein, 580 aa, synthetic construct
MKKLYSYIRWSTDKQTGNTSLERQTEKAKQYAAIHGLEYVQILDAGVSAFRGKNTTQGAFSGFINAVKAGVISSDSWLYVENLDRLTRQDVMTALNLFTSLLKLGLTIVTGMDGKIYTEESISNNVNDLIMSLFLFSRANEESLTKQKRAYETTLKLIERHKSGLPTNIKSAGSTPFWIDATGPNTEAVKPHPIYFKAAKEAVRLLLSGWGNYRVANYLNENSDIYPPPPGKKTRNKNREARWTVPNIKKMRLNRALMGEKVLTLNNVTYHLEDYFPPVCTPAEFARLQDVACNNKMPQGCKKKVITLLSGMGILRCGHCGGAMTSFSKQGKIRYLCESGKKRMSSCKAWSVSGELVERCLLYPLISGYMSLVIEDQNAGESLADQIDSKRSELELVESQIGNLTTAITMGGNLESLVTQLQELESRKRGLLLELDKLSQRELLQGSREQQIEKIVDTVEMLTPQLLEDTTHPNRLNIREVVRAVISSVTISKAKDKTLTLRYEIYDRQRYLFEGQIKTDNNGNKLCGYAMYVETPVFSDRVPPEVIKKYRDSGKLLVQKIDEMLIGFPRINPSCFVSKQ

SEQ ID NO: 18411 - protein, 441 aa, synthetic construct
MLARIEAGEFPEGTILLVESIDRIGRLEHLETEALMNRILGNGIEIHTLQDGLVYTKDALADDLGISIIQRVKAYIAHQESKQKSFRVSQKWKQRAKLALAGEQRLTRNVPGWIDPDTLKLNEHAETVRLIFKLLLSGESLHNIARHLQSNGIKSFSRRKDANGFSVHSVRTILRSETTIGTLPASQRNDRPAIPNYYEAAIDAATFNKAQEILDKNRKGRTPASDNPLTINIFKGLFRCQCGASVHPTGTKNKYAGVYRCNNHLDGRCDVPPLKRKPFDRWMIDNFLGMIDVGNDGEAEGKIASLQHEVEIVTARIKKATALLLEMDDIDELKIQLKELNQKRTELQTMIDNMRRKASLTDKELPQLKDIDLTTKAGRVECQLILSKHLKGLTLGKDSVTVTLQNDTEIIVPTDPLPLNDGTSIFEIAEKELLEIDAYQL

SEQ ID NO: 18412 - protein, 508 aa, synthetic construct
MKKAIAYMRFSSPGQMSGDSLNRQRRLITEWLKVNSDYYLDTVTYEDLGLSAFNGKHAQSGAFSEFLDAIEHGYILPGTTLLVESLDRLSREKVGEAIERLKLILNHGIDVITLCDNTVYNIDSLNEPYSLIKAILIAQRANEESEIKSSRVKLSWKKKRQDALESGTIMTASCPRWLSLDDKRTAFVPDPDRVKTIELIFKLRMERRSLNAIAKYLNDHAVKNFSGKESAWGPSVIEKLLANKALIGICVPSYRARGKGISEIAGYYPRVISDDLFYAVQEIRLAPFGISNSSKNPMLINLLRTVMKCEACGNTMIVHAVSGSLHGYYVCPMRRLHRCDRPSIKRDLVDYNIINELLFNCSKIQPVENKKDANETLELKIIELQMKINNLIAALSVAPEVTAIAEKIRVLDKELRRASVSLKTLKSKAVSSLGDFHAIDLTSKNGRELCRTLAYKTFEKIIINTDNKTCDIYFMNGIVFKHYPLMKTISAQQAISTLKYMVDGEIYF

SEQ ID NO: 18413 - protein, 615 aa, synthetic construct
MARKSERYPALYERLSHDDELQGESNSISNQKRILEDYAEQHGFTNCIHFTDDGISGTQFDRPGFQKMIAEVKADRISVVIIKDMSRFGRDYLQVGTYMEVLRKHDTRLIALNDSVDTLKGDDEFTPFRNIMNEWYARDTSKKIRSAFQAKNLAGKHTSSSVPYGYLKSEQDKNQWVIDPVAAPIVQRIYRMTMEGKGPYQIAAILSAEHIEIPAYYHQKLGIGLWQTREIRDPYKWGSSTIVHILTNPCYLGHTCNFKTRKHFKDKKSHYVDQDQWTIIENTQEPIIDQETYDNVQRIRAGIRRYPDGWGEAHPLGGLLYCADCGSPMYVNRTGNGKRVANFSCSGYGKIPVGSKCSSGHRVNADSVMALIQETLREIVRFSKEDEEEFVRIVKAEAENQQSSEIKGQKTRLAACKKRLDELETLICKIYEDNALGKLPDKRYQILDAQYAKEQESLEAEAASLQKAVDEYESGQKSADKFIALVKKYQNFEKLDTVMLNEFIYKIFVHERDYKGVANSPQTIEIYFNFIGKFGTQEVNQPTEEERAEIAEKERLRKKRYEAYLRRKANGWQDAYYQKHKAAKKAAMDAKKEAIRAEDRAKGVYYLPNQKGESA

SEQ ID NO: 18414 - protein, 463 aa, synthetic construct
MNNVAIYCRESTEKQNIDTLVSLCEKEAKKLGYSNYKIYKDIKSGYSKDREEYTKLKEDIKEEKINILILYESSRITRDEIEHHMFYALLKLYNVRVYTLNHGWIDLTNEDDCFLAGLLNLLDAREGRKTAKRVKDRMEEMAKNGFWTGGPAPFGYKLVDKKLIINPEEAEKVKEIFRLFLEGKTRFYLSALFGFECKRVMRMLVNPVYNGKLKFRQIEFKNKKRIEHKQFDVLPGIHEPIIDDYTFKLVQDKVKSIKRETNKGSYIFKDLLICTCGEKMYLHKKKYFYKRDTPTITNVYICNSKDRKIRNCSLSIIHENELFINVIESLEELILSFNVDDIDTNKNDFEKQLKYYKKELSSLSAKEEVLARQLMNGKLSENLYEKFIVELSENKEFIENKINSLTKVINSQEAKKNNKTILKKYFNKIKKEKDPEKLNAFFKLIIDSIEFINDYRFYIHLKF

SEQ ID NO: 18415 - protein, 511 aa, synthetic construct
MSQDVRCAIYTRKSTDEGLEQEFNTLDAQRESAEAFITSQRSEGWVVLPEHYDDGGFTGGNLERPALKRLLDDVAEGRIDCVVVYKVDRLSRSLLDFSRLMDVFDKHKVSFVSVTQQFNTTHSMGRLTLNILLSFAQFEREIIVERTKDKVYAARRKGKWTGGMPVLGYDVAPEGGRLLVNEEEAEQVRGIFQIYLDKQSLIATIKELEDRGWATKRWKTRSGHERGGKAFKLNSLHRLLTNPIFTGQVVFQGAVYEGEHKPIVDLNTWQATQRTLHGNFRRGPLGSNRYGALLRGLLYCSACGTAMIHTCSKRDTKTYRYYVCLTAQQRGWHQCPSKSLNAHDIETAVVEHIKGIGLNPAIISAVTNKATEKAQRNIMALEAEHLACEREIKKLTNEIRKLTEQPIKDARDPALAKLAEAQQALMEKEQRMTLVKEEVRSIQHGLTSHDEVGKTLQQFEPLWGTLTTQEKIKIIRLLVERVGFDGRDNSVTVTFRSQDIKELCSGQAAGR

SEQ ID NO: 18416 - protein, 500 aa, synthetic construct
MSLRGIVYARVSTDKQAERETPIESQISQCLKYAQEKGIEVVAIFKDEGISGSTDKRPQFQQAISYAVKNNVDCFIVFDTSRFARNREDAIYYKRLLRKNGIELHYVVTPLPDDPVSSYLTEGIFELLDEYYTLMIKKHTLRGIEESIKKRIYPKNKCPVGYKVVKGEDGKGRIYKDEETSHIYLKILTLFRRGLGALEIAHYLNRELGTDEWNKKKILRVLKNPLYKGIIEYGEIKVYFEDLRYISDEEWGKIQKELQRRHKEEKGRHKAKMFFVGLLKCGRCGSAMTTRTGKGKGGLYFYYVCYNRLHRKCKQEILPAHKVDEFLSKEILDYILNEQTLQELTARLKETIQKASNNFLEREKELREEKEKIENQINNLIKAITAGIDPHTVKDELNRLQAIKDKISAELSHIKNLKTLNVAPRINPAQVRAVFEELVASNDYRRIRSFFKTLIKEIVYDNKTFDIQYSPALFVIEGNQGRVTGLEPATRGSTVHCSTS

SEQ ID NO: 18417 - protein, 587 aa, synthetic construct
MNHKKAIAYIRVSTTHQDVERQRIKFKEYCKNNNLQANEEIIDFGISGAKSDRPGYLRLQALTGKDADILVVSELSRLSRQEEILETINIIQNIVYNGLSLIFLDAPSKVYEAHSTLDITELIILLVGAFRAAQDRKEIKRKNQEGKQALLSQNPYAVVDAKIPYGYNAIYNPNGSRPKKILIENEEEVANVKKIFQLALEGYSLGKIAKYFNNRNILFRGNFVTRQLLSVLVRNILYKGIRRRIHSFDRKDNPNIIENKITPIISESDFERVNQMLKDNHKFCSTGNNYFNTLRGIIKCRCGRGMMVKDKGYASGIKKMVYRCNDVSAKDNPIHCQYKDEISYQFTNEVIFNVFKYIHNTDEIFIFMAKTEQKIYEIDEEIKGIERKIENKNIEIESLNKDNKRLIERYIHAKSQSIANAIQDEQLTIENKIHKLEDEISHCNKEKVKLITNKESLINYIDTEELSSLGNEERAELFKKHLEKVIYLPVTLMQGFYIITFKSKMQRIVAIRKTAKSPIAAILPDGYTVDMNTKLITEYYQSIQTGGCSYPISSSFKQLTIQEYFKKLPQIGNLGILEIDYSYRKGK

SEQ ID NO: 18418 - protein, 542 aa, synthetic construct
MQQLKTKRVGIYVRVSTEMQSTEGYSIDGQINQIKEYCDFHHFEVKDIYADRGISGKSMNRPELQRMLKDAKEGNIDCVMVYKTNRLARNTSDLLKIVEDLHKQNVEFFSLSERMEVNTSSGKLMLQILASFSEFERNNIVENVFMGQTRRAQEGYYQGNLPLGYDKIPNSKHELMINQHEANIVKYIFECYAKGHGYRKIANALNHKGYVTKKGKPFSISSITYILANPFYIGKIQFAKYKDWSEKRRKGLNDKPVIAEGKHSPIINQDLWDKVQMRKKQVSQKPQVHGKGTNLLTGIIHCPQCGAPMAASNTTNTLKDGTKKRIRYYSCSNFRNKGSKVCSANSVRADVIEDYVMKQILEIVKSDKVIQQVVARVNQENQVDGASLHHDIAYKQQQYDEVKIKLNNLIKTIEDNPDLTSVIRPSIQKYEKQLNDITNQINQLKNQQNEDKTLFDAKEISKLLQHIFHDIKHIEKSRLKALYLSVIDRIDIKKDGNHKKHFYVTLKLNNEIIKQLFNNKQLDEVHLSTSSLFLPQTLYLTI

SEQ ID NO: 18419 - protein, 617 aa, synthetic construct
MDVQVIESSKKTSDGRATEYTKIYHVAAYCRVSTDELEQKNSYESQINYYRQKIAEHKDWKLVDIYADEAISGTQTEKRTGFQKMIDACRAGLVDLIITKSISRFARNTQDVLKYVRELQDRHIAVIFEEENINTLRMDGELLLSILSAVYQQEVENISAHVKKGLRMKMLRGELVGYAACLGFDYDIKTKQLSINEKEADIVRFIFKRYLEGVGGSRIAKELEAMGVKTKRGSSNWAVSTVNNIIKNEKYIGEIVQGKTYTANPITKKRRKNNGELDSYRTREHHPAIISKEDFNLAQEIRTGRGAAQNSSEVGAIPRFGRRYAFSHMVECGFCGEKYVRRNWHSRTTYAKFVWQCGGTTREGRKKCPCSRAVSETELEQAFVTSYNSVNTADNNETMVIFEDLMREVITRKEKGQTKSQIENSIAAVQKKIDMLLDMHLNKMIAEDDYGKKYKMLREELDKLVNKKKDVDTLKMATMTPQQRLKKFREVLTSNPNLMEFNRELFEAVIKKVTIGKINENGDPEPHVVRFEYVHGVVDEVMVQGTGRNAKTTADEDVVRMVHEERAGYGMAEQLTGMQRQSLDSMLSNGVIDKRLYNKTAKRLIGVNKVTASLSGG

SEQ ID NO: 18420 - protein, 506 aa, synthetic construct
MNAVIYARYSSDNQREESIDAQLRFCHRHCDEKGYNVIHEYIDEAFSATNDNRPAYQQMLKDAAKGGFDVVVFHKVNRNARNEYDYYMNKMKLMRAGVSIEYAGQAFDTQTPEGQLMENQLVGMAAYFSRNLAKEVKKGQNENALKCVHNGGIPPLGYDVDPVTHKYIINEKEAVIVRYLFSAYATGTKYPDIIAECERRGYRTKRGNKFGNNSLHDLFRNKKYIGTYTYGKTRGGHNMPRNSHVEADDMVEIPNGMPAIIDMETWQATQDRIYQRIKKNGAFHSDVNYLLSGLVVCGKCGKSVTGTFYRRAQKDGSKRLHAYYRCEHCNAKQIPKDKLEEYVIKAVKANIRNKRKVEQIVTSINSELKRQNKSIAVEVHNIDSELKSIDKANDNLLGFIEQGQVSEIIATRLKKNAERSAILRARLTELKKQEQNALDVDSVREVLQAWQAVKDEKGLSAMIHSFVSRVVLYEDKVDIDMFIGMDGVHYHTDRLLSSTPISSKKA

SEQ ID NO: 18421 - protein, 502 aa, synthetic construct
MSAQLKRLPTAAPSRAIIYLRQSTYREESISLEVQERAARDHAERNGYEVVGVESDPGISGRSWKQRRGVQNALAAIEAGKADVVVVWRWSRLSRNRRDWAVAADMADLAGGRIESATEPNDQSAAGRFARGVMTELAAFESERIGEQWQEARDHRVARGLPSTGGARFGYRIVDRAYVPDPETAPVLAELYRLYLAGQGSTRLAGYLNGTGIPRTRTNRPWGYSDVFDLLDSGFAAGLLVRTPPRPKNQPTASAPRARVWEREFREGSHPAIIDRATWDAYVAARRERTRARSRTDARMLAGILRCLDCGGPMHHNSWKKGRMYVCSRGSRYTGHRQVSVNAQRVEAAVEAWVLAQAADLTAIAGAVERTEERGARIEMTARRAQQQIERVEARLTTLALKLADGTISDAAYRLAAESLEAERKGATELLQKSARNPVRDSAPLGLSRDLARQWPGMTDGVRNALLRPLIAYVGVRPAKHRGDRSERWVIVPSWDAETDEG

SEQ ID NO: 18422 - protein, 481 aa, synthetic construct
MITTNKVAIYVRVSTTNQVEEGYSIDEQKDKLSSYCDIKDWNVYKVYTDGGFSGSNTDRPALESLIKDAKKRKFDTVLVYKLDRLSRSQKDTLHLIEDVFIKNGIEFLSLQENFDTSTPFGKAMIGLLSVFAQLEREQIKERMQLGKLGRAKSGKSMMWAKTSYGYDYHRDTGTITINPAQALAIKFIFESYLRGRSITKLRDDLNEKYPKHVPWSYRAVRTILDNPVYCGFNQYKGEIYPGNHEPIISKEEYDKTQSELKIRQRTAAENVNPRPFQAKYILSGIAQCGYCGAPLKIMLGVKRKDGSRLKKYECHQRHPRTLRGVTTYNDNKKCDSGFYYKDKLEASVLKEISKLQDNANYLDKIFSGDNDETIDRESYKKQIEELSKKLSRLNDLYIDDRITLEELQSKSAEFISMRATLETELENDPALRKNKRKADMRKLLNAEKVFSMDYEGQKVLVRGLINKVQVTAEDIVIKWKI

SEQ ID NO: 18423 - protein, 481 aa, synthetic construct
MKTMNKVAIYVRVSTTSQVEEGYSIDEQKAKLSSYCDIKDWNVYKIYTDGGFSGSNTDRPALESLIKDAKKRKFDTVLVYKLDRLSRSQKDTLHLIEDVFIKNGIEFLSLQENFDTSTPFGKAMIGLLSVFAQLEREQIKERMQLGKIGRAKAGKSMMWAKTSYGYDYHRETGTITINPAQALAVKFIFESYLRGRSITKLRDDLNEKYPKHVPWSYRAVRTILDNPVYCGFNQYKGEIYPGNHESIISKEEYDKTQSELKIRQRTAAENVNPRPFQAKYILSGIAQCGYCGAPLKIMLGVKRKDGSRLKKYECHQRHPRTLRGVTTYNDNKKCDSGFYYKDKLEASVLKEISKLQDDADYLDKIFSGDNAETIDRESYKKQIEELSKKLSRLNDLYIDDRITLEELQSKSAEFISMRGTLETELENDPALRKNKRKADMRKLLNAEKVFSMDYENQKVLVRRLINKVKVTAEDIVINWKI

SEQ ID NO: 18424 - protein, 540 aa, synthetic construct
MPQTEKTVRYIAPKASVSEEVKNKYRQKRVAAYCRVSTQQEEQINSYEVQTRYYTEKINAEPKWKLVRIFADKGISGTSTKHRDEFNKMIRMCKRGRIDMIITKSISRFARNTVDCLKYVRLLKDINVDVFFEEQGIHSIEKGSEFYITVYGSIAQSESENISANVRWGKEQSAREGNVSFHYKNFLGYRKGDDGNPEIVPEEAEIIRYIYERFLAGDSHQTIINNLQNKKILTPGGKERWTYGTLHSILTNERYMGDAIINKTYTVDCISKKKKRNNGERAKYYVENNHPAIIDRATFGKVQEEIARRSGLRKVKQVGTKTELGKYSSKYALTELLVCGECGTPYRRCTWTACGNKRIVWRCISRLDYGKKRCHNSPTMSEEDLHRAIMSAVQTVAMQNTKLLQTLKTFITMTVKCDDSEDRELEIKVRLAEINDEFQKAMSLVSVDDDNNLVIEQRLTELIMEKEKLNKELAKYSDEDSANSDSKANEIVRLTDILENQPLQFNDELIRQMLQCVVVESKERIKVIFNDGTEIDQPIL

SEQ ID NO: 18425 - protein, 413 aa, synthetic construct
MNIRKIEAKNNKRKKRICVYVRVSTTNGSQLDSLENQKVYFEKLYAERDDVEFLGVFCDKGISGSKYDRPDFQTMLGACRKGQIDVIHTKSISRFARDLINVLEISRELKTLGIDIFFEEQNIHTLSNEGEVVLTVLTSLAEEELQSMSGNQRWSFRRKFQKGELLINAKRFLGYDLNEKGELVINKAEAQIVRTIFYSYLEGMGTHRIAKKLNEGKVSTVTGKKWYDSTIRNILKNEKYKGSLLLQKYFHDGVNGPKKLNQGQVEQYYIEDNHEGIVSKEIWEKVQVKMKSRSRIQGTNKTYKFSRMLKCQYCGSTLKRQVSYKKKIVWCCSKYIKEGKNSCKGMRVPERDIEDWKLSSPVIVLERIEDGEKYYSYTGQKGTSNSHISNSEKNQSSRLLSSVYRPRRAAIKL

SEQ ID NO: 18426 - protein, 430 aa, synthetic construct
MSTDQDEQLSSYENQVNYYREYILKHEDYELVDIYADEGISATNTKKRDAFNRLIQDCRDGKVDRILVKSISRFARNTLDCIKYVRELKELGIGVTFEKENIDSLDSKGEVLLTILSSLAQDESRSISENSTWGIRKKFERGVVKVNTTNFMGYDKDEKGNLIINHEQANVVRYIFDRFLEGYSPEFISKELREQEIPGCTGKAKWCPSAIWKMLQNEKYKGDALLQKTYTVDFLTKKRIDNDGQVNQYYIENNHEPILDREKWEIVQLEIARRKKFREQHKLQFYIMQKENNPFTTKVFCAECGSAFGRKNWTTSRGKRKVWQCNNRYRIKGKIGCLNNHIDEEMLEKAVVMAVEQLSKNVDLLHGKWNKVLEENRPLEKHYSLKLAEMINKPLWEFDSHEMCQVLDNIIIAEDGQITVRFLEGTEVDL

SEQ ID NO: 18427 - protein, 481 aa, synthetic construct
MKTMNKVAIYVRVSTTNQVEEGYSIDEQKDKLSSYCDIKDWNVYKVYTDGGFSGSNTDRPALESLIKDAKKRKFDTVLVYKLDRLSRSQKDTLHLIEDVFIKNGIEFLSLQENFDTSTPFGKAMIGLLSVFAQLEREQIKERMQLGKLGRAKSGKSMMWAKTSYGYDYHRDTGTITINPAQALAIKFIFESYLRGRSITKLRDDLNEKYTKHVPWSYRAVRTILDNPVYCGFNQYKGEIYPGNHEPIISKEEYDKTQSELKIRQRTAAENVNPRPFQAKYILSGIAQCGYCGAPLKIMLGVKRKDGSRLKKYECHQRHPRTLRGVTTYNDNKKCDSGFYYKDKLEASVLKEISKLQDNANYLDKIFSGDNDETIDRESYKKQIEELSKKLSRLNDLYIDDRITLEELQSKSAEFISMRATLETELENDPALRKNKRKADMRKLLNAEKVFSMDYEGQKVLVRGLINKVQVTAEDIVIKWKI

SEQ ID NO: 18428 - protein, 428 aa, synthetic construct
MRVRIIEPIRKVQDVKKKVCAYARVSTDSEAQGDSLENQTTYYENLIISNPEYEFVGVFADKGITGTTENRPGFKRMIKAARDGQIDLIITKSISRLARNTTVMLEVVRELKELGVEVRYEKENINTLSGDGELMLAVLSSFAQEESKNVSDNIKWRVRKKFEAGEVMINTTRFLGYDKSKDGNLIINEEEANIVKRIFNEYLGGKGTFLIGKELNHEKVPTVTGGQWYDSTILTILKNEKYKGDVLLQKTYTLDHLTKKKVKNTGEVNSYYIENNHPAIISKEMWERVQEEIKRRGKCKGNTGGRDKYTKQYPLSRMLYCSKCGASLIRRTWNSKLSCRKIVWQCSNYIKNGKNSCEGTKIEDEIISRINIKEEVIVKEEMKNGEKYYSYTSKGKQNKSRREFKTTESENGSLLQGFHRPIRTVIKL

SEQ ID NO: 18429 - protein, 443 aa, synthetic construct
MAAYCRVSTDQLEQLSSYEAQVNYYTTFIENHPDYTLAGIYADEGISGTNTKKRDQFNKMIEDCKAGKIDMIITKSISRFARNTLDCLNYVRQLKDIGVGIIFEKENINTLDAKGEVLLTILSSLAQDESRSISENSTWGIRRRFEQGKLHLNHTKFLGYDKDAEGNLIINESQAKIVRRIYNDFLDGKGANRIARELEEEGIINWNGKAKWYESSIRNMLTNEKYKGDALLQKTYTVDFLSKKRTENNGEIPQYYVEESHPAIIDKEMWEAVQLEMERRKAFVKEHGIAKLDYATVKNPFAGRIICGNCGSTFGRKVWNSTDERLKRIIWRCNKKYERKGKKSCNSSHIDDKVLYLAFVNTFNAMIENKDYFIDKWKQRLESENVLVRYKANQFIKVLEKAERLKDFDMNLYFKLTEKMTVFEDKRLIVSLLDGTEVECDIE

SEQ ID NO: 18430 - protein, 452 aa, synthetic construct
MKAAIYIRVSTQEQVENYSIQAQTEKLTALCRSKDWDVYDTFIDGGYSGSNMNRPALNEMLSKLHEIDAVVVYRLDRLSRSQKDTITLIEEYFLKNNVEFVSLSETLDTSSPFGRAMIGILSVFAQLERETIRDRMVMGKIKRIEAGLPLTTAKGRTFGYDVIDTKLYINEEEAKQLRLIYDIFEEEQSITFLQKRLKKLGFKVRTYNRYNNWLTNDLYCGYVSYKDKVHVKGIHEPIISEEQFYRVQEIFSRMGKNPNMNRDSASLLNNLVVCGKCGLGFVHRRKDTVSRGKKYHYRYYSCKTYKHTHELEKCGNKIWRADKLEKLIIDRVNNYSFASRNVDKEDELDNLNEKLKTEHTKKKRLFDLYISGSYEVSELDAMMADIDAQINYYEAQIEANEELKKNKKIQENLADLATVDFDSLEFREKQLYLKSLINKIYIDGEQVTIEWL

SEQ ID NO: 18431 - protein, 452 aa, synthetic construct
MKAAIYIRVSTQEQIENYSIQAQTEKLTALCRSKDWDVYDIFIDGGYSGSNMNRPALNEMLSKLHEIDAVVVYRLDRLSRSQRDTITLIEEYFLKNNVEFVSLSETLDTSSPFGRAMIGILSVFAQLERETIRDRMVMGKIKSIEAGLPLTTAKGRTFGYDVIDTKLYINEEEAKQLQMIYDIFEEEKSITTLQKRLKKLGFKVKSYSSYNNWLTNDLYCGYVSYADKVHTKGVHEPIISEEQFYRVQEIFSRMGKNPNMNRDSASLLNNLVVCGKCGLGFVHRRKDTVSRGKKYHYRYYSCKTYKHTHELEKCGNKIWRADKLEELIIDRVNNYSFASRNVDKEDELDSLNEKLKTEHVKKKRLFDLYISGSYEVSELDAMMADIDAQINYYEAQIEANEELKKNKKIQENLADLATVDFDSLEFREKQLYLKSLINKIYIDGEQVTIEWL

SEQ ID NO: 18432 - protein, 616 aa, synthetic construct
MAKNVLFYARYSTDRQNEVSIETQIELCEAFVKQKGWNLVATYSDSAVSGMSFMLRPGIQRLLAHVKRERIDVVLCVTVDRLSRDVEHSARILKDLNYQNTEIWTVHASQAITKLELHFRATLSDELVDQIRYRTREGMKTAVKKGKASTCLAYGYKLSQQRDANGDRIKGQRDIDPVKAEIVRRIFKMYADGISPRDIAHILNNEGIIGPRGAAWRDTAIRGSKTVGTGILNNPSYIGRIVWNKRQYRKNPDTERRTARMNDADQWVWADVPTMRIVSDDLWERVRARDAEIGDLYQNARTNRLNATHRPEYLLSRMLECAECGGPYAISGKDRYSCTNRKKRLPIDELDGACCGNSKTITRHELEERVLNCIPTAFYSLDIFDRISQKMVAHEVSKLKSAPSRKKQLTDELAVIKSKQTSLMQQIQDRQAENRPRLAILDDQLDELEVTREKLLIELAASDEPVEDFQEKIAKLKAQFNPENTKIAIRKLLFLARTNADEQAKRRLMPIVRDLIQTVVIGKTLGHQPASLQVHGDIANIMASMDVIDIMQQQFVAAAQNDLMSRIASGEIDTEHKKKKLLEAYSEELLRRFPEWENLQMSVVAGAGFEPAAFRL

SEQ ID NO: 18433 - protein, 452 aa, synthetic construct
MKAAIYIRVSTQEQVENYSIQAQTEKLTALCRSKDWDVYDIFIDGGYSGSNMNRPALNEMLSKLHEIDAVVVYRLDRLSRSQRDTITLIEEYFLKNNVEFVSLSETLDTSSPFGRAMIGILSVFAQLERETIRDRMVMGKIKRIEAGLPLTTAKGRTFGYDVIDTKLYINEEEAKQLRLIYDIFEEEQSITFLQKRLKKLGFKVRTYNRYNNWLTNDLYCGYVSYKDKVHVKGIHEPIISEEQFYRVQEIFARMGKNPNMNRDSASLLNNLVVCSKCGLGFVHRRKDTMSRGKKYHYRYYSCKTYKHTHELEKCGNKIWRADKLEELIIDRVNNYSFASRNVDKEDELDSLNEKLKTEHTKKKRLFDLYISGSYEVSELDAMMADIDAQINYYEAQIEANEELKKNKKIQENLADLATVDFDSLEFREKQLYLKSLINKIYIDGEQVTIEWL

SEQ ID NO: 18434 - protein, 501 aa, synthetic construct
MNAVIYARYSPGPRQTDQSIEGQVRDCMAYAEQNDIKVLKVYADRHISGTDFEKRAEFNKMLRDSEKGQFEAIIVWKIDRFGRDREEIALNKIKLKRHGIKLLYAKEVIPDGPEGIILESLMEGLAEYYVADLRQKVKRGQRESALKGLAVSGMAAYGYKISDEKKYIENENESWVVKYVFEHYAAGKTATEILDELTRMGVKNRKGSPITKNGIYSMIRNEKYIGKCTYDGIDIPIPALISEELWDAVQSKIIRRPHSSAVYKAPERYLLSLKAFCGECGAMLVGESGYGKQGNKYLYYKCGTRKKKGHSHDCSLKTIRKEQLEDFVVQYTISDVLQDDVIDYIADKVIEINKKHTVNQLLSQLKSALRKAENGRNNLLKAIEDGIYTPSTKERLLELENECEELKVQIAKESIKKPEITKDHVVYWLEMFRKGNIKDEGFKQRLLDVFVHSVYVYNEKVVIAYNYTDNNHDNSIDVPGILEGSDTFVKVRHGGFEPPTT

SEQ ID NO: 18435 - protein, 517 aa, synthetic construct
MKTIHKLARPQLPEPPKLKVAAYARASTSSNEQLASLQTQITHYENHIQNNDQWEYVGVYYDEGTSGTKVEKRDGLHRLIKDAELGKIDLILTKSISSFSRNTVDCLNLVRKLTDIGVTIFFEKENINTGDMESELLLSILSSLAESESYSHSENMKWANRKRMAKGIFKTVPPYGYQRKGADFYLIPDEAKVIEQIFKWALEGVSAYQVAKRLNEKNIFTRKGSKWQDSGINNILHNIVYTGTMIHQRYFNDDQFRKKKNNGELPMYRIDNNHPPIISWEDYERVQELITLRANAKGTSKGSQKYSQRYVFTKRIICDKCGCNYKRVHIAGKGNTKVVKWSCTGHLKNKDGCDALPITDESLKTAYLTMLNKLILGHTIVLEPLINTPVEGKASKQELEKLSIEITKIDEKLEVLASLNASGVVSTKTALEEQGRLQMELNKLQEKQHKIMESVNGTSTQRIQLEQLHQFTKRSEMLTEWDEDLFLRFAELIVVYSRQEVSFELKCGLLLKERLEA

SEQ ID NO: 18436 - protein, 452 aa, synthetic construct
MKAAIYIRVSTQEQIENYSIQAQTEKLTALCRSKDWDVYDIFIDGGYSGSNMNRPALNEMLSKLHEIDAVVVYRLDRLSRSQRDTITLIEEYFLKNNVEFVSLSETLDTSSPFGRAMIGILSVFAQLERETIRDRMVMGQIKRVESGLPLTTAKGRTFGYNVVDAKLYINEEEAKHLQLIYDIFEEEKSITFLQKKLKELGFKVKSYSSYNKWLMNDLYIGYVSYADKVHVKGIHEPIISEDQFYRVQEIFSRMGKNPNMNKESSSLLNNLIVCEKCGLGYVHRAKDTVSRGKKYHYRYYSCKTYKHTHELEKCGNKIWRADKLEEIIIDRVKNYSFATRNVDKEDELDSINAKLKVEHLKKKRLFDLYINGSYEVAELDKMMADIDAQINYYNSQIEANKELKRNKKVQESLAELATVDFDSLEFREKQIYLKSIINKIYIDGEQVTIEWI

SEQ ID NO: 18437 - protein, 558 aa, synthetic construct
MTKLYSYIRFSSMRQSDGSSYERQIRMAKEIADRYNLELVNDYQDLGVSAFKGANSKTGALSRFLDEIGRSIPVGSWLFIENLDRLSRQDIISAQELFLSIIRRGITIVTGMDNKIYSIETVTANPMDLMFSILLFIRGNEESQTKRNRTNSSALLKIKAHQQNPQNPAVAIEEIGKNMWWTDTTSGRVLPHPVYFPVLQKIVQLRQEGHSAGAILDYLNEHHEPPAPTSNKKHGKWSRAMVSRLFHTKALIGVKTVNVDGVEYELRDYYPRVLSDSEFYFLRKNIVKKAWDYSHDKEKVIPLLSGIGVLRCVHCGATMVKQTAANGKREQYRYCCDGRKSGRTDCPYPNWGFRAVTLEGAVLQLLADKIWIAEDKTNPIPEIQVKIDEISRKIDNLINLSAMMGATKELANQITDLNSQREALHEEIRLFEREMYSVDSQGWDKLAQFDLSDVQNEERLKVRMKIKGALHEIECSRIDSKKNLFVLVYLDGLRQRLVIENNRGLKKGQIFVDLKTINDRQILESAGMVLHPCIEMIIDADWKAPEEIPGLLSEEFGI

SEQ ID NO: 18438 - protein, 525 aa, synthetic construct
MSRTVTAIPATKKLRSAAASSGVPAHRRVAAYARVSTEMEEQTSSYEAQIDYYTTYIHSRNDWQFAGLYCDEGISGTSMKRREGFQTMIDDALAGKIDLILTKSVSRFARNTVDSLTTVRKLKDAGVEVYFEKENIYTFDAKGELLITIMSSLAQEESRSISENVTWGHRKRFQDGKVMVPYKSLLGYKKGADGSLVIDETQAPTVRLIYQLFLDGMAISEIKTELAARKILTPRGKEVWSTSTVRSILSNEKYKGDALLQKTFTTDFLTKKMKVNEGEVPQYYVTGNHEPIIAPRIWDQVQYELATRHGNISSAKVGLFSTRLKCARCGVWYGRKTWASNTKYKYTVWQCNHKYTDEHPCSSATVKDEQIKDSFVQALNQLIARRPQQSQLPQVLGDMFGTSRLEEQAAACQTKIVELTEQIEALIAENQRCALNQDAYQNKYTELDTIYRKTLARKTSLEADIAANTAKHAAITTTLNDLTGEPVSEFHPAQWSALIDHAIVDEDTIRFVFRTGEQVSMALKG

SEQ ID NO: 18439 - protein, 416 aa, synthetic construct
MAQVSVVTPVRTLAPKLVNVAAYARVSTNGAEQLASLSAQVSYYSRLIQSTPGWAYAGVFTDEGVTGTSMKSRQGLADLMNAARAGKIDLVLCKSISRLARNTVDLLATVRELKDLGVAVRFERERIDTLSADGELLLTLLASFAQEESRSLSQNVKWAIRNRYKNGGTNSFVVYGYSWADGEFTIIDDEAKIVRLLFANYLEGISPEKTAAILNGQGVRSRGGGRFYGSVFRRMLENERYKGCQMLQKMYRPAIQAPNRALNDGELPRYWVEQALPPIIDKSVFDAVQAEIAYRREIGPAATPSKNTGVFTGRICCGACGKNYQRKTRTYKSGTSYKFWRCWSACTGNGNPCRGHNLRETLLEHACADMLGTQGFDPVHVAEQVVMIEAFEHQLTFHLADGTMTPVGLTSEGRLA

SEQ ID NO: 18440 - protein, 522 aa, synthetic construct
MKLSHILQPNMKAAFYGRHSTDKQDMDMQLNSVMEVIRKYDCIHTHSFLDKAVSARKNKITSRKELENMFEAAKRKEFDFVIVYKSDRLARDPLEHQTIRIVMKTLDIPIIISSTESVYNTDTDLIVQLMEDGFTKYEVDTIIARTRSGLENKAKQGKWLGGKPPFGYTYDKNSGQFIEHPEELCYVKEIFNLYVNGHGFQYIANTLPNGSRRGKDWGKENVKAIVLNPFYCGLLSWRRQTDGKQNVRDIWIEAPNHYVKPIISRTTWESCWRVYSEKRNGNMVPKHYKTSFLLQGLLSCERCQELMKTKNQQTVSSTNKKYGGKIYFCSNCKLRIDADLLHDKVVNQTLTDVKISGFQNVYQAIEQKIQYEIQELNNNIQKHHRLFENITIKLHNITEELKQRMKNNDDKRFLKSLAIYRLDVQRKLDGVTQQINDFKKQIILKEKVEKSKETWLHTLNEVFQDDVKLQEISDMDKRRFLLPLIQSVSIKENKKRNEYDISLQLRTDFSKRDVKNQISLIL

SEQ ID NO: 18441 - protein, 515 aa, synthetic construct
MYRPQELDVFIYLRKSRKDLEEEKKAMEHGQHYDTLERHRTQLLELAHKEHHNIIDIFEEVVSGEYISERPMMQKLLREVETGIADAVLVMDLDRLGRGDMVDQGTIYRVFRYSETFIITPTEVINPNDENQELTFSIKSLIAREELKTIVKRMQRGRRVSAKEGKSISRVPAYGYLRDNNLKLYPDPEKSWVIPKIFELMANGIGRQAIAQELDRLGVAPPEGEYWNPSTISSIIKNEVYLGHIIWGKIRYTKQNGKYIRKKVPKERWQRHDHAHPSLVSGELFQKANMAHSKRWRPPTIKTKKLSNPLAGILLCELCGHSMLYQPRKDRPNPQVRCVQPSCKGIQKGASLALVEQRILDGLKQIIESFEIQENMVQKKNSSNNIDLQQKALEKNEQQINDLQKQKSNLHDFLEKGVYDVETFLERQKSIAIRSKTTQKAIEELKHEIKKILEKEKHIHEFVPRIKNVLEAYYATNDIEKKNLLLKSVLEKVTYLRKKEWKRKDEFVVELYTKI

SEQ ID NO: 18442 - protein, 515 aa, synthetic construct
MKTAIYLRKSRADLEAEARGEGETLAKHRSTLLKIAKEMNLNILSVREEIVSGESLVKRPEMLALLEEIEDNKYDIVLCMDMDRLGRGGMKEQGIILETFKRSNTKIMTPRKTYDLNDEWDEEYSEFEAFMARKELKIITRRMQRGRVASVEAGNYLGTHAPFGYDIHRLNKRERSLTINSEEASVVRMIFDWYANEDMGANAIRSKLNDLGYKSKLGNEWNPYSILDILKNNVYIGKVTWQKRKEIKRPDAVKRSCARQDKSDWIIAEGKHEPIIPESLFEQVQEKLNSRYHVPYNTNGIKNPLAGIIKCSKCGYSMVQRYPKNRKETMDCKHRGCENKSSYTELIEKRLLEALKEWYINYKADFEKHKQDDKLKETQVIQMNEAALHKLEKELVDVQKQKNNLHDLLERGVYTVDMFLERSNVVSDRITEITSTMENLKKEIKTEIKKEKVKKDTIPQVEHVLDLYFKTDDPKKKNSLLKSVLEKAVYKKEKWQRLDDFELVLYPKLPQDGDI

SEQ ID NO: 18443 - protein, 584 aa, synthetic construct
MKSYLYSRISTLQQTKGFGIDRQVQTVTDFLKYATIDSRLGYQLDVEDFEVLESDLGKSAYKGNNWKPNSSLGRFYKDVVSGRITSGVLICENVDRLVRMSNYEASNKLSTLITNGIDIIEVESGMCFSNKIPESATILNMSISRAYSESKRKSDMATKSWANRTNKLKDSGRAVSKVCPRWLTVKDGQYVLDEKQAETLLYIHQMYLEGHGNSALVRRLNAAKRLDNGKPWTTITLHRVLRDERLTGRMVMGKTRKPIPVLDDQGNKIIENGKVKTYVPVEIIDDAYPVVVPRELFNQVQAMISEKEGSKVKKTTKYMRNIFNGVSRCSSCGEALVADKNGHGKLFYVCLGKRHKKACNSVGIPYEAFERTMLENLSQMDWQRIYTGNTDMEAMNQCRVRLVAVEREIAELEGELESSDEDMVLALVRAIKKKKAVRDEVQGELNSYVKAGTDNVTFNPDLKRVLNQEEVELRQDVNVELRKIIKYMKVGRMDRTITVQLQYYTDVVSHLIFIDSKTGELLSRSHLTNDLIYESDSVTIDLTGGKWDIKGDKFTEWDQFALEVWKEIIEQAVDQAQDILKNRI

SEQ ID NO: 18444 - protein, 479 aa, synthetic construct
MGKAKTPAQRVGARSAAIYARISADVEGTGLGVARQLEDCRKLAAERGWPIGDEYVDNDVSAYSGKPRREYARMLDDLKSGARDAVIVYNLDRLHRRPVELEDFVTLCESVGVRDVATVTADIDLGNDDGLFMARIFAAFAAKESGRKSARIRRKMLQNAEKGLPHGPARPFGYEPDKITLRPEEAKIVREMVDRYLAGASIRSLTIWLSDTGVAPPASKSWQTTTVRNILASGRIAGLREHHGEVIGAAAWPAIITAGERDRILARMTARSVTKTRAPRTYLLSGMLRCGRCGNRLFSQARHNNPTNRVRRYVCLKGPDHGGCGRLTVVALPVEELLTDAVLTRLDSPQLAGALAGRSSVDADVAALAAQLEADQARLDELAGLYAEGAVSAREWIAARDPITDRIARARRDIAKATDTSAVMDLVGCGEVLRGQWDDLDIDRQQAIIKSVLDHAVIAPGTPGSRKLDINRVQPHWRI

SEQ ID NO: 18445 - protein, 658 aa, synthetic construct
MIDISFDKTLYKGICIPYARFSSEQQAEIGRKSLERQIGEAKRYAIQNDLFLNDDLIFADKGVSGYALQGGVAKTFEKGQMFTMLSLLQKVPAEERQNVYITFHNFDRFSRMSPDEAQKHFQEILNQGFNIVTTIDDCVYTRKDTDMDKMILSIIHMCSAHYESEVKSKYVLDAYQRKRDVIEYLYNSPSQKGKHKHIGIKAYCPTWIKSEEVIYKYVDADGNEKLEALYQFSIDEDKAKVINKIFDMKIAGLGHIKICKQLNDSGVDTFQKGNYRKAKKWHTFSIHNLFKNEHVIGHTFLNQRRSVDFFDEEKNQFKTEQVKQIATAKLHDYYPSVVSEDKFRLAMKTLEDNKSSERRSEGKDKTHLFSQLMKCSCGGRMVFKSTKKKNVKKVDDYFEYLRCERSILNDGCEAENINYKAFEQQFVKYARHIDIESIVSDLSEALNDEYSLLSGKLSNALKEQDKAKLKATGLSKTFNSAINQGLDGSFVLDQIGENDKRLAQLAIEIADLERELRSAKQTEAKVEIPTLNKLLKSPNFEEVLEARKEINSYLKTKIRWLEVCSTKYHKFVIVCMVDNKIRTFSYQDEFASDLMFNSIKINTDSLSKNLADGLMIQLIQAVRLSLQGQTEVISNNDLIKYIVEVKQRYILDCESEFS

SEQ ID NO: 18446 - protein, 661 aa, synthetic construct
MFSFDKNLYKGICIPYARFSTKSQSKVGKKSLERQLGEARRYADQNNLFINEDLIFADKGVSGRSLSGNLAKAFKKGQMQVMLAMLDDVPAEERQFVFITFHNFDRFSRMSPDDAQAYFNLILQKGFNIITTIDNQLYTRNNKSLSSMIISIIKMTTAWQESEVKSIYVKDALARKKEIVDYLYNHPSQKGKHKHIGVVQPSIPRWIKQENITYEYVDQNGLKKVDTFKRFTLHEQKAKIVQYIFELRLSGLGHTRISQRLNEEGIPVFDQGKFKEAKHWHGYAIQNILVNEKVLGHLVLKSYKEEEFLCEESKTFKKRKVPVDSTGKLHNYYPAAVTEDMFIRANNVQLNKKSKPKPIGRIGERTNIFARIMVCSCGGSLQYHRTVKKFKNHERIKEYLRCLNAQFKNKCNCSGINYTELEESFFRFVNHLDFRSICAIGAGSVDNKIQSIEMQISESETVFNKLKLTKQGLERTFNSAIEKGMDATFVLNSISQNDEQQKEVKSKIEDLGLHIKKLELSKQNTVDEIIDMQAYSKDLKKADMDTKIKMRKKINDFLSSHIEHMEVCSNDYQRFVIVCFGDNIIRTYAYSDNFASDLMFNSIKVNFKGLNATQSKFLFVNYLKIIRESLKGERGAVSRLDMLNDLKQAKELYHNNLGIEL

SEQ ID NO: 18447 - protein, 664 aa, synthetic construct
MKNIKIKCNIYTRVSTTMQVDGYSLDAQKEKLRRYAEFQNMEIVNEYSDEGKSGKSVEGRPEFQRMLDNIENGTDEIQFVLVFKLSRFGRNAADVLNSLQRMQDFGVNLICVEDGIDSSKDSGKLMISVLSAVAEIERENILVQTMEGRKQKAREGKWNGGFAPYGYELVNGELQIAEDEAEVIRLIYDKFIHTNMGIAAIAIWLNQHGYKKKKRQNNTLDAFAASFIKGVLDNPVYCGKLAYGRRKNEKVAGTRNEYRIVKQENYMLYDGIHEGIISETDWELAHQKRVKNGVKYEKIHSLDHEHILSGILKCPLCGSGMYGNVNRKKKKDGTLYKDYFYYACKHRRLMNGHRCDYHKQWSEDKVNNAVEEVIRKLVQNPKFEEAIRKKIGSRIDTDEIEREIENLEKQHRQLTGAKARLGQQMDNLDIMDKFYEKKYQDMETRLYRLYDEIEGVENSIEEVKKRLLNIQQQKISEENVYQFLLYFDKLYDKFTDLEKKEFLNSFVERVDIYDQEQPDGRFLKHIKFRFPVYFGDRETQELCWDNESTVETVVLLSHKKPDGHINVKVEFGEGEGKVPLDNIAKRAETYKPKERVTYKMIKEYIEAKYGFKVHTAYIAEVKRDLGLPMYDAPNAVEELKQPRKHPTAEKVEAIKDALKHFEVI

SEQ ID NO: 18448 - protein, 562 aa, synthetic construct
MEEIIWTGANAPSEIIKYVDLLCRKSKVLSENDRLREVSTQEQEKQGRAWAARNGYVVRHVWIELGSAYKDRKREEFDGALKAITSGISHALWVYMLDRFSRKGAEDVLKVIGIARVIFDWDRLDSMDDRDRERIINEAERARSYSARLSTRVTDVKRSQRDRGEWVSGWPPFGLVVGKDRHLYPDNTPAAPGMKETRAEVMQELFRLSALGASAKDLAIALTAKGVPHCSYKDGDWVPDGANWIPTTLRRWIMNPAYAGWQVVHLRGDGGKARNKTVAYRNDKGERVRVIPEGLELVSDEEQAAAIAGDGAVERSFDGATHLATPEPEKGLPWGGSKGPRERGVAVHILTTLLECANCGRNMFFTGESYVCGSQQGGRVCPAPARVTGKAIEPYVFTKWRDYVTACAEDDDLLAIISERWAKIERPEESAEAERARKTFREAENALGQLLQDKRDGLYDGPAAQFFRPAHREAMSAVREAEKVLAKYGGLRVDISFLMEKEEVTEHWEGLAKAGDKKKQRELLGCAIDRIYVKESPGIGKRFDGEKRVRIRWADEEVETTP

SEQ ID NO: 18449 - protein, 602 aa, synthetic construct
MSTALAPASRTRNTHSSPSSEGMDNASSGLPGTERTVFARPLRGVRAIRLSVLTDETTSPERQRDSCDAAAAQLNIDFGEGENLREAVDLAVSASKTAPWQRPELGEWLARPDEWDVLVWWRFDRAVRSQGDMHELATWAAIHGKIIVFAEGVGGGMQTFDFRDPLNPVTRMMLNQFAFAAEMEAWSIKERVTGAHAALRNMNYRHATGTPAYGYKIVPMPAELGGVGKTLVQDESAVKVLLRIIKDLLDGVTIQKLCEDLAAEGVLTPRDHWAQLKGKATTGGKVGAGRKGSKVVDKFRWTRHSVRRILTTPALLGWKMHRGNPVRNAQGEPIMATAEPILTREEFDVIGKLFDEKRATGGNQPEAPSDASKLLHVALCNTCEAPMYKQGRARSVNQADTYRCSSSANHTPCAAPTTIRADWLEEWVEARFLDLAGRIPVMKTLITPGYDPQRELDAVTAEYETHQELKGEQRSRAALKAWEQRLAALDNRMVELEATPARPEKRERFDTGQTIADVWTDADDETRRGLLVEAGFRVRVGKARPGGWRRLDETRLHLSVVGELDPAIESWMGLRDELGMGPDGKAVAGSRMRIGSAVGLAA

SEQ ID NO: 18450 - protein, 544 aa, synthetic construct
MAQRERCASLIASKGWSDAGHFEDVGKSGWDPSIHRPGFEEMMTAVRGGHVDAVVVFSLSRLTRRGALEAMRIIEELETHGVRLVSVEEPYLDTSTPVGVGILAIIAGLAQQESDMKSAYVSATKDTLRRAGSHVSGVAPYGFTTERATSGKLSVVRLVPDLVEAPHVRDMAKWAAEGVSASQIAKRLNEDGVPTKAESLGESGAKRLASRRARGVSEAVERPAWVSSTVLRILRDPRLAGYAIEWQGRVQATKDADGNPIPGKTGKRVILRDDEGQPVQSHEALIPTDEWWKLQDVLDGRTQVVVRAGRRVPTLLAGHGLLFCDVCGSVMVTDRRAGKLYYKCNRAGGVVPGHGGLVIGQDAADSETAGRVWARLMAMDPDDPEDLEWLAEASRRFARQQDTSQRDAERAAVRAELEHVRESRRILHVDRLAGVYGDETGAQMFRESMARLAAHEERTAERLAQLEATGSRTIQIPNEWTSVDGDPIGEGSTWAVWDLEKKREFLALFIDSVRITKSVGRGRNANTRDRVIVRWAAAPDSAGA

SEQ ID NO: 18451 - protein, 473 aa, synthetic construct
MNRAAIYIRVSTDRQAEEGFSLEAQHDILMDLIERKGLQLFKVYSDPGVSGGSFKRPGIQMMIKDMKDGKFDTILIHKLDRLSRNLGDLYGFMAMINKLEVRLIIAAQGSEEIDTRSPMGKAFLLFSGIWAEIYLDNLREETLKGLVKKANKGGRHMSRPPLGYTYDPEHNLVIVEDEAKLVREVYELYLSGMGRNKIAQHMNSHSRLKEGGKWDAKAVLTIVSNPTYAGFNHFKPADWDQDKRILTQGDHEAIIGVDDFEKAKKMQSRRKSGEMSNNSYEYAYSGILRCNKCGSNFNGNSTKQKLKTGMTIYKGYRCHNNYLYKTCDTPFISETVLNKLVFERILLSGQTVQERKQKRKEQVDMQKEVEISNRRRKNWMMALGDGKLSPGDYAMLIEDEEKRMNDIYAKAKEEDVYEMEIPTEDLIQMMINLRDHWTLLDAGTQKEIIQSMFRKITLEKKENGWQIVDLLTV

SEQ ID NO: 18452 - protein, 550 aa, synthetic construct
MSTTAALSARTPLRVVGLIRLSNLTDTSSSPERQRLKVDQWADLKDAVVVGYAEDLDVSAIHTSPWDRPQLAEWLNRPQDYDVIVAWKLDRIARKAIDFLYILEWADRHNIRIVTIDDGIDLSTEIGRMVATILAVFAEFEGRTMRFRAKQAYDHNAKMGKWTGGTTPYGYMPFKTENGWKLIPDPVASAVLWEIIERVLKGESVRSITIDLNRRATLAPRNHFRASRGLPIKDSGWSTANVLEMLRSKILLGFRHIAGSSARVLKGDDGLPVARAEPLISLSKWKQIQAALDERKRAKKGPRSNGSKLLQVLYCPICRSVMYKLKSRGNHRYYRCSAINNDPPCILRGIPAAPVESHVEESLLAWAGDIKRLEPVHFEGVDYSEEIQQVEDSIKELEEDRYLYGLYSGPEGAARYREIYARLEQIHAELTARPTSPARTDWVDTGETYASYWNSLSEQQQAAELRAMGVKVYALVWHDLRDPDEWPDLPRATLGSKTWALGGEGRRKRNVAPIIHVDWGDLKAMALRAQGTPDDPEAIAWGRIRPKEIE

SEQ ID NO: 18453 - protein, 539 aa, synthetic construct
MQGQLPNTVKYIYGYIRKSRQDIEREKRVDQDTLAEQRTLIEDLLETNFRHIDWDIYEEIGSGGDLIESRPVFSSIIEEIKAKEPRTVAIAIKEISRLGRGDYSQMGIVWDLLMEKHLYLITPGKIYDPYNSYDQKVIKFNMFMANMEYDMIKERMVEARAHYARMGRWMTGGAGIPYGYKFNSYTQKLEPDPDTAWVVQKIFHLYVNEGIGYNAISTRLSREGIPTATGKDYWKPMVIRRILVNPVYVGTVQFRTTRTHKGTKIKQDKKDWIVVENAHEPIIDKETFEKAGQKMKENRSSPKVKLEFEPTPLASLIVCSKCGNKMQRQYSTQYYTKKDGTKSCYRKEFMICLGCSVYMKYNSVEEEVLRILEEDFINVNPETLKEKLKEIIDIEKMQQNKKIDPLNRISVLEKQLQDLDGELTALRRMLRKGQISDEEYEQDRAEILRQKEDKERQLNFLRKETQAEQVEELDVETLQAGFKDILHLYRYGELSKGEKNELLRGIFDYIVLEKTGKGKFNLHAYLNPMLIINSTSSLN

SEQ ID NO: 18454 - protein, 525 aa, synthetic construct
MPSAFSYVRFSSGKQAKGSSEQRQRSMLGQWLEQHPSFTLSDLRFEDLGRSGFSGEHLDHGLGQLLAAIDSGAIQSGDVILVEAVDRIGRLEPLEMLPLFSRIVRAGVSVITLEDGHIYSKDSVNETSLFLLVAKVQQAHDYSNRLSRRINASYTARREKAKAGLGVKRETPVWLTTDGQLVPHVAPHIAQAFQDYADGLGERRICRKLRESGLEEFSKTNATTVRRWLKNRTAIGYWNDIPDVYPHVVDPALFYRVQQRLDAPKVDRAKPSAHYLTGLVKCAVCGRNYNFKQRKHTDPAMLCTSRARLAGEGCTNSKTYPVIVLDQVRKLTSLPFLQHAMENASSQADPSSQRLAVIDGEIGELSRKISEATKALLVLGFTPEIQESLEQLKTAREALEEERATLLLPQAEKLTAAQLEAFSNGLLDDSPMKLNHVLQTAGYSMVVHPDGSIDVDGKRFVYEGASRKEKVYKLRLLGEDKQWSLPILTPARAESLAKSVAGGYLPPNTPEDVARYFEKVKHLVR

SEQ ID NO: 18455 - protein, 530 aa, synthetic construct
MSRTKTTKNVKTIPATLRQFSSTPINEQRKRRTAGYARVSTDSEEQFTSYEAQVDYYTNFIKSRDDWEFVKVYTDEGISGTNTKKREGFRRMIQDALSGKIDLIVTKSVSRFARNTVDSLTTVRQLKEKGIEIYFEKENIWTLDSKGELLITIMSSLAQEESRSISENVTWGQRKRFADGKVTVPFGHFLGYDRGEDGNLVLNPNEAVIIQRIFSMFLQGMTPYGIAKQLTAEGILSPAKKDKWNAGTIKRILTNEKYKGDALLQKSYTVDFLTKKKKANEGEIPQYYVENNHEAIIEPAVFDLVQNELEKRTPANNRHSGVHIFSGKIKCGSCGSWYGSKVWHSNSKYRRTVWQCNHKFKGQEKCSTPHLDDDTLKELFVKAANKLLEDKDEIIANFESMKDILYDTGPLETKQAELQNEMEIVTELIQQCINENANVALDQGEYQRRYDGLVQRFDTTKEDLENVSGQIKEKVTRRQTMTAFLDELKKQDELLTDFDPLLWHSMIEHVTVNSADDMNFVFKNGTEINI

SEQ ID NO: 18456 - protein, 574 aa, synthetic construct
MRKINKIEPSAPVMPTRKKVAAYARVSEEKGRTLHSLSAQVSFYSKYIQTHREWEYAGVYADEGISGTTEDRDEFKRLLEDCDAGKIDIVLTKSISRFARNTVDLLQTVRHLRDIGVEVRFEKENINSMSGDGELMLSILASFAQEESRSTSENVKWAIRRNFQKGKPNSFCIYGYRWNGEHFVIEPEEAKIVKLIYDNFLKGMSAEQTEVQLEEMGVKSYTGGRFSNTSIRAILKNEKYTGNMLLQKGFIEDHITHKLKPNNGELPQYWVEDSHEAIIDLETYEKVQAEIARRRELGVFANPSINTTCFTSKIKCGNCGVSYRRSGKRQSKHSSDVYYIWTCQTKDRKGVSECSAKNIPEKILQGACAQVLGLEEFDEDFFLDQVEKVVVNGKDELIFHLHDGSVIPQHWKSTARKDWWTPEARAAKSAYSKKNPRSSGNITCFTGKINCSKCEQNLRRNTSPRVSGQKAHHWRCPPHTDCGHSGLEENMLKTISSDVLSIKEFDEGIFKEKVDSITVVSNTELLFQLKDGSKITKQWQFKRRQPAWSEERKKRQAEKMKAAWRKKHEQNKDN

SEQ ID NO: 18457 - protein, 547 aa, synthetic construct
MPVAFSYVRYSSLRQAHGDSLRRQTAMVAEWLKHHPEYVLSADDAYQDLGRSGFSGAHLDNAFGRLRAAVSTGIIKPGDCILIEAIDRAGRLAPSIMLNLLTEIVNAGVSLISLDDGITYDSDPYKSNNLFLLVAKVQQAYQFSDALSRRVKSAYERKRETARAGEATGRRAPIWIKTEYPNGKKAQPVVSLREDLAPLVAQAFQDYADGLGERRIHHRLRDQHPELAKLSTTSLKRWMRNPTAIGNWNDIPDVYPAVVSKELWYRVQKRLNQKSKPKSAASNHLLVGLVKCAKCRANFHTHVTPDNAAMKCGQRHRLGDQGCSNKKSLPMAVLDFIRSQTTYKALQRASLSRNLTTSEKRALEIEGELAELNRQAATAAEGAVKYGMSAFGPALDRITAQIGVLEDEKLTLVSKAAPSTEGEMIDLQEELLDVDEMRLNALLQEAEYVMWCDDRTITIEEPSIEFSADRQVITYLGKDRVRGVFRITWNGARIDLPDLLSAPQRAELEQHMTQEARYKSGELERTVMRYNSETGDMDHVSGPPLKS

SEQ ID NO: 18458 - protein, 544 aa, synthetic construct
MPPENIYSDTGISAHDGSNKRKGKLKELIDMISDMHIKEGDYIFVESIDRLSRQRLLQAKELVNGILEKGVILITTIDGQRYEKPNETNRIDDLQQDILLSVIAKRAYEESKTKSVRRKSAWNRAKKLAEEEKVIFNAHNPPYGIRYNKELNCFEIEEEEAQEIRDFFESLKYVGVSLSIKKLNAYSKRKWSSRNIKHLIDTKYVLGAYMAQRRDENKKKVFERYIENYYPQIVSYELFNEAIAAMKNRAQRKNYGNQSVGSLNIFRHSIKCDCCEASMMFEKQTNPKGVVYPYFQCYTRKELKNGCDQPRFRFDLAFGLFLELIYQSTTNEDFDVHPWQNEDPNPERQHEWITRESGMIYRLPTQDDIDEEERVENFRELLIKLLSNRESQTKDNKKIVELNNLLLEQKSYRDNLMKSFAGFTSGVIPKEFLEVVSKTEANINDIEQNLAELQTQINIKKTTINIYSENDIIDLYKTEDGRLKINQFFVANDITFKFNFEKTTRTLFAKIFQNGFEIDRIAKQFSLHNPLKEFGINNLNEYFN

SEQ ID NO: 18459 - protein, 568 aa, synthetic construct
MARLISYVRMSTSEQLKGISLERQRNLIADFASKNDFQEVIIYEDVGRSSFAEDENQKELNKFFEELEKDNFDKGDVFALENIDRLTRRGAIDALIKVNKIIQKGLKIAIISDKEQRILEEIDIYSIITLSIDASRANKESEVKSQKGLINWEHKRRLAATEKVAMTKRAPAWIDTEIYHYFDEEKKKEIKRRRYILNEEKAQTVRLIFDLFLNGNGSLKINKILNDRKIKLLNDNVEFWEPSRINKILKNPAVYGLYQPQKQRSGKRDLVDAGEPIEDYFPAVITKEIYEQCRLIAEKNLSERKGRKGENFTNVFTGLLKCEKCGSPVHLLNCGVDKRNKSQHALIYLICKKAKFTKQCSTKRMRYDAFEASIFRAVNEINLIEVLNENNPLNDLVKKQREIETAINKKNKLLENYEKSFLENDGNVPAFMISAAKKAEIEIKELEEQKREIQNEISSLNYYNANVENSIEDIKNNSSYEKRAKINLLFHEIIKSISIDLVEKYSVITFKNDITRIIDKDGFVINVDRVNKLEIVEEDTTTISAEIANNPKLLLEYFEKMRRDLESD

SEQ ID NO: 18460 - protein, 590 aa, synthetic construct
MKPKAYSYIRFSSPEQSRGDSQRRQREAAAKYAEEHNLELVLDKDYQFFDAGISAYKGRNSTHEGKLRRFYDYVKDGRIKNGSYLLVESLDRLSREDVLIALPRFIDLLNEGVNVVTLADGIVYSKGADVPQLIMSIVHMSRAHHESKLKGERVSKAWRNKQKVARQDHIPLGRVCPYWIDLVDGQYILNDAKAAVVKKIFEMTIGGHGQVSVAKYLNSSKIPVFGSGNRNKSGLWGTSTIAKILSNRSVLGEYQPMILENGKRIKNGMPIEGYYPPVVSESDFYSAAYMRSVRRTSNDTRQSIDFNVWSKIIFCSKCGSPMHLINKGRPPKGYRYLRCFSAAKGMCAAKSIRLEAANIAFKEILAMFNSLPLVKVSEKDSRRRITELKGKVEEIHKLLGQYQCLMESAPSITLSKAAAAKEVELIACENELAQVSEELAASVIFDKDKFFASLDLESYEGRSSANLYLRNLNVQIRAGYNGFESFFVAMTRGEGLKAHFAIWVGDDFSPKFTPLSVEMTETIINQGEVGRARMVAPLKRYLPDLIDRTEGNGRLPLVVPLNEVPEFEWHQNPEHHKNRLLRALGLLPEE

SEQ ID NO: 18461 - protein, 484 aa, synthetic construct
MQTKKVAIYVRVSSLHQAIEGYSIGQQQDALTKYCEAMNWAIYNVYTDAGFSGGKIDRPAMQKLITDAKTGKFDTVLVYKLDRLSRSVQDTLFLVRDIFNENNIGFVSLQENIDTSTAMGNLFLTLLSAIAEFEREQIKERMQMGRYGRAKSGKSMMWNLTSYGYRYNKETQSMDVVPSEALIIKRIYKEYLSGKSISRIKDGLNDEGHVTRDKPWAYKRISHILTSIVYTGVTEFKGEIYEGLHEAIIDKETFELAQAEFKKRQQQTKQNKNNPRPFQAKYMLSGMIRCGYCGAPLKMRKGPVRKDGTRLMAYDCHNRWKRKHTYLTVYNNNEQCTQSGRYLKEDVEGYVINEIKKLQENPDELNKYLKQPEETKVDTKKIESQIKKIDKQIAKLNDLYLNDLITIEDLKSKADKFKSEKNILEAQLKKDENSILKLKAENVRKNLSVKDIDKMTYEEQRNLAKTLIKKVDVTKEDIKIIFDF

SEQ ID NO: 18462 - protein, 506 aa, synthetic construct
MRTVITYLRFSSATQGAEGADSTRRQNDLFKQWLKKNSDAQVVASFSDEGLSGYKGKHLTGQFGDMLARIESGEFPGGTILLVESIDRIGRLEHLETEALMNRILGNGIEIHTLQDGLVYTKDALADDLGISIIQRVKSYIAHQESKQKSFRVSEKWKQRAKLALAGEQRLTRNVPGWIDPDTFTLNEHAETVRLIFKLLLSGESLHNIARHLQANNISSFSRRKDANGFSVHSVRTVLRSESVIGTLPASQRNDRPAIPNYYEAAIDAATFNKAQEILDKNRKGRTPASDNPLTINIFKGLFRCQCGASVHPTGTKRTYQGVYRCNNHLDGRCHVPPLKRKPFDKWMLENFLGMIDVGNDGESERKIAALQHEVEIVTARIKKATALLLEMDDITELKAQVKGLNQKRTEIQTTIDTLKRKTSLTDKELPQLKDIDLMTKAGRVECQLILSKHLKGLTLGKDSVIVTLQNDTEITIPTNPLPLNDGTSIFEIAEKELLEIDAYQL

SEQ ID NO: 18463 - protein, 567 aa, synthetic construct
MAIKAKVYSYLRFSDPKQAAGSSADRQMEYARRWAAEHGMTLDSELSMQDAGLSAYHQRHVTRGALGLFLQAIDDARIPAGSVLVVEGLDRLSRAEPIQAQAQLAQIINAGITVVTASDGREYNREGLKAQPMDLVYSLLVMIRAHEESDTKSKRVRAAIHRQCQGWMAGTWHGLVRNGKDPHWLRLVGQAYEIVPERGEAVRTAVSMFRQGHGAVRIMRSLADSGLQITNGGNPSQQLYRIVRNRALIGEKVLAVDGQEYRLAGYYPPLLSPAEFADLQHLTAQRSRHKGTGEIPGLITGMRIAFCGYCGAAMVSQNLMNRGRQEDGRPQNGHRRLICVSNSQGGGCPVAGSCSVVPIEHALLTFCADQMNLSRLLDFGNRANGIAGQLSIARVQVSDTTARIDKITDALLASDAGQAPAAFLRRARELESELAEQQKRVEALEHELAAVALSPEPAAAKAWAGLVEGVEALDHDARIKARQLVADTFDRIVVFHRGRTPEHSRSWKGTIDLLLMAKRGGARLLHIDRQTGGWKAGEEIDTIQIPLPPGVAEATSQSEALPGLVSR

SEQ ID NO: 18464 - protein, 601 aa, synthetic construct
MSEKRKIGVGYARVSSSMQAEDGLSLEHQTSKISEYCYKNNIKLLEIFEDAAVSGFHISDKERESLRAKKKLSREEMIHRKRSGLLLLLNAIRHEDIDYVIVTKNDRLGRDDEEKAFLKRECRKRKIEIIYIDQPGLTGAAQTATEMLMDRMMDLLDEFYSMNLGMEVKKIHEDLAKKGLYTGGRVPIGYKLATRLNEKGKDEKFYVIDEESAPTIKLVFNMYVEGKGFSAIANHLNEIKAPGKKVWTAQNISIILKNPNYYTRVWNRHESKRIEGILKEEELWIYNLDESNATIVTKEQYDEVQEQMKKRVKNTNKGDRKNIDHDSRSYGKYLLTGMVFCKNCGKTMVSNRTTSARSKTVGYYFSCPSNKSLPKGHKCSNNLNMQKLDFIVWKELCKFLTPSEIIKEIDNHLKTTAEENKAKNQKLYSFQKDLKKRQDQVENLFDIVAEMDFSNKSLLARYNLQIQKHEDEIELLKRKIDEFGEPLDENIVFPSNVDIVKVEYLLHEDYYTYLDFEVIRAIIQSVVDRIVTKRINENETEVEIFFRFNHPSINEIINFKKQTMKSKQKQRKETVNQAVMGFLSKLFLGIDYIVPSPYIYC

SEQ ID NO: 18465 - protein, 482 aa, synthetic construct
MTSLKTSIKTITYLSDTGCLEIQGASLSGYKGKHLTGQFGDMLARIESGEFPEGTLLLVEAIDRIGRLEHLETEALMNRIIAHGIEIHTLQDGLIYTRDALSDDLGISIIQRVKSYVAHQESKQKSFRVSQKWKQRAKLALAGEQRLTKMVPGWIDPDTFKCNEHAETVRLIFKLLLDGESLHNIARHLQANNISSFSRRKDANGFSVHSVRTILRSETTRGTLPASQRNDRPAIPNYYEAAIDASTFNKAQEILDKNRKGRTPASDNPLTINIFKGLFRCQCGASVHPTGTKNKYAGVYRCNNNPDGRCDVPPLKRKPFDKWMIDNFLGMIDVGNDGEAEGKIASLQHEVEIVTARIKKATALLLEMDDIDELKIQIKELNQRRTELQTTIDNMRRKASLTDKELPQLKDIDLTTKAGRVECQLILSKHLKGLTLGKDSVTVTLQNDTEIIVPTDPLPLNDGTSIFEIAEKELLEIDAYQL

SEQ ID NO: 18466 - protein, 528 aa, synthetic construct
MKVPVWSYARVSTLSQIDGFGIQRQVNTINQFIQYLVLDHRLPYTLDVDNITQMVAEGKSAFKGKNWNPKTKLGQYRKMVMDGVIPDSVLIVENIDRLTRLDPFQAVEIISGMINRGTTILEIETGMTYSRYIPESITVLTMQINRANGESKRKSIMMQKSHLNRFGKVSKVRPRWFDVVEIDGVKQYRMNDTARVIQRMYSDYANGIGPAQIVRTYGTSDNGKSWTLVTVLRALSDKRVADDARYPPIVDKSLYEKVQAMKNPLRGSTHQKNMFNIFSGMSRCPLCKQSIIVKRNSHGGLFTVCLGKRTHKTCEARSMAYNAIERPLLNAIKGLDFSEVYNREESNVLTLRDQWIRNERDIAAFRERLSKASRHEKFAILDELEQISKEQDELSIRLKSIDAPHDVQLDFNDDKLDLDVSYRIELNNRMKKLIQSIDMVRVDTGRSTYTVYCSIKYWSDFMTHLVIIDAETKRVGTGGTNMLTTSLRSVSSINSDGTFSGNPDMEAIEYWQSVMTQAFERAGVEMPK

SEQ ID NO: 18467 - protein, 644 aa, synthetic construct
MLRPICYERVSSIQQVDMGKGLDDQRSSLTAYLDKNADKFTDERIFITDAGLSAFKNANISPESQLGIFLQDVGNRKYGVGDALVVLSLDRLSRRSSWAESTIQYIVNSGIEIHDISTNLVLRVDDPMSKIHMELIQHRSHNESLMKSVRAKLAWDNKITRAVQNGEVISNRMPNWLRNVDNKYQVIPEQAELIVKCFMWYREGLSTGEIVKRIGRKWQMVTVSRLIRDRRLLGEHERYNGEVVPNVYPKIIDEELFLTANRMMDRVMLEKKKPAEDLLLEPEVVREIFKLYETGLGSGAIVKRLPKGWSTVNVLRVLRDKKVVTMKIIDNLTFERANEKLSRNGIANRIRKDITIAQDDYITNLFPKMLKCGHCGGNIAIHYNHVRTKYVICRNREEKKICDAKSIQYMRIEKNILQLVKNVDFNKLMMEGKSDSDSLLASLREELSTLQKEAETYQVKINERKAAGKKASLPLMTGLTEVQDRIEEIEPEILNSKNIKEIPVFDFDINKVLDPLNVELRAKLRKEVRLVLKSVKYWVFEKRIFVQLEYFNDVLSHTLVIDNKRGGGEVLHEIVISETSGERVYTVNEEGKTVFIASVTSGTDMWSLAISRTKILDDVGLYLNLLKREKFEIIVNEDMIDWMD

SEQ ID NO: 18468 - protein, 500 aa, synthetic construct
MNVAIYARVSTEWQAEHGYSIGTQIEACRKKAAEMGAFVVKEYIDDGYSGGFLERPALDSLRDAVQDGLYEAVIFHDADRMARKLIHQLILTEELEKAGCRPVFVLERFDNTPEGNMSYQMKGVFAEYERAKIRERTMRGKRAKLRAGKAICDSHIYGYDFDRGNSCYEINPAEAEVVRMIYRWYVEEMVGGCEYIAEKLNNMGIPSPSGNVSWCASSVRNLLHRPHYTGKYFANTQYHKKTGPKSYKRLPRPREEWIEMSCPQIIPAELHQKALSIKSKHRTYKVWQKNSYPALLQGVAVCGACGGSIRITGGGKRNARWYTCVNTPPRNGSKCAARLMDVVVTDALFWSVLEEICTSEETVTAYIGGRAGAECLPAIPEQNKRQKIVKRIEKIQTERTAVMSWFSQSLLSQSEATEKLASLKADESRLQNELAALENSPTSEVERLAPADICAVVRNCPASPEARRRVFLSVVEKVSVLRRDNNYGHKYLIDFDIVFK

SEQ ID NO: 18469 - protein, 547 aa, synthetic construct
MKIAIYSRKSIFTGKGDSIENQIELCKEYINRNFEKQVNEFIIYEDEGFSGGNTNRPQFQQLLKDAKAKKFDALICYRLDRISRNVADFSTTLEILQSNSIDFISLKEQFDTSTPMGRAMVYISSVFAQLERETIAERVRDNMLQLAKTGRWLGGQAPLGFEPEKLTYLDEEFKERTLMKLTPNEKELEIVRFIYKTYLEEQSINKVVKKLNLSRIKGKNNGTFSSSQVGRILKSAIYVKSDDNTHEYMKAIGINVFGTANGNGYLTYNKTKKSISDRDITEWISAISKHKGIIESSDWLNVQDLLEKNKSKKIIRLGTGESNNSILSGVLKCSLCGANMLVREGHRTKNSKSGKFYYYICSNKLNRHIDKCKNKNIRVDRLDNIIIAKIKTYNKDALIHCLNETINIDDEIISKKEQKKNLIQELSDKKLLAKNLVKKIALLENDEISEMFIAELTSLNNEIKQSQLTLDSFEKQDNKFNSEIKNIQLVINSLKKFNENIELTDDVSQKRFLIQSIIDKIIWDGDKYEAKVLLLQLGSLDEGLKKK

SEQ ID NO: 18470 - protein, 553 aa, synthetic construct
MKKSAIYVRVSTNHQIDKDSLPLQKQDMINYSKYILGIDDYEIFEDAGYSGKNTDRPDFQRMFKKIKDGEFTHLLVWKIDRISRNLLDFCSMYDDLKKYGCTFVSKNEQFDTSSAMGEAMLKIILVFAELERKLTGERVTSVMLDRASKGLWNGAPIPLGYKWDKNIKFPVIDDEEKHTIELIFSQYKENKSTSYIRNLLNSNNIKTKRNGSWTTKTISDIIRNPFYKGTYRYNYREPGRGKKKKENEWIVLESNHPYIIPTDLWEECNKIMDENAKRNNAQFRDNSKVHIFSGLVKCGECNNNLYAKQDKANQDGFRPSLYVCKSRYNGLGCTQKTISENIVGTFVLTLISNMINLSNINKKQLSIDLLEHELLKGNCFDNIIGIEETNDILSSLLYAPKNLFTPQNRNEKSNNGVISLNNLSSNLKKYERALEKLEDLYLFDEADMSKKDYFIKKQKIENNITEIRKKIDETAITDSSSHNYNFILNAATLEFSRKLISEKINIKSLIQDVGRDLIKEFVNILINKIIVKDRQIISLEFKNGLVTTFIYNS

SEQ ID NO: 18471 - protein, 460 aa, synthetic construct
MKCAIYRRVSTDEQAEKGFSLENQLLRLQAFAESQGWEVVHDYMDDGYSGKNMNRPQIKRMLHDLKLNKFDIVLVYRLDRFTRSVKDLNDLLEVFKDHEVDFKSATESIDTATATGRMILNMMVSTAQWERETISERVKDVVRKKKDLGLISTGYPPYGYAMNDGVISQVPHEVEIVKFIFEKAKVYGFQKISKLLNEQGLVTRNGTKWLISTASRIAHNPFYSGEMRYKRDGETSTVPINVEGYEPVITKEEHRDVLKAIKKRNRNQTRSKSNEVYPFSGIVLCPECGHPMKGTRVSSRGYYYKYYRCDRAQDHFCDGKLIRSEKVDKAFVEYLRVTFKVDRIEIKEETNTKDIEREIKRCKSKIERLKDLYVDGDISKKKYKNDVDELNEKIYDLEQKLLSAENKISHDHIRENLKRISELWEHIDDQTKTESIRGVMDTMTIEIQGKDVVITSHTLL

SEQ ID NO: 18472 - protein, 525 aa, synthetic construct
MRTVRDVLEKGKKGAFYARVSSDRQTIAAQRHHVYEFIKNYECEIVEEYVDHGKSAFKKRLIQRPQMMALLRDVEQGKYDFVITYADDRLARSEIEHAQIRLLMKGVDTDVILTSTAELYTERDIITQLIREGGTRYEVERISARTKDAYNQRTDYGEWMGGPVPFGYEQDEKTKKFSILKDEREIVLKIYQLYQSGEGFADIAKKLNEQKEKTNTMVWRKERVKQILTNPIYAGYVTSGRLKSGSGNSIEDLSKWKMAQCKEIPPIMTQEEWFATFHLFEKKRNKELPPKQFKTEYVLRDLIYCKKCDHPLLPKNQETTGGNGKKYGMKKYMCSNKTCKTWFPTEELHTLVFDSVMKEVTDKVISKSQTELMYEIEQGLEKDIKRIQKEIQRLKQQVNDSLVWIKDAEREIDELYNRKKRLVEADPEIDPLLDVMLDYRVHLLHEIKGSEELIAKKEAEVKRIEEVDSNQRVLEKNVLQAFQIEFANIQTDVKKVRQFLVYLIDKIIIDQNGNTEYILKINLEQ

SEQ ID NO: 18473 - protein, 491 aa, synthetic construct
MKRLESYAVYVRVSTDRDEQVSSVENQIDICRNWLERNGFKWDEKRVFKDEGISGTLFVDRPSIQLLLQKAKSKEIDMVVFKSISRLARDLKDSLEIREVFLAHNVRIISVEEGYDSVKAGKNDMAFELWSLFSAQYSRTLSSSITAALSVKVRRGEHIGKVPYGYNRENQKLVINEEEAQVVQMMYKWYLEGWGYKKITNELNRLGIKSKTKKNWQMTSVQRILQSSIYKGTFILNQYTSVKVGGKKKQIRNPEEKWFVFPDHHPKIVKEEMWNQVNRKKNKTNKTKITAWNEFRNLAKCAVCGSNMVIVQSHLKKKSGERTEWKYLKCSQYRRAGKHGCVNHVPIQYGDFRQFIISLLVEKGESVTLRLQSNVEKGQEKKIKNLQQLMSTNQQKKKALLDLYLEELINKEEFEKKRNDLEVEIIKADHELLVIQNGNHVQIDIQTIKQAFEQLQKQEQDLIHVFQTLIQKINIHQNGTVDIIYTFESPL

SEQ ID NO: 18474 - protein, 515 aa, synthetic construct
MKTAIYLRKSRADLEAEARGEGETLAKHRATLLKIAKEMNLNLLAVREEIVSGESLVKRPEMLALLEEIEDNKYDVVLCMDMDRLGRGGMKEQGIILETFKRSNTKIMTPRKTYDLNDEWDEEYSEFEAFMARKELKIITRRMQRGRVASVEAGNYLGTHAPFGYDIHRLNKRERTLTINSEEASVVRMIFDWYANEDMGASAIRSKLNDLGYKSKLGNDWNPYSILDILKNNVYIGKVTWQKRKEVKRPDAVKRSGARQDKSDWIIADGKHEPIIPESLFEQVQDKLNSRYHVPYNTNGIRNPLAGIIKCSKCGYSMVQRYPKNRKETMDCKHRGCENKSSYTELIEKRLLEALKEWYINYKADFEKHKQGDKLKETQVIQMNEAALRKLEKELVDVQKQKNNLHDLLERGVYTVDIFLERSKAVSDRINEITSTMENLKKEIKTEIKKEKVKKDTIPQVEHVLDLYFKTDDPKKKNSLLKSVLEKAVYKKEKWQRLDDFELVLYPKLPQDGDI

SEQ ID NO: 18475 - protein, 488 aa, synthetic construct
MESYAVYVRVSTDRDEQVSSVENQIDICRNWLERNGFQWDEKRVFKDEGISGTLFVDRPSIQLLLQKAKAKEIDMVVFKSISRLARDLKDSLEIREVFLAHHVRIISVEEGYDSVKAGKNDMAFELWSLFSAQYSRTLSSSITAALSVKVRRGEHIGKVPYGYNRENQKLVINEEEAQVVQMMYKWYLEGWGYKKITNELNRLGIKSKTKKNWQMTSVQRILQSSIYKGTFILNQYTSVKVGGKKKQIRNPEEKWFVFPDHHPKIVKEEIWNQANRKKNKTNKTKITAWNEFRNLAKCAVCGSNMVIVQSHLKKKSGERTEWKYLKCSQYRRAGKHGCVNHVPIQYGDFRQFIISLLVEKGESVTLRLQSNVEKGQEKKIKNLQQLMSTNQQKKKALLDLYLEELINKEEFEKKRNDLEVEIIKADHELLVIQNGNHVQIDIQTIKQAFEQLQKQEQDLIHVFQTLIQKINIHQNGTVDIIYTFESPL

SEQ ID NO: 18476 - protein, 525 aa, synthetic construct
MKTIRDVLEKGKKGAFYARVSSDRQTIDAQRHHVYEFIKNYECEIVKEYVDPGESAFKKKLIKRPQIMALLRDVEQGKYDFVITYADDRLARSEIEHVQIRVIMKEAKTDVILTSTGELYTERDIITQLIREGGTRYEVERISARTKDAYGQRTDYGQWMGGPVPFGYVQDENTKNFFILEDEKEIVLKIYQLYQNGEGFADIAKILNEQKAKTNTIHWKKERVKHILTNPIYAGYVTFGRLKPGSGNSIEDLSKWKMAKCEEIPPIMTKEEWLATFQMFEKKRNKELPPKQLKTEYVLRDLIYCKSCDAPLLPKNQETRGKNGKKYGIKKYMCSNKLCKVWFSTDELHALVFDSVIKEVTDKFISKSQIELMYEMEQILEKDIKQIKKEIQRLKKQVDNCLVWIKDAEREIDELYNQKKKLVEVDPKIDPLLDVMLDYRLHLLHEIRETEELIAKKEAEMKHIEDVDSNQSMLQKNVLQAFRIEFTNLQKDMKRVRQLLVYLIDKIIIDQNGKTEYILKINLEQ

SEQ ID NO: 18477 - protein, 540 aa, synthetic construct
MARSKKFKRNDNNLAIAYYRFSSHSQNEASIDQQRELAHAWADAHGLTIVREYEDAAISGTKEDRPGFQLMLSEVAKIRPSTLIMWKTDRLGRDKYVLAMAKKEIRDAGCEIHLLAENIPTEGPEGILVEGLMDAMAEYYSRQLSQNIQRGMDYNAQHALFNGHKVWGYGVDKSTKKYVVDEDTAPFVQRMFAEYAAGKAMQEICDEFNAQGLRTTRGAEFGVKTMNKMLQNRAYIGEYHHGDIVVPDGMPALVDVKTFNEVQARFALNKRKGSQRARGMDDAEAPRYWLTGKLFCGKCGASMQGVHGTSKTGRKYYYYYCKAQRAKQCDKRKMRKEQVEELVTILLRGLLENPENLASLAVDAAAYYRDNYRNTHYLDGLEAKRREVEKSTANLLKVIEKGVLSDAVTDRLVQLDEQKAALDEAIKAEHVRAALFEDEHSIKAYFDKFMRADFDNPQTRDAVMEYFVDKIYLYDDKLLATFFYSEDRTEISWGELGDLVIDPFVKGEAAEFDVFPFGSTTNPAMPGFLFSSSEVSHSGI

SEQ ID NO: 18478 - protein, 541 aa, synthetic construct
MLRQTTQQLITALYPRLSHEDELQGESNSISNQKRILETYAKQNGFSNLRWYTDDGYSGANFQRPGFQAMLADIEAGKVGTVIVKDMSRLGRNYLQVGIYTEMIFPQKNVRFIAINDGVDSAQGENDFAPLRNIFNEWLVRDTSKKIKAVKRSKGMSGKPITSKPVYGYLMDEDENFIIDEEAAPVVRQIYSLCLAGNGPTKIARMLTEQQIPTPGTLEYRRTGSTRRYHPGYECKWATNTVVHLLENREYTGCLVNFKTEKPSYKLKHSIENPPEKQAVFENHHEPIIDRETWERVQELRKQRKRPNRYDEVGLFSGILFCADCRSVMYQQRYQTDKRKQDCYICGSYKKRTADCTAHFIRTDLLTAGVLSNLRKVTSYAAKHEARFMKLLIEQNEDGDRRRNAAKKKELETAEKRISELSAIFKRLYEDSVTGRISDERFTELSSDYEAEQKELKERAARLREELSKAQEATENAEKFMNVVRRHTTIEELTPTLLREFVEKIVVHESVALDGKRRGKLRRQEIEIYYSFVGKVELPDT

SEQ ID NO: 18479 - protein, 512 aa, synthetic construct
MRVLGVVRVSTKEQATDAHYSFAAQRTRIRAYCHDRHWDLVDIVEYVQSGGSNRRELREILARVQRDQIQCIVVNELDRLTRDMVSTMLFLEELQRVGCRFASVSDDLDLTTPDGELKMMMLAMFAHYFRRQLSRKVKGGQAERAKQGKRHGERPFGYRPHGDSWVPDPQEAPVVQQIFQWYLQDQLGFRAIAQRLNAAGIPGQRGRTGTWDVRTVERLLRREAYVGDTIYGRWIQETDREGHTHVRRQTPQIIRDTHPAIIDRETWNRAQDRLRIRQSLGRRTHDSPYLFSGLVRCGACGASMVVVRTGRRQPDGRRAPVYCCRAYHTKGQCSTATKIPVADLDAAVLGALREEFRQVQTAPTPEQVARWLGDDPVMAQAQAARHRAAQRLAAIPAMLARAEEMALAGAYTIDEYKQAKARLLAEQAECEAVLHAPWPQLDDPQRLAARVAALIPQLEAALTADVTTARPWIQSVVERIVCHPGRHITVTWRSAGEEVCPVAVGAAQRPSE

SEQ ID NO: 18480 - protein, 583 aa, synthetic construct
MSNNVEIIKANPLVTRRNDNSGSLSRRVAAYCRVSSDSDDQKNSYDSQVRHYREYISQHPDWILVDIYADEGISGTQVGKRQDFQRLISDCLDGKIDYIITKAIARFARNTLDTLKYVRLLKDKQIGVFFEEENIDTLTMDGELLLTILSSVAQQEVENTSAHVKKGLKMKMQRGELIGFQGCLGYDYNQDTKSISINEKEAKIVRYIFERYIDGIGGRAIARELDELGYKTPRGLDHWQDTTVLGIIKNEKYKGDILMGKTFTVDPISKRRLINFGEEDKYYIKNNHDAIISPEIFTQAQEIRLRRSGNKKTIANTKGKRERYSRMYPFSSRLECGFCGTVLSRRSWHSSSEYKKIIWHCTTSIKRGKKHCTHSKGIEEKAIENAFLQSYQQLFYENNNLTEDFLEIIKEELTDDTLKVELNKIVSKLNSLYKKEEKLVSMNLDGKISDSVYEDKFNQIQIEKEKLLEEKVNLEVTLKSEVDIKSRLENFKEILTSQKTLTEFDKDIFESIVEKIIVGGINSDGEIDPAMLTIIFKTGDSSTKDAKSYKSKRKNAKIENDKLCFNTVTDDEKKCTNKENNAC

SEQ ID NO: 18481 - protein, 502 aa, synthetic construct
MNNCVVYARFSSDNQRDESIDAQVRACRDFCKRSGMIITHIYADEARSATTDRRPEFQQMIADSASGDFKFVLVHKLDRFSRDRYDSAFYKRQLKNNGVRLMSVLENLDDSPESIILESVLEGMAEYYSRNLAREVMKGQLENAYKCKHTGGRTPYGFSLNGDKQLIINPEEAEVVRVIYEMYTRGDGYKAICTRLDEMRARTRNGRNFSAGTVREILTNEKYSGVYVFNRSAPKANGKRNNHASKSPDEIIRIPGGCPAIVSEETFRTVKTRMSKNLRTGGRYNAKRMYILSGVIHCGACGGGMSGSSIRGGRSKKLYHYYICNSKKYNKSCKAKSINADTAEDLVLRLLLDKAMAPTAIHSAAEAVLETMGSIFDNQSQRLDELKSAMSSIDTQIANLIAVISEGVFSPAIKSKLEDLEHRRDELEKEIRKISSSDKSDVPKSVLSVEKSIIQHKDLLRSDRTVQRTVIDEIVDDIRVFPDRLECDVNFFRLYPVRLSPP

SEQ ID NO: 18482 - protein, 513 aa, synthetic construct
MINCVIYARFSSDNQRDESIDAQVRACKEYATHHGYLPINVYSDEARSATTDKRPGFQQMISDSASGTFSVVLVHKLDRFSRDRYDSAYYKRQLKMNGVRLVSVLEPLDDSPESVILESVLEGMAEYYSKNLAREVMKGALETAYQCKHTGGPTPYGFKLDAERHLIIDETEAEAVRIMFTMHANGCGYGQIIDELSIRGHRARSGRCFSKITIHDMLHNEKYMGTYVYNRTQRKIAGKRNSRLNKPDDEVVRIPGGCPAIVDEATFLLVKERMQKNKHKGGRINAKRLYLLSGLVKCGYCGGTMSGASSTGGRNKTKYYYYGCNNRRYNKSCESPRINADFLEPIILNKIYDIVYASDAIDSIADIVMDSIGQYLGGRGAQAGTIKKKLLGIDTKIENIVSAITEGAYSSMLGEKLEQLENEKNALSAELATQEKDVPSDFNRQNIVEYLKTRRDICNYPRQRQFEIIQRCVPEVTVFRDFVSFEFDFVRLACDGPAPPTSSTPPAAALTKR

SEQ ID NO: 18483 - protein, 560 aa, synthetic construct
MTKLYSYIRFSSMRQGEGSSYERQIKMAKEIADRYDLELVNDYQDLGVSAFKGANSKTGALSRFLDEIGRSIPVGSWLFIENLDRLSRQDIISAQELFLSIIRRGITIVTGMDNKIYSIETVTANPMDLMFSILLFIRGNEESQTKRNRTNSSALLKIKAHQQNPQSPAVAIEEIGKNMWWTDTTSGYVLPHPVYFPILQKIVKMKQEGHSTGSVLDYLNEHHEPPAPTSNKQHRKWSIAMVSRLFKTKALIGVKEVNVDGVQYELKDYYPRVLSDSEYYFLKNNLIKKAWSFGHAQEKTIPLLSGIGLLKCAHCGSPMVKRKAANGKVEQYRYTCDGEGSGRTDCLYPNWGFRASSLEGAVLQLLADKVWIAEDKANPIPEIQVQIDEISRKIDNLINLSAMTGATKELANQITDLNTQREALHEEIRLFEREMYSVDSQGWEKLAQFDLSDVQNEERLQIRLKIKGALRSIECARIDRNKNLFTLVYLDGLRQRLVIENNRGIRKGQIFVDLKTINDRQILESAGMILHDHIDILIDEKAFYDGLPKEEDGPLSKFGI

SEQ ID NO: 18484 - protein, 558 aa, synthetic construct
MTKLYSYIRFSSTRQADSSSFERQKRTAKEIAEKYGLELVTSYQDLGVSAFKGANSKTGALSRFMEEIGRSVPVGSWLVVENLDRLSRQSIIEAQELFLSIIRRGITIVTGMDGKVYSKESVNANPLDLLLSVMMFARANEESQTKRNRTNSSALLKIKAHQQNPQSPAVAIEEIGKNMWWTDTTSGRVLPHPVYFPVLQKIVQLRQEGHSAGAILDYLNEHHEPPAPTSNKKHGKWSRAMVSRLFHTKALIGVKTVNVDGVEYELRDYYPRVLSDSEFYFLRKNIIKKAWDYSHDKEKVIPLLSGIGVLRCVHCGATMVKQTAANGKREQYRYCCDGRKSGRTDCPYPNWGFRAVTLEGAVLQLLADKIWIAEDKTNPIPEIQVKIDEISRKIDNLINLSAMTGATKELANQITDLNSQREALHEEIRLFEREMYSVDSQGWDKLAQFDLSDVQNEERLKVRMKIKGALHEIECSRIDSKKNLFVLVYLDGLRQRLVIENNRGLKKGQIFVDLKTINDRQILESAGMVLHPCIEMIIDADWKAPEEIPGLLSEEFGI

SEQ ID NO: 18485 - protein, 537 aa, synthetic construct
MKDQAKRALVVVRLSRVTDATTSPERQREACLELCKQRGYEVIGTAEDLDVSAGKTTPFDRPQLGEWLTNRHHEFDVLVVFRMDRIVRRLLDLADLIRWCQTHSVALVSATEAFLDLTAPFGDVVALLVAKVAEMELAAISERNRSAAQHNMRAGKYRGGPPPWGYMPEKIDGEWRFVQDDEQVEVINEVVRRVLDGEPLRQVAADLTGRAVLTPRDRVNQLKGRETKGYSWHSAKLREMLTSKSLLGHAVTANGSIRNDDGSPVIRATPILEREIFEQVQVELAGRENRKEPTKRSSALLLQIIHCGVCGRPAYKLKGGKGRNPRYRCSSVQKRRKCENKTIALDYADNVVQKLVLGILGESERLERVWDSGSDNSAELAELDATLADLADQLGSGAFRKGTPQRRVLDSRIIALAARRDELATQAVNPAGWAWEPTGVQFADWWTQQDVNQRNVWLRSMNIRLTYRSSALPNGRTEVDNVTLDLGDLQTLTEQLRATGAVGNWQHVFTAMANKDIQGMHVRGDGDVELVPLGALC

SEQ ID NO: 18486 - protein, 465 aa, synthetic construct
MVGTAEDLDISAGKTTPFDRPQLGDWLTNRHSEFDVLVVFRMDRIVRRLLDLADLIRWCQTHSVALVSSSEAFLDLTMPFGDVVALLVAKVAEMELSAISERNKSAAQHNMREGKYRGGPPPWGYIPEKIDGDWRFIQDDEQVKVINEVVRRVLNGEPLRQVAADLTDRAFLTPRDRVNQLKGRKIKGYSWHSAKLREMLTSKSLLGHAVTANGSIRDDDGSPVIRASPILEREVFEQLQVELAGRENRREPTKRSTSLLLRVIYCGLCGKPAYKLKGANGRKDRYRCASAQYKATCGNGTVATADADESLTESILDLLGDSERQERVWDTGSDHSVELAELDAVLADLTSLLGTSVYRAGTPQRAQLDSQIAGYAARHDELSKLSVKPAGWTWQPTGEMFSDWWEQQDIQARNVWLRDMEIRLTFDKSAGAVVWHTDLEDLKRFEEQLKFGKSARKAVRQITTA

SEQ ID NO: 18487 - protein, 534 aa, synthetic construct
MSRRKPKESAPAAPSKRAAIYTRKSTGKGLDRDFNSLDAQREACEQYIKSQAHQGWQLVETHYDDGGFTGANIDRPAFARLLRDVDAGRIDVVVVYKADRLSRSLLDFANVISRFNKTDTAFVAVTQNFSTADAIGRLTLNILMSFAEFEREMISERTRDKVAGSRKRGKWTGGPLPVGYASRDKRLVVVEREARIVREIFARYLRGDSVFEIARYLNESGRRKPGRTSRTGHVLAKREWDKGSVLRALKNPVYAGFMRFGGELFEGEHKAIIDRESFEQAAARLAANCVSSAPKVPRDDYVLSGRLFCVLCGSAMTPKSTTKRRTGKLYRYYQCVVKDKSGHDACPARPLPAAGIEAYVVERIRVVTAGGALARDVAARVEAHAARRRAELLAERTAHASEIAARSADGRALLDTLVGLDAPARRLVEERLGEIGRSVAEAERELAEAERALLALDEQQSEAQWTASTLEHFADVWKVMTPGNRIRLVQALVRRIEVNEPSQEIRVVLHDLECELGEDEHAEAGTVEATEALA

SEQ ID NO: 18488 - protein, 534 aa, synthetic construct
MSRRKPKESAPAAPSKRAAIYTRKSTGKGLDRDFNSLDAQREACEQYIKSQAHQGWQLVETHYDDGGFTGANIDRPAFARLLRDVDAGKIDVVVVYKADRLSRSLLDFANVISRFNKTDTAFVAVTQNFSTADAIGRLTLNILMSFAEFEREMISERTRDKVAGSRKRGKWTGGPLPVGYASRDKKLVVVEREARIVRELFARYLRGDSVFEIARYLNESGRRKPGRTSRTGHVLAKREWDKGSVLRALKNPVYAGFMRFGGELFEGEHKAIIDRGSFEQAAARLAANCVSSAPKVPRDDYVLSGRLFCVLCGSAMTPKSTTKRRTGKLYRYYQCVVKDKSGHGACRARPLPAAGIEAYVVERIRVVTAGGALARDVAARVEAHAARRRAELVAERTAHASEIAARSADGRALLDTLVGLDASARRLVEERLGEIGRSVAEAERELAEAERALLALDEQQTEAQWTASTLEHFADVWKVMTPGNRIRLVQALVRRIEVNEPRQEIRVVLHDLEFEHGEDEHAEAETVEATEAVA

SEQ ID NO: 18489 - protein, 534 aa, synthetic construct
MSRRKPKESAPAAPSKRAAIYTRKSTGKGLDRDFNSLDAQREACEQYIKSQAHQGWQLVETHYDDGGFTGANIDRPAFARLLRDVDAGKIDVVVVYKADRLSRSLLDFANVISRFNKTDTAFVAVTQNFSTADAIGRLTLNILMSFAEFEREMISERTRDKVAGSRKRGKWTGGPLPVGYASRDKKLVVVEREARIVREIFARYLRGDSVFEIARYLNESGRRKPGRTSRTGHVLAKREWDKGSVLRALRNPVYAGFMRFGGKLFEGEHKAIIDRESFEQAAARLAANCVSSAPKVPRDDYLLSGRLFCVLCGSAMTPKSTTKRRTGKLYRYYQCVVKDKSGHDACRARPLPAAGIEAYVVERIRVVTAGGALARDVAARVEAHAARRRAELLAERTAHASEIAARSADGRALLDTLVGLDAPARRLVEERLGEIGRSVAEAERELAEAERALLALDEQQTEAQWTASTLEHFADVWKVMTPGNRIRLVQALVRRIEVNEPSQEIRVVLHDLEFEHGDDEHGDAGTVQATEAFA

SEQ ID NO: 18490 - protein, 522 aa, synthetic construct
MPSKRAAIYTRKSTGKGLDRDFNSLDAQREACEQYIKSQAHQGWQLVETHYDDGGFTGANIDRPAFARLLRDVDAGRIDIIVVYKLDRLSRSLLDFANLISRFNKTDTAFVAVTQNFSTADAIGRLTLNILMSFAEFEREMISERTRDKVAGSRKRGKWTGGPLPVGYASRDKRLVVVEREARIVREIFARYLRGDSIFEIARYLNESGRRKPGRTSRTGHVLAKREWDKGSVLRALKNPVYAGFMRFGGELFEGEHKAIIDRESFEQAAARLAANCMSSAPKVPRDDYLLSGRLFCVLCGSAMTPKSTTKRRTGRLYRYYQCVVKDKSGHDACRARPLPAAGIEAYVVERIRVVTAGGALARDVAARVEAHAARRRAELVAERTARASEIAALSADGRALLDTLVGLDAPARRLVEERLGEIGRTVAEAERELAEAERALLALDEQQTEAQWTASTLEHFADVWKVMTPGNRIRLVQALIRRIEVNEPRQEIRVVLHDLEFEHGEDEHAEAGTAQATEAHS

SEQ ID NO: 18491 - protein, 534 aa, synthetic construct
MSRRKPKESAPAAPSKRAAIYTRKSTGKGLDRDFNSLDAQREACEQYIKSQAHQGWQLVATHYDDGGFTGANIDRPAFARLLRDVDAGRIDVVVVYKADRLSRSLLDFANVISRFNKTDTAFVAVTQNFSTADAIGRLTLNILMSFAEFEREMISERTRDKVAGSRKRGKWTGGPLPVGYASRDKKLVVVEREARIVREIFARYLRGDSVFEIARYLNESGRRKPGRTSRTGHVLAKREWDKGSVLRALKNPVYAGFMRFGGELFEGEHKAIIDRESFEQAAARLAANCVSSAPKVPRDDYVLSGRLFCVLCGSAMTPKSTTKRRTGKLYRYYQCVVKDKSGHDACRARPLPAAGIEAYVVERIRVVTAGGALARDVAARVEAHAARRRAELLAERTARASEIAVRSADGHALLDTLVGLDASARRLVEGRLGEIGRTVAEAERELAEAERALLALDEQQTEAQWTASTLEHFADVWKVMTPGNRIRLVQALVRRIEVNEPRQEIRVVLHDLEFEHGEDEHAEAGTAQAAEAYA

SEQ ID NO: 18492 - protein, 537 aa, synthetic construct
MSRRKPKESAPAAPSKRAAIYTRKSTGKGLDRDFNSLDAQREACEQYIKSQAHQGWQLVETHYDDGGFTGANIDRPAFARLLRDVDAGKIDIIVVYKLDRLSRSLLDFANLISRFNQTDTAFVAVTQNFSTADAIGRLTLNILMSFAEFEREMISERTRDKVAGSRKRGKWTGGPLPVGYASRDKKLIVVEREARIVREIFARYLRGDSVFEIARYLNESGRRKPARTSRTGHVLAKREWDKGSVLRALKNPVYAGFMRFGGELFEGEHKAIIDRESFEQAAARLAANCASNAPKVPRDDYVLSGRLFCVLCGSAMTPKSTTKRRTGKLYRYYQCVVKDKSGHDACPARPLPAAGIEAYVVERIRVVTAGGALARDVAARVEAHGARRRAELLAERTARASEIAARSADGRALLDTLVGLDASARRLVEERLGEIGRSVAEAERELAEAERALLALDEQQTEAQWTASTLEHFADVWKVMTPGNRIRLVQALVRRIEVNEPRQEIRVVLHDLEFKHGEDEHAEAGTAGAAQLAEVPA

SEQ ID NO: 18493 - protein, 697 aa, synthetic construct
MFGIAEINLDEVSAYGRVSSEDQAERGTIENQIDFGNKYCDLHGIKLEEWYLDDGVTGTIPLEERKDGKRLLEDAKAGKIKTLLIYKLDRLGRSARIILNSVYELEKHGVKIRSMTEPFDTSDPGGRFLLTILAGVADLERETILQRMWLGANRAAKNGKWLGGIVPYGYRVEDGYLALSNDPIPGFELSEVDVIILIYRLTIERRMNTYKIADYLNALGIPPSYTKDGRKVLKGKRKENTAGIWYPGRIRAILISSTYKGIHEYGRRSQKDREIITRKVPAIVTCEMFDQAAAVLEENRLEATRNKMRNYLLSGLIRCGSCSRTYTGTAYSGSKNKLTGYYRCHSKNMYHGPNEEKCTSKNVPQEWLENLVWSDIVYFVSNPDDLLNELETEIADDNSYVEQLNQEKDLLTKAINQKESEKQSILDLFRKKIITVEDVELQLQKINTESMQLNERLSQLNKYPDQQFTGEEKISKIQELLAYLKSRIHEDILWDEKREIVKMLVKRVIVETIHEDKSPTATIYIEYSFQHSDQHSESHGCPCGWYGDPKRACICTPRQISHYRNRISGPLLDRFDLHIEVPRVEFDELHRYSESETSADVQNRVLKARRRQWARLGESRTNAEMSAGETSTFCSLDSAGEQLLRNVFDRQHLSARSHDRILRVARTIADLDSKENIFPLHLAEALQYRTLDRPTAY

SEQ ID NO: 18494 - protein, 513 aa, synthetic construct
MKIPDLTGKRGVFYGRHSTDHQEMKSQEDSAKQFALKYNCHIEFDKYIDPAKSGDDLSKRKGMLALIEDADQGLFDFVVTYHRDRLTRDPLHGQIIRTSMSLQKVPIYITIDESVYDTGDLMIHFVQDGISKYELQKIRKNTKNAIQSLARSGDWVGGKAPFGYMYESDTGNLKQTEDAYLVERIFKEYTQHEGFSSIAKNLPPGTRKGKNWTKSHVKAVITSPFYAGYISIYRTNEHSRVEMDRDKWIMGKSIIIQPIITIEEWEYCWEIYRKKVMKEITPKHYKTSLFLNGIIVCAFADCNQNKLKTLNKQSYSKKGKPYGKRIYFCDICNNMVDAERIHPIVIQKINQELSKINSDQLVKALKNNIQHECSKLETEKYHLELNVIKLENQVIKLNKTSEGIFRETEEGSNTFTSLSENQESMIRIIKNSINDTSVRIDSLYEQINTISKRLKYLRTIEDSEQVSLARLVDIKKMDESNLKNIREFLLEFVQSITIDKNHNLHYNFRSNLI

SEQ ID NO: 18495 - protein, 572 aa, synthetic construct
MTRKMKLLDLDTSPETLQPVQVAIYARVSTAEQAELGYSVEAQLQTLRTFCKSEHKVVYREFVDAGFSGKNVDKRPALQQLLREIETGNIQEVQVWRLDRLSRNLLDVLTMVKKFDQYSVKFRSYSEPNFNTQTSDGYLTISMFGALAEYQRKTIVENVKMGMKQRARQGKWNGGTVLGYDVVEVPTLRGKESVLKINPIEAELVRKIFGMYASGQGLRSIANQLNHEGYKTKPGKDFSAVSIKTIINNPVYVGKIRYNVRENWSEKRRSGTNPHPIIADGDHEPIISQDLWEAVQALFSKKSFSPPRVFDGTYLLTGLMRCPQCGATLVAHRTRDKLKDGSTIVRRYYVCSNFRNKGRRVCGSNSVKAETAENFVVDRISEVVQRPKVLEEIVTKINKNRIKSLAPLQKEVEAIDKELKTIEAQRNKYFKLYESDAVDNEFLLGRLNELKAKHDVLSRRKSEVQQQLEENVSEPIPLQQVRRVLGKFHELLESSPAETQKTLLQTIVKQIFVQKGQKFEGIELEFDEHVKKCFLGLAPSTKTVEGAFAFHKQKLPSKYSMCHLSRSQNAEA

SEQ ID NO: 18496 - protein, 597 aa, synthetic construct
MKQKLYSYQRWSSAVQSDGTTKARQTFAAEEYAKRNDLEVVEIVDAGISGFKSINSKSGALAKFLEAVDEGLIPNNAYLFVESLDRITRDEIDVALELFMGILRRGITIVTGMDNKVYTHAGIKGNPIDLLTSILLFTRAHEESKTKQNRTNGNALAMIRRFQSGLPTTIKAVGSHPWWIDCSTDKFEAVRRHPTLWQPAQDAINMFMEGVSVFKVVQYLNEKYPHAYKGKAWKTANIRKLRFNKAVYGLREITVDGTDYALPNYFPSLITEGQFLRLEKIRETTKYIGKVGEGKTVTDEEGNSKVIAERNNINLLAGMKLFRCGHCGGTMMAMRHGDTIRYLCEKGRGHQNDCKTWSLPGILVEHTLMLVTTIAYINIQRKGGVDKEDYTAQISSTEQHIEDISKKISNGTSLVLAGLGDVDEVIEQLQELKDTRSNLVLELEVLQRKQLLAEDQTFEGLMMDFFTYAQYGVLQDPVHEYRSKLRDIVYSSIGDVRAWKVDRRLMISFQIKGDDEYYTFSAGDEPYNYIFYYGSPVQLGEDLSPQGNYELPEEVKQRIREHSDVYEDSMKLLGTANALLSVVHYPDLDGRLFWPRK

SEQ ID NO: 18497 - protein, 501 aa, synthetic construct
MELAFSYARFSTKSQSTGTSLERQLNASRLFCSERGLTLSPKGYHDLGVSGFKQVKRPELEQMLQAIQSGDIPSGSYILIEAIDRLSRKGISHTQDVLKQILQYKVKVAFVGEDAKTLAGQVLDENSLNDLSSVILVALAADLAHKESLRKSKLVKAAKSIIRKKATEGHKVRGHTMFWIDWSEQKQDFVLNDRVKDVHKIIELRQEGHGPRKIAKILNELNIPGPRGNPWNHMTVTVVLRSPVLYGAYQTHQIIDGQKVPDVLLENHYPAVITQEEFVTIQADSSKSNKGRPSKANPFSGVLRCECGQAMLFSKRTNLNKDGEPLEYEYHFCLGHAEGRCKNNKRIRDLVPLLVSLMDKLVINQAPKKNLNVELIKQKEQKIEQLNKMLIELDSPPLSVLKTIQTLEAELDILLNTHVEEPVQADVQTLSSITDAQEYNQHLKRLVKKIVVYQKNGPKNLRIKVYKTDGHYQNFLVKDGTVLFKSDTKALKELIDGFNKA

SEQ ID NO: 18498 - protein, 526 aa, synthetic construct
MKNCYLYRRYSTSKQSKGSSLERQQSLADRWCDANDGQLVDVITDEGYSAFKGDHISQGAFAGVLTAISSGVIPAGSYLLVENIDRLSRQAIGDALTTWMNILGADINIVTLMDGKVFTKESRNDLGSMLTYLVTQERAWSESHAKSVRTTNAIKAANKRLLNGEIARVTRPASWVTFTPQGYVLNGKADGVRRLFELYLSGLGQASTAKQLNDEGVSTLSGRSALWSSASVRKVLLNENVTGVKTIDGQTVIVYPVVISREDWLKAREQLASKNVGASITVGKVSNPLTGLCYCGVCGDTMHYSPSTSRAGKRYEYLNCASHRRADKCGNVLFKLDHLFEIAKNLAAILCELPVQEDETHRLSAELEGAQLELADASERLAVASTMAVKYPSEAAFAALGTLELEISEVTKRVEKAELALAGAKGVQSAPLVQLSTVRKLQMSEEASRREAAQIFSSSFVSWSFDVNGNSELRTKRHGVIHLDGAGRVLEVRANGLALEGLINRFRAIPFVIDGKQGHITFDRTG

SEQ ID NO: 18499 - protein, 481 aa, synthetic construct
MKRMEQITPPPISASPLVKVAAYARISMETERTPLSLSTQVSYYQQLIHDTPGWTFAGVFADSGISGTTTHRPQFQEMLALAREGAIDLILTKSISRFARNTVDLLETVRELKDLGVEVRFEKENISSTSADGELMLTLLASFAQAESEQISQNVKWRIWKGFEEGKANGFHLYGYTDSADGTDVQIIEEEAAVVRWIFAQYMKETSCEKMAAQLIADGRVPHLADNKLPGEWVRHILKNPHYTGDLLLGRWSTPEGRPGRAVRNTGQLPQYLVENAIPAIIDRDTFVAVQTEIARRRELGARANWSIETVALTSKIKCVSCNCSFVRNVRNPKTQNSISTEHWICTERKKGRKTGCGTCEISDTALKGFIAQVLGIEAFDEDVFNERIDHIDVQGKDHYTFQYTDGTSSSHTWRPNLKKSSWTPARKAAWGELVRARWAEAKRLGLDNPRQAPTPPEALAKYRAVAKAEAERLRAERGER

SEQ ID NO: 18500 - protein, 432 aa, synthetic construct
MKLERKVHRVQQRPSKPKLLKVVAYARVSSGKDAMLHSLAAQIDYFQNLIRQHPGWEFCGVFADEAKTGTKDERPEYQKMLEKCRNREVDLVITKSISRFARNTVTLLETVRELKSLGIDVWFEKENLHSTSGDGELMLSILASFAQEESKSVSDNMKWRIRNDFQQGKIGSITIFGYRRNADGVLEIEESEAKIVQMIFADYCSGMGQCAIAKKINAMGISTRQGNFWTGQRVKEILVNEKYVGNMLLQKYYRQDPIGKRKMKNQGELPKYFVEQSHEAIISAELFEKVQNLVKKQTKQFSHPGATNRYPLSGMVQCAACGKSYQRKIYKQGAVWMCATYLRQGKSHCPTAKQISERILYEKICSALQIKEFDVEIVKSKIENILVSPNWLTFLFKDNTEKAISWKNYSRSESWTPEMRQAAAERSRKCQK

SEQ ID NO: 18501 - protein, 350 aa, synthetic construct
MKRAALLLRCSTNIQDYNRQKLELEKVASRFKLKVAKVFGEHVTGKDDIRKGNRKSVDELINACENDEIDVVLISEVSRLTRNFLYGVTLVDKFNRDYSIPIYFRDKRKWTIDVETGEVNLEFEKELRKAFEQAEEELASIRFRMASGKRDSAGLGQWFAGIPPFGYTRQKNGYLVKNEYAPIVKEMFDKYLEEGQALITTTRYIYGKYPDIKKLKSIGNTKFILNNKAYTGRVEANIYDEIDKVTDTFYFDIPAIIDEETYNKVQKKLANNRTTTPYPKAAKYLLQKLIKCSICGAFYTRLHSNKRDTVHFKCTSDKNSLTGCKSQVYLNERIVNPIIWNFVKEQFLCR

SEQ ID NO: 18502 - protein, 590 aa, synthetic construct
MRKITKIEHTMPVIQHRKRVAAYARISMESERMNHSLSAQISYYNNFIQKNPDWEFAGVYADNGISGTSTAKREEFKRMIEDAKNGKIDIILTKSIQRFARNTVDLLETVRALKDIGVEVRFEKENINSLSGDGELMLSILASFAQEESRSISENVKWATRKRFEQGIPNGQFQIYGYRWKDDKLVIEPDEAKIVKLIYDNFLKGLSAESTEKQLEEMGVKSYKGGHFGNTSIRQILSNLTYTGNLLFQKEYVVDPITGKSKKNKGELPQYFVENTHEPIIPMDVYKQVQDEIKRRRELGVRANWSIPTTCFTSKIKCSNCGKSYRRSGKRQRKDPDKVYYIWICLTKSEKGKRYCDAKSIPENTLKRVCAEVLGTEEFDETVFEERVDKIVVIGDDTLEFHFKDGSTYLQKWKSSARTDCWTSERRKAWGELHKKKSTNPTRHTEFTGFVVCGNCSNNYRGQSNTYSDGTKERTRRCSESCGNTAIKESTLKRLVCEVLELDEFSEKIMDEKLDKAVVLNKTVTFHFKDGSTKTLDYKEKKKGTPHTEEYKEYMSKCMKQIWDDERREKMSQRMKKLREDRGDKWQKEK

SEQ ID NO: 18503 - protein, 526 aa, synthetic construct
MAKRKVTQIPATINKYTAKPMDSKKKRKVAGYARVSTDHEDQTTSYEAQVDYYTNYIKSRDDWEFAGLYSDEGISATNTRRRDGFNRMVADALDGKIDLIITKSVSRFARNTVDSLSTIRKLKENNIECYFEKENIWTFDSKGELLLTIMSSLAQEESRSISENVTWGHRKRFADGKVSFAYSRFLGYEKAADGTIVVVPEQAKTVKLIYKLFLDGLTFHTIAKELTNRGIKTPGGKDVWSQSSVKSILTNEKYKGDALLQKEFTVDFLNKKMKKNEGEVPQYYVENNHEAIIDPQLFDLVQVEIERRGKGKSRYSGITMFSSKVQCAECGGWYGSKVWHSNDKYRRVIYQCNNKFRNNTGCSTPHFIEYELKEIFIKAVNELITEKDEIIANLELVRQALCDKEELLKKRDNLEQEIAVTVDMTQAIVEENARKAQNQDDYNKRYNALVERYDKLKSEYDEICSTISNKEAKYEQMGRLITVLKEQADIITEFDEGLWSSLAEKIVVRSKEDITVVFKDGTEVTV

SEQ ID NO: 18504 - protein, 524 aa, synthetic construct
MAGAKNITVIPARKRVGNTATADNKPKLKVAAYCRVSTDSEEQATSYDAQVEHYTEFIRKNPEWEFAGIYADDGISGTNTKKREEFNRMIEDTMAGKIDMIITKSISRFARNTLDCLKYIRQLKEKNVPVFFEKENINTMDSKGEVLLTIMASLAQQESESLSKNVKMGLQFRYQNGEVQVNHNWFLGYTKDENGHLIIDEDQAIIVRRIFREYLQGASLKTIADGLMADGIPTATGNKKWRGDGIRKILTNEKYMGDALLQKTYTVDVLTKKRVSNNGIVPQYYVENNHEAIIPRQLFMQVQEELFRRAHLKTEGGKTKRVYSSKYALSSIVYCGKCGDLFRRVAWKARGASYNKWRCASRIEKGPKEGCDADAISEVELQNAAVRAINKTLGGREQFLVQLQHNIEDVLNGDSTATLEYIDQRMAELQEKLVMCVNKNAEYDVIANEIDALREKKAAVVTRDAEQEMLRKRIDEMRQFLQTQTNRVTEYDEQMVRRLIEKITVFDDKLIFEFKSGMTLELKR

SEQ ID NO: 18505 - protein, 520 aa, synthetic construct
MKNVTKINQVDLSIFKKLRVAAYCRVSTDSNEQELSLDTQKNHYESYIKANSEWEYAGIYYDDGISGTKTTKRDGLLRLVDDCEKGLIDLVITKSISRFSRNTTDCLALVRKLLNYDVYIIFEKENIHTGSMESELMLAILASMAESESRSISENEKWSIKKRFQNGTYVISYPPYGYANVDGEMVIVPEQAEVVKKIFAGCLAGKSTHIIAKELNEKCVPTKKGGKWTGGTINGILTNEKYIGDALFQKTITDAAFKRKRNYGEEEQYYCEDHHEAIIDRDTFEKAKEAIRQRGLEKGNCCEDTSKYQNRYVMSGKIKCGECGRSFKRRYHYTSHGRSYNAWCCGGHLEDSKSCSMKYIRDDDMKRVFLTMLNKLRFGSDLVLKPLLIAITTGNSKKNIHSMEEIKKEIAANEEQRKQLNTLLTKGYLERPVFAEAHNKLVTEYEHLIAKRDMLYRMDDAGYTIEQKLKELVDFLNGAEPFTEWDDSLFERFVEKVKVLSRDEVEFELKFGLRLKERID

SEQ ID NO: 18506 - protein, 536 aa, synthetic construct
MLRQTTRNLITALYPRLSHEDELQGESNSISNQKRILETYAKQNGFSNLQWYTDDGYSGANFQRPGFQAMLADIEAGKVGTVIVKDMSRLGRNYLQVGMYTEMIFPQKGVRFIAINDGVDSAQGDNDFAPLRNIFNEWLVRDTSKKIKAVKRSKGMSGKPVTSKPVYGYLMDEDENFIIDEEAAPVVKQIYSLCLAGNGPTKIARMLTEQQIPTPGTLEYRRTGSTRRYHPGYECKWATNTVVHILENREYTGCLVNFKTEKPSYKTKHSVENPIEKQAIFPDHHEPIIDGDIWERVQELRKQRKRPNRYDEVGLFSGLLFCADCGSVLYQQRYQNAARKQDCYICGSYKKRTHDCTAHFIRTDLLTAGVTDNLRKVTSYAAKHEARFMKLLIEQNEDGGKRRNAAKKKELEAAEKRIGELSAIFKRLYEDSVTGRISDERFTELSADYEAEQKELKERAAALQAELSKAQEATVNAGKFMNIVRKNMNFEELTPTLLREFVEKIIVHECSYDENGTRRQEIEIYYSFVGKVDLPE

SEQ ID NO: 18507 - protein, 538 aa, synthetic construct
MLRQATQNLITALYPRLSHEDELQGESNSISNQKRILETYAKQNGFTNLRWYTDDGFSGANFQRPGFQAMLADIEAGKVGTVIVKDMSRLGRNYLQVGFYTEMLFPQKGVRFIAVNDNVDSANGGMDNDFTPLRNLFNEWLVRDTSKKIKAVKRAKGMSGKPVTSKPVYGYLMDEDENYLVDEETAPVVQQIYQLCLAGNGPTKIARMLTEQQIPTPGTLEYRRTGSTRRYHPGYECKWATNTVVHILENREYTGCLVNFKTEKPSYKVKHSVENPVEKQAIFPNHHEPIIDTETWERVQELRKQRKRPNRYDEVGLFSGMLFCADCGHVMYQQRYQNKNRKQDCYICGSYKKRTRDCTAHFIRTDLLTAGVLSNLRQVTEYAARHESRFVKLLIQQNEIGGKRKTAAATKQLEQAQERIAEVNRIIKRLYEDNVNGKISDERFMELSADYEQEQRELKDRAAALQAELDKSQAATVNAEKFMGIVRKHLAFEELTPTLLREMIEKIVVHECSYDENGTRRQDIEIYYSFVGKIDLPE

SEQ ID NO: 18508 - protein, 544 aa, synthetic construct
MSNIPTAKNVTVIPALTTAEVRERKFKQIRVAAYCRVSTDHEEQQNSYQVQIAYYTELINSNPEWTLAGIFADEGISGTQTKNRKEFNKMIRRCKQKKIDLVLCKSISRFARNTVDCLEYIRELKLLGIGVMFEKENINTMTMNSEFIISLYGSFAQAESESISKNVTWGVEKSFKEGKVKYSLDKMLGFRRGDDGKPVIVEEEAEIVRYIYKLYLDGLSLKRIARRLRDEGVKKWNGTTDWTSVTVYGILKNEKYAGDAVLQKTYTVDCILHKQVKNNGEKDKYIVYDCHPAIIERDTYNRVQQELARRGSIRKRSDKTETEQGHYASKYALSDILICGECGTAYRRVTWTSHGHKLIVWRCISRLDHGSKYCKNSPSINEEKLQTAIVDALNRVYADGEKLMEEMKRNLMMVMTDKDIAASEIEKMKMRLNEISKARNGLVHLITSGAVDEDSLDRDFEDLINEEKFLKEQISDRKAKSKLSDEKRYHLMSAFEELQKAKFQMTEYDDVTVRKVVECIRVLSKTEVQIIFKGGFEMNVEVDR

SEQ ID NO: 18509 - protein, 532 aa, synthetic construct
MRISEELQALYNSTFGQGETGTVTAKATVHSYIRFSSSIQEQGDSITRQVAATKQWAASKGLEVSEQSFSDLGISGYKQNAKRDGLDQLLEAIETDAIKRGDWVSIEKFDRLSRQGIRHTTKLIERILDSDVNLVAVHDNLELTKDSLDDPVKVIQIAVYADTAHKQSEEKSYRVRAAKASQREAALSGEVTKRRLPWWISRDNDKYVLNENAEHVKAMIEMRLAGNGWRSIAKHFNEQQVLSRTGKKWSDNAIKCMITNRAVYGSYEMTDGNIVDNYYDAICSYSDWKILNSKYQNYAGGKSKTNAISGLVRCSCGSAMSLKMQSRTTKTTTHHYRTWICRASTAGACDNTGSVRDLDVIIKNVCGKLKYKKLGKAAKNNSVEIERTRDRLDEIRALMTDVNSAISVSELAVMAGSLQSELTKLLAQELEETTRDELKQLKTIADDTQWNVKAKQLIRSCTVTRKSKNVWHIKIIQKNSYVVNATIMRESQRKEIKVFYGNKEAQVDFRDEVTKTLFDGEEIGSYVNHETN

SEQ ID NO: 18510 - protein, 695 aa, synthetic construct
MPTDHALKIGADHLRRDAFLYVRQSSLRQVFENTESTKRQYALRDRAVALGWPIERIHVIDSDQGVSGAQAAGRDGFQHLVTEVAMGHAGIVLGLEVSRLARNNADWHRLLELAALSRTLICDEDGVYDPAHFNDRLLLGLKGTMSEAELHVLKSRLQGGILNKARRGELEIALPVGLVYGPDGRVCLDPDRQIQDTVRLLFDTFRETGSACAVLRRMRAQHILFPRRITRGIGKGEVLWGELDHSRVLEVLHNPRYAGAFVYGRRRTSYNADLKQVQLQLKREDWQVLIRDAHPGYISWDEFERNELTLQRNAVGFSTNLRGGAPREGIALLQGRVLCGRCGSRMRVRYDAREGKQRPYYCCNEDTVRRAASRNCQWVQGAEIDAAISALLLQTVAPAAIDVALAVQDEIAQRVEQAASMRAAQLQRCRYEAELARRRYVKVDPDNRLVADALEAEWNERLRQLDTLQREHERQQQADQTLSDEPARRRVVELAQDFPRVWNDPRTSALQRKKMLALMIEDVTLISGGQIAVHIRWRGGKTQSITVDKPRPIALVRKTRPEVVQLIDELLQTYTDREVARRLNDLGHHNWRGDSFTAKKVRLVRITYGLKSRFQRLRERGMLTSSELARRFGVCPTTVNHLGRQGILKRHMYDSDHRYLYEPPGDVTLVKGAGSRYGGRAPQLIPVPSTAQGAL

SEQ ID NO: 18511 - protein, 532 aa, synthetic construct
MKQAISYVRFSSDRQKYGSSVERQEGMIAAWLKAHPDYEMSGLKFSDLGKSGYHGEHIKEAGGFGKLLKALEDGFIRAGDVVLVEAIDRTGRLEPMDMLTLVINPILKAGVSIITLDDNTTYSKESVNTAQIFLLVAKIQAAHGYSAALSTRVADSYKKRRKDAAKYGTVPRRITPVWLNPDGTVREEVAPWIKTAFELYVSGVGKSTIAKRMRESGVERLAKASGPGVEGWLRNKAVIGKWETLEGTPGHQIIDDIYPAIIEPSLFYKAQVHAEKMKTQRPIKTANHFLVGLIRCGECGKNYIVQNLHGKPHTMRCRTRQSQNDCKNSHCVPKPVLDAIYRYTSVTAAVEAVQQQQMGVNDKEIVTREAELLTITKRVDGLVQALTQTGPIPEVIEALKQSRIEREAAESALVILRSTVVPSAGANWQDMGNVWKLEAEDAQRLAAMLKMVDYHITVAPTGDITSSHSDVLYRYIGVDRALDKYKLLANGKLILIPKGYVDDFPYHEPFQKMESENTWDESDYENLRLQYE

SEQ ID NO: 18512 - protein, 541 aa, synthetic construct
MKKIIAIYARKSLFTGKGDSIGAQVDTCKRFIDYKFANENYEIKIFKDEGWSGKTTDRPDFTNMVNLIKSKKIDYVITYKLDRVGRTARDLHNFLYELDNLGIVYLSATEPYDTTTSAGRFMISILAAMAQMERERLAERVKSGMIQIAKKGRWLGGQCPLGFDSKREIYIDDMGKERQMMKLTPNKEEIKIVKLIYDKYLEMGSMSQVRKYCLENSIRGKNGGDFSTNTLKQLLTSPIYVKSSDNIFKHLESQNINVFGTPNGNGMLTFNKTKEIRIERDKSEWIAAVGKHKGIIDDNKWLQIQQQLQQQSEKQIKSSGRQGTTSTGLLSGIIKCEKCGSNLLIKTGHKSKKNPGTTYSYYVCGKKDNSYGHKCDNKNVRTDEADSAVITQLKLYNKELLIKNLKKALVQNKKADTDNIEILESKLKEKEKAVSNLVKKLSLVDDENVSNIILSEVTNINKEINDIKLQLSNETLKINEVTKATLDTEIYIKILENFNKKIDDITDPIEKRNLLKSALESVEWNGDSGEFKINLIGSKKK

SEQ ID NO: 18513 - protein, 536 aa, synthetic construct
MKAAIYSRKSVFTGKGESIENQINLCKDYGKKNLGIEDYLIYEDEGFSGGNTNRPKFKQLIKDAKNKKFDVLICYRLDRISRNVADFSSTLELLQENNISFVSIKEQFDTSSPMGKAMVYIASVFAQLERETIAERVRDNMLELAKTGRWLGGQTPLGFQSEKISYFDAEMKERTMYKLSPVKEELDKVKLIYKKYLELKSLRKVTQYLLENNFKTKLGANWHTSVVSDLLQNPTYVKSSQDVFNYLRESGITCVGTPDGIHGLLTYNKKKGTKKQRDKTDWIATVAKHKGIIDSDIWLQIQSKMNCNKAKAPKLGRTHNALLTGLLRCEKCGSPMSVIHGPKDKNGNKTYFYGCSMKIYSKGTRCDNSNIRTTEMETVVINKLKSVTKNNGLLFEELNAVKEQLAPSKEETNELTLLNSKIKSNKQAIENLVKQLSLNPSSTASKYIIEEIEKKEEEIKQTQSKIESLKEDKMEINKLEIDLDLIISNLKNFYDTIDNVDIEKKKYLISVLVDKITWNGSTGEVDIKLWGSSKKK

SEQ ID NO: 18514 - protein, 452 aa, synthetic construct
MKAAIYIRVSTQEQVENYSIQAQTEKLTALCRSKDWDVYDIFIDGGYSGSNMNRPALNEMLSKLHEIDAVVVYRLDRLSRSQRDTITLIEEYFLKNNVEFVSLSETLDTSSPFGRAMIGILSVFAQLERETIRDRMVMGKIKRIEAGLPLTTAKGRTFGYDVIDTKLYINEEEAKQLRLIYDIFEEEQSITFLQKRLKKLGFKVKSYSSYNNWLTNDLYCGYVSYADKVHTKGVHEPIISEEQFYRVQEIFSRMGKNPNMNRDSASLLNNLVVCGKCGLGYVHRRKDTVSRGKKYHYRYYSCKTYKHTHELEKCGNKIWRADKLEELIIDRVNNYSFASRNVDKEDELDSLNEKLKTEHTKKKRLFDLYISGSYEVSELDAMMSDIDAQINYYEAQIEANEELKKNKKIQENLADLATVDFDSLEFREKQLYLKSLINKIYIDGEQVTIEWL

SEQ ID NO: 18515 - protein, 452 aa, synthetic construct
MKAAIYIRVSTQEQIENYSIQAQTEKLTALCRSKDWDVYDIFIDGGYSGSNMNRPALNEMLSKLHEIDAVVVYRLDRLSRSQRDTITLIEEYFLKNNVEFVSLSETLDTSSPFGRAMIGILSVFAQLERETIRDRMVMGKIKRIEAGLPLTTAKGRTFGYDVIDTKLYINEEEAKQLQMIYDIFEKEKSITTLQKRLKKLGFKVKSYSSYNNWLTNDLYCGYVSYADKVHTKGVHEPIISEEQFYRVQEIFSRMGKNPNMNRDSASLLNNLVVCSKCGLGFVHRRKDTVSRGKKYHYRYYSCKTYKHTHELEKCGNKIWRADKLEELIIDRVNNYSFASRNVDKEDELDSLNEKLKTEHTKKKRLFDLYISGSYEVSELDGMMADIDAQINYYEAQIEANEELKKNKKIQENLADLATVDFDSLEFREKQLYLKSLINKIYIDGEQVTIEWL

SEQ ID NO: 18516 - protein, 452 aa, synthetic construct
MKAAIYIRVSTQEQIENYSIQAQTEKLTALCRSKDWDVYDIFIDGGYSGSNMNRPALNEMLSKLHEIDAVVVYRLDRLSRSQRDTITLIEEYFLKNNVEFVSLSETLDTSSPFGRAMIGILSVFAQLERETIRDRMVMGKIKRIEAGLPLTTAKGRTFGYDVIDTKLYINEEEAKQLQMIYDIFEKEKSITTLQKRLKKLGFKVKSYSSYNNWLTNDLYCGYVSYADKVHTKGVHEPIISEEQFYRVQEIFSRMGKNPNMNRDSASLLNNLVVCGKCGLGYVHRRKDTVSRGKKYHYRYYSCKTYKHTHELEKCGNKIWRADKLEELIIDRVNNYSFASRNVDKEDELDSLNEKLKTEHAKKKRLFDLYISGSYEVSELDVMMADIDAQINYYEAQIEANEELKKNKKIQKNLADLATVDFDSLEFREKQLYLKSLINKIYIDGEQVTIEWL

SEQ ID NO: 18517 - protein, 505 aa, synthetic construct
MSEDKQLHTYKDYPYLIYTRVSTDKDEQKDSLSNQIDICRYWLEQHDYEWDERSILKDEGKSGTLFLERTALQLILKKARNRDIKMVVFKSIHRLARDLKDALEVKEVLLGHNVRVVTIEEGYDSEYEGKNDMKFEMFSMFAAQYPKTLSVSISAAMSAKVRRGDHIGKVPYGYDRVENKLVIKKDEAKVIKKIFSWYVNDNIGMKTIAVKLNEQMEQGLVPPPKHGSYWQLTTINSIIKNRTFCGDFIYNRFSKIKVDGRKKRIENPKSKWVIIEEHHPGIVSKEVYQKANSKDVINRKRKITPWNEFRGLLQCAHCGSNMVILESWKKKKDGSKSHWKYLKCSKRRRSGLCVNHKPMTYEDLREVILQELKIESDKISLNFNEALLHSNQGKIKQLEKQQSELTGKQKRLLDIYLDGIIDKQKFDDKKRELDMKIQRTEEQIFLLHSKDEHKYNVEHIKDALEQLNDTEQDLYHVFRTLIDKGVVYEDGCIDLGFSFKKNIKI

SEQ ID NO: 18518 - protein, 484 aa, synthetic construct
MQPKKVAIYVRVSSLHQAIEGYSIGQQQDALTKYCEAMNWAIYNVYTDAGFSGGKIDRPAMQKLITDAKTGKFDTVLVYKLDRLSRSVQDTLFLVRDIFNENNIGFVSLQENIDTSTAMGNLFLTLLSAIAEFEREQIKERMQMGRYGRAKSGKSMMWNLTSYGYRYNKETQSMDVVPSEALIVKRIYKEYLSGKSISRIKDGLNNEGHITRDKPWAYKRISHILTSIVYTGVTEFKGEIYEGLHEAIIDKETFELAQAEFKKRQQQTKQNKNNPRPFQAKYMLSGMIRCGYCGAPLKMRKGPVRKDGTRLMAYDCHNRWKRKHSYLTVYNNNEQCTQSGRYLKEDVEGYVINEIKKLQENPDELNKYLKQPEETKVDTKKIESQIKKIDKQITKLNDLYLNDLITIEDLKSKADKLKSEKNILEVQLKKDENSILKLKAENVRKNLSVKDIDKMTYEEQRNLAKTLIKKVDVTKEDIKIIFDF

SEQ ID NO: 18519 - protein, 515 aa, synthetic construct
MKTADLYIRVSTDEQADKGYSQRSQEEVLTKYCVLRDIKIRNVIFEDHSAKSFKRPEWQKLLIQLKKKRGQTDLILFTKWDRFSRNAGDAYQMINLLSDLGVEPQAIEQPLDISIPENKLMLAIYLAQPEVENDRRALNTFFGMRRARKEGRWMGHALIGYANRIDERGMKYITPLEPQASIMRWVFEQLATGDYFIDQIWREAKDKGLAMGRKNFWRVIRNPVYCGKIFIPKYKDEDAHFVPGQHEALISESLFYQVMDVLDGRKKKHPVKIRSMEELPLRGFLICHKCGQMLTGSASKGKNQYYHYYHCNSTCGVRFNAKTTNDKFLDLLKKHSIDPGTGYLYKELIVEAYETESGHDKKLFAHLKKQLMEYNIKIDKARDLLIKGDLDGSDFKKIKGDCERQVSIIEGKLFEMSGKKEGIGPLLDRAMKNIAKLPILYQFGDSEAKRNIVCSMFPEKLTFDGEQHRTLRVNEAICVFDSVKVVFEQKKDRKTGAKSDLRSKVTWERIELSTH

SEQ ID NO: 18520 - protein, 525 aa, synthetic construct
MAEQTAIIYARVSTSRQADDGLPIASQIEQGHKKAGLLGALVVRVFTDAGISGRTDERPAFRDAVAYCKAYGVDYFVCWSTSRFARNKLDAALYKRDLEKCGTRVVYVSVDLDNRTDSGWMMESMLEIFDEHYSRQVSADTLRSMIKNARDGYFNGGRVPFGYMAVPDGKRKRLAVLDVEAQIIRDLFGLYVEGIGCKAIAMTLNERARLRRGMRWNKNVVTATLKNEVYTGKVVFNRTDSRTGRARSREEWIITQSHPAIIEEGVFMSVQELFGERTPVDGGGSPHSGLVFTGLLRCGKCGLAMRSENGTGRSRRYHYYNCQTAQKGGGCENRRIAAPDLDQWLIQAIMDKVLTRERLVETISELHEITGRWVKDRARRREEIVKTLRDVESRLKKLFDVLELHGKDAPNMGDLTERLRELKQQRSSLDLQLVTIEEEEIPIIPITESDVQEMADLLRDIVETTGDQKKLRLFFSSFIDQIVVNDKGVRIEYRAEKLVNQTGFDTVRSKARWLPDQGSNLGPAD

SEQ ID NO: 18521 - protein, 582 aa, synthetic construct
MNEIKSVALYCRVSTEEQASEGYSISAQLQTLRQYTSLYGWHIAEEYVDEGISGKDIKGRPAMQRLIADIDKEKFQAVLVWKISRLSRNMLDTLVLLDNFEEYDVKFISYSENFDTSSPIGKLVVQLMASIAEMERNTLSENVKLGMTQRAKEGSWNGGVVFGYDSIEKELIFNSQEADIVQLIFNLYAEGKGLKAIANYLNKAGYRTKRRKHFSINGIATILDNPIYNGKIRWLQVENWDKKRRRGKNANPIVVDGKHDAIISDELWNIVQARRQSKSFKQRQSQEPFLLSSILRCPTCGQGMVPSITTHILKDGSKRKHRYYICSVFHNKGSSACKANSIKAYDAEDAVINRITEFLNDSAGFSQTIQSINKDTVQLNVNLKEQLKKIKTELKEANTMQEKYMEAFEQNLFPVSILQERLQKLAKSKNDLEQKKNELSIQLSSSDTKIIPPDVVRHLLEKYVDEFQQSSREKKKQLLQLLLNKISIKHLDGRFRTMDKIELDFDFSEVNLSKTFTLIHILYLESDYSKENSDSKDKMPPYLQIFLPLFMVRFLPINPKPPINLLQQYKSHHLVRKCHFGK

SEQ ID NO: 18522 - protein, 511 aa, synthetic construct
MGAKRSSIKGPKKGTKRALVYGRLSDRPEKDSNSTSIERQIEEITEYCERNNIELVDTYTDDRKSGRSFKGRDGFKAMFSRVLKKEEEIDYIIVHKQDRLSRNTLDTLYIKERLESHGKHMIAVADHINTEDPKSDIFVHVMALFAEIEREFISFRTNEGMERKAKDGHYLGGKVTGYKSIDKELVLIPEEVKIVKYIFEKYALEKWGYKRIASSLNIQGIKTKRGKYWTSNAVKTILENEMYIGNTTWRGKINKGKHDRIIDELLWKGKEKVMNFRSYIPEKIHPGSYPLSGLLKCSQCGGPMVQGNSDPKYKYYQCNNNKNSGSSVCSSNLVKKEHAEEYVLKDFLNCLKEKVSPEVIYSTTKSILNYDLNPLENEAGKLKKQIKKLEDQIFNLMDLTEDETLNLDEEMMKSRISVKQEEIYKNKSVLENITMQIDLKKNKSLIDIIKFSIKNFEDFYHTLSDDEKKLFFHSVIKKVHVTKGKKTKDRRIKDVIYLFDLEDLNRLAEKE

SEQ ID NO: 18523 - protein, 585 aa, synthetic construct
MPRVALYARYSDDKQSPASIDDQFLICREQAAREGWRIVANYKDAAISGASVILRPGIQSLLQDAQMGRFDILLAEALDRVSRDQADVATLYKNLQFAGVKIVTLAEGEVSELHVGLKGTMNALFLKDLAKKTHRGLRGRVEKGKSGGGLCFGYDVVRRFSSEGEPVHGERSINAAEAEVIRQVFRQFANGLSPHAIACRLNDSGISAPTGKLWTSTTIRGHAKRGTGLLNNELYIGKLVWNRLRYLKNPQTGKRVSRINPKSEWIVTEVPDLRIVDEELWQAVKARQENIAIQYVDVIEATRSAHTALNRTHRPKSLLSGLVYCGCCGGPYSLRGQGRFACSNHVDTKSCANGHSITRDKLEARVLDGLRDRMMTPDVAAEAIRTYVEESNRINHQRRASEIADRTDLQKVLKAIKGLVTLAKEGKGTRALVDEILELEAQEDAIRARLAAAPVDVPDIHPNISEIYRRKVERLTHALSQPEERQEAADALRALIERIDLTPGAKRGEVNAMLYGEFGRILEWIEQRRLAENAQSPNALASGLCGMSVSVVAGGRSPRWYNWPPPPPSLLTALRIPMSCPHNSA

SEQ ID NO: 18524 - protein, 593 aa, synthetic construct
MPLCFPYVRFSSQKQADGNSVVRQSERIESFVSRHNLTVDTRLEDHGISSFRGANAKKGQLSGFLQRVRDGEIPNGSYLLIENWDRLSRQVLDASIEIFSDLIRSGIKIAVLDEDTVYDDLTSNSFIRAIVQFERAHSESLRKSDMSKASWRAKHKAMAEGTIATEKCPQWLVVKDGAWCKLDDICLHIETMFSLAQTYGVAETGRRLNAQFGTSYKTHQIQYLLRNRRLIGEHSPVELSKEHGKNVPTGHLVEHYYPQVIPPATFEEVQTILKSRKPFSGRQDATNLNIFRNLLVCAECGGSTRFMLRSGKEFYYCTASMTGGCVDDQIRSIRGEFLRRVLFKFEHWTAIRDYIAAGSDVLKTLKKEETVAVAKLSRLEVKAEGLKNKFAAEDDEDKAETYVGLLTDTRKAIATAKADIDRIKQELASLDGAFALSDSNVDSFESMLTSDSEQARTDRQRLNRYLRGIFLKLELHFPTHKLVTQPIPALANRISPVIAYVQQPKDKRTGDDYGHHTWITKDKQTLIIRSIKARLRRAGIPSPTFEQVKPIYESVAYSLLPKSKPQCKNQSELADLPEEFKGLVWKAPDPFLK

SEQ ID NO: 18525 - protein, 507 aa, synthetic construct
MKRVISYIRFSSERQAKGDSLRRQSKMVNDWLKAHPEYYLDQDLSFRDLGVSGFTGKHLKGGLGDFLTAIEKGLVKAGDTLLIESLDRLSRQDIDIASELLRRILRAGVDIVTLSDGEHYTRESLKDPLALIKSILIMQRAHEESLRKAERIQAAWDAKKEAAKAGIKISKRCPAWLKLNDDRKTFSVIPEKVETVRRCFQLRLEGKSIWEIVRTLNDEGHQTLNQYKAGKFGQTSVQDLLKNRSVIGYFTPKGCEEIAGYFPPIIPETDFYKVQQLSYSRYGRKPASDKPLSVNLFKGVIRCSECGHALIITGFSDTRNGIYRCPLRNENRCSAKGLSRKQTDGTLLALLSRIDRFDSDMTNTIDTLKLHREHISSNIEKLVQLSLEIEDLSAITSKLKQLKGELSQVNADIEKETQRLKSIDVGCLSDCDLTTKAGRIEAQLIIKSAVKEVILNTAKRRCKVTFHNGKVIDLPITEDPSENVTEAIQSLSEVTERGLIDVDVVEI

SEQ ID NO: 18526 - protein, 506 aa, synthetic construct
MRTVITYLRFSSATQGAEGADSTRRQNDLFKQWLKKNSDAQVVASFSDEGLSGYKGKHLTGQFGDMLARIESGEFPESTILLVESIDRIGRLEHLETEALMNRILGNGLEIHTLQDGLIYTKDALADDLGISIIQRVKAYIAHQESKQKSFRVSEKWKQRAKLALAGEQRLTKMVPGWIDPDTLKLNEHAETVRLIFKLLLSGESLHNIARHLQSNGIKSFSRRKDANGFSVHSVRTILRSETTIGTLPASQRNDRPAIPNYYEAAIDAATFNKAQEILDKNRKGRTPASDNPLTINIFKGLFRCQCGASVHPTGTKNKYAGVYRCNNHLDGRCDVPPLKRKPFDKWMLENFLGMIDVGNDGEAEGKIASLQHEVEIVTTRIKKATALLLEMDDIDELKIQIKELNQRRTELQTTIDNMRRKASLTDKELPQLKDIDLTTKAGRVECQLILSKHLKGLTLGKDSVIVTLQNDTEITIPTNPLPLNDGTSIFEIAEKELLEIDAYQL

SEQ ID NO: 18527 - protein, 507 aa, synthetic construct
MKRVISYIRFSSERQAKGDSLRRQSKMVNDWLKAHPEYYLDQDLSFRDLGVSGFTGKHLKGGLGDFLTAIEKGLVKAGDTLLIESLDRLSRQDVDQASELLRNILRSGVDVVTLSDGEHYTKESLRDPLSLIKSILIMQRAHEESLRKAERIQAAWDAKKEAAKAGIKISKRCPAWLKLNDDRKSFSVIPEKVETVKRCFQLRLEGKSIWEIVRTLNAEGHQTLNQYKAGKFGQTSVQDLLKNRSVIGYFTPKGCEEISGYYPAIIDETTFYKVQQLSYARYGRKPASDKPMAVNLFKGVIRCSECGHALIITGFSDTRNGIYRCPLRNENRCSAKGLSRKQTDGTLLALLSRLDRFDSDMTNTIDTLKLHREHISSNIEKLVQLSLEIEDLSAITSKLRQLKNELSQVDADIEKETQRLKSIDVGCLSDCDLTTKAGRIEAQLIIKSAVKEVVLNTAKRRCKVTFHNGKVIDLSITENPSEDVTEAIQSLSEVTERGLIDVDEVII

SEQ ID NO: 18528 - protein, 604 aa, synthetic construct
MKKVFVYHRVSSDQQLDGSGIARQAELLEGYLERTGICFEMDDPIPVVLSDQGVSAFKGLNISEGELGAWMEEVRKGMWDSSILVVESIDRFSRQNPFDVMGYINALMAHNVAIHDVMANIVISRSNSKDLPFVMMNAQRAYDESKYKSDRIRKGWAKKREQAFNKGTIVTNKRPQWIDVEDDKYILNHKAAVIKEIFELYKTGLGCPTIAKELQKKEGEQYKFNRAWTGELVHKILTNRRVTGKIFISETIRNHDDLDNPVTQKKYQMNVYPIVVNEDEFELVQDLLKSRRPNAGRITIKKTDNEEVLIKSNLFSGIARCMDCGGPMYHNVVRAKRTPKKGDPKVEEYRYIRCLSERDGLCNNKAMTYETVERFVVEHLIGMDISTVIKEQEFNPELEIIRIQIDQVKDQIANYENGIERRKSVGKVISFEMREELDDARLQLEELLARQASLATVNVDIPVLKNVDVNELFNVNNVDIRTRYENELNKIVSTVRLKRVDDSYIIDIKYKNNDLKRHVIFVEHKKKEQKLIGDVIIENIDGTILYSTSSFWIRVKDGAIRFQPTKDDLSIIDYHLLLNYVDGLERDNMVAVWMRHNINFLFDK

SEQ ID NO: 18529 - protein, 559 aa, synthetic construct
MKTKLYSYIRFSSMRQNDGSSYERQIRMAREVAAKYDLELVNDYQDLGVSAFKGANSKTGALSRFLDAIGRSVPVGSWLFIENLDRLSRADIVSAQELFLSIIRRGITIVTGMDNKIYSLDTVTANPMDLMFSILLFIRGNEESQTKRNRTNSSALIKIKAHQENPQNPAVAIEEVGKNMWWTDTTSGYVLPHPTYFPVVQEIVELRKNGRSTAEILDHLNETYTPPPAVSNKKHSKWSRAMVERLFHTRALIGIKEVSVDGVNYELKDYYPRVIDDATFYHLKKNIGARAWNFGEKEEVKPIPLLSGIGLLKCDHCGCAMVKVKGTNKRSDQYRYTCDATRSRRLDCEHPNWSFRGDQLEKAVLQLLADKIWIAEDKANPVPALKVQVDEISRKIDNLIALSAMTGATKELADQITTLNSERETLYNQIKMAEEEMYSVDSQGWEKLAEFDLEDVYNEERLKVRFKIKQALKRIGCSRIDRNKNLFVLEYIDGKTQRVVIENSRGTRKGRIFIDLKTINDRQILESNGLVLHPCLDMLTDKDWKPEEEIPGPLQEFGI

SEQ ID NO: 18530 - protein, 559 aa, synthetic construct
MKGKIALYSRVSTSEQSEHGYSIHEQEQVLIKEVVKNYPGYDYETYIDSGISGKNIEGRPAMKRLLQDVKDNKIEMVLSWKLNRISRSMRDVFNIIHEFKEHGVGYKSISENIDTSNASGEVLVTMFGLIGSIERQTLISNVKLSMNAKARSGEAITGRVLGYKLSLNPLTQKNDLVIDENEANIVREIFDLYLNHNKGLKAITTVLNQKGYRTINQKPFSVYGVKYILNNPVYKGYVRFNNHQNWAVQRRSGKSDENDVILVKGKHEAIISEDVFDQVHEKLASKSFKPGRPIGGDFYLRGLIKCPECGNNMVCRRTYYKTKKSKERTIKRYYICSLFNRSGSSACHSNSINAEVVERVINVHLNRILSQPDIIKQIASNVIEELKQKHSNQTEIKYDIDSLEKQKAKLKTQQERLLDLYLDEEIDSEILKDKQSQMNQQLEVLDQQIKEAQQANQSQDEIPNFDKLKGRLILMITRFSVYLRKATPESKNQLMKMLIDSIEITTDKQVKLVRYKIDESLIPQSIKKDCGNFFMPKFNFVINVTNENRIENLSLLPLF

SEQ ID NO: 18531 - protein, 542 aa, synthetic construct
MQQLKTKRVGIYVRVSTEMQSTEGYSIDGQINQIKEYCDFHHFEVKDIYADRGISGKSMNRPELQRILKDAKEGYIDCVMVYKTNRLARNTSDLLKIVEDLHKQNVEFFSLSERMEVNTSSGKLMLQILASFSEFERNNIVENVFMGQTRRAQEGYYQGNLPLGYDKIPNSKHELMINQHEANIVKYIFESYAKGHGYRKIANALNHKGYVTKKGKPFSISSITYILANPFYIGKIQFAKYKDWSEKRRKGLNDKPVIAEGKHSPIINQDLWDKVQMRKKQVSQKPQVHGKGTNLLTGIIHCPQCGAPMAASNTTNTLKDGTKKRIRYYSCSNFRNKGSKVCSANSVRADVIEDYVMKQILEIVKSDKVIQRVVTHVNQENQVDGAALHHDIAYKQQQYDEVQIKLNNLIKTIEDNPDLTSVIRPSIQKYEKQLNDITNQINQLKNQQNEDKPLFDAKEISKLLQHIFHDIKHIEKSRLKALYLSVIDRIDIKKDGNHKKQFYVTLKLNNEIIKQLFNNKQLDEVHLSTSSLFLPQTLYLTI

SEQ ID NO: 18532 - protein, 449 aa, synthetic construct
MKQVIGYLRQSTMKQQSLAAQKQAIEAIAEKHHIQHINFYSDKQSGRKDNRSGYRQMTQLIQQGQCDILCCYRLNRLHRNLKNALKLIKLCQTYHVHILSVHDGYFDMDQAFDRFKLNIFISLAELESDNIGEQVRNGLQEKAKQGRLITTHAPFGYEYHNGAFIINQNESPTVKAVFNYYIKGHGYKKIAQLLEEDNTYINRQPYQVRNIIINPNYCGRVNNQYGQFDNMFPSIVSTSIYEQAQRLRSQKQIKQTSSDNQLKQKIKCPCCNTTLTNMTVRKKNHTLRYYVCPKNMNASRFVCDFKGINAQTLEDKVLEVCKDFYQNQRIYTKIKGAIDKRIKRQRNIEKHHTLTQEQLIEKLAQGIIDAETFREQTQSLRQQPQRTTSINGHQIQHTIQNIIQKRFTLNILYPYIETIHITKDKNLIGIYFKNEPLNIVNQTMQSSIA

SEQ ID NO: 18533 - protein, 516 aa, synthetic construct
MAGKKVTVIPMKPRQWAAENTEEKPKLKVAAYCRVSTEMEEQASSYEAQVQHYTDYIQRNPDWELAGIFADEGISGTGTKKRDGFNRMIEACQKGDVEYIITKSISRFARNTVDCLQYIRQLKDLHIAVFFEKENINTMDAKGEVLLTIMASLAQQESQSLSQNTKMGVQYRFQQGQLRINHNHFLGYTKDEDGNLVIEPKEAEVIKRIFREYLEGSSLQEIANGLMSDGILTGGKRKLWRGEGVRLILRNEKYMGDALLQKTYTTDFLTKKRVKNDGSYAQQYYVENSHPAIIPRDIFMQVQQELDRRKSMKNKHSQCFSGKYALSGITVCGDCGNAYRRVHWKNRGTVWRCKSRVDKREHNCSGRTIYEKDLHEAIIKAINETVVDREDFLQQLSENINSVLTDGLTGRLEELDSKLKELESEIISMAIGGQGYDELVSQIFSLRDERDAVAKQIAANTNLQQRVDEMVVFVKEHDVINEYSEVLVRRLIEKVTIFEKNIVVDFKSGVRVTVEI

SEQ ID NO: 18534 - protein, 537 aa, synthetic construct
MSDVLFFDSFAKGKQHKQVTRSKECVIYTRVSGKDQVDNLSLGTQLKACTSYAEKFGFDIMAQFGGTYESAENDERKQFTAMLSFVKKYKGKISAILVYSLERFSRNDNSIWLSGELRRLGIEIISVTQPIDTSNASGQMQQKLLFLFGEFDNQLRKQKCTAGIREMLLRGDWPTSPPLGFDIDKSGNRRKIVVNAKGRLLRQAFEWKAYENVSNEVIRDRLALRGLKLIHQRISEIFRNPFYCGLMVHNMLEGKVVEGNHEKLVPRELFLKVNGLLDTLSHGFSINEENVDIPLKRFMVCAECGRPLSGYLARKKNIHYYKCKTKACCNNKNANDLNRRFERVLEFFKIETAKDYLELIKNQVVATFNQLTKHKETDLIQLENSYREIKSKVDRLEERYIEEEVSNELYTKYHEKYSQEKYEIERNLMTLSNKSSNLVKCVELAIEYATQLPSKWVSGDYHTKQQLQSLLFPKGISYDKKNDKVRTKEINFVFLYIAYFQQVVLKKQRGIPELDLNYASFAASVAGSRIELPTSGL

SEQ ID NO: 18535 - protein, 559 aa, synthetic construct
MSKEKIKVYLYTRVSTSIQIEGYSLEVQKSRMKAFAIYNDYEIVGEYEDAGKSGKSIEGRIQFNRMMEDIKSGKDGVSFVLVFKLSRFARNAADVLSTLQIMQDYGVNLICVEDGIDSSKDAGKLMISVLSAVTEIERENIRIQTMEGRIQKAREGKWNGGFAPYGYKLEDGKLFINEEEAVAIRTIFDQYVNTTIGANGISKYLENHGIRKIPRQNGKNPLFDAGLIRKILKNPVYNGKIAFGRRTLEKVHGTRNEYKQVEQDEYLISEGIHEAIVSDEVWQAAQVKLKSQAKKYEHVNKGKDTRTHLLSGIVKCPICGVGMFGNKCIKKKKDGTKYKDFYYYGCKHRQMIRGHKCTFSKQIREELLDDAVAEVIVKIVSNPKFASMMQEKINMKVDTSEIEKEIDNYQKELRKSHSTKFKLIEEIDNLDVEDKHYKRRKQDLDDRLYRMYDKIDELESSLIDAKAKKQTIEAEKLTGDNIYKVLIYFNKLYKVMNDVERRQLISALISEIQVYEEKQSNGQWLKSITFKLPIIEENLNIGLDNDEQVECISLLEKRS

SEQ ID NO: 18536 - protein, 452 aa, synthetic construct
MKAAIYIRVSTQEQIENYSIQAQTEKLTALCRSKDWDVYDIFIDGGYSGSNMNRPALNEMLSKLHEIDAVVVYRLDRLSRSQRDTITLIEEYFLKNNVEFVSLSETLDTSSPFGRAMIGILSVFAQLERETIRDRMVMGKIKRIEAGLPLTTAKGRTFGYDVIDTKLYINEEEAKQLQMIYDIFEEEKSITTLQKRLKKIGFKVKSYSSYNNWLTNDLYCGYVSYADKVHTKGVHEPIISEEQFYRVQEIFSRMGKNPNMNRDSASLLNNLVVCGKCGLGFVHRRKDTVSRGKKYHYRYYSCKTYKHTHELEKCGNKIWRADKLEELIIDRVNNYSFASRNVDKEDELDSLNEKLKIEHTKKKRLFDLYISGSYEVSELDAMMSDIDAQINYYEAQIEANEELKKNKKIQENLADLATVDFKSLEFREKQLYLKSLINKIYIDDEQVTIEWL

SEQ ID NO: 18537 - protein, 555 aa, synthetic construct
MNDLFSMENKYRKSHVTDDILDEFGQRQIVIGVLERVSTDMQANEGDSLEMQRELAQEHAKNINGTIYKFYTEEGVSASKVRIEKRQKLQELIQDVSHGKVNYIIAYKRDRIFRNAQEYMWFIQFLVDNNCEIYLTAREEQQIDLSAFKVAGAAKMMEVMMAMISEMESATTSTRVSDTMINLAKKGEYTGGSTPIGYHRVEGKFLPMDGVNELFAKIEDLYLQGFGLFSIAKWLNGGEVKGLVALKNPIPKPIENKTSDIWNHRNINTILFNPIYTGHFSYQSKKNLDLNRFISKNELIEPIRTEKRQRELNAFYNKKIKNARPARAYNTSFLLSGLLYCAECGEKMMTSTTQPKNSDKKHSYYRCKSQGTNYYKTKCENHGYRKEEIETFVLKAAKEKSVDLIGNFLDLEVHKIVQEKIKIEKKTNVNHADVLKDKIKDFEKKLNRYTELVEELDSSEEDIGLQKIYMKKQLDILKELNDLRKTYASLDAEDNKNSNDNFTHEEDFMNLAKEIGNIIETSPVHLQKQFLENLFTVIYVDKNRRIKMVTKDGLT

SEQ ID NO: 18538 - protein, 475 aa, synthetic construct
MKCVIYVRVSTDEQAKHGFSIAAQIEKLEAYCMSQGWEIVETPYVDDGYSAKDLNRPHFQAMLQRIQQGGIDVLLVYKLDRLTRSVPDLHTILAELDQYECKFKSATEVYDTTNAMGRLFITLVAAIAQWERENTAERVRLGMEKKVKLGYWKGGTPPYGYQVVNGALMMDEEEAQIVRDIFTLAKTLGFYTIAKQLTSKGVPTRKGGQWHVDSVRDIANNPTYAGYLMFSLNPKDIKKPPRERVLFEGNHERIIDRDEFWALQDLLDKRRTLGGKRETSNYYFSSLLKCARCGHSMAGHKAGKKKTYRCSGKKAGKACTSHMILESNLVQAIFAQWDDLVGGHFTSNEGDASFPAAQLTALQQELAVVQKLLHKKKTMFEHDIIGIDELIRDSEKLRNKEKEIQASLKKIQLLDDRHHEEIRAIIRNIDTLWINADDYERKQLMTTIFEQIVVDTKDDYRSSKQAREITIVTAK

SEQ ID NO: 18539 - protein, 452 aa, synthetic construct
MKAAIYIRVSTQEQIENYSIQAQTEKLTALCRSKDWDVYDIFIDGGYSGSNMKRPALNEMLSKLHEIDAVVVYRLDRLSRSQRDTITLIEEYFLKNNVEFVSLSETLDTSSPFGRAMIGILSVFAQLERETIRDRMVMGKIKRIESGLPLTTAKGRTFGYDVVDTKLYINEEEAKQLQMIYDIFEEEKSITFLQKRLKKLGFKVKSYSSYNNWLTNDLYCGYVSYKDKVHTKGIHEPIISEEQFYRVQEIFSRMGKNPNMNKESASLLNNLVVCSKCGLSFVHRRKDTVSRGKKYHYRYYSCKTYKHTHELEKCGNKIWRADKLEELIIDRVNNYSFASRNVDKEDELDSLNEKLKTEHVKKKRLFDLYISGSYEVSELDAMMADIDAQINYYEAQIEANEELKKNKKIQENLADLATVDFNSLEFREKQLYLKSLINKIYIDDEQVTIEWL

SEQ ID NO: 18540 - protein, 520 aa, synthetic construct
MTEKNIMVIPARKRVGSTAAKEQIKKLRVAAYCRVSTETEEQNSSYEVQVAHYTEFIKKNTEWEFAGIFADDGISGTNTKKRDEFNRMIAACMDGNIDMVITKSISRFARNTLDCLQYIRQLKDKNISVYFEKENINTMDAKGEVLLTIMASLAQQESQSLSQNVKLGLQYRYQQGKVQVNHKRFMGYSKDEDGNLIIVPEEAEIIKRIYREYLEGQSLVRIGRGLEKDGILTAAGKPRWRPESVKKILQNEKYIGDALLQKTVTVDFLTKKRVKNEGHLPQYYVENSHEAIIPKELFLQVQEEIHRRSNIYTGEGKNKRIYSSKYALSAITFCGDCGDIYRRTYWNIHGRKEFVWRCVTRIEQGPEVCKNRTVKEDELYGAVMTAINKLLAGGNNMIKTLEENIHAVIGETTEYQISEINNLLEEKQKELIKLANKGQDYEHLADEIDELRDKRQLLLVEDASLSGENERINELIEFIRKNKFRTLEYDDKLVRKIIQSVTVYEDHFVIAFKSGIEMEI

SEQ ID NO: 18541 - protein, 520 aa, synthetic construct
MKKITKIDELPQGQLPNTNLRVAAYARVSTDSDEQLESLKAQREHYERYIKSNPEWEFAGLYYDEGISGTKMEKRTELLRLIRDCKQGRIDFIITKSISRFARNTVDCLELVRKLIDIGVYIYFEKENLNTGDMESELMLSILSGFAAEESASISQNSTWSIQKRFQNGSYVGTPPYGYTNIDGEMVIVPEEAEIIKRIFAECLSGKGGGTIAKGLNKDKIPASRGNHWSAGTVIDMLRNEKYMGDVLLQKTYTDSNYNRHPNTGEKDQYYYKDNHEPIISREDFAKVQDLIDERAKMKCKGMKENIYLNRYALSGKIVCGECGRNFRRKTNYSAGRSYIAWSCIGHIEDKESCSMLFLRDGEIKATFTTMMNKLAFSNKLILEPLFKSISQIDEESDRERMDAIDKRMEQLMEERNTLITLMAKGFLEPALFNQERNVLDSEMKNLSTEKTNLVSNSASGVLRANEIKDLINYVSADNFNGDYTEKLFEEFVVNIIVNSRDELTFNLKCGLSLKEKVVR

SEQ ID NO: 18542 - protein, 452 aa, synthetic construct
MKAAIYIRVSTQEQIENYSIQAQTEKLTALCRSKDWDVYDIFIDGGYSGSNMNRPALNEMLSKLHEIDAVVVYRLDRLSRSQRDTITLIEEYFLKNNVEFVSLSETLDTSSPFGRAMIGILSVFAQLERETIRDRMVMGKIKRIEAGLPLTTAKGRTFGYDVIDTKLYINEEEAKQLQLIYDIFEEEKSITTLQKRLKKLGFKVKSYSSYNNWLTNDLYCGYVSYADKVHTKGVHEPIISEEQFYRVQEIFSRMGKNPNMNRDSASLLNNLVVCGKCGLGFVHRRKDTVSRGKKYHYRYYSCKTYKHTHELEKCGNKIWRADKLEELIIDRVNNYSFASRNVDKEDELDSLNEKLKTEHKKKKRLFDLYISGSYEVSELDAMMSDIDAQINYYEAQIEANEELKKNKKIQENLADLATVDFDSLEFREKQLYLKSLINKIYIDGEQVTIEWL

SEQ ID NO: 18543 - protein, 563 aa, synthetic construct
MTQLGHLYRRVSHPSQLTGHGLKRQDENTLAFVKSRGLTLVGTYEDRGISAWTGKNQKKGELGRVLDLIRAGVIKSGEALVVDALDRLSRQPFMSAFGLLKEILEAGVVIHAIHEPNPITLESVNTVPQIAQSMISALMLAHDESKNKSRLVRQAYQHGRETGEIVAGRVPTWVIRNVNKRTGEKWFTLDEDIVPIVQRIFRMCASGHSSYEIAKRFTEEGIKPFGDLKRLSGSAATNKHHWNSTTVQDIVRSRTVLGEFRSHQVWEDENGKRQHKLMKVMPNYYPSGFIDHDLWQKANDALVMRKRARVRGNTGIGFPNLLKPIAVCQHCGSTMQIKNQIAKKDGSKFRRLRCAGRSENYCDNSRVPRYDQVEEAILRLVSEIKLTDHRSAEKSALTRVVNEESMKLDALQVEVRNIILAFKGSPTAVAIVAEKEAEIATLAKSRSENQAKLDALNFSQSPESRRDAMIELIGRMRSEIDLHKLHDIRTELNMRLRQAIKHVAFNCNGDIAIHLHGETAWYLLAQDKGGLTSGMRLIDGPKRGEDGLDLRGKTVDDFVMIRS

SEQ ID NO: 18544 - protein, 515 aa, synthetic construct
MKTAIYLRKSRADLEAEARGEGETLAKHRTTLLKIAKEMNLNVLSVREEIVSGESLVKRPEMLALLEEIEDNKYDVVLCMDMDRLGRGGMKEQGIILETFKRSNTKIMTPRKTYDLNDEWDEEYSEFEAFMARKELKIITRRMQRGRVASVEAGNYLGTHAPFGYDIHRLNKRERTLTINPEEASVVRMIFDWYANEDMGANAIRSKLNDLGYKSKLGNEWNPYSILDILKNNVYIGKVTWQKRKEVKRPDAVKRSCTRQDKSDWIIADGKHEPIIPESLFEQVQEKLNSRYHIPYNTNGIKNPLAGIIKCSKCGYSMVQRYPKNRKETMDCKHRGCENKSSYTELIEKRLLEALKEWYINYKADFEKHKQDDKLKETQVIQMNEAALRKLEKELVDVQKQKNNLHDLLERGVYTVDMFLERSNVVSDRITEITSTMENLKKEIKTEIKKEKVKKDTIPQVEHVLDLYFKTDDPKKKNSLLKSVLEKAVYKKEKWQRLDDFELVLYPKLPQDGDI

SEQ ID NO: 18545 - protein, 568 aa, synthetic construct
MFDTYVTIVGNVLTAPEWRRTTQSNTLVANFKVASTARRLDRDSGRWVDGNSLRVQHRSMSHMTTAIIYIRLSSHRGDLDPSTSPARQEEACRAYCTAKGWAVHPHVVRDLDVSGSDKGLRLDRPGLGEIRERWGEVDVVIFAKLDRLARNVVDFRAFAEEAEQNGAALVSVAESLDMTTISGKFVATILAAFAEMEAATIAERTAAGIAGARRLGRWAGGAAPYGYRVAPATDGPGYILVPDAEAVTVVREAAERVLSGESLYRIAHDFNTRGVPTRSAKLIAEGRTRRMKAAPWSTQVIAQMLVNPAVVGRSVYRGEVIRDDDGMPRQLWEPILSLDVWHQLRAALAANGGGVEGRGRRVRAARLLSGIAYCAGCGRKLYASSRKHPSGATVPTYACAARRNGQGCKGVAITAELTERYVEREFLGMVGHRPLVELVTVAVDDGRRADIEAGIADLARQMTERGADVAALAARLAELHAAREALPATAVTEVRRVETGQTFGEAWESRDVDGRRALLVWAGARVVVHRAAVPGRKTFDESRLDLQLGTADDPEAQRLAEIAAEEAM

SEQ ID NO: 18546 - protein, 515 aa, synthetic construct
MKTAIYLRKSRADLEAEARGEGETLAKHRTTLLKIAKEMNLNVLAVREEIVSGESLVKRPEMLSLLEEIEDNKYDVVLCMDMDRLGRGGMKEQGIILETFKRSNTKIMTPRKTYDLNDEWDEEYSEFEAFMARKELKIITRRMQRGRVASVEAGNYLGTHAPFGYDIHRLNKRERTLTINPEEASVVRMIFDWYANEDMGASAIRSKLNDLGYKSKLGNEWNPYSILDILKNNVYIGKVTWQKRKEVKRPDAVKRSCARQDKSDWIIADGKHEPIIPESLFEQVQEKLNSRYHVPYNTNGIKNPLAGIIKCSKCGYSMVQRYPKNRKETMDCKHRGCENKSSYTELIEKRLLEALKEWYINYKADFEKHKQDDKLKEKQVIQMNEAALRKLEKELVDVQKQKNNLHDLLERGIYTVDMFLERSNVVSDRITEITSTMENLKKEIKTEIKKEKVKKDTIPQVEHVLDLYFKTDDPKKKNSLLKSVLEKAVYKKEKWQRLDDFELVLYPKLPQDGDI

SEQ ID NO: 18547 - protein, 552 aa, synthetic construct
MTSAEAPATFHGPPAVQGGEPWLGYIRVSTWREEKISPELQKAAVLAWAARTGRQITDWITDLDATGRNFKRKIMGAIQRVEEGEARGIAVWKFSRFGRTDLGIATNLARLEHAGGQLASATEDVDVRTAVGRFNRRILFDLAVFESDRAGEMWKDAHQWRRAHGLPATGGKRLGYVWYPRRIPDLTRLGEWVTQNERYEIDEGARADIEQLFERKLGLGAGVPEGYGALAGWLNRLGYRTGVGTLWKADSLRRYMLSGFAAGLLRIHHPDCHCAYTDNGGTCTRWLLIDGAHEAIITPETWERYLAQVEERRNMSPRARNPTYPLTGLVRCGSCRGDAGATSAKRASGRIYGYAYTCGRQAHSGGTVCENGVWVQRYLVEDAVMDWVRREAAASVDAAPPTPVEMNPDRDRQRAAGERARLQAEHTRIENALVNLAADRALNPSSYPGQVFEQAQGKLLAQLQAAKAGAEEAAAVESAPRREDFTPMAGKLLDLWDVLDAPEKNALLRQLIRRVVCTRGAKGKKGVEGSGDTRVTVHAVWEPDPWADKAIA

SEQ ID NO: 18548 - protein, 517 aa, synthetic construct
MAHELADLYLRLSLDREGKTAIERQDADCTAWCERQGIRVRTRHIDRGRSGYKRRTKRAAFTEAIRAATSGEVSTLVVWKLDRLSRQGIGQVGLVLDQLELVGSRIVFVVDGLDSSVSGHRSVIAFLAERARDESETLSFRVKNAKDHLRPAGGWLGGPLPYGLRSGKNGLERDPTTAPVIRDIVSRYLGGLSMVKIARALNSEGVKPSRGEQWTAGTIAQILKSPTLAGLMPISTTRVDPETGETVYTGDIQPYRDPETGDVVEILDEDERLISPTERQLILKRIAERTTPTWKGVRPKRKPTALLTGLVYCECGARMSASGSSYVCGSKRSGGHCPGASAMVEVLDRYVVGQWFDRLSGATFDPDNPDPFLIAVAERWGRYTDPAGANERDELEARIADAEARLSDLEAARYERGEFSDPGGTDRYARLHEKVSGALVTLVKRRADLGPGALDIGGFLEPELVLEAWESQGDNDERRELLRLAFERVEVKKARGRGYRFKPDERVNLVPVGYDAD

SEQ ID NO: 18549 - protein, 480 aa, synthetic construct
MKTAIYVRVSTEEQAQEGYSIQAQKNRLQAYCDSQDWEIVGFYVDEGISAKNMERPELIRMNEHIEMGLIECVLVFRLDRLTRSVLDLYKLLEHFDKHDCKFKSATEVYDTTTAMGRLFITIVAALAQWERENTGERIKIGLEEKVRQGKYAAHVKPFGYSLDNATGELTIIPEEAKVVQKIYNQYLEGLSTNKICLNMIKDNAPGIVWNDNAIFRIIRNPLYKGSLWWGKNTENYFEVDKAVPAIIPEEVWDKVQLHIDMRKPKHPRQATSDYVFSGTLRCGICGRALVGSKITSTIKTGKKTYKNYRCRARYFKECNMNVSDKIVEALFLDYVGNIKYYDEVNETMNQVSSSLDSTPILDERAEIEQELKSIVKRRKKWQFAWANDHINDKEFTERMKEENDKEKYLKEKLSNVATPIELHSNEEIQEILLNIKENWYDMTDYEKKTLVNILVKSFVVVRKPGKKTRYEFFIESIEFN

SEQ ID NO: 18550 - protein, 599 aa, synthetic construct
MKKKLYSYIRWSSAQQTAGTSLERQTAAAREYAKAHDLEFVEILDAGVSAFRGKNATDGALAEFIAAVENGAIPSDSWLYVENLDRLSRATVRNALKLLLHITDLGVTVVTGMDGKIYSAETMDRDFTDLMISLLLFSRANEESKTKSDRVKEASMKALARVQAGLPATIKGGGADPFWIQRGGRETSPTQHPTHWLAIKKIVELSLQGIGCNRIRQVLNADPTLYPPPRQKDTPQRRALIDAGLAPTGWNIHRIEDARRQPSLYGLKTIKLSGHTYNLEGYYPAVCSEEEFHLIQNISANNRKKSGDIRNTITLLSGLNLCKCGSCGGWVTTFRKNGKLTYRCDAGHRKIHHCPTTWSLNALIIESSTIRALIAGVAHNIIEDSHDLESVAGEIDSRRAEVSEIDCKRERLAVRIAEEDDDLLMQQLRQYNARKRDLLAEIGTLTQREALRSEGQNVAERLAEAQRLLTAEMVADIFTSDRLAVRELIRKSMRQVTIWKRQDKSLKVECEFISGWRYTFEGVMNEGQKSFIEYRTSPDGINMMEIYDKLNAITAKAFKHVLDVDDSVMLPTLSHVQAYHDMAVRLGHSPLTGSQFFWK

SEQ ID NO: 18551 - protein, 539 aa, synthetic construct
MITQRKAFLYPRVSTDEQVDGYSLAHQEDVLIRYCEKENIQVVGIYREDHSAKTFDRPEFQKMLHVISKNKGIVDLILFSKWDRFSRNVAAAYEMIGKLKRLSVEPQSIEQPLDMDIPESKIMLAIYLTTPEVENDRRALNTLHGMRRAKKEGRYLGIAPIGYKNGRDAQNKPFLIPNEKAEIVRWAFEELSRSIWDIDTLRRMANRKGLKIGRSQFWSLVRNPVYCGKVFIAAYKNESAHCVKGIHEPIISESLFDDVQDVLKGKKRNVRVNTFTEIDQQLPLRGFLICPRCGRLLSGSGSKGNGGVYYYYHCQSVKLCKERFRADTANEAFVWQLGQIAVNAPIIDYYCQIISQSLKKDNQGKEQELKETQAEIDKLYIRIQNARSLRLDDEFTAEEFKEIKSDLTRKIEELEKKKTKLLSTNDNYQEYLSQGGEIMKNIATRYISASPIVKKQIIGSIFAEKLIFSENKFRTTEPNVILELISRPRAGSDDYKKQKVGEYSDLSALVPRTGFEPAHPCERCDLNTVRLPISPSGHL

SEQ ID NO: 18552 - protein, 613 aa, synthetic construct
MKKAYSYIRYSSPQQAKGDSFRRQLATTQAYCDKHGFKLDEELSLYKELGVSGFSGDQENLKRFISDCVSGKIEKGSLLIVENLDRLSRQKINIAMRQFLHLLEYVDIYTIQDEKKYLHISDTDEEKNDNQMLDIMTSLIIMSRAYEESATKQKRLKESWDERRANIGTKKLTSLIPHWLKLSKDKSSFHIKKERVEIIKHIYDKCIEGVGVTQLIRQLNNNLEQFPTPTTKSKLWARTSVSRILTDRSVLGEYQPHVGKHSGIGDKKRKPLGDPILDYYPQIIDEETFLKAQIARKSRFVGKRSGKLSNDHFSNLFRSFMKCGHCDGKMEFVNKGSDKSRGGKYLTCASSKRGGGCTQNKHYKYLSLELMLLHLTTENGFMPKPEPPTKLNLRLAKLQDVNEKASNDLNFLLNGDFTALPIQNKISELSKDIENCSSEIKILEEQVLTFKPDYHYDELHYDVIIEEDKLKLYSNRINFNSYLLKKIDSAYLIYDRCPFILFKMKDDHVHTIILDENYNFGGCTLPNGEVSYKRLNGASTPIDPMIWQIQENFIALIDDAKNIKSKKLENYLNKINKLINKIIMVQDVEILDQISYQITKATKLLSQLLIKNQ

SEQ ID NO: 18553 - protein, 523 aa, synthetic construct
MSRTVTAIPATKKPGTVTTPSGVPARRKVAAYARVSTEMEEQTSSYEAQIDYYTTYIRSRNDWQFAGMYCDEGISGTSMKRREGFQTMIDDALAGKIDLILTKSVSRFARNTVDSLTTVRKLKDAGVEVYFEKENIYTFDAKGELLITIMSSLAQEESRSISENVTWGHRKRFADGKVMVPYKSLLGYKKGADGNLVIDETQAPTVRLIYQLFLDGMAISEIKTELATRKILTPRGKEVWSTSTVRSILSNEKYKGDALLQKTFTTDFLTKKMKVNEGEVPQYYVSGNHEPIIEPRIWDQVQYELTTRHGNISSAKVGLFSTRLKCAQCGAWYGRKTWASNTKYKYTVWQCNHKYAVEHPCSSATVKDEHIKNAFVQALNQLIARQSRQSHLLQIFDSMFDTSRMEEQAAACQAKIVELTEQIEALIAENQQRALDQDAYQNKYTELDTAYRKTLACKASLEADIAANTAKHAAVTTALGDLAGEPVSEFRPSQWSALIDHAIVDEDTIRFVFRVGEVVRVQL

SEQ ID NO: 18554 - protein, 416 aa, synthetic construct
MAQVSVVTPVRPPTPKLVNVAAYTRVSTNAVEQLASLSAQVSYYSRLIQSTPGWAYAGVFTDEGVTGTSMKSRQGLADLMNTARAGKIDLVLCKSISRLARNTVDLLATVRELKDLGVAVRFERERIDTLSADGELLLTLLASFAQEESRSLSQNVKWAIRNRYKNGGTNSFVVYGYSWADGQFTIIEDEAKIVRLLFANYLDGISPEKTAAILNGQGARSRGGGRFYGSVFRRMLENERYKGCQMLQKMYRPTIQAPTCALNDGELPRYWVEQALPPIIDEEMFDAVQAEIAHRREIGPAATPSKNTGVFTGRICCGACGKNYQRKTRTYKSGTSYKFWRCWSACTGNGNPCRGHNLRETLLEQACADMLGTQSFDPVQVGEQIVMIEAFPHQLTFHLADGTMTPVGLTSEGRLA

SEQ ID NO: 18555 - protein, 528 aa, synthetic construct
MARTVTAIPATRALHTGAPLGQTTLRRVAGYARVSTDHDDQVTSYEAQVDYYTRYISDHAGWQFVKVYTDEGITGTSTKHRAGFQQMVTDALDGKIDLIITKSVSRFARNTVDSLTTVRALKDKGVEVFFEKEGIWTFDAKGELLITIMSSLAQEEARSISENVTWGHRKRFADGKVTVPYSRFLGYDKGEDGNLVVNPEQAKLVRRIYGMYLEGHSIRHIAHTLTDEPATYTAAGNKTWPYQSVRSILTNEKYKGDALLQKSYTADFLTKKQVINEGEVPQYYVTGNHEAIISPAVWDFVQAEIAKGARDQRTQHRTRPFSSTLICGQCGHFFGSKTWHAGSKYEKVIWRCGHKYSGQEKCATGHISDQRLKDMLLKAIRLRFGSPTDTGVNQAVLDALDTSDLEVEAAGLLAQINEVAKKLQSMIARNARVAQDQQSYEKAFNASHEQHQTLLAEHAAVVAEIQNKNNRLAAYHYYMQETANLDLDRLVFSPYLCVALLDKGTVDVDGNVTFQFRDGSTQVVAIKQ

SEQ ID NO: 18556 - protein, 496 aa, synthetic construct
MYGYNLKPCLTRRNTLKRMEQITPPPISASPLVKVAAYARISMETERTPLSLSTQVSYYQQLIHDTPGWTFAGVFADSGISGTTTHRPQFQEMLALARKGAIDLILTKSISRFARNTVDLLETVRELKDLGVEVRFEKENISSTSADGELMLTLLASFAQAESEQISQNVKWRVWRGFEEGKANGFHLYGYTDSADGTDVQIIEEEAAVVRWIFAQYMKKTSCEKMAAQLIADGRVPHLADNKLPGEWVRHILKNPHYTGDLLLGRWSTPEGRPGRAVRNTGQLPQYLVENAIPAIIDRDTFTAVQTEITRRRELGARANWSIETVALTSKIKCVSCNCSFVRNVRNPKTQNSISTEHWICTERKKGRKTGCDTCEISDTALKGFIAQVLDIETFDQEVFNERIDHIDVQGKDHYTFHYTDGTSSSHTWRPNLKKNSWTPARKAAWGELVRARWAEAKKLGLNNPRQAPTPPEALAKYRAVAKAEAERLRAERGER

SEQ ID NO: 18557 - protein, 498 aa, synthetic construct
MTPIKMTTASKPQAILYSRFSSSQQADGDSIRRQEEAAYKFCEREGLELIESQFKDLGFSGWKRHVKREGLESLLMAVENGTIPSGTWLLVEATDRLSRQGWDHVVQLVKSLVSTGCTFVTLDNNQIYTNDNIQDLMSALPLMISADLAFKESQKKSERLRAVKTNKRTNRVIQGNQPFWIDVVDGKPVLNDKAPLARRIVDMALEGIRPLAIVRQFNTEGIKSPKGKEWEVAVIRRILKNTILYGAKTYFEARDGEYKDVETVAGLYPKICTLAEFEQITIKKKKDDNSYNTSGPFSNLLKCQCGKPLVAKQRRGDDYYKVCSGMQNKTCNYRGYYKNIDFYLTKWLGTLSMEEIAHKSNVIDNSPRITELEQLLIDLEAMRVENKGKTRILQRIYEDIEEAESELEQLQAQKFLSEGDTKTTLRDALSFSDNPTKQNMIFRRYINTIVCRKETKDIIVGEVHFKSGASYEVWIHHDSKLKNTSESISYKYNLKTDR

SEQ ID NO: 18558 - protein, 533 aa, synthetic construct
MTTIRPLVSLRSPTAYSYVRFSSAIQAKGDSLRRQTQLAQEYCTRHSLTLSEQSFTDLGVSAFNSANTNEDNGLGQFLKALEQRAIPRDSFLLVESLDRLSRAKVQTALRQLLNIIEYGITVVTLIDNRTYNSDSDTTDLIISLTVMERAHNESKTKSERLKAAWANKRANPTTTNRTSLAPFWLKLNEDKRTYTVIEKSAETVRRIFQMSINGHGIIGIVRKLNEEQIPSPKGGSWSNTSICRILNSKAAIGEFTPNIGRASTNAPISDYYPSIIDEDTFYLSQSRKAERSKPESAGRKTTFPNVFNQVAKCGVCGATMYYDNKSPTLKYLTCREFKKKNCTNRPIRIEFMHKFIVEQYLLPKHFQHHISMTTTSSKEDPISSLEAKIKEEEQALCQLMEITENFTSHIAVQQMENRDRKIAQLKKELEETKVQQAKVALTPRIGFRQAQQLVANALQAEVHSKKPINTEPQELRKYRVSLNRSLKDVFDSLLIHNEKAEPQIIVKCNQFTYVIEKSCLKSIHKDLYWAVKV

SEQ ID NO: 18559 - protein, 522 aa, synthetic construct
MRKVTRIDGNNALQAFKPKVRVAAYCRVSTDSDEQMASLEAQKDHYESYIRANPDWEFAGIYYDEGISGTKKENRTGLLRLLADCENKKIDFIITKSVSRFARNTTDCIEMVRKLTDLGVFIYFEKENINTQRMEGELVLTILSSLAENESLSIAENSKWSIRRRFQNGTYKISYPPYGYDYVDGKLFINKEQAEIVKRIFSEALAGKGTQKIADGLNLDKIPAKRGSHWTATTIRGILGNEKYTGDVLLQKTYTDENFKRHYNRGEKDQYMIKAHHEAIISHEEFEAAQEILKQRGKEKGVIKGSSKYQKRYLLSGKIKCAECGSSFKRRIHGSGDRKYIAWCCTKHIKDASSCSMKFVREDAIHQAFVVMMNKLIFGHKFILRPLLQSLKKTNYSDNITKIQELETKIKENTERVQVIMGLMAKGYLEPALFNTQKNELIKEAALLKEQKEAINRAINGGMTALVEVEKLLKFAMKAEKQIDKFDCEIFENFIEEIIVFSQEEIGFKMKCGLNLRERLVK

SEQ ID NO: 18560 - protein, 522 aa, synthetic construct
MAIRNVTVIPARKRIGNNAKAEELPKLRVAAYCRVSTDSEEQATSYEAQIEHYTNYIKSNPEWELAGIFADEGITGTNTKKREEFNRMIEECMQGKIDMIITKSISRFARNTLDCLKYIRQLKDKNIPVYFEKENINTMDSKGEILLTIMASLAQQESQSLSQNVKLGIQYRYQQGKIHINHNRFLGYTKDKDGNLVIVPEEAEIVKRIYREYLEGSSMLQIARGLEADGILTGAGNHRWHTSTINKILRNEKYIGDALLQKTYTVDFLSKKRVPNNGIVPQYYVENSHEPIIPREIYMQVKEELVRRRCVHISKNGKKRNYSNNHPLSQMVFCGKCHEVFRRVHWNNRGKKSIVWRCVSRLENTGLFCTASTILEDTLKEKIVEAINIAVSGKNSFLAILKKNIETVLNEDLDESTADIDKRLEELQAELIQLANSKEAYDNIVNEIYRLRDLRQETLSRNALRQDKRDRIAEMTDFLNMQTGGITEFDDKLVRKLIEKATVYNDRLVVEFQSGLEIEVNL

SEQ ID NO: 18561 - protein, 561 aa, synthetic construct
MTEVATETIDRTEAKRAALYLRVSTGRQAEADLSIPDQRRQAVAFCAARGWQVAAEFVEPGASGTDDRRPELQRLLDLATGGGTPFDVVIVHSFSRFARDHFALEYHVRSLRKAGVRLISITQDLGDDPMSVMVRQVFALFDEYQSKENAKHTLRAMQENARQGFWNGSKAPFGYSVVDAEQRGSKTKKRLAIDPVEAETVRLMFRLFQRGDGTNGPMGVKAVTSWLNEHGYRTRVGARWGIGPLHQILTRPTYKGEHRFNRKVWKTKEAKPESEQIAVPVDPIIDAATFDAVQAMLKSKNPRAMPPRVVTGPILLTGIATCASCGGGMTLRTGKYGRYRYYTCATCAQKGKSACKGRSIPMDKLDKLVTERLAEQLLTPERIGKILAGIMERQASKDEDYSGRLTALRAKLADAQGRLGRLYAAIENGIADPMDATLKERVATVKTERDIAQVAFDRAVAEMRPDVRITEDKIAAFTEVMRANVLKGETPFRRAYIRSVIDQVEVDDTEIRIHGRRAVLERLVMGGGATPAGVPSFVRKWRARRDSNPWPLPSEGSALSS

SEQ ID NO: 18562 - protein, 543 aa, synthetic construct
MNPVVQTIPATINPFTATADGKKIARKVAAYARVSTDLEEQQTSYEMQVKYYTEHIKGNPDWEFVGVYSDEGISGTSTAHREGFKQMIADAMDGKIDLILTKSISRFARNTVDCLTTIRKLKEKGVEVEFEKEGIKTLDASGELLITIMSSLAQEESRSISENTKWGRRKRMAEGKFNMPYKIFLGYDPGPDYKPVINEEQAETVRLIYQWYLDGLTFAQICHRLEGMGVKSPAGGPRWHTGTVRSILTNEKYKGSALLQKRYVPDFLTKKQKVNKGELPKYYIENSHPAIVSKEMFDAVQAERQKRKGSKLMWRGKDAYSCKVKCGCCGDWFAEATWHSNDKYRKVIFRCRNKYHKKTYCETGWFTKEELQRFFLTALNERLRGKNELADNLMAINEELFAVKELEAKMNKYDDKRKALQEVRLEGALIYSPEQKAEYEAKRKVLEDEYDDALKKYEECKIELEKRQTKRLYFESVKATIDHLGDAVTEFDERLWCNLLDHMVVNDEERVTVIFRDGMEIEVPLGDLVKSRTRTASRKKTTS

SEQ ID NO: 18563 - protein, 432 aa, synthetic construct
MNGAEIIPATKPLEAQIQKKKVAAYARVSTDKKDQESSYEAQAAHFEKLIMNNPEWELAGIYTDNGISGTSLKHRKQFLQMMEDCRAKKIDIILTKSISRFARNTVDLLNSVRELKGLGIEVRFEKENINTSGMGGEFLLTVTAAVAEQESVSISNNVKWAIRRKYQRGETSGGTFVYGYRWVDRQYVIEPEEAEVIRQMYAGLLRGESVYAIAKRLREEGRLTVRGKQFSTVTVRRILSNPLYAGDLLLQKVFVRDCISKKVINNIGQRDRYYVKHHHAGIVDRETYDKVQEVLAYRTKMGFMLRKGMTCFTHKIQCGSCGKWYSRFSKDGYVDWICSTRRKGGKCPSKYLPERKLKAVCCRVLGLEEFDEAVFTVKVEKIVIPEQHRLVFHMKDGTIIDETWEPVCRKDWWTPERRAERSRQYKGRRFGA

SEQ ID NO: 18564 - protein, 478 aa, synthetic construct
MNKVALYVRVSTTSQLEEGYSIEEQKAKLESYCDIKDWHVYKVYTDGGFSGSTTERPALEQLIKDAQSKLFDTVLVYKLDRLSRSQKDTLYLIEDIFLKNNIEFVSLLENFDTSTPFGRAVIGLLSVFAQLEREQIKERMQLGKLGRAKSGKSMMWAKTSYGYNYDKETGSMTVNEYEALAVKEIFTSYLAGMSITKLRDKINGEYPKQPAWSYRTIRGILANPVYCGLNQYKGQTFQGTHKAIISLDDFEQTQRELAKRQQTAKELSNPRPFQAKYMLSGLAQCGYCHAPLKVILGAVRKDGTRFKRYECYQKHPRKTRGVTVYNDNKKCDSGHYDMELLEHYVLTRIAQLQNDPDKIQELFSDDTSPAVDKQAIQKQIDSLTLKLSKLNDLYLDDRITLDELRTKSSDFIKQRSALEEEIKKASNDKQAGQRERIEKLLDASSVLDMSYDNQKVIVRELIDKVQVTSDKVVIRWKI

SEQ ID NO: 18565 - protein, 451 aa, synthetic construct
MKNVALYIRVSSDQQAKNGDSLREQEDTLNEYVNSNKNMTIFSTYIDDGISGQKLKRDEFTRLMNDIAAGSIDMILFTKLDRWFRSLKHYLNTQDILEKYEVHWIAVSQPYYDTTTPYGRTFINQVMSFAELEAQMTSERIISINANKVKEGEVITGSTPLGYSIKDKKLIPNEDSRIAIEVFNYYDLHTNLNQTTKFLADKHGILRTPQSIRSMLKNTKYIGEYRQNKNYNPPIIERDLFESVNRKLKMNTKSNVKHDYLFSGLLCCGNCSRKMNSGRKSNRSPKRKDGTCIVYPPLPEYTCRYAYQLPKCENTKVIREHLLEKYLIENLPALLQLTINSLKKQKNSTKNTQTRIKTLEKKIERLKLAYLNEIITLEEYKIDKAEFEKELTRLAKPNVEKQKIEGYEKLLNCDLNHYYADMSRIEKKAFWQSLIAKLTFDNQRLITVEML

SEQ ID NO: 18566 - protein, 531 aa, synthetic construct
MRTVIYARYSSQLQNSRSIEGQLADCRDRCAREGWTIVAEFQDAAISGAKGIDEAARPGLNAMLAAVEAGGIDQVLADSTSRIARRERDSAEIHEILAHANCRLFTLADGVVQGLTASIKAAVDAQQRRDLAHNIRRGQRTSVLQGRAPAGIAYGYRRANRFDDRGELVRGIREVDEDKAEIVRRIFAEFAAGRSPQAIAEALNAEGVPGPRGAHWSITTIRGDRKRQNGMLVNRIYVGELVVGRTAKLVNPRTGSTVIRPIAEDQWQAQQKPELRIVDQEVWDAVQDRIANAAYAPYNKQQRPKHILSGLGQCGSCGSGYIRISGEKWGCSARKNGKGCDNGRIIETKRYLSEVQHALKNDLLHPDLVAHYERVWRTSRAERISNQKRDRTRVERRLAESSKKLERLAHAIANGAGEVAEIVALAASERKIRDEAKAELAQLEAMQLIPLLPGLAEQYRRQIDALHEALEAPEASLEAVPKFRALIHRIVLTPNADGRGVLVQVEGRMDQLLSLATGEQLGQEGLRRHVG

SEQ ID NO: 18567 - protein, 599 aa, synthetic construct
MKKEVKVIKGDTTLKRTASGCVERSIKRVAAYCRVSTDTEDQINSYNSQVEHYTEFIQKNNEWTLAGIYADEAITGTQVDRRIDFQRLINDCMNGDIDMIITKSISRFARNTLDTLKYVRKLKEFNVAVFFEEENINTLTMDGELLLTILSSVAQQEVENISANVKKGLRMKMERGEMVGFQGCLGYDYDPETKSISINEKEAEIVRYIFRRYIEGVGGMVISRELEEQGYLSPRGNKRWTETTVLGIIKNEKYKGDLMMGKTYTVDPISKRRLDNFGEQDKFYIENHHEPIISEEDFEKAQGIRLRRSKNRNTVANNGGKREKYSRKYAFSSMLECGFCGHNLSRRNWHSSSEYTKVIWQCVNATKNGKKYCPHSKGIEEEAIEKAFMESYRQVCHNNVEITNEFLKTVEEELKDNSLAKDLKKITNQLDKILKKEKDLVELRLNESISMDIYQDKYNEIAISKEKLLAEKRTLEVTLTDEKALKKRLEGFKKLLESNKYLEEFDRAVFESIVDKIIIGGTNDEGEIDPAMITIIYKTGKKDSQDGRLFKSRRKNAKEVNEKADSKLYPQSSDEVNNLCSYPMDNTRRVCSVANQGVR

SEQ ID NO: 18568 - protein, 413 aa, synthetic construct
MTVKLIKAKHTTKKQRVCAYVRVSTTNSSQLDSLENQIAYFTNLYGNRDDVTFVGVYHDKGISGSTDYRPSFQAMIEDCRKGQIDLIHTKSISRFARSTMTILEVSRELKVFGVGIYFEEQNINTLSSEGEVMLSVLASLAEEELESMSSNQRWAFQKKFQRGEMVINTKRFMGYDVDDKGELVINEEEALVVRRIFHLYLDGMGLHRIAKQLNHEKVPTVTGAKWYDTTIRNILRNEKYKGSALLQKYFQDGVNGKKRLNVGEVEQYFIEDNHEAIISKDDWQVVQEKLNQNSRNQGPNKIYRFTGLLKCQYCSSTLKRQVSYKGKIVWCCSKYIKEGKVSCQGMRVPENDINDWQIQTAVTVIERIEDGQKHYSYSSKEGTGNNATPYQRENQSSRLLSGVHRPRRTAIKL

SEQ ID NO: 18569 - protein, 430 aa, synthetic construct
MSTDQDEQLSSYENQVRYYRDYILKHEDYELVDIYADEGISATNTKKRDAFNRLIQDCRAGKVDRILVKSISRFARNTLDCIKYVRELKELGIGVTFEKENIDSLDSKGEVLLTILSSLAQDESRSISENSTWGIRKKFERGIVQVNTTKFMGYDKDENGRLVINPEQAEVVKYIYSQFLKGYSPESIAKELNAKDIKGWSGKANWYPSSILKMLQNEKYKGDALLQKTYTVDFLTKKRIQNDGQVNQYYVEDSHEGIIDEETWETIQLEIARRKIYREEHQLKSYIMQSEDNPFTTKVYCKACGSAFGRKNWTTSRGKRKVWQCNNRYRIKGVEGCNSRHLDEATLEQIFIKALELLSENIDLLDGKWEKIVAENRLLDKHYSMALSDLLRKEQIAFNPSDMCRVLDHIRIGLEGEITVRFLEGTEIDL

SEQ ID NO: 18570 - protein, 556 aa, synthetic construct
MSNTKRIGQTALYERLSRDDEMQGESNSITNQKQLLESYAKRNGFVNIYHYTDDGVSGTTFDRDGFQKMIKAVEENKVSTVIVKDMSRFGRDYLKVGFYTEILFKEKGVRFIAINNGIDSEKQAESDFTPFLNIMNEWYARDTSRKIQSIFRARMEEGKRVSPSVPYGYYRNPKNKQELLVDKESAKVVKRIYRLVIEGYGVTQIADILTKDKVLIPSAYAEIHYPENNHSSKKRGIEDPYFWTPTTVSYILEKQEYMGHTVLGKTICLDYKTKKRRKAKEDELIIFKNTHEAIIDEETWNNAQRLRKTVRRSPKYGTTSHPFTGLLICSDCGGKLSYREPAEHKEKKYDCDYCFVCQHYRHRKGSCSMHYIKVKTVNEILLKSIKEITDFAKEEKQEFLKVMNKLSDEKREEKYQEDKEKLEKLSSRNAELTTLITKLYEDHALGKIPVKHFERLFNTYDTEQQDLEKQIQYFEQEIESYHQRKVDTDKFLKMIEKYTDIEELTVPMINEYIEKIVVHEATGGRQGKNRKQQVDVYFNFIGNCQVPQKADIDKMA

SEQ ID NO: 18571 - protein, 449 aa, synthetic construct
MLKRAALYIRVSTDQQAKHGDSLDAQIATLKDYVSTQDNLTIIDTYIDDGISGQKLYRDEFQRLLEDIKKNRIDIILFTKLDRWFRNLRHYLNIQEILDNSGVTWLAVSQPFFNTDTAYGRSFVNQSMSFAELEAQMASERIKAVFENKIRKGEVVTGSVPFGYKICDKKLIPNENAPIAKDIFKHYSIHNSIRLTVEYLFNEYDITRSSRTIKHMLRNRKYIGEVSGNKNYCPPIVDKETFEKVQNLLDKNISSIAKRTYIFSGLVVCSCCGKKMTGRYRKRKYIKKDGTVMYYTKKVYRCNGNTYKRNKCPNKINIAEEILEEYLLNNIKADAENFEAKQKKIAVSAPEKNNNSKILKKIERLKKAYLNEVTSLDEYKKDRKELEQMMIQVKPKETIVFKSNWFNKNIESTYRDFDEEEKRFVWRSVLKNLIVDPHSKITINFLTKN

SEQ ID NO: 18572 - protein, 503 aa, synthetic construct
MNNRIDAIYARQSVDKKDSISIESQIEFCKYELKGGNCKEYTDKGYSGKNTDRPKFQELVRDIKRGLIAKVVVYKLDRISRSILDFANMMELFQQYNVEFVSSTEKFDTSTPMGRAMLNICIVFAQLERETIQKRVTDAYYSRSQRGFKMGGKAPYGFHTEPIKMDGINTKKLVVNPDEAANIRLMFEMYAQPTTSYGDITRYFAEQGILFHGKELIRPTLAQMLRNPVYVQADLDVYEFFKSQGAVIVNDAADFTGMNGCYLYQGRDVKPSKKNDLKDQMLVLAPHEGIVPSDIWLTCRKKLMNNMKIQSARKATHTWLAGKIKCGNCGYALMSIFNPSGKQYLRCTKRLDNKSCPGCGKIITSELETVVYQQMVKKLASYKTLTGRKKAAKANPKIAALQVELAHVDSEIEKLVDSLTGANNVLLSYVNVKIAELDGRKQELLARIAELTVETISPEQVSQISGYLDTWENVSFDDKRRVVDLMITTIAATSDSLNITWKI

SEQ ID NO: 18573 - protein, 558 aa, synthetic construct
MSKEKIKVYLYTRVSTSIQIDGYSLEAQKSRMKAFALYNDYEIVGEYEDAGKSGKSIEGRIQFTSMMEDIKSGKDGVSFVLVFKLSRFARNAADVLSTLQTMQDFGVNLICVEDGIDSSKDAGKLMISVLSAVAEIERENIRVQTMEGRIQKAREGKWNGGFAPYGYQLIDGKLIINEEEAVAIRTIFDQYVNTTIGANGLSKYLENHGIRKIPRQNGKNPLFDAGLIRKILKNPVYNGKIAFGRRTLEKVHGTRNEYKQVEQDEYLIAEGIHEAIISDELWQAAQVKLKSQAKKYEHVNKGKDTRTHLLSGIVKCPICGVGMFGNKCIKKKKDGTKYKDFYYYGCKHRHMIRGHKCTYNKQIREELLDDAVAEVIIKIVSNPKFASMMQEKINMKVDTSEIEKEIDNYQKELRKSHSTKFKLIEEIDNLDADDKHYKRRKQDLDDRLYRMYDKIEDLESLLIDAKAKKQTIEAEKLTGDNIYKILIYFDKLYKVMNDVERRQLITALISEIQIYEEKQPNGQWLKSITFKLPIIDEDLNIGLDNNEQVECVALLAKA

SEQ ID NO: 18574 - protein, 519 aa, synthetic construct
MKKITKIDSLAQVKSSKLRVAAYARVSTSSEEQLLSLENQKLHYEQRILANSKWEFVEMYFDEGISGTKIDKRDGLKRLLQDCENGKVDFILTKSISRFSRNALDCLEMVRKLNDLNIFIEFEKENINTQTMDGELMLSILSSLAESESRSLSQNTKWGIEKRFQNGTYKIGYPPFGYDWVDGVMVINKEQALVVKDIFADVLKGTSTGDIAEKLNQQGVTTKRRKTWHGTTIRGIIKNEKYIGDALFGKTFTDDSFKRKINRGDKNQYFMEGHHSAIIDKETFDQAQQMLVQNAKSKNIVQDDDKYQNRYSFSGILKCGECGGTFKRRIQTKNKNEKYVAWACTTHLKDKYSCSKKFIKDEQIKLAFITMMNKLVFFHQILLKPLLSDLRATTYTVDNTQIAVLDAELEKLKQQQDNLVQFVANGYIERPTFVKEQNQLTKEMDDLENKRKMLTGSISKGFDNLERLEELVKFTKQAQMLTAFEDSHFDSFVDEVIILSRTELVFKLKCGLKLKERLV

SEQ ID NO: 18575 - protein, 520 aa, synthetic construct
MITKSVTMIPATKRVGTLRIDAEEKPKLRVAAYCRVSTDSDEQASSYEVQVEHYTNFINNNSDWVLAGIYADDGISGTSTNKREEFNRLIQDCMDNKVDRIITKSISRFARNTLDCLKYIRQLKENNIPVFFEKENIDTLDSKGEIMLTIMASLAQQESQSLSQNVKLGLQYRYQQGEITINHNRFLGYTKDEDGHLVIEPTEAEVIKRIFKEYLEGASLIQIARNLEADGILTGAGNKKWAGTTVKGILINEKYMGDALLAKTHTVDFLTKKRVKNNGIVPQYYVENSHEPIIPKTLFLQVQEEITRRANLKNKKGSITYSSKYALSGITYCGKCGEIYRRLHWNNRGKKSIVWRCLGRLTKTKDCDARTILEEDLKQVVVDGINRVFADEGRIKEILNLSIRKLLKAENTVEIEIVDSQLQAMQQQLLNQSSKNQDVTKIGEQIIQLKEQKHNILLGKALNDNSKQRMSELLEFIDKSEQENLEFDEVLVRRLVERVEIFDECITIKFKSGIEVEIQN

SEQ ID NO: 18576 - protein, 541 aa, synthetic construct
MTEISLFKSFAKGSEIASTKRSTNCVIYTRVSTKEQADNNLSLETQGKACLKYAEKCGYSVLANFGGTYESAQTDERKEFASMLSFVKKSKLKIAYIIVYSLERFSRNDNSIWLSGQLRKLGIEIVSVTQPIDTSNPSGQMQQKMLFLFGEFDNQLRKQKCMAGIKEVLLRGEWPTKPPLGFDSVRVNGKRKIVVNSRGKLLRQAFIWKAEEKLSNEAIRQRLIEKGLKVCHQRVPEIFRNPFYCGLVVHRMLDGTVVEGKHEQLISKEIFLKVNGLLDLNTHGYKIVENNENVPLKRFLHCHTCGKLMRGYIVQRKGIHYYKCSTIGCSNNKNADALNKRFEKILGYFNLGVSEKFIGVIKKQALTTFNQLNDGNEKSKDVYKDLSQQLVELNKKIERLEERFIEEEITRELYLKYLEKYQVDKKEIESGLLKTSKRVSNLSECVDLTIDFALNMQSRWLTADYYTKQRLQFLIFPEGIGYDKKNDECRTPRINSLFAYVANLQQVLTKNKSGIPELGLNYAAFAALVAGTRVELVTSGL

SEQ ID NO: 18577 - protein, 507 aa, synthetic construct
MKRAISYIRFSSEKQSRGDSLRRQSKMVNDWLKAHPEYYLDQDLSFRDLGVSGFTGKHLKGGLGDFLTAIEKGLVKAGDTLLIESLDRLSRQDVDQASELLRNILRSGVDVVTLSDGEHYTKESLKDPLALIKSILIMQRAHEESLRKAERIQAAWDAKKEAAKAGIKISRRCPAWLKLNDDRKSFSVIPEKVETVKRCFQLRLEGKSIWEIVRTLNAEGHRSMNQYKPGKFGQTSVQDLLKNRSVIGYFTPKGCEEISGYYPAIIDETTFYKVQQLSHSRYGKRSVSDKPLSVNLFKGVIRCSECGHALIITGFSDTRNGIYRCPLRNENRCNAKGLSRKQTDGTLLALLSRLDRFDSDMTNVIDALKLHREHISNNIEKLVQLSLEIEDLSAITIKLKQLKGELSQVDADIEKETQRLKSIDVGCLSDCDLTTKAGRIEAQLIIKSAVKEVVLNAAKRRCKVTFHNSKSITLPITENPSEDVTEAIQSLSEVTERGLIDVDEVII

SEQ ID NO: 18578 - protein, 565 aa, synthetic construct
MKTLIWYKRVSTDRQIDGHGLKRQQDYFNSYLQNLPDRNSYRLEEISDEGLSAFHGVNVSDKGGLGSVLKRIQSGDISAGSILVCESQSRLTRLHAVDATLLIHTLNQAGITIWSLADNREITTDSDTGLIMAVLDGIRNRAYSQDISDKVSKKKKAIRQAVRVDKTATYGNVCPYWLRATDNGFEPIPEHVQTIQRIFKERFELKSMASIAAGLNADAVPLITSRNWKKKAAPTGWSQSTVKNLLSNERVIGTLPASTRTSGDKVPGYYGDPVVPLEHWLAAQESLSHRGKKAVRNDKNPFAVRLFKSLMVCQHCGHKMDVNGARQALSAKGTPYHGSLICRGARDNSCMCGEGGTRTPALPMKLVEHSLTCNLFRSLKQRDISNGAQEQIARLRLEITEAENDLAATAPLIVNQRNAIARQALQNELDKLADTISQKRAELATLERKQQATTLETLEGLDLMTVDGRLEAQRVIAKSLALISINTVTAFADITLRNGNVIQGFDLRSTDDFTSTMTHATDDSHHEEIAMVIGEHLPAVYTAKKPVPATDEPDYSDWPEPDTDE

SEQ ID NO: 18579 - protein, 548 aa, synthetic construct
MELKNIVNSYNITNILGYLRRSRQDMEREKRTGEDTLTEQKELMNKILTAIEIPYELKMEIGSGESIEGRPVFKECLKYLEEGKYQAIAVKEITRLSRGSYSDAGQIVNLLQSKRLIIITPYKVYDPRNPVDMRQIRFELFMAREEFEMTRERMTGAKYTYAAQGKWISGLAPYGYQLNKKTSKLDPVEDEAKVVELIFDLFLNGLNGKDYSYNAIATHLTNLQIPSPAGKKKWNRFTVKAILENEAYIGTVKYKVREKEKDGKRTIRPENEQIIVPDAHPPIIDKVQFEEANKKIENKIPLLPNRSDYKLNELAGVCICADCGGPLSKYEAKRKRQNKNGTESLYHVKVLRCLNNKCMNVRYNDVEEAILDYFRLFQSLNDKELTNLIEDMVHSHENKNNIKSQKQINEQFEQREKELQNKLNFIFDKYESGIYSDEIFLQRKATLDKEMKELKKAKDELNGLTDIKSGIDISKVRSQMKNLIQIYETSNDKEEKNNLLRIALEKVIVKMTAKRKGPVPAQFEITPILRFGLLTGDTLTDTKESSLS

SEQ ID NO: 18580 - protein, 505 aa, synthetic construct
MRIIGYVRLSRASREESTSIVRQRELIAQTCTLRDDFELIDLVEDVDVSATRSRLDRPGLNKVREMVRRGDADAVMVWRLDRLVRSVVDVGVLLDEGLQIISATENLDTTSAMGRAMIEILQVFASMEAKTIGVRVAASQERLRNNGRWPGGVVPYGYRSVPHPTGAGRALEPEPFEARIVRRMADEVLAGSPVFAVTARLNADGVPTRRPIKNDDGTESRRDWSPTSVQRILRSDAVLGRVRLGGIHKRSGRKTTTTKKAEPLRDELGIPVSVWPPLLSVEEVERLRELTDWKPIPGRSEATRQGRRQRRTRLLSGLLSCPTCGHELVAKSRRSTTGEDIYTCNAKSRGLVCECGVAVECYRIEAEVERQFLGAYGRLRLVEPSTIIREVAGLAAVQEAIRDTTDRLRDPDADVPTLVDRLTDLRRERERLEAVPERPVVVMVDAGMTVEEAWADRDVTLRREIIEASGVSITLAHAAQRGRWDPARVSVEFPIGYLTERDFAS

SEQ ID NO: 18581 - protein, 534 aa, synthetic construct
MKKVAIYARVSTTEQAEKGYSIDAQIETVKKKCELAERIVIREYVDRGISGKSIEKRVQLQQLIRDAKSGEFEEVWVWKTNRLARNNLDLLKVVDILEKSNVSFKSCTEEFDTSTAAGKLLLSVLASLGEFERKTIVENVQMGMKKRARLGKWNGGQVLGYKSVKDNGDSQKSKLQVVEAEAEIVRMIFNLYAGGKGLKSLVNHINKLGYRSKKGNMFAIATIRDILHNPLYIGKIRYNKMQNWSEKRRKGKSEEIILVEGEHEAIIDIDLWDKVQSLYKKKSYKPVRNYSGSYPLTGILKCPQCGGSMVAGKTKRKLKDGSYKIHQYYYCGEWRNKGIAACRSNGVRKNEIEECVFKKIHEVLFTKTILKDVVDRMNEKRRNIIKPKKERLEYIDKKIKELELKKNKIFDLYEEGIFEKEDLSERMKSLSNQIKCNLEERDKLQQSVSEEQIEPIDYKLVKRILTKFNQVLTTVEDEKKKLILNLVIQKIELDEKRMLKKITFAFDDQIKKYIFNGQEDDSIYGTSSFSFSID

SEQ ID NO: 18582 - protein, 517 aa, synthetic construct
MYRPTNLDVFIYLRKSRKDIEEEKKAAEIGASYDTLQRHRDTLLAVARKENHNIIDIFEEVVSGESIAERPQIQKLLREVETGIADAVLVMDIDRLGRGDMLDQGILDRAFRYSGTKIITPTEVYDPESETWELVFGIKSLIAREELKTITKRMQRGRRTSAAEGKSISKKPPYGYLRDENLKLYPDPETSWVVVKIFEMMRDGYGRKAIATELDRLGVKPPDEKREFWAPTTITSIIKNEVYMGHIVWGKVRYIKQNGKYVRKKMPPERWYVKENAHEPLVSKELWEAANRSYKERWRPATADNKCLANPLAGILKCEICGYTMLYQPRPDRPNDYIRCVTQTCRGLQKGAILQLVEERILQSLAEFVDQFEVQENESNIKEYKSVIPLKQKALEKKEKELQELNKQKNNLHDFLERGIYTVEVFLERQQNIVQRIKQTQEEIEQLKQEIDKEQLKEKNINEYIPTVKKVLEAYRSTDDVEKKNRLLKSVLEKATYLRKPEWTKKDQFIIELYPRI

SEQ ID NO: 18583 - protein, 606 aa, synthetic construct
MTTRSTKRVAIYSRYSSDLQNDRSIEQQVDLCESYAARNGWQVVERFEDRAKSGSSVLGRPNFMKMVEAADAGRFDIVLSEDLDRLSRSQRDTAALYEDMTFKGVEIYTCTDGQINEMHVGVKGVMNTMFLNNLANKVRRGQKDVLNEGRNPGGDIYGYKVRRGEPGILDVDPETSKVVKRIFEAYADGVSPRKIADSLNRDGVPSPRGGAWNASTINGNVARGQGILLNERYAGRVVWNKRKNFKNPRTGKQVRRDNPPSDWVHTEAPHLRIVDDELFNVVRARRLDAGTPASRKRPKSARLLSGLLRCGACGSGMSLMGHDRSGPRIQCTRHRESGSCKNGTRYYVEKIEQLVLTRLRAQIENPKQMGKFVEAYLAERRALSASARRDKAKITAQIAGCQRAIDNLIAAVEKGLLGMEEIASRLEPQRAEKARLERELATADEKIVSVDLHPTAVARFRQNLEQIAGAGDRIDPQIAASFRELVESVVVLPRKPGEPYMVETRGRLAALIGTPGGRPEAVQAALSVRGGSARVGKSVLSAKLLVPAEGIEPPTFGLQNRCSTAELSRRRLEEAGRGRHAPGCPPARRNTRLDRKVPEPARFQRA

SEQ ID NO: 18584 - protein, 638 aa, synthetic construct
MKPKLYSYVRFSSAKQREGNSLERQQDTALRIASRYDLELDTTAFHDLGMSAFKGKNAHEGKLSEFIKQIGIKVPVGSWLVVENLDRISRDDAWSALDIFKSILSKGIVIVTGMDEKVYKYADVKNNPTDLIISLLMFTRAHDESLTKKNRVESQARSLIRHNLTRKSGTPAKSIESVGQNVWWVDTKSGYVTPHPMYFSAAQKIIELKQSGETLLGIQRYLNKHYPAPKKRIYKDQTGQALAPKTEQWGKHLIRTFLNPTVHGQKVFTLDKRDESGAIMCDPDTDAPLKETLTIPDYYPALMSEIDYLTLSKLDRHRAVTRSSSKYPEGNPEPEIPLLSGIGILFCGKCGSFMFKSGSSKNKYRYICGSKIVQGKPCGKKGFTSYQLEHTVLQLISDHVWNNHQEDKTAWYESEIEKVSEAVNTLYKLATLTDGLEELADQIKANKQKKVTLEREFQQYKISRSEIQTTGWEQFRHFDVHDTKNPNRKRIRLKVKQAIKRIDCYDIDERHDHFEVTFADETKQRIVIKFNRNRSPGVSYVEAQTVNAHDLLKMQGLVLHSFIDELIEPEKFAQHIKDKQEVSILNPTFITELEDGVGKAEGDGMAIMVDGNKNKSYATVNGIKYEINSLEDLEKLSR

SEQ ID NO: 18585 - protein, 521 aa, synthetic construct
MKKITKIDGVQNNSTIKKELRVAAYCRVSTGSDAQLESLEAQKTHYERYINSRKDWKFAGLYFDEGITGTKAEKRPELLRLIADCEAKKIDFVITKSISRFSRNTTDCLALVRKLQSLNIPIFFEKENINTGSMESELFLAILSSMAEGESASISENSKWSIKRRFQNGTFKLSYTPYGYDWDGENMIINPAQAAVVKRIFTDILSGKSTNAIADELNAEKIPSKKNTNWTSSTIRGILANEKYTGDVIFQKTYTDENFNRHTNYGEVDQYMASDHHEAIISHADFDAANALVSQHALEKGVKKGSDKYQKRYAFSGKIICGECGDTFKRRIHTCTTYKYVAWACNTHLKDKSTCRMKYVRDNDIKAAFVTMLNKLIYGQRLVLVPYLKALENSSGDEALQRIQHLELLLDQNNEQRETLTKLMAQGYIDQILYNQETNALLLQAETYRSDIEAITICMTGDSAKVTETNLLLHFVSHADMLTNYSEELFESYADHIEISDRNEIKFVMKCGLTFTERIGD

SEQ ID NO: 18586 - protein, 522 aa, synthetic construct
MGNVMLIPARRQVGNNARKQEEEKPKLRVAAYCRVSTDSDEQATSYEAQVEHYTEYIQKNPDWEFAGIYADDGISGTNTKKREEFNHMIDDCKAGNIDMIITKSISRFARNTLDCLKYIRQLKDMNIPVLFEKESINTMDAKGEVLITIMASLAQQESQSLSQNVKMGLQYRYQQGKVQINHNRFLGYTKDAEGNLIIDPEQAEIVKRIYREYLEGLSMDKIAAGLEHDGILTGAGGKRWHTSTINKILRNEKYIGDALLQKTYTTDFLNKTRVKNNGLVPQYYVEGNHEAIIPKDIYLQVQEELVRRRVVKTSANGKKRSYSCNHCFSQIVICGECGEMFRRLHWNNRGVKSIVWRCISRLESTGLECHARTINELILQDAVVKAINQMLGDKSSYQAQLQLNIASVIRASQATSVENIDEKLMVLQQELIQKAQSKEAYDEIADEIFRLRELRQQTTIDTAARDEQIKRINDLQDYIAQQTTHLTEFDESLVRRWIKQITIWDDHITVELKSGVNIDVDV

SEQ ID NO: 18587 - protein, 559 aa, synthetic construct
MKTKLYSYIRFSSMRQSDGSSYERQIRMAREIAAKYDLELVNDYQDLGVSAFKGANSKTGALSRFLDAIGRSVPVGSWLFIENLDRLSRADIVSAQELFLSIIRRGITIVTGMDNKIYSLDTVTANPMDLMFSILLFIRGNEESQTKRNRTNSSALIKIKAHQENPQNPAVAIEEVGKNMWWTDTTSGYVLPHPVYFPVVQEIVELRKNGRSTAEILDHLNETYAPPPAVSNKKHSKWSRAMVERLFHTRALIGIKEVSVDGVNYELKDYYPRVIDDATFYHLKKNIGARAWNFGDKEEVKPIPLLSGIGLLKCDHCGCAMVKVKGTNKRSDQYRYTCDATRSRRLDCEHPNWSFRGDQLEKAVLQLLADKIWIAEDKANPVPALKVQIDEISRKIDNLITLSAMTGATKELADQITTLNSERETLYNQIKMAEEEMYSVDSQGWEKLAEFDLEDVYNEDRIKVRFKIKQALKRIGCSRIDKYKNLFVLEYIDGKTQRVVIENSRGPRKGRIFVDLKTINDRQILESNGLVLHPCLDMLTDKNWKPEEEIPGPLQEFGI

SEQ ID NO: 18588 - protein, 506 aa, synthetic construct
MRTVITYLRFSSAIQGAEGADSTRRQNELFKQWLRKNSDAQVVASFSDEGLSGYKGKHLTGQFGDMLARIEAGEFPAGTILLVESIDRIGRLEHLETEALMNRILGNGIEIHTLQDGLIYTKDALADDLGISIIQRVKAYIAHQESKQKSFRVSQKWEQRAKLALAGEQRLTKMVPGWIDPDTFKCNEHAETVRLIFKLLLDGESLHNIARHLQANNISSFSRRKDANGFSVHSVRTILRSVTTRGTLPASQRNDRPAIPNYYEAAIDAATFNKAQEILDKNRKGRTPASDNPLTINIFKGLFRCQCGASVHPTGTKNKYAGVYRCNNHLDGRCDVPPLKRKPFDRWMIDNFLGMIDVGNDGEAEGKIAALQHEVEIVTARIKKATALLLEMDDITELKTQVKGLNQKRTELQTTIDSMRRKTSLSDKGLPQLKDIDLMTKEGRVECQLILSKHLKGLTLGKDSVTVTLQNDTEITIPTNPLPLNDGSPIFEIADKELLDIDAYQL

SEQ ID NO: 18589 - protein, 547 aa, synthetic construct
MKLLVTYIRWSTKEQDSGDSLRRQTNLIDAFYSKHKNDYYLLPAHRYVDKGKSGFHQQHKNQGSDFRRMFENVMSGAIPEGSLIVVENFDRFSRADIDTAIDDVRQILRKGVSILTLGDGELYDKSALTDPVKLIKHIIIAERAHQESLVKQKRIAQVWNHKTQLARELKKPMGKQAPGWLELSEDGSHYIVDEDKASLVNIIYDKRLSGMSMFAICKWLNEQGYPTINQRKVRISKTKKPDGNWSALSVKHILTSRSVLGYLPAKISSEDRKTVLREEIEGFYPQIVTDSKFYAVQQLLEETGKGKTSSGEHWLYVNILKGLIRCKCGLVMTPTGIRKPVYQGTYRCNGNKESRCNYGTVSRKLLDTQLCSRLFSKLSQLHDEATDTAKLDELQRRLNTVDSELEKLTETLIQLPNITQIQEALRVKQEEKDELIVQLSREKARVKSVSSLDLSGLDMESVEGRTEAQIIIKRLVKEIVVSGNEKLVDIYLHNGNMIRGFPLDGKDDHTLTLEEATDEMQPLDDMLIFGEPVTRIYPAGDMEEVDA

SEQ ID NO: 18590 - protein, 362 aa, synthetic construct
MDKIIPYGYLRVSSLEQVNHGGGLDSQDDAVRSYINNHSNIFDINRTVMMSDAGLSAYSGRQLSEGELGRFMADVESRRIPSNSALVVYSIDRLSRQNPWIGTKLISTIIGAGIEIHSVAENQILKSTDPVGAIMSTIYLMRANNESEIKSDRAKTGYQKRLKESIENKKVLTRQMPRWLVEQDEVYAIEPGMKKVIDFVFDSYIAGQSTGYIASELNKKGLLYDKTLWRSSYVAKLIRDERLIGYHIRYSKQIKGVKREILERIPDFYPVAVDVEKYHLANNMLTNVAENIRGRTRVTYGDKTTLKNLFNTVIKCGACGGDTSVVQNTRVRVIDGVKKYIPYKTFLRCRNKYELRTCKQGG

SEQ ID NO: 18591 - protein, 470 aa, synthetic construct
MESGYIEAGSVLLVESLDRVSRQDIDTAGEQLRKILRSGVEVVTLVDNEWYTKESLKDSLSMIKAMLVMERAHEESAMKSTRLRSMWAAKRERAANGEIMSKRCAAWLKVSEDRSHFEFIPENVKAVQRVFQLRLEGLSHIKIAKQMNDEGFYTLNQHKSVKGGWSQSSVTELLSNRSVIGFKVPSKSMAVKGVSEIPNYYPSIITDEQFYAVQQLKQGSGRKPSSGLPLLTNLFKGVLRCSECGFIVVVAGVSAKRSGIYKCSMKSEGRCNSVGFSRLQTDRALVQGLLYNTNRLSLNRDNGSAIGTLQSELEQLQKQRERLIKLAMLADDTESMAKDLKALNSQIKDAEKAVSEVHQREQSSQLETISHLDLTVKKDRVEAQIIIKRIVKEIRLNTAGKKCDVFLHNGLKLLNFPLDRVVDGAQWLEVLPLIDGDEFDFEGFTTKPRHIALEEAPNWVKEMEEQSNQP

SEQ ID NO: 18592 - protein, 669 aa, synthetic construct
MRLSAIAQATEDLRPVVITYTRFSTNIQKEGLSEYRQDELTQRYVLDFCEEHGVPVEDIISLKDRGISAYRGKNMTKGSLSEVIAKFNSGELPKVYNEKGEINTFLFIESLDRLSRADLHTANKLFLDLVEYCNIVVVAENEKKIYSLNSLKTDMGMLDLFSALLTLSRSHNESRMKEMRHRANWSKKRQVVIDYFELPEDEREGVEYPLNPTKTCPWWLRPKADNRGFEFIEEHREAMLYFLNRMMEGHGLTSCIRRLNEKIENGDFKVEFTERQKKAKGFQTHTFYQLLSGDDNESIIGNLIFHQDYYPTEKDVQQGLYEKKSLGKKVRIPVFTAKGFYPALLNEVEYMRLKQQMKQRKQSQTKPTKKVQNIAQGLLKCPLCGYSYVYVADNRKGRHHNLVCGLSRSKKCKSYTFRYKWFEKNLLNYCRNLDMNRILGIKIDNKLKERISELEVNALTYEQEIEVKNKELEQLVENLSKITIPTLLEKAQDQYVKIENSIKVITYEKEQNELELVDLKKRSIKSDIVSEEVYELIDSVQLQENVSLRERLNIELKKVISELYIYHKDNPNNYFGRNMIVVKFRDDYIRFIPLDRELEREELYNILPTISTKKAVDYSKYEILPFDYLEGLEEGRYPEHQFITKFYQENPDVLAEILSELDEADNVYV

SEQ ID NO: 18593 - protein, 575 aa, synthetic construct
MTKIAYSYTRLSTEKQIKGHGFTRQREAIEKVCCQHGWQLSDQTFNDLGVSAWKGANVTTGALSHFIELTKKGAIKPDSVLIVESVDRLSRQQVDKSLRLMLELLDVGISIFTLSDSKLYTTNSDNVMLDLMMWLMTAQRAHEESEMKSLRIRAAKRKNKELIRQGVIVSRKCPEWLSVSDDKSCFIVNEERAEIVRKVFIWYSQGFSTKPIALKLNELGVPYWGKSSTWSYRHIRSLLKHRAVIGDIQPLIRVNGKDVPDGDAVSDYYPAIVDKGLWATCQQIKSSKTTARGRTVEIGMANLFRGLLKCECGSGLAINSSTVKGRTYRFLRCSQLKTTGCQAKNWHYEKTERILLIALRHSLSSFSEEDHAVSLRESQHYLARINEELKEKERQAENAINYLLDKPSRLLEARLQTLEDDIARLKAIQEQAEHRVEAVHYEKSTALDKVEELQRVLEDIANDDDSRHKANGLLRRLIDTVTLGSISNPRSKEFMELSGNDYHGLIVIKRRDGLEVRVEVLKNYELSISWEGDEFTVIECSPTQQPNSQHEHQKFINVGEQTVDLWDDEGWVASS

SEQ ID NO: 18594 - protein, 621 aa, synthetic construct
MFRPSPNPEVYSYRRFSNIEQEKGTSLARQDKYAYEIAEKYGLTVNEDLILTDKGLSAFHAEHKTKGAFGVFLSLVKSNHIKPGSFLIIESLDRMSREQVIQAQTTLNELVMAGITVITARGDKVFNRKTFSADPVGTMLYAIIEMQRSHEESLRKQGFSIDFIHEQVANFRKGEIADVSGSLPFWLSRKPKSHPKEKAGFELNEHQSTALLIVELYLKENMGLNSISRELGTRGIKSPTGRDVWGVSTITSILANPSLCGRKVFEIKYLKEGETVKEKFELDNYYPQLISEEEFETIQAVKKRKHQAMNGDKSVSQKNALVYLLTDYGKKSTCAKCGKSIGSQPQRQKYRIRRRLHCSTQKETKTCCKSIIQDYLEDAFLMSVSRHIDYDLINQGVDSNTKLTIDEKIKEIDQKMDNILDTLTIISDGEKRASEKAKYQVLQDKKEELKKQSSEYETYTISADSIKEFISKVQAARNYRNREARLLVKDVLVKAIKKLSVHMEPKPLSYYGYGNIHGNALVNVIDVEFYSSRNLSIFVTSEKDAGELLFTRIDDDFANDARGSYTEEQLAYWNQHGFEALLEKLAMNDSKSDSSAPDNVWLGYDIASALSQIVFDELVEE

SEQ ID NO: 18595 - protein, 529 aa, synthetic construct
MRKVYSYMRFSRPEQAKGTSIERQSNFAEQYALEHGLELDKSLTMMDKGLSAFHGVHKTKGAFGQFLAAVTAGKVPSGSVLVVESLDRLSREDPLIAQAALTDLILSGITVVTAADNQVYSREEIQQNPFKLIMSLVVMIRANEESETKQRRSNAFLKSALNQYQANGKIRRLGSDPSWLDFNKDNDTYSFNERVEVIRRILNLYNKGIGSLKIARQLTEESILTLSGKRSAWGQTTVANIVKSHALYGMKRINVQSVEYDLEDFYPALITKSKWLALQQHRTKRSKSMHGRGEVVHLITGHGKGFTTCGYCGGGLGAQTQKQYKRSGEYSRTVTRLHCLTHKETSSCCSSVFLEPIESAVLFAACIGVEPQSLVPTVNNVNYSALIDEVENKVKHIVEQVTAGAPWDLFKDAHDKLKLEKQKLIKERDSQKPDVNQSDVQKWVNKLVELADKARANDKEARLKCRTLINSICKSIVIKLRGHDLKSEPVVTITFVTDEQFEFKVGKNGAVQFVDNGMAVNRRLKPLLA

SEQ ID NO: 18596 - protein, 532 aa, synthetic construct
MNCIAYLRVSSHSQLEKGDSIDGQRNYIESWAKNNNHSIERWYIDDGKSAFNGKREQYELMLNELDNDVVQAEAIVVYSLSKFSRNLRSQLSSLEKLNSLGIKLISTTESLPEAEDDSYMMSTMLGLMNEQYSRQNAKVVCHRLKDTARKGYFTGGPIPFGYISVGVNGDTSKHRKILQIFEEEAVVVKDIFQMSDHGDSGLGIGVKNIAKILNQRGDKRRGTVWNRNSVHRILTNPAYCGNFIFGKNSSEPITVLIPQIISKEQFNRVQDGLKERDFTSTENKKFRSNSLLTGILICPQCGSSMVVTSGKSGKYKYYQCSLQVRQSPDKCSSKRIRKDIIEPIVKEKFCNQLLTEERLKTICKLAREVHKLASKELLSEQLKLTKRISQAKEKSYRLISLIAQGTLEPSKQINDQINDYTITLERLEFQLQQVKRKLTLPVKNFGKRRIEEFAIELKQHLTEIDDASLKQLMLATLNSIEGDVSEKKIRFRGSNMAMLYIIANAKTGTDFSVPVFVTKWRRDRDLNTIPSS

SEQ ID NO: 18597 - protein, 499 aa, synthetic construct
MRLFSYIRFSTEKQIEGDSIDRQTNSAKKYASLHGYDFQNKSFSDLGISGFKNVDRDGLTSMLEAIQSGGISRGDLIFIENVDRLTRQGFQHANDLIVKIVNSGVLLHFERESVTFKSPSDLNDMMSLMKVCMSASLAFEESQKKSERIASAKQKQRNLMKQGIAVKHKTPHWIEFDETGKCFHLGNTKIIKRVIELRRDGFSVSKIISTMNKEGFKAPYGGTLRSSTVKQWLQSPALYGAVMVEDELIKDYYPALMSYDEATKLYNKLTNNKAPENQNNHLRGLIYCSKCDSAMGLRFTTSSGKSKKKIPTFYCIKQREGGCDAPSVSNIMPLIEKMVSHMKTIEHKVDVAAITARIDEISANLERISKSVTTDNFKMMMDMMDKFEKEKRELQTSLTVSDDVDTDTLLSHIDNPVEFNNIARRYIDKIKVTFKGGTRRKRTFHFKLIQRNGHIVNLTRFGSGQITIGKTEVLSTFGKPESEFGEALTSLEDSDMFYE

SEQ ID NO: 18598 - protein, 600 aa, synthetic construct
MSYAKEQVNAYIYSRVSKDVQVHGDGIRRQIEGAIRFVEKINQDNIQKGIPTYKIADDFITDKGLSAYKGFNTAANGGLGAFLEAARKGEIKRGSLLVVEAVDRISRMPADESRKTFSLFKQYGIDVAIVKFGIIIKHSESTTLENDLLITAAIHLAYMESQQKSNRINDYFDKKRLREKEGGEKRTSICPLWMKLSEDKKSFELIPDRARVMSRIIDMKLNGIGCHRIASTLNKEGVPYFNGKTWSTTIVTKYCKMIQLYGAFQPVKHVRTDSGTQKKPWGDVLQNYYPAVIDEQTFLRLKNSFKRTGGRQTGAYSNLFSGLLCCPECGSGMSYFKPNRGKQKIRCRKQIDKQGCFQRALDYEEIENRLVKALAGLDYAKINDNSFASLSEELSSLEANITELRENIEAVSAQLMENSNPRLYDILIEKLTKLDDEICIEQDKFNELSTLQSNYDASIINSLQLDSNEDRARYNHFVKQFVKYIICTDKKQGGPLRVVFKADTVGELPFNFDDEKNDKAVSEVFTANRSISDTETVRLINLDKSSGMYLSTLKDITDVKQPNDLSDSRELIRYMHAVRMAVRRNPNKWKGIAAQAKLRY

SEQ ID NO: 18599 - protein, 530 aa, synthetic construct
MRQAYSYVRLSSKKQILGYGQERQWEAIQSAALAHNWELSDKTFSDLGVSGWKGVNIDTGALSQFLRCVEDGYIEQGSVLIVENVDRLSRAGVNRAVTLLMQLLDNGISIYTLTDSKLYEPESPNPLMDLMGWALSAQRAFEESERKSQMILNAKAKAREEARLTGKIITRRCPSWLRVNDDKTAFELLPERVETVQKIFDLYTSGYGTPRIGRLLTEEGRKPLNGRAWYARSLSRIIQYRAVLGEYQPTLNGKPEGEPVKEYYPAIISEDQFNEAQAIMKAGGAGKGRRGEDMRNYFAGLLRCSCGEGMHITSSRVKGKRYYQLRCLQYRISCTNATWNFNKASTYILFGLRRLPILEVMGTDNNKDIKELNNSIRDLTAQLDSSKQQLENTTNAIAELGLSDQLKNKFRELTVLVEDTERQLAEAKSSLDKSHGETAIKKQDTEMLTGRFLELIENTKDVDDRIKLNQVLRRYLSKIVLDADKEKDNRFIEIYRKDGELLVTAKLDHKLNGGTFESSEASEAVELKRA

SEQ ID NO: 18600 - protein, 547 aa, synthetic construct
MRTAYSYVRLSSKKQIQGYGQERQWQAIQAAALAHGWELSEKTFSDLGVSGWKGANIETGALSQFLQCVEDGYIEKGSVLIVENVDRLSRAGVQRAVSLLMQLLASGISIYTFTDSKLYEPDSHNPLMDLMAWALSAQRAFEESERKSQMILNAKAKAREKARLTGEIITRRCPSWLRVNQDKTAFELIPERVETVRKIFDLYVNGYGTPRIGRLLTEEGRKPLTGRAWYPRSISRILQYRAVLGEYQPTLNGKPEGDAIKNYYPAIIDEDRFSEVQAVLKEGGAGKGRRGKEMRNYFAGLLRCSCGEGMHIVSSCVKGKRYYQLRCLQYRISCFGSSWNFYKLSSFVLFALRRLPILEVMGSQDNNNIKELNAKERELTFLLEDTRRQLDNTINAIAALGLNDQLQSKFRELKTSVTNIEKQLSNVKTELETSQGKLVIQKQDSEMLTGRFLELIDSTKDIDGRIKLNQVLRRYLSKIEMHADKKEEYRYIKIYRKDGDELVSIQCDHSLKGALFESKDGLETFELLPATDAKRNEISNTLLCTPK

SEQ ID NO: 18601 - protein, 529 aa, synthetic construct
MRKVYSYMRFSRPEQAKGTSIERQSNFAEQYALEHGLELDKSLTMMDKGLSAFHGVHKTKGAFGQFLAAVTAGKVPSGSVLVVESLDRLSREDPLIAQAALTDLILSGITVVTAADNQVYSREEIQQNPFKLIMSLVVMIRANEESETKQRRSNAFLKSALNQYQANGKVRRLGSDPSWLDFNKDNDTYSFNERVEVIRRILNLYNQGIGSLKIARQLTEESIPTLSGKRSAWGQTTVANIVKSHALYGMKRINVQGVEYDLEDFYPALITKSKWLALQQHRTKRSKSMHGRGEVVHLITGHGKGFTTCGYCGGGLGAQTQKQYKRSGVYSKTVTRLHCLTHKETSSCCSSVFLEPIENAVLFAACIGVEPQSLVPTVNNVNYSALIDEVDNKVKHIVEQVTAGAPWDLFKDAHDRLKSEKQKLIEERDSQKPDVNQSDVQKWVNKLVELADKARANDKEARLKCRTLISSICKSIVIKLRGHDLKLEPVVTITFVTDEQFEFKVGKSGAVQFVDNGMAVNRRLKPLLA

SEQ ID NO: 18602 - protein, 609 aa, synthetic construct
MDLYGSGMKKAYSYIRYSSPQQASGDSYRRQLAATQAYCDAYGYELDTELSIYKELGVSGFTGDQENLKQFINDCETGKVKKGSLLVVENLDRLSRQAINVAMRQFLSLLEYVDIYTLQDEKRYSNNDGRDSENQLLDIMTSLIIMSRAHEESRTKQKRLKESWANQRKNAHKIKMSGVYPHWLVRSEDKKEFYLKEDRVKIIRHIFDLCINGQGATQILRSLNDNVEKYPPPSSKKEFWVRSTVKRLLSDRRLLGEHQFYVGHHSKREPIGEPLSNYFPQVIDEKTFVNAQISLKSRKIGAGKIKSDSFSNIFRGFLRCGHCDSPIEYVNKASKQASTLYLTCSNAKRGGDCNHSKHYRYLPLEHMLIHLSTANGFIPKPEKPSDLQQQLELITVKREQTNSKLSTLLERDFTAPIIMSKIEELTHNLTKYESEIAEIEDKLLALKADYEYEDLYHDMIVESDATKKFSNRVRFNSNLNKKIDNAYLYSIGLLPSIVFTMSDKSVHSLIIDERYNFGGCSIKNEGDTLIRLNGESVEAVDQMIWQMINQSIDLLGSIDNDNEQAVKAGRKISLLISKFAMDSQNHSLLDEFQSVLSEFQDIQYKSEIC

SEQ ID NO: 18603 - protein, 575 aa, synthetic construct
MKVAAYIRVSTLEQVKYGDSLDGQKESAKRWARENGHTIATWYVDEGRSAYKGTHRPSFQQLIEDVSSGELAIDAILVFSLSRFSRRLLQQLNAFEILKNNDVTVLSITEPLPDDPSSNFLMTTVIGMVNEQQSQQNSKNVKERLADTARKNYFTGGRVPFGYTSIDVEGEDKLRRKKLAINPDESVLVKKIFSLALSGINGKAMGIKAIYTWLNENGLTFRGKRWTRNSVNRILRNTVYIGEFVFRTNTSSSGIAEEIIVSVPRIVEDETFRKVGEGLDFRKPTNTQVNKGPLSKSLLTGILRCGKCGSNMSLMSGKTGRYQYYVCNQKKNVSAKACSCPYLSKDHVDKAVLSTITNEVLSIEHIDSCLDRVKEILDDKRSTASQNIMQLNNKRTRLEQSISTLLEQIGTGQLMSSTTVNQFILDKEKELALTKNQLSELESLSNIPVMKFSEEGASQFIRKAANYMLNTEEEVLKQFLMVIVDQIIVEPNQQKLKMTCSNMGVINLIPKTKMGTDFSVPIFVSIWRRDRDLNPRYAINVCRFSRPVLSTTQPSLRCGTYNREWSSRCKALNYN

SEQ ID NO: 18604 - protein, 499 aa, synthetic construct
MRLFSYIRFSTEKQIEGDSIDRQTNSAKKYASLHGYDFQNKSFSDLGISGFKNVDRDGLTSMLEAIQSGGISRGDLIFIENVDRLTRQGFQHANDLIVKIVNSGVLLHFERESVTFKSPSDLNDMMSLMKVCMSASLAFEESQKKSERIASAKQKQRNLMKQGIAVKHKAPHWIEFDETGKCFHFGNTKIIKRVIELRRDGFSVSKIISTMNKEGFKAPYGGTLRSSTVKQWLQSPALYGAVMVEDELIKDYYPALMSYDEATKLYNKLTNNRAPENQHNHLRGLIYCSKCDSAMGLRFTTSSGKSKKKIPTFYCIKQREGGCDAPSVSNIMPLIEKMVSHMKTIENKIDVAAITARIDEISANLERISKSVTTDNFKMMMDMIDKFEKEKRELQSNLTVNDDVDTASLLSHIDNPVEFNNIARRYIDKIKVTFKGGTRRKRTFHFKLIQRNGHIVNLTRFGSGQITIGKTEILSTFGKPESEFGEEITSPEDSEMFYE

SEQ ID NO: 18605 - protein, 575 aa, synthetic construct
MTKMAYSYTRLSTEKQINGHGFTRQREAIEKVCCQYGWQLSDQTFNDLGVSAWKGANATTGALSQFIDLAKKGAIRPNSVLIVESVDRLSRQQVDKSLRLMLELLEVGVSIFTLSDSKLYTTNSDSVMLDLMMWLMTAQRAHEESEIKSLRVRAAKKKNKELIRKGIIVTRKCPEWLTVSDDKSCFLVNNERAEIVRKIFTWYSQGFSTKPIALKLNELGIPYWGKSSTWSYRHIRSLLKHRGVIGEIQLLKRIDGRDVSDGDPVEDYYPAIIDRGLWATCQQIKSSKTTAKGRIVERGMANLFRGLLKCECGSGLAINSSTVKGRTYRFLRCSQLKTTGCQAKNWHYEKTERILLIALRHSLSSFCEEDHAVSLRESQHYLARINEELQEKERQAENAINYLLDKPSRLLEARLQTLEDDIARLKAIQEQAEHRLEAVHYEKSTALDKVEELQRVLEDIANDDDSRHKANGLLRRLIDTVTLGSISNPRSKEFMELSGNEYHGLIVIKRRDGLEVRVEVLKNYELSISWEGDEFTVIECPPTQQSKSQHAPQKFINVGGQTVDLWNDEGWVAST

SEQ ID NO: 18606 - protein, 619 aa, synthetic construct
MTSAYADFIDELQQDVTIPIQPPMDDLAPGTRAVIYLRVSSTGQVRTDYNPEGISIPAQREACLRKARELGVTVIDEYVEPGRSGTEMTKREAFQQMLARVRSQGDVDVIIIYQLSRMARNRYDDAIVMADLRKRGVTLVSATEAIDDTPVGQLMHGILATFNEYQSRQSGADIAYKMGQKARNGGTLGRAKIGYLNHIDHSDGRVIRTIIVDPERAPFVQLGFELFATGDYTQEELADELYDRGLRTRATRRHPAKKISENKISQMLRDRYYLGYVEYDGEEIQGRHEPLIDEDLFDTVQEILESRMTAQERRRVHHHYLKGSLFCGRCQRDGIKRRMIIQRTINSKGAEYLYFFCRGRQKGLCQAPHVNVTLVEDAVERHYSAIRFSQPFIADMRDQIDAVLGEQEKSARLLRKQITAQLKELDTKEENLIDLAADSTLPRTKVKEKLRDIARERRRLEERLDTANADLTDSAQLVNAGLALLEQPDQLYRRCNDQQRRLLNQAIFHALYIEDDKITDGELREPFGELHAIQDQRAGATGAEGASKRTTRDAGGPCTPSGVAVLLRGLHSGTCSSKTSKVELRGIEPLTFSMRTRRATNCATAPQEREPLLFSAWKA

SEQ ID NO: 18607 - protein, 481 aa, synthetic construct
MKTMNKVAIYVRVSTTNQVEEGYSIDEQKDKLSSYCDIKDWNVYKVYTDGGFSGSNTDRPALESLIKDAKKRKFDTVLVYKLDRLSRSQKDTLHLIEDVFIKNGIEFLSLQENFDTSTPFGKAMIGLLSVFAQLEREQIKERMQLGKIGRAKAGKSMMWAKTSYGYDYHRETGTITINPAQALAIKFIFESYLRGRSITKLRDDLNEKYPKHVPWSYRAVRTILDNPVYCGFNQYKGEIYPGNHEPIISKEEYDKTQSELKIRQRTAAENVNPRPFQAKYILSGIAQCGYCGAPLKIMLGVKRKDGSRLKKYECHQRHPRTLRGVTTYNDNKKCDSEFYYKDKLEASVLKEISKLQDDDDYLDKIFSGDNAETIDRESYKKQIEELSKKLSRLNDLYIDDRITLEELQSKSAEFISMRATLETELENDPALRKNKRKADMRKLLNAEKVFSMDYEGQKVLVRGLINKVKVTAEDIVINWKI

SEQ ID NO: 18608 - protein, 541 aa, synthetic construct
MKQLKKKRIGLYARVSTEMQTDGYSIHGQLNQLTEYCQFQGYEVVDEYTDRGISGKTTQRPELQRMLKDAKEGKLDGIMVYNTTRLARNTSDLLNIVEELYEINVEFFSLTEKIEIASSTGKLMLQILASFAEFERNVIVENVFNGQRQRAIEGYYQGNLPLGYDKVPDSKKELMINQHEANIVKYIFESYAKGHGYRKIANALNHKGYVTKKGKPFSISSITYIISNPFYIGKIQFAKYRHWSDKRRKGLNEEPIIADGKHAPIIDRNLWDKVQFKRQESRKKPQVHGKGTNLLTGIVKCPKCGAAMAASNTTNTLKDGTKKRIRYYSCSNFRNKGSKVCSANSVRADILEKYVMNQILEIIKSKKVMKQLVEKVNERSQIDVSSLNHDIAYKQSQCEEIKAKMHTLTKTIEDSPDLDSVLKPTILSYQDELNQINNQIHQLEQDKQVEAPHYDADMIANILQTIFKDIDKLEKSQLKSLYLTVIDRIDIRRDEQHKKQFYVTLKLNNDIIKQLFNNHPLDEVLLSTSSLFLSQTLYLTI

SEQ ID NO: 18609 - protein, 481 aa, synthetic construct
MKTMNKVAIYVRVSTTNQVEEGYSIDEQKDKLSSYCDIKDWNVYKVYTDGGFSGSNTDRPALESLIKDAKKRKFDTVLVYKLDRLSRSQKDTLHLIEDVFIKNGIEFLSLQENFDTSTPFGKAMIGLLSVFAQLEREQIKERMQLGKLGRAKSGKSMMWAKTSYGYDYHKETGTVTINPAQALTIKFIFESYLRGRSITKLRDDLNEKYPKHVPWSYRAVRTILDNPVYCGFNQYKGEIYPGNHEPIISKEEYDKTQSELKIRQRTAAENVNPRPFQAKYILSGIAQCGYCGAPLKIMLGVKRKDGSRLKKYECHQRHPRTLRGVTTYNDNKKCDSGFYYKDKLEAYVLKEISKLQDDADYLDKIFSGDNAETIDRESYKKQIEELSKKLSRLNDLYIDDRITLEELQSKSAEFISMRGTLETELENDPALRKNKRKADMRKLLNAEKVFSMDYENQKVLVRRLINKVKVIAEDIVINWKI

SEQ ID NO: 18610 - protein, 542 aa, synthetic construct
MQQLKTKRVGIYVRVSTEMQSTEGYSIDGQINQIKEYCDFHHFEVKDIYADRGISGKSMNRPELQRMLKDAKEGNIDCVMIYKTNRLARNTSDLLKIVEDLHKQNVEFFSLSERMEVNTSSGKLMLQILASFSEFERNNIVENVFMGQTRRAQEGYYQGNLPLGYDKIPDSKHELMINQHEANIVKYIFESYAKGHGYRKIANALNHKGYVTKKGKPFSISSITYILANPFYIGKIQFAKYKDWSEKRRKGLNDKPVIAEGKHSPIINQDLWDKVQMRKKQVSQKPQVHGKGTNLLTGIIHCPQCGAPMAASNTTNTLKDGTKKRIRYYSCSNFRNKGSKVCSANSVRADVIEDYVMKQILEIVKSDKVIQRVVTHVNQENQVDGAALHHDIAYKQQQYDEVQIKINNLIKTIEDNPDLTSVIRPSIQKYEKQLNDITNQINQLKNQQNEDKTLFDAKEISKLLQHIFHDIKHIEKSRLKALYLSVIDRIDIKKDGNHKKQFYVTLKLNNEIIKQLFNNKQLDEVHLSTSSLFLPQTLYLTI

SEQ ID NO: 18611 - protein, 481 aa, synthetic construct
MITTNKVAIYVRVSTTNQVEEGYSIDKQKDKLSSYCDIKDWNVYKVYTDGGFSGSNTDRPALESLIKDAKKRKFDTVLVYKLDRLSRSQKDTLHLIEDVFIKNGIEFLSLQENFDTSTPFGKAMIGLLSVFAQLEREQIKERMQLGKLGRAKSGKSMMWAKTSYGYDYHKETGTVTINPAQALTIKFIFESYLRGRSITKLRDDLNEKYPKHVPWSYRAVRTILDNPVYCGFNQYKGEIYPGNHEPIISKEEYDKTQSELKIRQRTAAENVNPRPFQAKYILSGIAQCGYCGAPLKIMLGVKRKDGSRLKKYECHQRHPRTLRGVTTYNDNKKCDSGFYYKDKLEASVLKEISKLQDDADYLDKIFSGDNAETIDRESYKKQIEELSKKLSRLNDLYIDDRITLEELQSKSAEFISMRGTLETELENDPALRKNKRKADMRKLLNAEKVFSMDYESQKVLVRRLINKVKVTAEDIVINWKI

SEQ ID NO: 18612 - protein, 460 aa, synthetic construct
MKCAIYRRVSTDEQAEKGFSLENQLLRLQAFAESQGWEVVHDYMDDGYSGKNMNRPQIKRMLHDLKLNKFDIVLVYRLDRFTRSVKDLNDLLEVFKEHDVDFKSATESIDTATATGRMILNMMVSTAQWERETISERVKDVVRKKKDLGLISTGYPPYGYAMNDGVISQVPHEVEIVKFIFEKAKVYGFQKISKLLNEQGLVTRNGTKWLISTASRIAHNPFYSGEMRYKRDGETSTVPINVEGYEPVITKEEHRDVLKAIKKRNRNQTRSKSNEVYPFSGIVLCPECGHPMKGTRVSSRGYYYKYYRCDRAQDHFCDGKLIRSEKVDKAFVEYLRVTFKVDRIEIKEETNTKDIEREIKRCKSKIERLKDLYVDGDISKKKYKNDVDELNEKIYDLEQKLLSAENKISHDHIRENLKRISELWEHIDDQTKTESIRGVMDTMTIEIQSKDVVITSHTLL

SEQ ID NO: 18613 - protein, 452 aa, synthetic construct
MKAAIYIRVSTQEQIENYSIQAQTEKLTALCRSKDWDVYDIFIDGGYSGSNMNRPALNEMLSKLHEIDAVVVYRLDRLSRSQRDTITLIEEYFLKNNVEFVSLSETLDTSSPFGRAMIGILSVFAQLERETIRDRMVMGKIKRVESGLPLTTAKGRTYGYDVVDTKLYINEEEAQHLQLIYDIFEEEKSITFLQKRVKELGFKVKSYSSYNKWLMNDLYIGYVSYSDKVHVKGIHEPIISEDQFYRVQEIFSRMGKNPNMNKESSSLLNNLIVCEKCGLGYVHRAKDTVSRGKKYHYRYYSCKTYKHTHELEKCGNKIWRADKLEEIIISRVKNYSFATRNLDKEDELDSITEKLKTEHSKKKRLFDLYINGSYEVAELDKMMADIDAQINYYDSQIEANKELKRNKKVQESLAELATVDFDSLEFREKQIYLKSIINKIYIDGEQVTIEWI

SEQ ID NO: 18614 - protein, 559 aa, synthetic construct
MSKEKIKVYLYTRVSTSIQIDGYSLEAQKTRMKAFALYNDYEIVGEYEDAGKSGKSIEGRVQFTRMMEDIKSGKDGVSFVLVFKLSRFARNAADVLSTLQTMQDFGVNLICVEDGIDSSKDAGKLMISVLSAVAEIERENIRVQTMEGRIQKAREGKWNGGFAPYGYQLVDGKLFINEEEAVAIRTIFEQYVNTTIGANGLSKYLENHGIRKIPRQNGKNPLFDAGLIRKILKNPVYKGKIAFGRRTLEKVHGTRNEYKQVEQDEYLIAEGIHEAIISDELWQAAQVKLKSQAKKYEHVNKGKDVRTHLLSGIVKCPICGVGMFGNKCIKKKKDGTKYKDFYYYGCKHRQMIRGHKCTFSKQIREELLDDAVAELIIKIVSNPKFASIMQEKINMKVDTSEIEKEIDNYQKELRKSHSIKFKLIEEIDNLNVDDKHYKRRKQDLDDRLYRMYDKIEELESLLIDAKAKKQAIEAEKLTGDNIYKVLIYFDKLYNVMNDVERRQLITALISEIQIYEEKQPNGQWLKSITFKLPIIDEDLNISLDNDKQVECVSLLEKRS

SEQ ID NO: 18615 - protein, 515 aa, synthetic construct
MKTAIYLRKSRADLEAEARGEGETLAKHRSTLLKIAKEMNLNLLAVREEIVSGESLVKRPEMLALLEEIEDNKYDVVLCMDMDRLGRGGMKEQGIILETFKRSNTKIMTPRKTYDLNDEWDEEYSEFEAFMARKELKIITRRMQRGRIASVEAGNYLGTHAPYGYDIHRLNKRERTLTINSEEASVVRMIFDWYANEDMGANAIRSKLNDLGYKSKLGNEWNPYSILDILKNNVYIGKVTWQKRKEVKRPDAVKRSCARQDKSDWIIADGKHEPIIPESLFEQVQEKLNSRYHVPYNTNGIKNPLAGIIKCSKCGYSMVQRYPKNRKETMDCKHRGCENKSSYTELIEKRLLEALKEWYINYKADFEKHKQDDKLKETQVIQMNEAALRKLEKELVDVQKQKNNLHDLLERGVYTVDMFLERSNVVADRITEITSTMENIKKEIKTEIKKEKVKKDTIPQVEHVLDLYFKTDDPKKKNSLLKSVLEKAVYKKEKWQRLDDFELVLYPKLPQDGDI

SEQ ID NO: 18616 - protein, 515 aa, synthetic construct
MYRPQELDVFIYLRKSRKDLEEEKKAMEHGQHYDTLERHRTQLLELAHKEHHNIIDILEEVVSGEYISERPMMQKLLREVESGIANAVLVMDLDRLGRGDMVDQGTIYRVFRYSETFIITPTEIIDPNDENQELTFSIKSLIAREELKTIVKRMQRGRRASAKEGKSISRVPAYGYLRDNNLKLYPDPEKSWVIPKIFELMANGMGRQAIAQELDRLGISPPEGEYWNPSTISSITKNEVYLGHIIWGKIRYTKQNGKYIRKKVPKERWQRHDHAHTPLVSEELFQKANIAHSKRWRPPTIKTKKLSNPLAGILLCKLCGHSMLYQPRKDRPNPQVRCVQPSCKGIQKGASLVLVEQRILDGLKQIMENFEIQENMIQKKKPQNSIQLQQRALEKKIHQVNDLQKQKNTLHDLLEKGVYDIDTFLERQKSIVIRLKAIQTEIKQLEHEMQHVLDKEKYIHEFVPKIRNALEAYYATEDIEKKNRLLKSVLEKATYLRKKSWQRTDEFVVELYTRI

SEQ ID NO: 18617 - protein, 522 aa, synthetic construct
MKLSHILQPNMKAAFYGRHSTDKQDMDMQLNSVMEVIRKYDCIHTHSFLDKAVSARKKKITSRKELENMFEAAKRKEFDFVIVYKSDRLARDPLEHQTIRIVMKTLDIPIIISSTESVYNTDTDLIVQLMEDGFTKYEVDTIITRTRSGLENKAKQGKWLGGKPPFGYTYDKNSEQFIEHTEELCYVKEIFNLYVNGHGFQHIANTLPNGSRRGKDWGKENVKAIVLNPFYCGLLSWRRRTDGKQNARDIWIEAPNHYVKPIISRITWEACWRIYSEKRNGNMVPKHYKTSFLLQGLLSCEKCQKLMKTKNQQTVSSTNKQYGGKIYFCTNCKLRIDADLLHDKVVNQTLTDVKISGFHNVYHAIEQKIQYEIQELNNNIQKHQRLFENYTIKLHNITEELKQRMKNNDDKRFLKSLAIYRLDVQRKLDGVTQQINDFKQQITLKEKVEKSKETWLHTLNEVFQDDVKLQEISDMDKRRFLLPLIQSVSIKENKKRNEYDISLQLRTDFSKRDVKNQISLIL

SEQ ID NO: 18618 - protein, 452 aa, synthetic construct
MKAAIYIRVSTQEQIENYSIQAQTEKLTALCRSKDWDVYDIFIDGGYSGSNMNRPALNEMLSKLHEIDAVVVYRLDRLSRSQRDTITLIEEYFLKNNVEFVSLSETLDTSSPFGRAMIGILSVFAQLERETIRDRMVMGKIKRIEAGLPLTTAKGRTFGYDVIDTKLYINEEEAKQLRLIYDIFEEEQSITFLQKRLKKLGFKVRTYNRYNNWLTNDLYCGYVSYKDKVHVKGIHEPIISEEQFYRVQEIFARMGKNPNMNRDSASLLNNLVVCGKCGLGFVHRRKDTVSRGKKYHYRYYSCKTYKHTHELEKCGNKIWRADKLEELIIGRVNNYSFASRNVDKEDELDSLNEKLKIEHAKKKRLFDLYINGSYEVSELDAMMADIDAQINYYEAQIEANEELKKNKKIQENLADLATVDFDSLEFREKQLYLKSLINKIYIDDEQVTIEWL

SEQ ID NO: 18619 - protein, 544 aa, synthetic construct
MANFQSGAERAVAYSYVRFSTAKQQLGDSLRRQVAMAEEFCAKNGLELHPVSFRDLGVSAFKRRNLERGALAAFLDAVKTGKVAKGSYLVIEQFDRLSRAETDIALKLLLDLVHSGIKLVTLVDEKIWDKEAVKDIGNLILAIVFMSRANNESAAKADRLSRVWGEKKKAAAASGKIMSRECPRWLEVNEDKSAFVVLEDRAESVRKVFAMRIAGHGVVSIVNRANKEEWPVPGKGETWHISLVGRLLRNRALLGEYQPHKSGSDDRGRVPIGEPVAGYYPAILDEQTFLRVQATRERKAQFPGRRDVNYRNWLQGLLKCTCGQSFVRKNKTSAKQPGYARYYCAARSRGASDCASVGAKEVETAVIYAVSQIAPQFWNGSDRLAELISLVDVQQVNLTAAQQRRDRFLEAIGMADAVIPSLMQRLTAAEAEVVAAETALAATRAEISEMKVDGGDVFENIVKAIANVESLDARAELREDLSRVLLKCVIDAEAGVVHAHVRGESTPILVPLTLNAKIPGAVMGEMTVEQFVAAYGRSPEHFES

SEQ ID NO: 18620 - protein, 543 aa, synthetic construct
MIRAAIYARFSTDRQSESSAEDQARLCRERADREGWEIAGVYSDLAISGTSNTRPGLNALLEAADRRELDIMLTEAIDRISRNQADIASIYQRLEFAGVRIITLSEGEINELHIGLKGTMNALFLKDLGDKIRRGQRGRVATGHIPGGLSYGYRVVTGLDERGELRRGEREVDEAQAVIVRRIYREFLAGISPRAIAHKLNAEGVPTASGGEWRPTTIVGSRSRQNGILHNPAYAGRYIFNRVRMVRDPISRKRISRINPPSEWVTQDLPHLRIVDEATWEAVQRWRDAREGVSFRQQPRAKHLLSGLVVCGNCGGNVTILSRDRWGCVRHKDAGTCDNGRRISTERLESRIIGGLRRHLLSPEALSLAVREYHDRRTKRRAERLGSRAEAERRVNEAKVAIARLVDAIADGAADFSEVREALAARRADRERAEQLVAEFEAEPVIALHPHIVDAYRKRVDQLGQALASGAEGRATAMPLLRSLLEKVTITPNDADEDGLAIEGAGSLNDVLGLAMGKPAQTARPRTIQVVAEEGLEPPTRGL

SEQ ID NO: 18621 - protein, 421 aa, synthetic construct
MMHEKIRPHHLERKAILYVRQSSAHQVLHNRESSTLQYAMRDRLTALGWSRVETVDDDLGRSAAGGVARVGFDRMVAEVCLGKVGAVAAREVSRFARNSRDWQQLIEMCRVVDTVLVDQETVYAPRQGNDRLLLGLKGSLNEYELDLLRQRSLSARYEKARRGELVVAAPVGFVKVGDRLEKDPDRRVQEAIILVFDKVAALGSARQALMWFLEHGLDLPTRRNNGDVIWRRPSYATIHRMIENPIYGGAYAYGRTRAAPGFGSTAPRPGVRRQAREEWLALIPGSHEGYVSWERAEAIRTMVSDNVPTGRHHGAPKHGDALLAGLVRCRRCGRKLTVRYTGIKHNIPRYSCWRGLLDNGEPRCIAFGGLRVDDAISQPQQPGDRAWQSLDARTGHGARTGRITRFRSSGRRRRATNRGST

SEQ ID NO: 18622 - protein, 558 aa, synthetic construct
MTKLYSYIRFSSMRQSDGSSYERQIRMAKEIADRYNLELVNDYQDLGVSAFKGANSKTGALSRFLDEIGRSIPVGSWLFIENLDRLSRQDIISAQELFLSIIRRGITIVTGMDNKIYSIETVTANPMDLMFSILLFIRGNEESQTKRNRTNSSALLKIKAHQQNPQNPAVAIEEIGKNMWWTDTTSGRVLPHPVYFPVLQKIVQLRQEGHSAGVILDYLNEHHEPPAPTSNKKHGKWSRAMVSRLFTTKALIGVKTVNVDGVEYELRDYYPRVLSDSEFYFLRKNIIKKAWDYSHDKEKVIPLLSGIGVLRCVHCGATMVKQTAANGKREQYRYCCDGRKSGRTDCPYPNWGFRAVTLEGAVLQLLADKIWIAEDKTNPIPEIQIKIDEISRKIDNLINLSAMTGATKELANQITDLNSQREALHEEIRLFEREMYSVDSQGWDKLAQFDLSDVQNEERLKVRLKIKGALHEIECSRIDSKKNLFVLVYLDGLRQRLVIENNRGLKKGQIFVDLKTINDRQILESAGMVLHPCIEMIIDADWKAPEEIPGLLSEEFGI

SEQ ID NO: 18623 - protein, 537 aa, synthetic construct
MIEISPFDTFAKGTITSSKVRGTNCVIYTRVSSREQADNLSLGTQLKGCNQYAERLKYKVLAQFGGTYESAENDERKEFIAMLAFVKKAKEKVSYILVYSLERFSRNDNSIWLSGELRKLGIEIVSVTQPIDTSSASGQMQQKMLFLFGEFDNQLRKQKCTAGIKEMLMRGDWPTAAPLGFDIVRSNGVRKIIVNQKGKLLRHAFEWKSQYNLSNEAIREKLGEKGLKLNHQRISEIFRNPFYCGLMAHNMLEGRVVDGNQEKLVSKATFLKVNGILDQNAHGYSLKEENDAIPLKRFTKCAECGKPLTGYLMRKKNIHYYKCKTRGCNTNKNAKSLNETFHNLLNSFTLNLDQDFLHLIRQQAVTTFNQLFKGDEEAYVSLANQYNELKKKIDRLEERYVEEEINSDLYNKYSEKYLSEKGELEDKIMKASKKSSNLGNCIDISLEIASEIGKKWVLSDYVGKQKIQTLVFPDGITFSKKKEEVRTPRINFVFLYLAYLQQLIGNKKSGIPELNLDFAAFACLVAGSRIELPTLGL

SEQ ID NO: 18624 - protein, 560 aa, synthetic construct
MKHEQKMEGTQLKAVIYCRVSSTKQKLDGGGLESQEQRCRAYAETQGYEVEAVFPDDASGGGDFMKRPGMVALLSYLDAQPDKNYVVIFDDLKRFARETEMHIKLRQAFKARGALVECLNFKFEDTPEGKFIETIIAAQGELEREQNRRQVMQKMKARVENGFWVFRAPIGYKYVSAKGGGGKVLVPDEPLASTVREALEGFANGRFASQAEVQRFFERCPHFPKDFPDGRLRPMTVSRLLKKVVYAGYVEAPKWGVSVRKGEHEGLISFETFERVQEALAGRARPAARKDFNEDFPLRGFVHCDDCGKPMTACWSKGCRKHYAYYLCDTRGCPSKRKSIPRAKVEDGFADILKAMQPTKQLFTLARVMFEDAWNARLQSVTASQGEIKRQLKAVEKQIESLLDRIVEANSQAVISAYETRLAKLEREKFVLTEKEASGLPPKGRLEEFIELSLRFLASPWNIYKNGDHATRQTVLRLAFVEPLQYSRNQGYRTPEISFPFKVLEGISGAKKQMVLLERIELSTSPLPRECSTSELQQPAVFQIANSGVAPIQAGSGKAL

SEQ ID NO: 18625 - protein, 467 aa, synthetic construct
MTVALYCRVSTDEQATHGFSLEAQKDRLIAYCQSQGWQDYEVYSDDGYSGTNLERPALRRLIRHIESGLIQSVVVYRLDRLSRRQRHVLYLLEEVFERHGVAFKSATEPFDTSTPLGKAMIGILAVFAQLERETIIERTKEGHHKRARQGLWGGGPQPFGYRWNKEAGRLEVVPSEARIVREMFRRFLQGASLVEIADWAESQYPNRWWDHNVAKAMLQRPIYAGHVHYGTAKAKGNHEPIIDEVTFQSAQREMKRRDGLLPARGEYLLSGLLRCGECGEPVVHHHVHRTRGIPKVHDYYVCARKHKGSGYRKLGGPCPSRHIPMDPLDDQVTQLVRSIATSPEDLISQADEPEAEYEIAALEAELASVERKLRRWYDAFEEEAIDARELRRRVADLERERGRIELALDEARERMRRPDPEPILDAFHAIRDAWDDMELSEKKTVLRATIRQILVFRDGSFRIEWNL

SEQ ID NO: 18626 - protein, 620 aa, synthetic construct
MSTRTTSADMLLGYTKRAPAGDGVDLAVTLLRVSTKKQLYTAIDIDADGNSIATQRDVTALKADALGASVAREFIEPGHSAKTVDQRPVFKELLRYLHEHPAVRYVIVYMRSRAFRNHFDAALVQSQLAKLDVRLISAKEDFGEGAAAVAMEGMVDIMNGFQNTLQGLDVQAKMGRKARAGGTVSLAKIGYLNIRAEFDGKLVNTVGLDPDRAPLLRKAWELYATGEYTIARLEATMADLGLTSRPTRTIAAGKPVSSSTLQKMLRDPYYAGFVHYKGELYPGRHEALVSQALFDQVQDVLDARSRDGQRDRVHMHYLKNTLFCERCRRNGENSRLIYTKVKGHNGSYYEYFLCRGRQEGYCDLPHQPVHLVEEAIVDYYATLGLPETFITEVRERLESTVTDNQASARELHASLTRKLATIDTKESRLIDLAADDLMPRDKIRQKLNELKQERARIEAGLTSTNEQLSIGAQVLRDALHLVEDPQRLYGDAPNHVRRHLNSAFYERFYLDDLVVADADKTPLFDDLHEAADAHHSARIRRTRPTGASSAKTQGKGPQMARNPRNAGVPSGATGLDHPNLVTVLTVPSSSTTSLVGVAGFEPTTSSSRTKRATKLRHTPL

SEQ ID NO: 18627 - protein, 521 aa, synthetic construct
MKKITKIEGNLANSFLKPKTRVVAYCRVSTDSNEQLVSLQAQKAHYESYIKANPEWEYAGLYYDEGISGTKKENRSGLLKMLSDCETGKIDLIITKSISRFARNTTDCLEMVRKLIDLGVHIYFEKENINTGSMESELMLSILSGLAESESISISENTKWAIQRRFQNGTFKISYPPYGYQNMDGQMIVIPKQAEIVKYIFAEVLSGKGTQKIADDLNQKGIPSKRGGRWTATTIRGILTNEKYTGDVILQKTYTDRHFNRHTNYGEKNMYLVENHHEAIISHEDFEAVDAVLTQRAKEKGIEKRNNKYQNRYSFSSKIICSECGSTFKRRIHSSGTRKYIAWCCSKHISQITECSMQFIRDDDIKTAFVTMMNKLIFGQKFILRPLLDGLRNQNSAASFLRIEELETKIENNMEQSQMLTGLLAKGYLEPALFNKEKISLEAERERLLAEKDQLTRSINGNFAKVDEVDRLLKFTTKSKMLKTYEDELFENYAEKIIVYSREIVGFELKCGITLKERLVN

SEQ ID NO: 18628 - protein, 521 aa, synthetic construct
MPATSRIPHQHTPPHHQVDSPPVSDLYARKSTKDAGRSVARQERAWRADCATEGLTPGRVFVDPELSASRYAKKARPDFAALLDHIRQDGCQVISLWEPSRGSRQMGEWVNFIDLCRLKGILIRIFGDDDPQTYDPRRQRDRDHLFKEGMAAEGESERLSTRSRAGIADAAVNGRPHGKIPDGYKRIYTTPDEDADGSLLNARKLHVEQVIDEDRAAIYRAAAEGILNGVPVNYIARVLTAWQVPTPRGATRWSGGALYNSLLRPSLEGHRELNGIIITRDAWPPILDADTVARLRQLREAPRTSRSHNDTRLKYMLSGLVQCGLCRRPLSGLYDRKTAGTRYECMITRGGCCRVSTEMEPVDSLVSAMVTDRLREPDALAVFEPSADANLQAQQAQAELDALMDRKKELYSSAARPGGPSMALVAAAEQELLPRIEEASRRLKAVKTPPALRGYDPIDLADNWLSYSPGERRTVVSLLAEVVVAPVGRGGRWSPWRLADSRWRGQHRTWGDLWREQGLVR

SEQ ID NO: 18629 - protein, 570 aa, synthetic construct
MVQAYSYIRWSSKKQSTGDSLERQLDYARKIASEHHLELVEIVDKGVSAFKGKNASDGELGRFIDAVEASRIPSDCWLIVENLDRISRSDVLQANELFTKLLRLGVTIVTGMDSKVYSYDSVIANPMDLMYSIMLFMRANEESKTKSSRTIKNALGMIRKHQEGVRSNDGYPFAIEVVGSHPFFVDTSEGVVKPHPVYFDAARLILTKRADGWGTNRIKKHLDASIPPPLNRRNKTLKTWSHDTIRRLPHTEQILGIRRVTLEGIEYELKDYYPRLVSDDEYQKLQYVLSKRKVNSTSRNHVGLFTGIKVGKCHHCGGTLCVYRASRRDRAVTETLRYACTNKQKGEPCKQRTFAHTQIEDALIRVGMMKLWKPTDNESFDTTELDVKRNHLEDLNQQSSNLATNFALLNPVPQSMVDKMREIQGSIEIVEGEITQLELLQAEHEHKPSSTGIEKVFRELSPSIMDIKNDADRIKVRELIRDAVDTIMLESLDGSQRAGFKMTLNWSDGSIDTVIRKGKAILLDKGHGLSEDDLYQAVDVMSEWDFEMMEERPLNEFKVVSGENSVTHRY

SEQ ID NO: 18630 - protein, 586 aa, synthetic construct
MKTNLNTCELIKVCAYARVSTDSKEQQNSFENQQSYFSREINKSGYKLTKIYADEGLTGTKLYNKPQFNKMLYDAGLDVIETKSNGKKHIYSQVSERKPLFNEIWIKNTSRFARNTLSSEIIDQLRQKNVYINFIEQNINTKDLSQDFLLKLMQVFDEQDSKDKSSKVHWGHQEGARKGIIMTNSNIYGYTYIQAENRLEIVTHEAEVIQKIFKLYSEGLGIRRIINYLKENDIKTRKHKDFQKSTISKILDNEKYAGYSVRQKYDTGMVIIGKHYPKKRDKSEWIMEKNVKIPAIITSQLFDQCQSIRENKISVKNQKGIYKGTSEYAELIKCHNCGSNFTRNMDKENIFYNCGNKKKNGTIACNSINVKLDYLENAITLIAIEYYNYVYSSKKILIAYCEKVRKKIFEKLDQDNEEVISCKTRELDVLIEKLNKLNDMFFFQNSIDEQYYLSAKERFDIQIEDLKHEIRTLSINDDEHKNEIIEIENIINKIENIGAKKEYEIEEIKQEIISYEIRKAKDIHRMYQEVNIPEIGFKFKMNDQIKSLTDKYLKDINENEVVMTNVSEEAVIQIYSNGEISIYFRK

SEQ ID NO: 18631 - protein, 519 aa, synthetic construct
MKKVTKIEKSQNVENKKEKIRVAAYCRVSTSSDAQLESLEAQKVHYENYINSRDDWQFAGIYYDEGITGTKKDKRPELLRLMDDCKAGKIDFIVTKSISRFSRNTMDCLELVRDLQALHIPLYFEKENINTGSMKSELFLSLLSTLAENESVSISENSKWSIQKRFENGTFKISYPPYGYVWDGEQMVINPEQATVVQKIFAMLLSGKSTQTIADDLNQRGVASKRSGHWTATTIRDMISNEKYVGDCLFQKTYSDSNFVRHNNHGEVTQYLVKDHHAAIISREDFTTAQRLIRQRAIEKGIIQGSEKYQNSYAFSGKVICGECGNTFKRRMHGYAGYKYVAWCCSTHLRNKNKCHMLFIRDETLKQAFIIMMNKLKCFRQIILTPYVQSLKTDPANNSMKKIQKLHTLLAHNSEKRETLTKLLSQGIIDSIIYNKETNELLFQADAYQKNIESLKHTVSDSMAIITEAINLLRFVEKAPAVTAFDPMLFEKFVDHILIRSRNEICFILKCGLALTERR

SEQ ID NO: 18632 - protein, 522 aa, synthetic construct
MGTVMIIPAKKRMGNTIKKSEQKKLRVAAYCRVSTDSDEQETSYEAQVSHYTEYIHNHPEWSLAGIFADDGISGTNTKKREEFNRMIDECMAGNIDMVITKSISRFARNTLDCLKYIRKLKDKNIPVFFEKEAINTMDAKGEVLITIMASLAQQESQSLSQNVKLGLQYRYQQGKVQINHNYFLGYTKDKNGHLIIDPEQAEVVKRIYREYLEGYSMAKIARHLEKDGIRTGAGKTRWHSSTINKILRNEKYMGDALLQKTYTTDFLTKTRVKNNGIVPQYYVENDHEAIIPKEIFMQVQAELVRRRVVHVSPSGKKRNFSSNNCFSQIVRCGECGDLYRRVHWNNHGHKSIVWRCITRLEPTAADTNCTNRTVNEELLKDISLKAMNQILLGSDSFIQQLQENLAKAITKSDTLSPDGIQKRLEELQQELITKANNRQAYDAIADEIFRLRDQKEKAENNLRSQKEVAERIKTLQEFIKRQPSNLTAFDESLVHKLIERITVFPKHFTVEFKSGISVDINE

SEQ ID NO: 18633 - protein, 560 aa, synthetic construct
MKNKKIKCDIYTRVSTTMQVDGYSLDAQKEKLKRYAEFQNMEIVNEYSDEGKSGKSVEGRPEFQRMLDNIENGTDEVQFVLVFKLSRFGRNAADVLNSLQRMQDFGVNLICVEDGIDSSKDSGKLMISVLSAVAEIERENILVQTMEGRKQKAREGKWNGGFAPYGYELVNGELQIAEDEAEIIRLIYDKFIHTNMGISAIAAWLNQHGYKKKKRQNNTLDAFAASFIKGVLDNPVYCGKLAYGRRKNEKVSGTRNEYRIVKQENYMLHDGIHEGIVSETDWELAHQKREKTGVKYEKTHSLDHEHILSGILRCPLCGSGMYGNVNRKKKKDGTLYKDYFYYACKHRRLVDGHKCGYRKQWSEEKINNAVEEVIRKLVKNPKFEEAILNKIGSRIDTEEIEKEIERLEKQHRQLTGAKGRLGQQMDSLDIMDKFYEKKYQDMETRLYRLYDEIEGVENSIEEVKNRLLNIRQQKISEENVYQFLLYFDKLYDKFTDLEKKEFLNSFVEQVDIYEQEQPDGRFLKHIKFRFPVYFGDRETQELCWDNESTVETVCLLSKKP

SEQ ID NO: 18634 - protein, 467 aa, synthetic construct
MAREIVHIPARRGLSNRATVTDRKIRVAAYCRVSTDHEEQINSFENQVTYYTEYINRNPNYELADIYADEGISGTNTRRRDDFNRMIADCEAGKIDLIITKSISRFARNTQDCLNYSRKLKDLGIGIQFEKEGINTMDSSGELLFTILSSLAQDESRSISENCQWGIRSLFKQGVLHLNTNRFLGYDKDEKGNLVINEEQAVIVRRIYTEFMNGINPDVISRRLRDEGVPGCMGEAKWQASTIFGILRNEKYMGDAILQKTFTSDYLTKKTVKNEGQLEQYHVKGDHEAIIDPEYWDAVQLELERRQNYMTAHSLRTMGRYTDEQPFSNRVLCGECGKVFWRRTWYRLNNTYKVWQCGNRYREKGVVTCHSENLKESDLHGAFVMAWNGILESRAEFTETWKAQAENGNALERFRAKQMLELTKMKPMKEIDLLLVGKVLDYVIVQNGGELEFHFLDGTQLAVEVTE

SEQ ID NO: 18635 - protein, 464 aa, synthetic construct
MARSVTVIPARNRQREIGRRAVQEKKIRVAAYCRVSTDQEDQLHSFEAQVDYYTKYINDHENYEMAGIYADEGISGTNTKKREQFKRMIADCEGGKIDLVITKSISRFARNTQDCLAYSRKLKNLGIGIIFEKENINTLDSTGELLFTILSSLAQDESRNISENCKWGIRTKFKNGEMHLNTFKFLGYDKDENGKLVINKEQAKTVRRIYRDFLIGINPAQIAKELTEEKIPGCNGQTKWYPSTVTGILKQEKHMGDALLQKTYTADFLTKRQVKNNGEIAQVYVKDSHKGIIDKQTWNAVQEEFDRREKFMESHGTDRYSYGADCMPFCEKVFCGECKSLFTRHSWRSRGIVQWQCKNHRKDGKVACTNAYVDNADLEKGFVKAFNRLVTDRDKHMERWQQMKSDGSPLEKIRAGQMMEAVENEPLTRFVPEIAQLVLCEVTVLGAKKYEFFFQEGSRVKVSV

SEQ ID NO: 18636 - protein, 483 aa, synthetic construct
MQDRITNSPNTLAAIYCRISSDKTGKSAGVERQQSDCRVMADRLGLSVQHVLVDNDISAYSGKPRPGYKQLLELMRTGAVGTVLAYHQDRLQRSPVELEEYVDVSEIHRVTTHTVLAGHIDLSTPSGRFNARIIGAAARYEVEHMIERQQTAKLQAAKDGKYLGGQRPFGFEPQRKAIRESEAAIIRDMYERFVVGRSWWSIAVSLNQRGIRTTHGKDWNSLKVRNVLIRPINAGIVLHKGVEYPAQSPAILSPDEWANLKLAIDISRRKSPHPGRARKHLLKGFLICGACGEKMFHKSKQQRDGSYKTTAACGKTDNQTGRQHGCGKVSRMVEPIIDLVVDSIMFRLNSPELATTLHKHKTSADTLKTLNDQQRALESSINEITDDYYVNKLLTRDQFERAKTQADNDLALITKQIDAELVSEAVNTTDVSGDLRERWENETLEWQRSLLFLLIDRISVHPSLACRVTSTQSTSLSGGLILI

SEQ ID NO: 18637 - protein, 581 aa, synthetic construct
MAYAMKVPAASADDRAVAIYVRVSTGYQVDKDSLPFQKKELKAYCKHILHVDMSRVEIFEDAGRSGKNTKRPAYERMMQKVRAGLVSHVLVYKIDRISRNLVDFSLMYDDFKYNRVTFVSLNEQFDTSSAIGEAVLKIILVFAELERKLTSERVKDIMIGRANEGKWNGARVPYGWDWDSSAGWPVHSEKEAPFGRAMYEMYLKVKSTGKIRDYNNAHGIPTKRGGEWTSKTVGDFLRNPMNKGDYRYNYRESARGRKKPIDEVVYLEGVFDPLIDPEIWEKVNKIMDINRDKRNMGGLHPVEKNCNVFAGLIQCGSCGSGYLVGKKDKRRKNGFTPSMYYCSAKTRAIHCQNLNVSDVKIGPFVINYISAMVRVSNERRKIKTPEDLEEILLSDKAVFADIMGLSSDSLNNTFELLTGKSATGGALWRADLVDQEGVTADPAEIESLKDQIRKYERAKERLEDAYYFSDDGMSEKEYLEKKNRFDSGRVAAENKLKELTETHIASGVDESAFMKSASAFLLTHKIRAGSHIVYSDLAGMVEEESIKEFFNLVLDHITVKDRRVTEIVFANGLSHKFIYRD

SEQ ID NO: 18638 - protein, 514 aa, synthetic construct
MKKVYSYIRFSSTKQAFGDSHRRQSKAIQDWLANHPDHILDESLSFEDLGRSAFHGDHLKEGGALRAFLEAVKQGLIPPDSVLLVESLDRVSRQSISHAQETIRGILEQGITVVTLSDGETYNRQSLDDSLVLIRMIILQERSHNESVIKSDRIKKAWSHKRQQFEQDGTKITGNCPGWLKLNSDKKSFSLIPHHIETIHRIFDEKLSGKSLHAIARDLNLENIPTITNKKVDTGWTPTRVRDLLLKESLIGVAYGVSDYFPPAISKEKFHAVQMIRGQGKGKKPTSRQPSSIDILKGICKCAECGSTLRQRNTKKTPEGRYPRGYLECRNRQLGRCNSKAFNRSLIEDILIQKVFPTLQYLSLKSNGDNISVTTLKADITSLEKGINNLISLAEKGLGDLDTLAQRITNNRVELESKKKDLRQAEAILSLRSDNDIQDSDRKTVEGRIKLQLAIKSFVKEIIFDYDKQEITIRLLNGKSFSGISVAREDKDFDHSSMFEVLQKSLLDVDGVCL

SEQ ID NO: 18639 - protein, 517 aa, synthetic construct
MNVIKIPAKPQKGNNAAKQEVKKLRVAAYCRVSTDNEEQATSYETQIEHYTEFINKNPEWELVRVYADDGISATSTKGREQFNAMIEDCKKGLIDMIFTKSISRFARNTVDCLNYIRMLKEMNIPVFFEKESINTMDSKGEVLLTIMASLAQQESESLSQNVKIGVQYRFQQGKVMVNARRFLGYDKDDEGHLIINPEQAEIVKRIFREYLEGASCKKIAQGLQRDGIPNARGSTKWHDNSIRLILGNEKYMGDALLQKTYTVDCLSKKRVKNSGIVPQYYVEDDHEAIISKETFLMVQEEMARRSEQNACFGRRKNFSANHPFSKIVFCAECGEEYRRIHWNNRGKKSVVWRCLTRLKQKDQCHARTVNEETLIEAFLDALNEIVGNSDDYLTRLKENLETAINEVHPESAAALAAKMAKLQQELIDRTERRENYDDITEEILRLRELQAQTAMDDNAKTEHKKRIRELLKFIERQKSKVLVFDEALVRKLLEKVTVYDDYLEFRFKSGVTVSVEK

SEQ ID NO: 18640 - protein, 516 aa, synthetic construct
MIIRKIDAQEPVAGKKLRVAAYCRVSTENADQKESLEAQKAHYETWIKRHSDWEFAGVFYDFGISGTKADSRDGLQALLYACRTGSIDYVLTKSISRFSRNTADCLSLVRELLSCNIPIYFEKENIDTGSMDSELILSMLSSMAQDESESISKNVKWSIQQRIEAGTFKFGYPPYGYTKDANGNYVIEPTEAEVIRLIFSSALNGMGTYKIAQMLEKKKIPTRKGGKWSGSTIKGILVNEKYYGAAAFMKTYTDSSFRRHNNHGEVDSYYAEEHHEPIISREMFDKVQLVLQKHAEEHNIEADVGKYQNKYPFSGKIICGECGGKFKRQTQTTGIAWACTTHLYDKASCSMKFIKDAAVKAAFVTMLNKLIFGYQFILSPYLESLKLSDADNNLLSIMDIKAALQKNTDRKQELRKLRVGGFLDSVMYTQELRRIEQQNEEYRAALKNQEKTAVNGSIKETEKLLHFIESLETQTEFSDEAFTEYVDSIIVYSRTSIGFRLKCGLTLKEELCSGTE

SEQ ID NO: 18641 - protein, 518 aa, synthetic construct
MPKVTEIPAKKPVGSIAKKEEIRKLRVAAYCRVSTDYEEQTSSYQTQIEHYTDVIEKKPDWVLAGIFADDGISATSTKNREQFNNMIQACKDGKIDMIITKSISRFARNTVDCLNYIRELKALNIPVYFEKESINTMDAKGEVLITIMASLAQQESESLSQNVRLGIKYRFQQGKVMVNANCFLGYDKDEDGHLVINPEQAEVIKRIFREYLEGASCQQIARGLERDGVPTARGNNRWHDSGIRRILENEKYMGDALLQKTYTVDFLNKKRARNNGDVPQYYVEDDHEAIIPKELFMKVQEEMSRRGSLIDCNGRKRGFSSNHCFSGLIYCAECGERFRRIHWNNHGCKSVVWRCITRVDKAGDCCARTVHETELKNSFIAALNQLIADSDSYLPVLQKNIASVLMTMNPESAESIQARISALQQEIIDKASRQEDYSEAAQEVLRLRQQKENALQNDTSRNDNLDRIRELQKFITSQPDAITEFDESLVKHLLSKVTVFESKLVFEFKSGVTLEICK

SEQ ID NO: 18642 - protein, 516 aa, synthetic construct
MNIRVIEAQKPSVKKKKRRVAAYCRVSTDHSDQLESLETQKAHYESYILLNSEWEYAGLYYDTGITGTKAEIRDGLQNLLTACRIGKVEHILVKSISRFSRNTTDCLSIVRELLNIGVTIYFEKENIDTGDMESELILSILSSMAEEESSSISKNEKWSIQRRMAAGTFKIGYVPYGYQRDENGDMVIEPAEAGVVRFIFRTLLAGNSTDTIASALQQQGIPTRKGGKWSGSTVRDIIVNEKYVGDALFQKTYTDDTFRRHNNHGEVKTYLVSEHHEPIISRETYERANALVRQRSKEKGIVRENGKYQNRFAFSGKIICGICGGKYKRRIHSHGAEIAWVCNTHIEDIRRCSAKYVRDDVLKATFVTMLNKLIFSRKLILKPLYDTLRADSTDESIKRMQELQQLLEKNSEKKHTLRQLRAQDIIDNVMFNQEMNMLRKAAEDYRNELAVLGTYTSAEAYEITELDKLLKFTETTTLLDEFSDELFTAFVDHIIVYDRDCIEFKLKCGLTLKEVL

SEQ ID NO: 18643 - protein, 507 aa, synthetic construct
MKRVISYIRFSSERQAKGDSLRRQSKMVNDWLKAHPEYYLDQDLSFRDLGVSGFTGKHLKGGLGDFLTAIEKGLVKAGDTLLIESLDRLSRQDVDRASELLRNILRSGVDVVTLSDGEHYTKESLKDPLSLIKSILIMQRAHEESLRKSERIQAAWDAKKEAAKAGIKVSKRCPAWLKLNDDRKSFSVIPDKVETVKRCFQLRLEGKSIWEIVRTMNAEGRQTLNQHKAGSFGQTSVQDLLKNRSVIGYFTPKGCEEISGYYPAIIDETTFYKVQQLSYARYGRKPASDKPMAVNLFKGVIRCSECGHALIITGFSDTRSGIYRCPLRNENRCSAKGLSRKQTDGTLLALLSRLDRFDSDTTNTVDTLKLRREHIASNIEKLVQLSLEIEDLSAITSKLKQLKGELSQVDADIEKETQRLKSIDVGCLSDCDLTTKAGRIEAQLIIKSAVKEVVLNTAKRRCKVTFHNGKEIDLPITETPSEDVTEAIQSLSEVTERGLIDVDEVIV

SEQ ID NO: 18644 - protein, 578 aa, synthetic construct
MNKSDAFFKKFVPKDAISKIDNHENNVVIYTRVSSKEQLSNDSLENQYKTCTNFSVKHGFRIVEYFGGIYESAKSDEDRKEFQRMINFVCTPKNRISGIVVYSHDRFSRTGLDGAFEVLGKLKRHRVKVFSAMYNIDPDSMEGKVMLTMSLLQASVENESKSKLTIQRVKAKLEAGYWSHSLPKGYSRDEKKRIYINKDGYLIQEAFDLMLKQHTLSEVQKIIALKGYNINIKRWFEICSNPFYCGIMLSRSNNYSPIEGNHPKIISIAQFKKLNNSRSNARLTRTKDTAINEHMPLKGYLRCDCGFKFTGYLNKKKNRHYYICNNFECRKSLSAILITTSFLEQLKNQLPIELSNEKLSYQLCSFLKELETIHKQLIFEQKNELKKAKDKLYKLADALMEGELDKKLFQEHYVEIEAKVAEEEQKLFDLDVHISNPQTVAKNIIKFFRNTLIMWEKGDLHIKRQIQKIYYPEGIIYSKDKKQYLTFKKNSLLHLINVLSSSYTKKRADFSEVILNKSAQVPRVGIEPTHLTVHDFESCASTSSAIQAFIPIPYEVGVAKVGILGEKTNKFYVLGNKF

SEQ ID NO: 18645 - protein, 547 aa, synthetic construct
MKLLVTYIRWSTKEQDSGDSLRRQTNLIDAFYAKHKEEYYLLPAHRYVDKGKSGFHQQHKAQGSDFRRMFENVMSGVIPEGSLIVVENFDRFSRADIDTAIDDVRQILRKGVSILTLGDGELYDKSALTDPVKLIKHIIIAERAHQESLVKQKRIAQVWNHKTQLARELKKPMGKQAPGWLELSEDGSHYIVDEDKASLVNLIFDKRLSGLSMFAICKWLNEQGYPTINQRKVRISKTQKPDGNWSALSVKHILTSRSVLGYLPAKISSEDRKTVLREEIEGFYPQIVTDSKFYAVQQLLEETGKGKTSSGEHWLYVNILKGLIRCKCGLVMTPTGIRKPVYQGTYRCNGNKESRCSYGTVSRKLLDTQLCSRLFSKLSQLHDEATDTAKLDELQRRLNTVDSELEKLTETLIQLPNITQIQEALRVKQEEKDELIVQLSREKARVKSVSSLDLSGLDMESVEGRTEAQIIIKRLVKEIVVSGNEKLVDIYLHNGNMIRGFPLDGKDDHTLTLEEATDEMQSLDDMLIFGEPVTRIYPAGDMEEVDA

SEQ ID NO: 18646 - protein, 500 aa, synthetic construct
MKKVFVYHRVSSDQQLDGSGIARQAELLEAYLKRTNILAEMDDPEPVIITESGGVSAFKGHNMLITSGLGAWMQEVRAAMWDGSHLVYENGDRFSRQNPFTVIGYINDLINHNITIHDATMNIIISRQNSAMLPMVLMNAQRAYDESKYKSDRIRKGWAKKREQAFNKGTIVTNKRPQWIEVEKDKYVLNEKAAVVKEIFALYQTGMGCPTIAKKLQGKEGEQYKFNRPWTGELVHKILTNRRVTGKIFISETIRNHADIENPVTQKKYDMDVYPVVINEEEFELVQELLKSRRPNAGRVTVKKDGQEEVLIKSNLFSGIARCTECGGPMYHNVVRAKRTPKKGDPKIEEYRYIRCLNERDGLCENKAMTYETVERFVVEHLLGMDLSTVMKEQEFNPEIEVLRIQIDQVKEQITNYENGIERRKSAGKIITFDMREDLDDAKSELERLLARQASLATVQVDVAVLQDVNVTELYNVNNVDIRTRYENELNKIVSTIRLK

SEQ ID NO: 18647 - protein, 542 aa, synthetic construct
MKEMKRKSVGCYVRVSTISQDIDKFSINGQITQIKEYCQFHGYDVFDIYADRGVSGKTMNRPELQRMLKDAKEGKLDCVMIYKTSRLARNTSDLLTIVEGLHKQNVEFFSLSENMKFDSNSGKLLLQILASFSEFERNNIAEGAFMGQLRRSQEGYYQGNLPLAYDKIPDSKHELMINQHEANIVKYIFESYAKGHGYRKIANALNHKGYVTKKGNPFSISAVTYILSNPFYIGKIQFAKYKDWNDKRRKGLNDKPVIAEGKHTPIISQDLWDKVQARKKQVSKKPQVHGKGTNLLTGIIFCEKCGAAYAASNTTNTLKDGTKKRIRYYSCSNFRNKGSKVCSANSVRADVIEKYVMDQILEIVKSDKVLKQVVERVNQENQVDVAALNHDIAYKQQQFDEINTKLKNLIQTIEDNPDLASTLKPTIHQYETQLNDITNQMNQLKQQQNQEKPSYDTKQIAALLQQIFQNVESMDKAQLKALYLTVIDRIDIRKDGNHKKQFYVTLKLNNEIIKQLFNDTPLDEVLLSTSSLFLPQTLFLQI

SEQ ID NO: 18648 - protein, 449 aa, synthetic construct
MKQAMGYLRQSTTKQQSLPAQKQAIKTLAEKHNIQHITFYSDKQSGRTDKRNGYQQITELIQQGQCDVLCCYRLNRLHRNLKNALKLMKLCQKYHVHILSVHDGYFDMDKAFDRLKLNIFISLAELESDNIGEQVSNGIKEKARQGKLITTHAPFGYHYKRGTFTINKNESPTVIAVFNYYLQGNGYKKITQFLEEDNKLLNRKPYQVRNIIMNPNYCGRVINKYGQYDNMFPSIVSTNMYEQAQALRSQKQIKRTPSDNQLKQKIKCPYCGSTLTNMTIRKKNHALRYYVCSRNMNASHFVCEFKGINAPKLETQVLTTCQDFFQNQQLYLKINDVIQKQIKKQRALETRSTLTQEQLIDKLAKGAIDAETFRKQSQSLLQQSKPTLSINEQQIQRSFENVIQQHFTLSMLYRYIDEIHISKNKSLVGIYFKNEPLNIINQATQSSIA

SEQ ID NO: 18649 - protein, 543 aa, synthetic construct
MQQLKTKRVGIYVRVSTEMQSTEGYSIDGQINQIKEYCDFHHFEVKDIYADRGISGKSMNRPELQRMLKDAKEGNIDCVMVYKTNRLARNTSDLLKIVEDLHKQNVEFFSLSERMEVNTSSGKLMLQILASFSEFERNNIVENVFMGQTRRAQEGYYQGNLPLGYDKIPDSKHELMINQHEANIVKYIFECYAKGHGYRKIANALNHKGYVTKKGKPFSISSITYILANPFYIGKIQFAKYKDWSEKRRKGLNDKPVIAEGKHSPIINQDLWDKVQMRKKQVSQKPQVHGKGTNLLTGIIHCPQCGAPMAASNTTNTLKDGTKKRIRYYSCSNFRNKGSKVCSANSVRADVIEDYVMKQILEIVKSDKVIQRVVARVNQENKVDGAALHHIVVAYKQQQYDEVQTKLNNLIKTIEDNPDLTSVIRPSIQKYEKQLNDITNQINQLKNQQNEDKPLFDAKEISKLLQHIFHNIKHIEKSRLKALYLSVIDRIDIKKDGNHKKQFYVTLKLNNEIIKQLFNNKQLDEVHLSTSSLFLPQTLYLTI

SEQ ID NO: 18650 - protein, 449 aa, synthetic construct
MKQVIGYLRQSTMKQQSLAAQKQAIEAIAEKHHIQHINYYSDKQSGRKDNRSGYRQMTQLIQQGQCDILCCYRLNRLHRNLKNALKLIKLCQTYRVHILSVHDGYFDMDQAFDRFKLNIFISLAELESDNIGEQVRNGLQEKAKQGRLITTHAPFGYEYHNGTFIINQNESPTVKAVFNYYIKGHGYKKIAQLLEEDNTYINRQPYQVRNIIINPNYCGRVNNQYGQFDNMFPSIVSTSIYEQAQRLRSQKQTKQTPSDNQLKQKIKCPCCNATLTNMTVRKKNHTLRYYVCPKNMNASRFVCDFKGINAQTLEDKVLEVCRDFYQNQRIYTKIKSAIDKRIKRQRNIEKHHTLTQEQLIEKLAQGIIDAETFREQTQSLRQQPQRTTSINGHQIQHTIQNIIQKRFTLNILHPYIETIHITKDKNLIGIYFKNEPLNIVNQAMQSSIA

SEQ ID NO: 18651 - protein, 449 aa, synthetic construct
MKQAIGYLRQSTTKQQSLAAQKQTIEALAKKHNIQYITFYSDKQSGRTDKRNGYQQITELIQQGQCDVLCCYRLNRLHRNLKNALKLMKLCQKYHVHILSVHDGYFDMDKAFDRLKLNIFISLAELESDNIGEQVKNGIKEKAKQGKMITTHAPFGYHYHNGTFTIDTVKAPTVKAVFNYYLQGYGYKKIAQYLEADDKFINRKPYQVRNIILNPNYCGRVINQYGQYENMFPAIVSTTIYEEAQVTRTQKPVKRKPSENQLKQKIKCPYCDSTLTNMTIRKKHHTLRYYVCPQNMNASRFVCEFKGINAQELETSVLATCQDFFQNQQLYSKINHTIQQRLKRQRDIETKTTLNHEQLIEKLAQGKIDAETFREQTQSLRQQSKPISSISTYQIRKAFQNIIQQRFTLNMLYPYIDEINISKNKSLAGIYFKNEPLNIVKQTMELSIV

SEQ ID NO: 18652 - protein, 541 aa, synthetic construct
MDKMKKKLVGGYIRVSTERQVEGYSIEGQITQIEQYCQFNGYELVDIYADRGISGKSMNRPELQRMLNDAKNGKLDCVMVYKTNRLARNTSDLLTIVEELHRQNVEFFSLSERMEVKNSTGKLMLQILASFSEFERNTILENIYTGQRQRALEGYYQGNLPLGYNNIPDNKKELMINQHEANIVKYIFESYAKGHGYRKIANALNHKGYVTKKGNPFSISAVTYILSNPFYIGKIQFAKYKDWNDKRRKGLNDKPVIAEGKHTPIISQDLWDKVQARKKQVSKKPQVHGKGTNLLTGIIVCEKCGAAYAASNTTNTLKDGTKKRIRYYSCSNFRNKGSKVCSANSVRADVIEKYVMDQILEIVKSDKVIKQVVERVNQENQVDVAALNHDIAYKQQQFDEINTKLKNLVQTIEDNPDLTSALKPTIHQYETQLNDITNQMNQLKHQQNQEKPSYDTKQIAALLQRIFQNIEFMDKSQLKALYLTVIDRIDIRKDENHKKQFYVTLKLNNEIIKQLFNNNNLDEVLLSTSSLFLPQTLYFQI

SEQ ID NO: 18653 - protein, 584 aa, synthetic construct
MNTKVKLIKASNTGARNRNALHLDLKRVAAYCRVSTDSKDQLESYKSQVDYYTNLIKNNKNWTLAGIYADEATTGTTASKRADFMRLISDCQNGDIDMIITKSISRFARNTLDTLKYVRLLKENNVGVVFEEENIDTLTMDGELLLTILSSVAQQEVENTSAHVKKGLKMKMEKGELIGFQGCLGYDYDPTTKSISINEEEAKIVRYIFKRYLEGNGGSVIGRELEEQGYLTPRGKTKWSDTTVLGVIKNEKYIGDILMGKTFTVDPITKRRLANFGESDKYHIENHHEPIISREDFEKAQEIRLRRAQNRNTIANKDRKREKLSRQYAFSSMLECGFCGEILSRRTWHTSSIYKKINWQCVKSTKKGKKYCPHSKGIQEAAIEKAFVESYRQLCHADSTVIDDFLKIVEEEINDNTLVKDLKKLENQLNRIISQERKLVDLHLEDSIDEEVYAKKYKKLTKQKEELLDEKKTLELTIKDENSIKERLKQFKKVLENKEIIEEFNRTVFESIVDKVVVGRIDKDGTVHPYDLTFYFKTGVKDSQDSNNFKDKRKNAKDNDINKLCSYKDDEDKKLCSQSKDNTC

SEQ ID NO: 18654 - protein, 631 aa, synthetic construct
MKKDVKVIKGDTTLKRTASGCVERSIKRVAAYCRVSTDTEDQINSYNSQVEHYTDFIKQNNEWTLAGIYADEAITGTQVDRRIDFQRLINDCMNGDIDMVITKSISRFARNTLDTLKYVRKLKEYNVAVFFEEENINTLTMDGELLLTILSSVAQQEVENISANVKKGLRMKMERGEMVGFQGCLGYDYDPETKSISVNEKEAEIVRYIFRRYLEGVGGMVISRELEEQGYLSPRGYKRWTETTVLGIIKNEKYKGDLLMGKTFTVDPISKRRLDNFGEQDKFYIENHHEPIISEEDFEKAQGIRLRRAKNRNTVANNGGKREKYSRKYAFSSMLECGFCGHNLSRRNWHSSSEYTKVIWQCVNATKNGKKYCPHSKGIEEEAIEKAFMESYRQVCHNNVEITNEFLKTVEEELKDNSLAKDLKKITNQLDKILKKEKDLVELRLNESISMDIYQDKYNEIAISKEKLLAEKRTLEVTLTDEKALKKRLEGFKKLLESNKYLEEFDRAVFESIVDKIIIGGTNDEGEIDPAMITIIYKTGKKDSQNGRLFKSRRKNAKVVEENDGDKLYSQSSNEVNKLCSYSTDNTCGVRSVATTKQRVKILYFKHFFKHFVFIEKSDFNIKKVLKNILT

SEQ ID NO: 18655 - protein, 502 aa, synthetic construct
MIAIYARQSVDKKDSISIESQIEFCKKEFEEGQAYKTYIDKGFSGKDTNRPAFENMMNDIRAGQIEKVIVYKLDRISRSTLDFANIINTFKKYNVEFISSTEKFDTSTPIGKAMLNIIMVFAELERETIQKRIKDNYYARGKKGFFLGGRVPFGFNKVETKVDGKKTSMFEPNPEQIPYVIEMYEMYANTNTSLGKISDYLNEKNVPAPNGGNWDSNKVSRILHNPVYVRADADVYQYYKNKGCIISNDISDFIGTNGCYLFGKREANERKYTKVENHVLALALHEGIIDSHTWLLCQYKLDSNKQIKNSGKGKHTWLTGVAKCGYCKYAVSVIKSSTGNYKYFNCRGKTNLKVCKGHSRPILVDEIENIVKEHIFEKINQLRNTSIDTQVEEDRNINRIKIQLIELDKQIENLINKIAEANEVTMKYINERLAKLDKEKTALLEELQKLTIENSKVISMNEIFEKVDNWENLSLEEKKEVCSNLINKVYIKDDEINIEWKI

SEQ ID NO: 18656 - protein, 556 aa, synthetic construct
MNRSGMKCVLYPRVSTEMQVDGFSLDGQRTSLKRFADREEMVVVDIYEDAGKSGKSIEGRPAFKKMLSDIENGLQIDYILVYKLSRFGRNAADILNSLEFVQSYGVNLICIEEGIDSSQTSGKLLISVLSAVAEIERENIIEQTMNGRKEKARQGGWNGGFAPYGYYLKDKMLFIQEEESEAIRLIYDKFANTNIGYGGVAQYLNLQGIEKIQRQNGILKEWSGSFVRQILDNPIYCGKIAFGRRTREKVKGTKNEYRQTWQEDYILADGQHEAIIAEELWNKVREKRKATGIKQPSKVGKDRVHLLSGILKCPVCGSPMYTNKRAWTNKDGTYKEVYYYVCSRNRNARGKNCEYKAMLRKTEIEPLVIEAIRELVSNETFAKEVKARIGTQIDTTTIDREIKNYKAKLQEVDLNKARLENEIDTLPEDTRYRERKLHDMTIRLDGLYDIMVELEDKIEDAKLRLQSVVRDAITLDNVYKLLINFEKVYDKIRDEDRKILVSSLIKEIQIYPRDEEKVPLKSIFFNFPVYKDGQEVQELLWDKGSHVETVVRLSKK

SEQ ID NO: 18657 - protein, 546 aa, synthetic construct
MKAVIYARVSTQDQALGFSLATQEELCEKKARALGALEVEVVEDAYTGTELNRPSLDYVRQLVAAGKVDLVVVYDPDRLSRNLTDLLILCREFDKAGVKLEFVNFEWQKTPQGMLFLQMRGAFAEFEHALIKERTQRGKAKKAASGKIRCYAKPFGYDWDAERDTLVINPQEAKIVKQMFEWLTDPLEPLTPWQITQKLGQVYPQGPRGKGWVHSSVVRMLKNPVYTGRLRRKDEQPDWKPVLVPAIIDQETFMRAQEMLARSKRFNPKTTRRRFLLQRLLVCGECGRRLTVVTHNNPQRAKYSYYTCPGRYPTKFDDQGRVGRCGLPPWRTEEIDKTVWDTIASIIKNPELFYQYITSEKLETASIPRRRLEEARKRLEQVQRVIERIDRAYFILEALPEEDYKRYRAEQEGELVRIEEDIKRLEAVINAQKQVQKGVEFLRQYAENLARSVDELNFFQKQNITRELVQRVKIYADGSLEIEGYFNLPFTGPGKNVPDHCEELTTLTTQKNLKEPLSSSVLTCTHRKKGHPKVAEGIIHLKILAV

SEQ ID NO: 18658 - protein, 452 aa, synthetic construct
MKAAIYIRVSTQEQVENYSIQAQTEKLTALCRSKDWDVYDTFIDGGYSGSNMNRPALNEMLSKLHEIDAVVVYRLDRLSRSQKDTITLIEEYFLKNNVEFVSLSETLDTSSPFGRAMIGILSVFAQLERETIRDRMVMGQIKRVESGLPLTTAKGRTFGYDVIDTKLYTNEEEAKQLQMIYDIFEQEKSITFLQKRLKELGFKVKSYSSYNKWLMNDLYIGYVSYSDKVHVKGIHEPIISEDQFYRVQEIFSRMGKNPNMNKESSSLLNNLIVCEKCGLGYVHRAKDTVSRGKKYHYRYYSCKTYKHTHELEKCGNKIWRADKLEEIIISRVKNYSFATRNLDKEDELDSITEKLKTEHSKKKRLFDLYMNGSYEVAELDKLMADIDAQINYYNSQIEANEELKRNKKVQESLAELATVDFDSLEFREKQIYLKSIINKIYINDEQVTIEWI

SEQ ID NO: 18659 - protein, 517 aa, synthetic construct
MKTIHKLARPQLPEPPKLKVAAYARASTSSNEQLAILQTQITHYENHIQNNDQWEYVGVYYDEGTSGTKVEKRDGLHRLIKDAELGKIDLILTKSISRFSRNTVDCLNLVRKLTDIGVTIFFEKENINTGDMESELLLSILSSLAESESYSHSENMKWANRKRMAKGIFKTVPPYGYQRKGADFYLIPDEAKVIEQIFKWALEGVSAYQVAKRLNEKNIFTRKGSKWQDSGINNILHNIVYTGTMIHQRYFNDDQFRKKKNNGELPMYRIDNNHPPIISWEDYERVQELITLRANAKGTSKGSQKYSQRYVFTKRIICDKCGCNYKRVHIAGKGNTKVVKWSCTGHLKNKDGCDALPITDESLKTAYLTMLNKLILGHTIVLEPLINTPVEGKASKQELEKLSIEITKIDEKLEVLASLNASGVVSTKTALEEQGRLQMELNKLQEKQHKIMESVNGTSTQRIQLEQLHQFTKRSEMLTEWDEDLFLRFAELIVVYSRQEVSFELKCGLLLKERLEA

SEQ ID NO: 18660 - protein, 558 aa, synthetic construct
MTKLYSYIRFSSMRQSDGSSYERQIRMAKEIADRYNLELVNDYQDLGVSAFKGANSKTGALSRFLDEIGRSIPVGSWLFIENLDRLSRQDIISAQELFLSIIRRGITIVTGMDNKIYSIETVTANPMDLMFSILLFIRGNEESQTKRNRTNSSALLKIKAHQQNPQSPAVAIEEIGKNMWWTDTTSGRVLPHPVYFPVLQKIVQLRQEGHSAGVILDYLNEHHEPPAPTSNKKHGKWSRAMVSRLFATKALIGVKTVNVDGVEYELRDYYPRVLSDSEFYFLRKNIIKKAWDYSHVKEKVIPLLSGIGVLRCVHCGATMVKQTAANGKREQYRYCCDGRKSGRTDCPYPNWGFRAVTLEGAVLQLLADKIWIAEDKTNPIPEIQVKIDEISRKIDNLINLSAMTGATKELANQITDLNSQREALHEEIRLFEREMYSVDSQGWDKLAQFDLSDVQNEERLKVRMKIKGALHEIECSRIDSKKNLFVLVYLDGLRQRLVIENNRGLKKGQIFVDLKTINDRQILESAGMVLHPCIEMIIDSDWKAPEEIPGLLSEEFGI

SEQ ID NO: 18661 - protein, 558 aa, synthetic construct
MTKLYSYIRFSSMRQSDGSSYERQIRMAKEIADRYNLELVNDYQDLGVSAFKGANSKTGALSRFLDEIGRSIPVGSWLFIENLDRLSRQDIISAQELFLSIIRRGITIVTGMDNKIYSIETVTANPMDLMFSILLFIRGNEESQTKRNRTNSSALLKIKAHQQNPQNPAVAIEEIGKNMWWTDTTSGRVLPHPVYFPVLQKIVQLRQEGHSTGVILDYLNEHHEPPAPTSNKKHGKWSRAMVSRLFATKALIGVKTVNVDGVEYELRDYYPRVLSDSEFYFLRKNIIKKAWDYSHDKEKVIPLLSGIGVLRCVHCGATMVKQTAANGKREQYRYCCDGRKSGRTDCPYPNWGFRAVTLEGAVLQLLADKIWIAEDKTNPIPEIQVKIDEISRKIDNLINLSAMTGATKELANQITDLNSQREALHEEIRLFEREMYSVDSQGWDKLAQFDLSDVQNEERLKVRMKIKGALHEIECSRIDSKKNLFVLVYLDGLRQRLVIENNRGLKKGQIFVDLKTINDRQILESAGMVLHPCIEMIIDADWKAPEEIPGLLSEEFGI

SEQ ID NO: 18662 - protein, 598 aa, synthetic construct
MTMSPEPRVRQHHSGHTDIESEAVLYLRVSSKKQMDTAIDIDPDGNSIATQREVSTRKANSLNARVVKEFVEPGVSASTIEKRQAFQDMLSYLREHPNVRYVIVYARSRAFRNYIDAAITKRLLDKLNVKLVSAREDFGDGVYADMMEAVTDIFNDVQNKLSGEDIRIKLQHKAINGGTTGRAPVGYLNTRTEVEGRLINTVSLDPNRASLVLKAWELYATGDYSIERLTTTMADLGLTSKPTVRSPAGRPMSDTQMHRMLGDAYYAGFVVYKGDIYPGRHEPIIGQDLFERVREVQQARSGRGTRDRILNHYLKGMLFCQRCHDHGRTSRLIYTEAKGRSRRYGYFLCRARQDGLCDLPHIAVERVEQAVVDHYVTFQLGEEFANECREKLDAALADAQGSEREAHAALTRRINELNKKESRLIDLAADGTLPAAKIRAKLNEIKIDRARVEAGLTTTAEQLSLGAVVLRDALQLVADTHALYQNGNSQVRRNLNDTFFQKLYIDDCEVTHDELKPIFADITEAKKVIQAVTTNTGTTTTVATDRTTNNKTASPGLAGILLASGSSKADLVELRGIEPLTFSMRTRRATNCAIAPRR

SEQ ID NO: 18663 - protein, 501 aa, synthetic construct
MEQNVKEVAIYLRKSRDDSDGQEDVLAKHENLLVEYAKKNNFKYKIYKEIGSSEYIDSREEMLRLLTDVKQDLYDAILVVDLDRLSRGDLEEMGRISRIFRDSKTLILTPTKIYDFNNEDQALINNFEMVFANHEFHMIKKRMSRGKKQGAKAGKWVNGTPPFPYFYNRLTKELDVDPDKEKVYNLIKKMFLEDMKHSYEIAWELNKLGFKTNRNCYWSENTVRRVLKNEVHLGKVIFGKTCGGGNKNKPNYSAPKIKDKSEWIIAEGTHRPLKTEEEHQRILAILQSRQIMSKGTRTNVQVLSKLIYCGKCKRAISFINKPNGKSYVKTCSRADHFGNCCYNMGVNVEVIYAQLFFDLAKHEQQLLNHESKETQIDSSTLQLAVCNKYEELERLEKGIERIKDLFIDEMIDKLEMKKRIEKQQQLIQTKKQEIRSIEQSLAVIKNVRTDSDRLHAIKEFKKAWNTKGISKKELNILSKTLIDRIEYIRDKGNIQINVKFL

SEQ ID NO: 18664 - protein, 491 aa, synthetic construct
MFVAIYLRLSKDEQQLGVEEVLSNHRLALTRIADSNGWKYDIYEEVSSGVNTEREEINLLLQRIDDYSAVLCMDVDRLSRDNSFAEQIKKQLILHGVKLITPQGEYDFDNENSDMLYSFQSMFANFEYKQIRKRLSRGKFMEASKGLWVMNNVPLGFKKNQETKKLEVNEEEAHIIRYIFDKTLEGFSINRISRDVYDFGWRSRRGKILSTSHLSNIRQNPTYYGVVRYERKNEIGKVLESCFIENAHEALIPKQRWLEAQKIIKNNSNKKFTTRGKISRALQGLIYCGCCGHKRYICRDATGKDYIKACGFKVQIRCNDAGYRYLPIEEAVFKWVKEYIPELKEELSGLKNQDTGKVEKVLFNQLKDVEVQLAKRATKRKNFTNMRAEGEITKAEFEEVRGELEEEVTQLNQQKELLELKLENVTNNDEQIMTIEKRIETLENLEKLSPEEVNAFLRQFIKKVVFSRNIEGNPNTTGREEIAPTVEIIPL

SEQ ID NO: 18665 - protein, 515 aa, synthetic construct
MKTAIYLRKSRADLEAEARGEGETLAKHRSTLLKIAKEKNLNVLTVREEIVSGESLVKRPEMLALLEEIEDNKYDVVLCMDMDRLGRGGMKEQGIILETFKRSNTKIMTPRKTYDLNDEWDEEYSEFEAFMARKELKIITRRMQRGRIASVEAGNYLGTHAPYGYDIHRLNKRERTLTINLEEASVVRMIFEWYAHEDMGANAIMRKLNELGYKSKLGNDWNPYSILDMLKNNVYIGKVTWQKRKEVKRPDATKRSCTRQDKSEWIIADGKHDPIIPESLFEKALEKLNTRYHVPYNTNGLKNPLAGIVRCGKCGYSMVQRYPKNRKHTMDCKHRGCENKSSYTELIEKRLLEALKEWYINYKADFEKNKQDESTKETQIIQMNEAALRKLEKELVDVQKQKNNLHDLLERGVYTVDMFLERSNVVSNRINEITETMENLRKEIKTEITKEKVKKDTIPQVEHVLDLYFKTDDPKKKNSLLKSVLEKAVYTKEKWQRLDDFKLVLYPKLPQDDDK

SEQ ID NO: 18666 - protein, 522 aa, synthetic construct
MATSLVRAVVGARVSIFTDGKESQITQRTKGTAYAESQGWTVVGAFEDLDVSAIKQSPWDRPDLKQWLTDRADDWDALVFAKTDRVFRSAADCVKLSEWCRDHKKILVLVDDGIKLDYFHPDSQQDAFAGAMSKVFLILASVFAEIEGQRFVQRALDRVTQYRHQPRWAYGVPPYGFQVVDRPEGGKTLGHDLEAQQVLQGIATRLLSGDSLTRITADLNETGVLSPADRLRQRTGKELRGSRWTVITVQTILTNPATQGIKTAKGKPVLDAGGEPVRVGPPSFDSETWGRIHSELAQRSQSGQQRRHSDNPLLGVAKCGVCGKNMRHFQRTKGGRHYRYYICGSTPKACPGVLINADNAELAVETSFLDVHTNRRIKERVWRAGSDHSAELEQTTNTITALWEDRALGLFTTPEDQDMFRSQMSALVAKRDALAQTPVIKAGWVEVETEQTYGAVWPDATPVERRKMLTDAGMKLTVYRANKYETYVDLDKAIGEGSVGEELHSELEARAAEERRRWGMPD

SEQ ID NO: 18667 - protein, 602 aa, synthetic construct
MATATLPPLGSGNPVVPTEGMTTTSRSPLAGTVYETTLRGVRCVRLSVLTDETTSPERQREAGDIAAAALGIDFGEGDQLREAIDLDVSASKVSPFDRPQLGGWLAKPDEFDALVWWRFDRAIRSMADMHELAKWAREHRKLLVFAEGVGGGRIEFDFRNPLAPTGELMMMLFAFAAQVEAQSISDRVTGAMAAIRKMPLRWSGGGMPPYGYMPAPMPEEYGGVGWTLIPDPDAVRIIERIVRLLLDGLSASAIAVQLNADNVPSPRDHWSLMKNRKTGGRIGGRQSITRERFRWTGSAIRRMLLNPTLLGWKMHRGVPVRDAQGNPVMMTESPIMTREEYDRVGAILNKPRSASPVRAARVDTDALLLTVIHCASCGERMYLDKRRTHATAAPKYVCNSRTRGVQCAAPAYIRGDWTDDYVTAEFLRLVGTIQTTQVVEIPGYDPEPELLATLAEFEEHQKQQGRQKSKHAAAKWQERADALDARIADLETREKREPQRIVTRTGRTFADEWAEKNTAGRRAMLIEAGVRLDVRRGTRGGWRKLDTRRVDFSMTGELDPAAESLAVAAGDHEAYKRGHKPPAPGSSARLVESCQERVTVAA

SEQ ID NO: 18668 - protein, 577 aa, synthetic construct
MNLQMSIPSRAALYLRVSTMRQAEVDLSIPDQRSQTASYCERQGWQVIAEYVEPGASAMDDQRPEFQRMIERASDDDRPFDVIVVHSFSRFFRDAFGLEMYIRRLAKYGVRLVSITQELGDDPSQVMMRQVIALFDEYQSRENAKHVLRAMKENARQGFYNGSRVPLGYTVADVEKRGHRTKKRLIIDPVEAETVRLIFKLYLNGEATSGPLGVKEIAKTLNTRGMRTRLGARFGVGPVHKILTNPIYIGEWRFNRRHAKTGREKPVTEIIAVEVASIIERAAFDEVQRTLVARNPRTTPPRVTTGPILLTGLAHCASCGSAMTMRSGTSKTGRVYRYYSCSAAARMGKTACKGRSIPMDKLDQLVTSHIADRLLVPDRITALLAEIVQKRAVAGGEVQDRIDQLSRQARAAEEKLRRLYALVEDGITDLDEVLKARLADIKADRDQAQSALDRIKSRSSTACIDRSKIERFGSLMRESITAGSVPFRKSYLRSLIDAVEVDDRVIRIHGSKTTLEQAIMAGDQPERRVRGFVRKWRSLGEAKRDTISPSKISTNQLGCFVSATMRCYHQQAFTNIF

SEQ ID NO: 18669 - protein, 515 aa, synthetic construct
MKTAIYLRKSRADLEAEARGEGETLAKHRTTLLKIAKEMNLNVLSVREEIVSGESLVKRPEMLALLEEIEDNKYDVVLCMDMDRLGRGGMKEQGIILETFKRSNTKIMTPRKTYDLNDEWDEEYSEFEAFMARKELKIITRRMQRGRVASVEAGNYLGTHAPFGYDIHRLNKRERTLTINPEEASVVRMIFDWYAHEDMGANAIRSKLNDLGYKSKLGNEWNPYSILDILKNNVYIGKVTWQKRKEVKRPDAVKRSCARQDKSDWIIADGKHEPIIPESLFEQVQEKLNSRYHIPYNTNGIKNPLAGIIKCSKCGYSMVQRYPKNRKETMDCKHRGCENKSSYTELIEKRLLEALKEWYINYKADFEKHKQDDKLKETQVIQINEAALRKLEKELVDVQKQKSNLHDLLERGVYTVDMFLERSNVVSDRITEITSTMENLKKEIKTEIKKEKVKKDTIPQVEHVLDLYFKTDDPKKKNSLLKSVLEKAVYRKEKWQRLDDFELVLYPKLPQDGDI

SEQ ID NO: 18670 - protein, 491 aa, synthetic construct
MGLAAIYLRLSRNEEQLNIDEILLNHRNALTKLAKQQKLTYDIYQEISSGVNTERPELNLLLSRLDDYDALLVMDIDRISRDNAHAEEIKKMLIIHDIKILTPQGAIDLSQESNEMLFSFQAMMANFEYKQIRKRLGRGRLAAAEQGKWTMSNRVPLGYRKNEEKRLEVVEEEAKIIRFIFQKTLERVSANEIAKQLDILGWRSRQGKVLTSAHISNMRRNVVYYGVVKAGRKVNGRVVDEVFVEDAHEPIVSKQMFLEVQKILEENTTGNFFNKLKATRKLQNLIYCNCCKRKRYIQCDGNGIDYIKSCIYKVDNNKCRDRGYKYEPIEQFVLQKVKEKKPDFEQELQMLKSLDTTEVEKKLSIQRESLEKQINRFNKRQRNLKEMRMDGEISKAEFYEMRDENEEQIKQVKQQMELIDIKLENLSNTDEEQARLQDAIKTLDKLEELKAESCNTFLKKFIKKIWFSSNTEANHDTTRPKEDATIEIEWL

SEQ ID NO: 18671 - protein, 515 aa, synthetic construct
MKTAIYLRKSRADLEAEARGEGETLAKHRSTLLKIAKEMNLNVLAVREEIVSGESLVKRPEMLALLEEIEDNKYDVVLCMDMDRLGRGGMKEQGIILETFKRSNTKIMTPRKTYDLNDEWDEEYSEFEAFMARKELKIITRRMQRGRVASVEAGNYLGTHAPFGYDIHRLNKRERTLTINPEEASVVRMIFDWYANEDMGANAIRSKLNDLGYKSKLGNEWNPYSILDILKNNVYIGKVTWQKRKEVKRPDAVKRSCARQDKSDWIIADGKHEPIIPESLFEQVQEKLNSRYHIPYNTNGIKNPLAGIIKCSKCGYSMVQRYPKNRKETMDCKHRGCENKSSYTELIEKRLLEALKEWYINYKADFEKHKQDDKLKETQVIQMNEAALRKLEKELVDVQKQKNNLHDLLERGVYTVDMFLERSNVVSDRITEITSTMENLKKEIKTEIRKEKVKKDTIPQVEHVLDLYFKTDDPKKKNSLLKSVLEKAVYKKEKWQRLDDFELVLYPKLPQDGDI

SEQ ID NO: 18672 - protein, 515 aa, synthetic construct
MKTAIYLRKSRADLEAEARGEGETLAKHRSTLLKIAKEMNLNVLSVREEIVSGESLVKRPEMLALLEEIEDNKYDVVLCMDMDRLGRGGMKEQGIILETFKRSNTKIMTPRKTYDLNDEWDEEYSEFEAFMARKELKIITRRMQRGRVASVEAGNYLGTHAPFGYDIHRLNKRERTLTINPEEASVVRMIFDWYANEDMGANAIRSKLNDLGYKSKLGNEWNPYSILDILKNNVYIGKVTWQKRKEVKRPDAVKRSCARQDKSDWIIADGKHEPIIPESLFEQVQEKLNSRYHIPYNTNGIKNPLAGIIKCAKCGYSMVQRYPKNRKETMDCKHRGCENKSSYTELIEKRLLEALKEWYINYKTDFEKHKQDDKLKETQVIQMNEAALRKLEKELVDVQKQKNNLHDLLERGVYTVDMFLERSNVVSDRITEITSTMENLKKEIKTEIKKEKVKQDTIPQVENVLDLYFKTDDPKKKNSLLKSVLEKAVYKKEKWQRLDDFELVLYPKLPQDGDI

SEQ ID NO: 18673 - protein, 515 aa, synthetic construct
MKTAIYLRKSRADLEAEARGEGETLAKHRTTLLKIAKEMNLNVLSVREEIVSGESLVKRPEMLALLEEIEDNKYDVVLCMDMDRLGRGGMKEQGIILETFKRSNTKIMTPRKTYDLNDEWDEEYSEFEAFMARKELKIITRRMQRGRVASVEAGNYLGTHAPFGYDIHRLNKRERTLTINPEEASVVRMIFDWYANGDMGANAIRSKLNDLGYKSKLGNEWNPYSILDILKNNVYIGKVTWQKRKEVKRPDAVKRSCARQDKSDWIIADGKHEPIIPESLFEQVQEKLNSRYHVPYNTNGIKNPLAGIIKCSKCGYSMVQRYPKNRKETMDCKHRGCENKSSYTELIEKRLLEALKEWYINYKADFEKHKQDDKLKETQVIQMNEAALRKLEKELVDVQKQKSNLHDLLERGVYTVDMFLERSNVVSDRITEITSTMENLKKEIKTEIKKEKVKKDTIPQVEHVLDLYFKTDDPKKKNSLLKSVLEKAVYKKEKWQRLDDFELVLYPKLPQDGDI

SEQ ID NO: 18674 - protein, 553 aa, synthetic construct
MEKVESRESSAIKRAVGYFRVSTGRQAESDLSIPDQRKQVIEYCNRKGWELVQEFVEPGQSATDDNRPALQEMIAQATTHGSPYDVILVHSYSRFFRDSFAMEYYIRKLAKAEVEVVSITQELGNAPAQIMMRHIIGLFDEYQSRETAKHTLRSMKENARQGFYNGAPLPLGYKAVEVEVRGQRVKKKIVVDLTEAETVRLIFQLYLRGDGTSGALGCKALVSWLNERGYRTKTSARFGVGSVAFILKNRSYTGEFLFNRMEAKTRKLKPASEQVSVGVPPIVSLEEFEAVQATLHARNPRVTAPRTVTAPTLLSGLAFCSQCNSSLILRTGTSHTGKVHRYYSCRANLRSGKVACEGVSIKMETLDTEVVQHLSEQMLTVGRLTELISSISLARNENNAGASRRLSDLSSELGDTEARLKRIYLSIENGTAEVDDLFRSRIAQLQTERQRTVDALARLRATTKIVEVVTPEAIVKFSGVMRENIADGEPSFRRAYMRSVIERIMVGSDTIKIIGLKSTLENAVGTDSLPYIPVRSFERKWRPLQDSNLRPPA

SEQ ID NO: 18675 - protein, 515 aa, synthetic construct
MKTAIYLRKSRADLEAEARGEGETLAKHRTTLLKIAKEMNLNVLSVREEIVSGESLVKRPEMLALLEEIEDNKYDIVLCMDMDRLGRGGMKEQGIILETFKRSNTKIMTPRKTYDLNDEWDEEYSEFEAFMARKELKIITRRMQRGRVASVEAGNYLGTHAPFGYDIHRLNKRERTLTINPEEASVVRMIFDWYANEDMGANAIRSKLNELGYKSKLGNEWNPYSILDILKNNVYIGKVTWQKRKEVKQPDAVKRSCARQDKSDWIIAAGKHEPIIPESLFEQVQEKLNSRYHVPYNTNGIKNPLAGIIKCSKCGYSMVQRYPKNRKETMDCKHRGCENKSSYTELIEKRLLEALKEWYINYKADFEKHKQDDKLKETQVIQMNEAALRKLEKELVDVQKQKSNLHDLLERGVYTVDMFLERSNVVSDRITEITSTMENLKKEIKTEIKKEKVKKDTIPQVEHVLDLYFKTDDPKKKNSLLKSVLEKAVYKKEKWQRLDDFELVLYPKLPQDGDI

SEQ ID NO: 18676 - protein, 515 aa, synthetic construct
MKTAIYLRKSRADLEAEARGEGETLAKHRTTLLKIAKEMNLNVLTVREEIVSGESLVKRPEMLALLEEIEDNKYDVVLCMDMDRLGRGGMKEQGIILETFKRSNTKIMTPRKTYDLNDEWDEEYSEFEAFMARKELKIITRRMQRGRVASVEAGNYLGTHAPFGYDIHRLNKRERTLTINSEEASVVRMIFDWYANEDMGANAIRSKLNDLGYKSKLGNEWNPYSILDILKNNIYIGKVTWQKRKEVKRPDAVKRSCARQDKSDWIIADGKHEPIIPESLFEQVQEKLNSRYHVPYNTNGIKNPLAGIIKCSKCGYSMVQRYPKNRKETMDCKHRGCENKSSYTELIEKRLLEALKEWYINYKADFEKHKQDDKLKETQVIQMNEAALRKLEKELVDVQKQKSNLHDLLERGIYTVDMFLERSNVVSDRITEITSTMENLKKEIKTEIKKEKVKKDTIPQVEHVLDLYFKTDDPKKKNSLLKSVLEKAVYKKEKWQRLDDFELVLYPKLPQDGDI

SEQ ID NO: 18677 - protein, 535 aa, synthetic construct
METQNQTGYPVTALIYARVSDKSQLKGSGLQSQEHRCRQYAKAQGYDVEEVFLDTVSGGKNDIFDRPAMHGILNYLDKRQYENKRYIVIFDDHKRFARLTEMHLHLRREFAARGAIIEFLNLKTEDTPEGRFTETIFAAQAQLEREQGGVQSKQKTKARLEQGYWTRRAPRGYKYITAKGGGRELIVDEPIASILKEALEGFVSGRFASQTEVRRFLERQPEFPKDMPNGELRAQTVPRLLRQKLYSGYLEAPSWGVSLRKAQHEALISFETFQRIQAKLDKGVYAPMRKDISKDFPLRGAVACSGCNNMLTAAWCKGKYKKYPYYLCQNKGCDHRGKAVARDKLEDRFKALLKQLTPSKELFELAKVMFDDLWQVRQAQAKEQKQSARTQIVALEKQIGRLLDQIVEAQNVRVIKAYEGRIAALETNKLLLEEKATKPLNKSHSYRDLIKLSFKFLENPQILWDTGNFALRRLVLKLAFSEPITHDRNTGLLNTKLSLPFKALGGNFMPENKMVLLGRIELPTSSLPKQGKAFA

SEQ ID NO: 18678 - protein, 557 aa, synthetic construct
MRAAIYARVSTERQERQQTIESQLTALRAWAVEQGHDLAAGHVFRDEGYSGARLDRPGLDTLRDAVRDGAVEIIAVLTPDRLTRKYAYQVLLLEEFRRAGCAVMFLQHPISDDPNDQLLLQIQGAIAEYERAVLAERFRRGKLQRAREGQIIGAKAPYGYRYEPRRDGRPGCLVVDEAEAAMVRQLYSWVADEGLSVRQCGHRLNEGPWVTRSGRALWSLSVVYHIVSDPVYAGTAYVNRHEYVVPEHHRPATRRTGERTSRRARPREQWIAIPVPPLVEQDTWDRAQAQMARNAKLSFRRNKKTNYLLRCLLKCGNCGLGIHGCVFPGSAERRPWRYYRCSGKDPLTRARATKCPRACIDANALDQVVWDHVAGLLGDPERLLAQFERFATEASVVENAPRSAQSQIHQRIERIERADRRLVEAYQAEVISLSELAERREALATQRRLAEQQHAQLRRLQEQHQRTLATFEGLSAFSSRITARLQTTSIAERQAILKLVVERIIVHDDHVEIEHVIPLPKPGPDAGSRTCLPVARLRSDGVQATKERPAVRLLSTY

SEQ ID NO: 18679 - protein, 534 aa, synthetic construct
MGVVGAGQEVARTARTARAATAPRRRAVLYSRLSVSDDTSTSIARQLRDLRALAEREDLEVVAEFVDDGVSGRTSRANATGALQFLRERRADVLVVWKFDRWSRQGMRSLADLIDTLDEIPTTEFVALQDGLRSAQPAWRIVASVLAEVARMESENTATRVRSSIQWRVEAGLWRGGQIPFGYQAAEGKEPNTRTLIPYPPEVAVIEEMASALITGLWTPNRVTEELNQRQVPTGRSAYRTARNRGHNPDGLDRGIWRPGTVMQLWTASHLIGRQVHRGELVRDDAGIPKTVWPPLVDRDTYEALRAAVRDPRLAAGTTTQANRRRSQLLSGLLFCAECGSIAYSNRASRGQRASVYTCSRRNDPTCPKPTMSLELVDAMVTERFLKDFGACQLTTLREPDAARVDRARLADVEQAIDRTTDELRFDGADLEVLLPRLAELKAQRTQALVSQHAATTEVVVTEETYAERWGVHPSIEARQGLLRLAFDRIVLSKLAPGAARKGSHPERLAYSPRVSGHAALLGGPELRGGRDHL

SEQ ID NO: 18680 - protein, 621 aa, synthetic construct
MGYFMNKVKAYSYIRYSSPQQAKGDSFRRQFAKTQEYCEKNGYDLDTELNVYTELGKSAFKGEEQENLKRFIEDCKSGIVEKGSLLIVENLDRLSRDTINKAMRQFLHLLDYVNIYTLQDEKFYTSNEDVDNDSQVFDIITSLLIMSRAHEESQTKRKRLRESWEAKRQQINKKKFATSYPHWLNLSDDWESFTLKSDAVRSIKKIFELCISGNGYNQILRYLNDRLDLYPTPSKRSKSGLWVRSTIQLLLSDRRLIGEMQMYKGAYKNRKPYGDPIPDYYPQVIDEKTFLKAQIAMKERNIGAGKTGTYRFSNIFRGFLHCTECGNVMEFVDKGNTKKRSQKYLTCTNAKRGGECTSNKHFRYDELESMLLYLISENGFLPKPAEPNDLKLQLQKITQQHDDADKKLNILLEQDFSAPAIMKKMEQLNHDVALYKQQIKDLELKIKSTSTTNYDYDQLVHDIQQEPDEDVKFSNRAKLNGFLQENITNAIIYENHCPIVVFTMKDNTAHSLIMDKKYNFGGCTLPNNQDSFKRINGEGHEQIDKGIWMMQQHFLDLLITTKGISFTDKEQDQLEHLLNEMNNTLSSIIISSKPEKFDDLISLTEKAYLLIEKKSLFNQLR

SEQ ID NO: 18681 - protein, 575 aa, synthetic construct
MTKIAYSYTRLSTEKQIKGHGFTRQREAIEKVCCQHGWQLSDQTFNDLGVSAWKGANVTTGALSHFIELTKKGAIKPDSVLIVESVDRLSRQQVDKSLRLMLELLDVGISIFTLSDSKLYTTNSDNVMLDLMMWLMTAQRAHEESEMKSLRIRAAKRKNKELIRQGVIVSRKCPEWLSVSDDKSCFIVNEERAEIVRKVFIWYSQGFSTKPIALKLNELGVPYWGKSSTWSYRHIRSLLKHRAVIGDIQPLIRVNGKDVPDGDAVSDYYPAIVDKGLWATCQQIKSSKTTAKGRTVEIGMANLFRGLLKCECGSGLAINSSTVKGRTYRFLRCSQLKTTGCQAKNWHYEKTERILLIALRHSLSSFSEEDHAVSLRESQHYLARINEELKEKERQAENAINYLLDKPSRLLEARLQTLEDDIARLKAIQEQAEHRVEAVHYEKSTALDKVEELQRVLEDIANDDDSRHKANGLLRRLIDTVTLGSISNPRSKEFMELSGNDYHGLIVIKRRDGLEVRVEVLKNYELSISWEGDEFTVIECSPTQQTNSQHEPQKFINVGEQTVDLWDDEGWVASS

SEQ ID NO: 18682 - protein, 501 aa, synthetic construct
MDFSTYSGIYAYIRHSKESQSEGDSVDRQDSLASYWEKTHNVPVNYLAIDAGKSAYSAENIATGSLGQFIADLESNNLPSSSLLLVEGFDRLTRQQLMTALALLQRIFATGAHVYTLEDNNLFTADSLNDLPTMFGILMKIGRANEESATKSRRIKESFARRDQQMIAKTPINYRHLPHWLEYKEGQDKYHINEHADTIRLLFSLYLEGHGVTHITNTLNDKGLLRQGKTEWTTANVSSQLGSRLVLGEWKGHEGVYPTIVSEHDFNAVQAMKRKGTGRRANRLTSVNLFIASIARCSCGKPLHVIRPRGVKRLVCSGTRQGKTGCPFGYKLYNVDAIEMALGLWATETIGTDPEDYTSKLSHLRNALAANEQEQQAHRDALVGLADAIAELGYTQALKDRYKSVEGDLATCIQRAETISLEVQQLERPQTDNADTLAHWHKHADDSDYRRRMLQLMETKGVEFIMDNGKVTLHYQDRSWFLQDGLFFTDATVAKFLNEGD

SEQ ID NO: 18683 - protein, 586 aa, synthetic construct
MEVEVIKAKTNFDNSAAVGRKDRLRVAAYCRVSTADEEQIKSYDSMVKYYTDLIKKNPDWKFVEVYADKASTGTKAETRENFQRLIADCMAGKIDMVIAKSLSRFARNTLDTLKYVRQLRTKNVAIYFEVEKINTIKDGEFLLTILSSVAQQEVENTSAYVKKGLKMKMKRGELVGFQGCLGYKYDIETKTISVDETEAETVRYMFERYVAGAGSTMIARELNEQGIMTIRGNPWTSSSVMGVINNEKYTGDILLGKTFTVDPITKRRLDNLGEEDRFFIKNHHEPIISHETFEKAQALRERRNGGRQHHVEIGKREKYSRMFAFSSLIECGFCGGHLTRRKWHSSSKYKKTIWQCVTSTKGGKKLCPDSKGIPEQVIEEAFIESYRLLCSDNQEVMNEFLSRIEKTLGDDANEKNYQKAKKEVKQYKEKRKKLLDKYVDDGIDKETYMSMDAEYEVKYAEAQSQLEYYEKQVQGDDSLRKRIEGFRKTLTQNQVLEEFDRAVFESIVEKVIVGGYDDDGNADPYKVTFIYKTGFKDSFDHAKTKFDPKSKKSDENVSSNSSVHQENQCSNHSVDTCGDCSVADKD

SEQ ID NO: 18684 - protein, 634 aa, synthetic construct
MKLEHFSHTEPQIYSYSRFSNIRQEKGRSLARQKKFIDEVSAKFNLKINKDLVMTDRGLSAFHGHHKTKGALGVFLAAVEKQLIKPGSVLIVESLDRLSREQPYIAQATLASLVNADIVVVTAADEKIYSKETMAKDPLGTMILSVLEMVRAHKESLRKTEASIDFLHGQIATHEEGGVSDLAGPLPFWISRKQRPHPKIKTGFELNEHEEIIRLIVDMHFKQGMGLRPISVELLNRGIKPPSQLKHSPANSRKPKNDVWGVSTLSHIVSNQALCGRYVVNLNYQKDGKKHVEDYVLRSYYPAIMSEEEFDTFQAIKKRRYGSNKGDKSKRNGLVYLLTDYGNKSVCAKCGRSIGSQPQKQKHGIRRRLHCSKHKETANCCKSIIQDYIEDAFLISVARHIDYNLINTQVKPADIIRNSDRLEEIDLEMANVIDMRRTVKDEKIKLKLKFDYETLENEKEDLIKQKLEFKQFKIAPNDIKKFIRTVNDARDYNNNEARTFVKSILMQCIRKIEVHMEKKKLECYGYPNLFENAIVNVVDVEFYTDKKLSIFVSAETNALLFSKISDEFADESLGSFTEEQLKAWNDVGFDNFQNLGERGTLVNENENSTENLWFASDLAEAFMNEIINQSEDES

SEQ ID NO: 18685 - protein, 562 aa, synthetic construct
MKQTLAYSYVRFSSPEQAKGDSFRRQTEAARKYCNKHGLELADLRFHDLGISGYKGNHFTQGALGDFVEAIEQGKVRGGSYLIVESLDRLSREEVDIAFSRFASILRADIKIVTLQDGKVFSRASLKNTTDILVSILVMLRAFEESESKANRIREARDEKHRQARENKKPTGYRPPDWVRTVKDADSGKPKYELIPERAEVIKRIYHLNNSGMGAIVIARLLNEERIPPWGRSKTGWQTSYIKKILKARTVLGEYQPHIVTNRVREAVGEPVFGFYPAVIDPNTFKLAQMTMTARDKRSGGVRKDKVNNLFTGLAKCKHCGNTMHFVDKGKPPKGNQYLLCSLAKTGAVHNGVSCKRASIRYQQTEDAILTVAATLNLKFEPPTNKGEVERLQSQLSEVHADLGTAEEAIVRITNAIAELPDSSGLIAKLAELELQKREKKSEYQAIENRIDELNLVPQASSVWNELQQELKVFREDASDRTNVKLRTKINNQLLNSIDRIEFDNHAKIVTIHIDSKRIVEIRFEEKMKGYTVKPSWDNREFFPNTFIIKEQIRKVHYEKEQ

SEQ ID NO: 18686 - protein, 510 aa, synthetic construct
MKRAVAYCRFSSSNQREESIDAQVRAIKEYCDKNKLKLLKIYKDEAISGTSTKDREMFLEMILDCKKNLFDCVIVHKYDRFARNRYDHALYEKILNDNNVKLISVLEQLVDDSPESVILKSVLAGMNEYYSKNLSREVKKGKKENALKAIHNGGIPPLGYDLDKNKKYVINKKEAEAVKLIFELALDGVGYVSIADILNKRGYKNKRGKEFKKISIRDTLLNIKYIGTYYYGLKDGHGRLQKEPIIIENSHEAIIDKDIFYKVQSKMKKNLKGPRNRNGQLYFLTGYCVCGECGGPFSGGYRSVNRNGSVSYGYYCQKKKRKETKCNNKAIRKELLETFIFDIIKKEVFNDEKVEKIIKDIISFSENKKLIREEEIKEYTKEIEKLQKITLKLLEKNLEGNILDEIFNIKNNELKEKIQVLREKIYSVKNITKINEKELRKYLIKFKESANEQAKRKVVEAFVQEIRVYRDKIKIVLRKFPKDLDMVKIGGDDESRTRVRNHNDYKLLQV

SEQ ID NO: 18687 - protein, 493 aa, synthetic construct
MNRAVAYCRFSSNNQREESIEAQIRAITEYCKIKKLNLIKIYKDEAISGTSVKNRENFIEMIAESKNKTFDYVIVHKYDRFARNRYDHAIYEKKLNDNNVKLLSVLEEMSDSPENVILKSVLTGMNEYYSLNLSREVKKGQKENALKAIHNGGIVPLGYSLDENRKYIVNEKEAEIVRFIFNLALHGVGYANIAAALNEKGYKNKLGKNFKKTSIRDLLMNQKYIGTYFFGLRYPNGKLKENPIIIKNSHEAIIPEDIFYKVQERFKISKKKPRKGKNDYILTGYCTCGLCGGSYSGGYRTKNRHGTVYYGYECRNRKAKVNDCKNKSINKKLLENIIFDTIKKNILNDENIKTITKDLVKVINEKMDTRTEEVNKCKKEIEKLERMSLKLLGKHLEGIILEEIFNKKNQELNQQIYSQKEKLYSLENLHNVKVDEGAILEYLYELKKDSEDKIKRILIETFVQNIKIYPDKLEICLSKFPKVIVKNGTPSRT

SEQ ID NO: 18688 - protein, 530 aa, synthetic construct
MEQYLIYLRKSRSDLEAEAHGEGETLSRHEHTLLELAKRQHLNVTDIYREVVSGDTIAARPMMQRVLSEVEQGVWSGVLVMEVERLARGDTIDQGIIAQTFKFSGTKIITPIKTYDPDNEFDEEYFEFGLFMSRREYKIINRRLQRGRLASAKEGKWPSGLAPFGYRRVKLKNEKGCSLEPIEEQAAIVRMIFDLYTVGLQDEDGSARPLSLGSIATRLNDMHIPSPSGSQWARITIRGIIKNPTYIGMVRWGSRETKKKVVDGKVVSVRGPADPEKECVFKGIHPPLIPKETFELANDKLTRSENTSTHKEKVVRNPLAGLLVCSECGRQMMRMINPVHPDMPVVRCPRRGCPNCSSYLPIVEERVIQGLSEWMKGYELEWSSAAASSSVSSVGVREKALASAEAELRKLQQQLERTHDFLEQGIYDTNTFLSRSRMLSDKIAAAKDSVARCSRELTEEKLRETSRREIIPKVKNLLDVYPLLETAEEKNALLKEVLEKVVYQKLNEKRKKSPDGFTIEIYPRIPKSEK

SEQ ID NO: 18689 - protein, 626 aa, synthetic construct
MSVDIEQIHQEKLAYSYIRYSSKRQEFGDSFRRQTQQTKDFCEKYGYTLANQFEDLGVSGFKDDQEALQAFIRDCESGKIKKGSLLIVESLDRLSRKQTKIALRQMLQILEYVDVYSHHEQKFYRSEADNSDNQMIDLMMSIMVMSRAYNESFAKQKRLKEAWDAARNKAKKGIGKVKGSLPHWLSLSPDATKFIIKEDRTDIIFTMFELSASGMGSTQIIKFLNKNIDKYPSPSPKTKLWVRSTVKRILGDKRLLGEHQFFKADPTNVKKKIPAGDVIPDYFPQVIDEELFYEVQSGMRSRKIKAGRVSSTHFPNVFRHILKCGCCGASMSYVNKGLMNAKVRKPTKYLACSVAKRSDECSQSKHFRYEPIEHMLIHLATANGFMPKVESSADLTVRYEKLLATHEKEQKQLEMLLSRDLTSQIIMDKISALDKSVQRISSEIQALEDLIAANKGQYQYKDLYRDLVLLDDEIMKYSNRAQFNSHMQQEIDLAYLYHRYGQPHLVFKMKSGLVHAALLDQQGTFGGCSLEDGSDTFKRLEGKNSLEDDARLWKLLKYVGDISDDVENADLYAHHRSQIHDLMSKLSAKLSKYVQKPTDESLFEEIYELSDRVYAEIGKNEKVFIE

SEQ ID NO: 18690 - protein, 548 aa, synthetic construct
MDKIIYPYIRFSTKKQEHGHSLTRQITRIKEYALENGYKINDSLELRDLGKSGFKGLNAKEGALSVFLKLLEDEKIPKDGSAYLCIEQFDRLSRMPTDDAYQVFRKILKQNVNIITLMDEKVYRKEDLNNMVSILNSLILMEQAHLESQRKSDLISQIFKGKVKTLKSGGKVQFTYILPGWIDNNGTKEEPDFVVNEKVEVVKMIVDMYLGGETMGHIARILNENQIPQIARKRTKNQTNSWNSAKISHLLTNQTLLGKLHIRTTGDIIEDYYPAVISKDQWDLIQAKKRTQSVTKVAGRRSINIFQGRMFCADCGNKYYFETDDKKGKNGKRYVYHMLKCSGRRFHSCDSESLKYDTMTNPDLFFFRNIKEENSEDISLIKEEIKNYNKDILLLNQEKDEIEDLLDNNEINFKAYTLAVTKITDKVETLEKKIALNKQHLSFSSNEYRMDHFDKNDSENVANAKKFISSNYAAIIISSKHHAMVILLHSGEMMVKPLPNKKANILPVHRAINEIKKNIQDQDKKGLLDGKFKEILDAFNFQDKFVGL

SEQ ID NO: 18691 - protein, 598 aa, synthetic construct
MDEKPRIAHIYSRVSKGTQAKGDGLRRQIEIASKFIEDVNISNSRDGLPVYTLADSPIYDRGLSAYFGLNTDENAGLGAFLKAAENGQVEKGTLLIVEAIDRISRLPVDDARALFARFKKYGIDVAICRFNLIIYHDKSSDLGQDLLITTAIHLAHLESEQKSKRIRARFTHKRLLEKEGGERRTSMSPSWIELSKDKTHFVLIPERARIVRKMVDLKLQGWGAHRITVYLNEQGFPCWNRSNTWYTKIVEKYLKMIQLVGDFQPVEHVHGEKGVRKEPVGDVIKGYYPALITEEEWIRLKASFKRSGGRQTGAFSNLFSYMLYCPTCGSCMSYFKPNRGRIKVRCRKQIDKQGCDQRALNYEEIEPRLIKALAGLDYAKINNNSFASLQKELNTLEAQVAELEASADDIKTQMLEESDPRIISVYVNKLKAIYTEQDKAKARFEKLSTQTSDYDVNTLEQLQLERNEDRERYNGFVRSFVKYVIASDSKLGKPLRIVFKSEAVGEVPVFFNDDKNNKAISDIFTAQKDVNEAAPIRLINMSRVHGNLGKLAAIDTVPVPDDLGDALERIKYLFAVRQAVLQNPEKWQAIADDARLFE

SEQ ID NO: 18692 - protein, 529 aa, synthetic construct
MKKVYSYMRFSRPEQAKGSSIDRQSQYAEQYALEHGLELDESLTMMDRGLSAFHGVHKTKGAFGQFLSAVTAGKVPSGSVLVVESLDRLSREDPLIAQAALTDLILSGITVVTAADNQVYSREEIQQNPFKLIMSLVVMIRANEESETKQRRSNAFLKSALNQYQTNGNIRRLGADPSWLDFNKDDNTYSFNARVDVIRRILSLYNQGIGSLKIARQLTEESIPTLSGKRNAWGQTTVANIVKSHALYGMKRINVQGVDYDLDDFYPALITKSKWLALQQHRSKRSKTMHGRGEVVHLITGHGKGFTTCGYCGGGLGAQTQKQYKRSGEYSKTVTRLHCLTHKETSSCCSSVFLEPIESAVLFAACIGVEPQSLVPTVNNVNYSALIDEIDNKVKHIVEQVTAGAPWELFKDAHDKLKLEKQKLIKERDSQKPDVNQSDVQKWVNKLVELADKARASDKEARLKCRTLINSICKGIVIKLRGHDLKSEPVATITFVTDEQFEFKVGKNGAVQFVDNGMAVNRRLKPLLT

SEQ ID NO: 18693 - protein, 528 aa, synthetic construct
MKVPVWSYARVSTLNQVDGFGIQRQVNTINQFIQYLVLDHRLPFVLDTDNITQMISEGKSAFKGKNWNPKTKLGQYRKMVMDGVVPDSVLIVENIDRLTRLDPFQAVEIISGLINRGTTILEIETGMTYSRYIPESITVLTMQINRANGESKRKSVMMKKSHQNRYGNVSKVRPRWFDVVEVDGIKQYRTNNTAKAIQRMYNDYVNGIGAAQIVRTYGDTDNGKPWTLVTVLRALSDKRVADDARYPSIIDKELYERVQALKISPSKGKTHQKNMLNLFAGMSRCPLCGQAIITKRNSHGGLFTVCLGKRTDKTCTARSIAYNALERPLLNAIVGLDFSEVYGQEESNVLTLRDQWIQNERDIAAFRERLTKASRHEKFAILDELEVMNREQDELTIRLKSVDAPKDITLTYDDDKLDMNVEYRIELNNRMKKLIQRIDIVREDVSKTNYKIFCSIKYWTELLTHLVIIDVDVQRIGRGGTNQLTTTLRSVSSLDLEGNIKGNPDMEALEYWQSVVSKATQKAIESLT

SEQ ID NO: 18694 - protein, 518 aa, synthetic construct
MELDASLSLRDEGLSAYHQRHVRQGALGVFLRAVEDGQVPAGSVLIVEGLDRLSRAEPLQAQAQLAQIVNAGITVVTASDGREYNRERLKAQPMDLVYSLLVMIRAHEESDTKSKRVKAAIRRQCQGWIAGTWRAPIRVGKDPHWVRENNGGGFELISERAEAVRHVIAMFKQGHGAVRIVRDLAERGLQITESGRTQSSNLYRLLANRMLLGEKSVEVDGETYRLEGYYPALLTPAEFADLRYLAEQRGRRKGKGEIPGVVTGLGITYCGYCGAAIVAQNLMGRKRLPDGRPQPGHRRLHCVTYSTGAGCKVSGSCSVVPVERALMLYCSDQINLTRLLEGDGGTAGLCALLASARHRVAEIEAQVRRVTDALLLDDGEAPAAVLRRVRELESQLDVERRDVDSLEHQLTSAASAGTPTTVDAWRELVRGVDQLDYDARLTARQLVADTFSRIVIYQSGFRPALDGGKIGLVLVAKRGSTRMLHVDRKTGEWREAEDVVLPPDRELPLPPTMTAMLA

SEQ ID NO: 18695 - protein, 524 aa, synthetic construct
MRTAAYCRFSSDAQREASIRDQLRNIETYCTRMGWATPALYQDQAVSGSRNDRIGYQAMLDAAELGVFDVLLLDDLSRLTRDHIESATTIRRLKFAGIRVIGVSDGIDTARDGYKLETGLRGLMSEFYLDDLAKKTHRGLMGQALDGYSAGGLPYGYTSDFDGNGHRKRINEDQAKWVRYVFERYAAGASTRQIADELNVQKVPSPRGSSWSHSGIYPDSKGVGMLGNPIYNGRQVWNRTAWVKDPITGRRLRTMRPKLEWVIIESPELTIIDDELWKICEARTIARKRDTAGRRETGKNSGGRNPKYLFSGLLKCGVCGGAFSLRGSRYYGCSTYLNRGQSVCSNSLSVKKDTIERVLLAGVKESLLSNEAFKAFETEARALLKQMKPDSGQAKRKLEGARKELDNLMTAIKEGIITPTTKAAVQTAEQTIADTMEEIKAVERFEPTQMLPRAREIYNDLVTRLEMVEDVAAAREALRGLIGDVMLVPEGGKLTAEIQSAGLAGALYETLVAGAGFEPTTFGL

SEQ ID NO: 18696 - protein, 577 aa, synthetic construct
MSVNKNITNETPKKAALYVRVSTSYQADKDSLPMQRQELIAYAKLMFGIEDYVIFEDAGYSGKNTDRPEFQNMMRRVRAGEFTHLLCWKIDRVSRNLLDFASMYQELKDLGVTFVSKNEQFDTSTAIGEAMLKIILVFAELERNMTSERVTATMLSRAQNGLWNGGRVHYGYDYDKESKTHSINEHEALVVHKMADLYEEHKSLLVVSRILNEEGCRTRAGNEWSPVTICTILSNPFYTGRYRYNHYKFPGVRIEKAPSEWIVIPDHHQRILSDDQFEKINRILRTNSRLQRKPGQQHTSQNTHIFGGLLYCGTCGCQYVSTPSRMQASGYRPSKYACPNLRKTKTCNTKSVSDPVIGEFIINYVLNMMHARRDFSKIHNPSDLQDALLKGGTFEDVDRIGKDGLDSCFNMFTTTPLEGKRFRKPKTVNTIDPELKRLRAEKRKTERALDRLMNMYLYDDNPIGEKDFIIRKQALDDYLKEINESLGMIDRGHGIETISDENFIKRASYFIMGKELADKDYIYFKKLAMDIDSEILRDFFHEIIDSIIMEGSNVREIVFKNGLSHIFFYKNKKEPGA

SEQ ID NO: 18697 - protein, 515 aa, synthetic construct
MKTAIYLRKSRADLEAEARGEGETLAKHRTTLLKIAKEMNLNVLTVREEIVSGESLVKRPEMLALLEEIEDNKYDVVLCMDMDRLGRGGMKEQGIILETFKRSNTKIMTPRKTYDLNDEWDEEYSEFEAFMARKELKIITRRMQRGRIASVEAGNYLGTHAPYGYDIQRLNKRERTLTINSEEASVVRMIFDWYANEDMGANAIRSKLNDLGYKSKLGNEWNPYSILDILKNNVYIGKVTWQKRKEVKQPDAVKRSCARQDKSDWIIADGKHEPIIPESLFEQVQEKLNSRYHIPYNTNGIKNPLAGIIKCSKCGYSMVQRYPKNRKETMDCKHRGCENKSSYTELIEKRLLQALKEWYINYKADFEKHKQDDKLKETQVIQMNEAALRKLEKELVDVQKQKSNLHDLLERGVYTVDMFLERSNVVSDRITEITSTMENLKKEIKTEIKKEKVKKDTIPQVEHVLDLYFKTDDPKKKNSLLKSVLEKAVYTKEKWQRLDDFELVLYPKLPQDGDI

SEQ ID NO: 18698 - protein, 491 aa, synthetic construct
MGLAAIYLRLSRNEEQLNIDEILLNHRNALTKLAKQQKLTYDIYQEISSGVNTERPELNLLLSRLDDYDALLVMDIDRISRDNAHAEEIKKMLIIHDIKILTPQGAIDLSQESNEMLFSFQAMMANFEYKQIRKRLGRGRLAAAEQGKWTMSNRVPLGYKKNEEKRLEVVEDEAKIIRFIFQKTLERVSANEIAKQLDILGWRSRQGKVLTSTHISNMRRNVVYYGVVKAGRKVNGRVVDEVFVEDAHEPIVSKQMFLEVQKILEENTTGNFFNKLKATRKLQNLIYCNCCKRKRYIQCDGNGIDYIKSCIYKVDNNKCRDRGYKYEPIEQFVLQKIKEKKPAFEQELQMLKSLDTTEVEKKLSIQRESLEKQINRFNKRQRNLKEMRMDGEISKAEFYEMRDENEEQIKQVKQQIELIDIKLENLSNTDEEQARLQDAIKKLDKLEELKAESCNTFLKKFLKKIWFSSNTEANHDTTKPREDATIEIEWL

SEQ ID NO: 18699 - protein, 488 aa, synthetic construct
MKYAIYVRVSTDKDEQVSSIQNQIDICRYWIEKNGFEWDEDAIYKDEAVSGTEWFKRQAIQLILAKARKRELDTVIFKSIHRLARDLRDALEIKSILLGHGVRLVTIEEGYDSYYEGNNDMKFEMYAMFAAQYPKTMSVSISAALNAKVRRGEYNGGRVPYGYRVVDQKYVIDDEESENVKELFDLYNQGLGYLKVALYMNDKGLRFIDGKLWRDYHIRHIINNPFYVGDYIAQKYTKIKVDGRRKQAVNPKEKWVVYKNHHPAIIDRELWDKIHNLEKKEKNRTKRRVSVDNELRGLVYCAHCGQPMKAETVKKTKKDSVIKYVYMRCSTYRRTGGRECVKHVPLYYSQVRELIVEKLKEKEQDLEKQINVEHENKNKQKVSKINKEIKEWESKKEKLLDLYLDGQNISKEVFTQRDKKIDKIIREKNMELLKLNSLEEQIKEDNATKKAFDLLKNAENLYESFNKLIKRIDITQNGGLDIFYRFEE

SEQ ID NO: 18700 - protein, 507 aa, synthetic construct
MKRVISYIRFSSERQAKGDSLRRQSKMVTDWLKAHPEYYLDQDLSFRDLGVSGFTGKHLKGGLGDFLTAIEKGLVKAGDTLLIESLDRLSRQDIDIASELLRNILRSGVDVVTLSDGEHYTRESLKDPLSLIKSILIMQRAHEESLRKSERIQAAWNRKKELISEGIKVSRRCPAWLKLNDDRKSFSVIPEKVETVKRCFQLRLEGKSIWEIVRTLNDEGRQTLNQHKAGSFGQSSVQDLLKNRSVIGYFTPKGCEEIAGYYPAIIDETTFYKVQQLSYARYGRKPASDKPLSVNLFKGVIRCSECGHALIITGFSDTRSGIYRCPLRNENRCSAKGLSRKQTDGTLLALLSRLDRFDSDTTNTIDTLKLHREHISSNIEKLVQLSLEIEDLSAITSKLRQLKNELSQVDADIEKETQRLKSIDVGCLSDCDLSTKAGRIEAQLIIRSAVKEVVLNTAKRRCKVTFHNGKVIDLPITENPSEDVTEAIQSLSEVTERGLIDVDEVII

SEQ ID NO: 18701 - protein, 559 aa, synthetic construct
MKTKLYSYIRFSSMKQADGSSYERQKRTAAEIAAKYDLELVTSYQDFGVSAFKGANSRTGALSRFLDEIGRSVPVGSWLVVENLDRISRQSIIEAQELFLSIIRRGITIVTGMDGKVYSKESVNANPIDLLLSVMLFARANEESQTKRNRTNSSALIKIKAHQENPQNPAVAIEEIGKNMWWADTTSGYVLPHPVFFPIVQEVVELRRNGRSTAEILDHLNATYTPPPAASHKRHSNWSRAMIERLFHTRALIGIKEISVDGVKYELKDYYPRVLDDAEFYHLKKSIGVRACNYGDKEEAKPIPLLSGVGLLKCEHCGSAMVKVKGTNRRPNQYRYSCDAMRSSRIECVHTNWSFRGDQLEKAVLQLLADKIWIAEDKANPVPALKVQIDEISRKIDNLITLSAMTGATKELADQITTLNSERESLYNQIKMAEEEMYSVDSQGWEKLAEFDLEDVYNEDRIKVRFKIKQALKRIGCSRIDKYKNLFVLEYIDGKTQRVVIENSRGPRKGRIFVDLKTINDRQILESNGLVLHPCLDMLTDKNWKPEEEIPGPLQEFGI

SEQ ID NO: 18702 - protein, 558 aa, synthetic construct
MSKEKIKVYLYTRVSTSIQIDGYSLEAQKSRMKAFALYNDYEIVGEYEDAGKSGKSIEGRIQFTRMMEDIKSGKDGVSFVLVFKLSRFARNAADVLSTLQTMQDFGVNLICVEDGIDSSKDAGKLMISVLSAVAEIERENIRVQTMEGRIQKAREGKWNGGFAPYGYQLVDGKLFINEEEAVAIRTIFDQYVNTAIGANGLSKYLENHGIRKIPRQNGKNPLFDAGLIRKILKNPVYNGKIAFGRRTLEKVHGTRNEYKQVEQDEYLIAEGIHEAIISDELWQAAQVKLKSQAKKYEHVNKGKDVRTHLLSGIVKCPICGAGMFGNKCIKRRKDGTKYKDFYYYGCKHRLMNRGHKCTYNKQIREELLDDAVAEVIVKIVSNPKFASMMQEKINMKVDTSEIEKEIDNYQKELRKSHSTKFKLIEEIDNLDVDDKHYKRRKQDLDDRLYRMYDKIEELESLLIDAKAKKQTIEAEKLTGDNIYKVLIYFDKLYKVMNDVERRQLITALISEIQIYEEKQPNGQWLKSITFKLPIIEENLNISLDNDEHVEVLCLLERK

SEQ ID NO: 18703 - protein, 532 aa, synthetic construct
MTENNNRVCCLYRVSTDKQVDFNSNHEADLPMQRKACHKFAESKGWVIVHEEQEEGVSGHKVRAAARDKLQIIKDYARRGKFDILLVFMFDRIGRIADETPFVVEWFVRNGIRVWSTQEGEQRFDNHTDKLLNYIRFWQADGESEKTSVRTRTSLRQLVEEGHFKGGNAPYGYDLVRSGRINKRKHELYELHINEQEAAVVRIVFDKYVYEGYGPQHIATYLNNSGYRARSGKCWHPSSIRGMVQNLTYTGVLRCGDARSELMPDLQIVPQEQFENAQRIRNERSVRSTAEAENRLPLNIHGKSLLAGNAYCGHCGAKLELTSSRKWRKMADGSLDDTLRIRYTCYGKLRKQTNCTGQTGYTVHILDEIIDKAVRQIFSKMRGIPKEQIVTKRYEKENTERKNHLQDLQTQRNKAEKDLLALKTEVLACIKGESVLPRGTLAEMITEQEEKLAELENLCESATEELEKTAELMDKVSRLYDELISYADLYDSANFEAKKMIVNQLIRRVDVYRGYQINISFNFDLTPYIEGE

SEQ ID NO: 18704 - protein, 603 aa, synthetic construct
MARKKNIAAGQNAVIYARYSSHNQREVSIEQQVRECMKHAAELGLHVVGTYEDRAISGKTDKRPNFQRMMRDAEKGKFQAVVAWKSNRIGRNMLQAMVNEAKLEDCGVKVFYAEEDFDDTAAGRFALRNMMNVNQFYSENMAEDITRGLYDNASKCMANGRQPLGYKRGEDGRVVLDDANAAVVREIFTRVAAGDLFVDIARDLNAQGIKTSKGANWNKGSFQSICQNERYRGIYIYGDVRVVDGIPRIVSDDLWYRVQEAMRMKKNPVGTRHRVGAEDYLLTGKLRCGHCGSYMTGVSGTSRNGELHYYYTCQKRRTEHACDKKNIRRDVIEPAVAQAIKMYCLTDDVIEWMADRTVEYWEKHDNDLQIEALEQQLEENKKATSNMLKAIEMGIITEATRTRMVELETEQSRLSVQLNTAKEDVVKIDREQIISYLELLQQGDIHDRDFQMELFKNFLVAVYVYDDNRMKLVFSCMGDQNSVEISLETGEDPPDGGLSPDAKMFVLTPDSSTKKALYFVESMVLFFFSAAKNGGCTALSASFSDVLQAIQCSPRVIGASAGQKVPVQLTISSICPNTSSIWRTSVNWVRARSRLWSGRAVWK

SEQ ID NO: 18705 - protein, 536 aa, synthetic construct
MLRQTTRNLITALYPRLSHEDELQGESNSISNQKRILETYAKQNGFSNLQWYTDDGYSGANFQRPGFQAMLADIEAGKVGTVIVKDMSRLGRNYLQVGMYTEMIFPQKGVRFIAINDGVDSAQGDNDFAPLRNIFNEWLVRDTSKKIKAVKRSKGMSGKPVTSKPVYGYFMDEDENFIIDGEAAPVVRQIYSLCLAGNGPTKIARMLTEQEIPTPGTLEYRRTGSTRRYHPGYECKWATNTVVHILENREYTGCLVNFKTEKPSYKTKHSVENPIEKQAIFENHHEPIIDTQMWERVQELRKQRKRPNRYDEVGLFSGILFCADCGSVLYQQRYQNATRKQDCYICGSYKKRTRDCTAHFIRTDLLTAGVTDNLRKVTSYAAKHEARFMKLLIEQNEDGGKRRNAAKKKELEATEKRIAELSAIFKRLYEDSVTGRISDERFTELSADYEAEQRELKERAAAIQAELSKAQEATVNAEKFMNVVRRHTSFEELTPTLLREFVEKIVVHECSYDENKTRRQDIEIYYSFVGKVDLPE

SEQ ID NO: 18706 - protein, 536 aa, synthetic construct
MLRQTNQQPITALYPRLSHEDELQGESNSISNQKRILETYAKQNGFSNLRWYTDDGYSGANFQRPGFQAMLADIEAGKVGTVIVKDMSRLGRNYLQVGMYTEMIFPQKGVRFIAINDGVDSAQGDNDFAPLRNIFNEWLVRDTSKKIKAVKRSKGMSGKPVTSKPVYGYLMDEDENFIIDEEAAPVVKQIYRLCLAGNGPTKIARMLTEQEIPTPGTLEYRRTGSTRRYHPGYECKWATNTVVHILENREYTGCLVNFKTEKLSYKVKHSVENPPEKQVIFENHHEPIIDTQTWERVQELRKQRKRPNRYDEVGLFSGILFCADCGSVMYQQRYQTDKRKQDCYICGNYKKRTHDCTAHFIRTDLLTAGVLSNLRKVTSYAAKHEARFMKLLIEQNEDGGKRRNAAKKKELEAAEKRIGELSAIFKRLYEDSVTGRISDERFTELSADYEAEQRELKERAAAIQAELSKAQEATVNAEKFMNVVRRHTSFEELTPTLLREFVEKIVVHECSYDENKTRRQDIEIYYSFVGKVDLPE

SEQ ID NO: 18707 - protein, 556 aa, synthetic construct
MAMMNEMEYRTIGKALAGGYRAAVYCRLSKDDDLQGESASIANQRDMLEKYCEKQGWEVVAVYQDDGFTGLNMERPDLQRMLRAIERRQINLVITKDLSRLGRNYLQTGHLIEDFFPRNGVRYIAMNDGIDTLRDNNDIAPFKNILNEMYSKDISKKVHSSYLLKAQKGQFTGCLAPFGYRKDPEDKNHLLIDEETAPIVRLIFGYALNGHGPNYIRRRLEEEKIPCPTWWNRERGLRNTRTKWEKKDPENGRYMWDFSVIKDLLMNPVYTGAIASQKKDYRFKIGTIGEKKPEDWIVVEGQHEPLIDRMSFDIVQNKLKSRQRPGQTNEISLFAGLLKCGECGKSLTIRYTNAKHPQRIYSCKTYNAFGKNHCTQHRIDYDTLYSHVLRKIRECARAALMDGEAVADRLTNTCEAEQREQREAMERSLTRDEERIEVLDKMVMRLYEDMIAGRISEQNFNTMLERTQTEQTELKTKVSEGRKRLSDEVQLANDAKQWVEAIQEYANITELDAATLNRLIKEIVVHERIDENKTRHISIEIHFNLKPIPEVEQVTA

SEQ ID NO: 18708 - protein, 447 aa, synthetic construct
MKKVAIYCRESTEKQDIDSLVSLCERQAIKLGFQEYKIYKDVKTGYSNERTEYINLVNDIKSREINVVITYESARLGRDELEHHILYKIFKDYGVKVYNMSHGWVDPNNEDDLFLEGLLNLLDAREGRKTARRVRDRMKEICQSGRWTGGPAPFGYCLKNKELFIDEEKATIVKEIFRLYLEGMPSSKIAAMYDFEPRQIRRMLSNPVYAGKLKYHQVRVENKKKIESKEYEVFDGIHEKIISEETFNIANNMVKNTSTTRFTYPAIFRNLLYCNCGNKLYPAVGYGRRTYRCVHNCLRVVYEDEVLVDVIESIENILNQIDLDTIDSQKKELEERIVFYKKNLTSLKTQIENLTRKYISEQISEELYDKLNSELSEKVKFATSEIEKLNAKSLHVDSSVSNKKIILKYLEKIKKEEDKDKMNQFFSLIIDKIVFINGYRFIIYLKI

SEQ ID NO: 18709 - protein, 679 aa, synthetic construct
MNNMDKKVLIYCRVSTQQQTTDRQKEELLKFAAENHWNVEEEDIFIDVISGFKKGEFRPEYVKMLERVEYGDIDIILFSEFSRLARNATELLEQIKLFIDKGINLYFDKQKLWVRDSNKDVGSIILLHVLAVMSSYEIELFVERSLSGKITKVQAGHGGGDERAYGYMHNENKQIVINPIESKIVTRIFEMYVGGYSSIQISEILNAEKVPAPYVRKLNEYKKNREAKGLEVKEYKFDTDNLKWRISTINRLMHNELYKGNRRITFYKPDPTNPLPLSERQDREIVYEYSEHVESLRIVSDELFQQAQDKLSKAHYNKNNAVRHENLLKHLMVCGECGANFSVGKSNETSKNYISGGRTYKCYGRVNRKDKPRTCTNGAELRQWKLDGLVLQLSIQMFAEINIQQTNILKIENLGKEIEELVQIKSSKNTELVEAENLYKKTLKRLIAIEDDEVAKNLISDAKHKYDETKNVLNKTMDKLSREITTKRITIDNLKRLNANPLLINKMDEIRKNRDLVKTMVDEYIDKITIFRLHELWLLVVVSYKGGEEMWGTIKCARYKKEEMFYDELHCHYGVEFQGWLLNNTEHCFSYDKSTRIITYHGGSKIYVEFKSGEYDYDTFNQMIQATGWMGCFPFYAYEDSGKDLSVPSNEDFGKSLQENRTDWKVHNDKVLERLLSKS

SEQ ID NO: 18710 - protein, 679 aa, synthetic construct
MNNMDKKVLIYCRVSTQQQTTDRQKEELLKFAAENHWNVEEEDIFIDVISGFKKREFRPEYVKMLERVEYGDIDIILFSEFSRLARNATELLEQIKLFIDKGINLYFDKQKLWVRDSNKDVGSIILLHVLAVMSSYEIELFVERSLSGKITKVQAGHGGGDERAYGYMHNENKQIVINPIESKIVARIFEMYVGGYSSIQISEILNAEKVPAPYVRKLNEYKKNREAKGLEVKEYKFDTDNLKWRISTINRLMHNELYKGNRRITFYKPDPTNPLPLSERQDREIVYEYSEHVESLRIVSDELFQQAQDKLSKAHYNKNNAVRHENLLKHLMVCGECGANFSVGKSNETSKNYISGGRTYKCYGRVNRKDKPRTCTNGAELRQWKLDGLVLQLSIQMFAEINIQQTNILKIENLGKEIEELVQIKSSKNTELVEAENLYKKTLKRLIAIEDDEVAKNLISDAKHKYDETKNVLNKTMDKLSREITTKRITIDNLKRLNANPLLINKMDEIRKNRDLVKTMVDEYIDKITIFRLHELWLLVVVSYKGGEEMWGTIKCARYKKEEMFYDELHCHYGVEFQGWLLNNTEHCFSYDKSTRIITYHGGSKIYVEFKSGEYDYDTFNQMIQATGWMGCFPFYAYEDSGKDLSVPSNEDFGKSLQENRTDWKAHNDKVLERLLSKS

SEQ ID NO: 18711 - protein, 576 aa, synthetic construct
MENFDLKGFAKGKKQQKEQIGGNAIIYTRVSSSEQVDGQSLEVQIDKCREYAKVRSYTVVGEFGGTYESAKSDKERKEFNRMLAFIKQSNKKGSSQPVKTVIVFSTSRFSRTGSTTIIEEVEARGAYVVSATSNYDPRTPVGKYMQLMELANARFQNDEKRATTIENSVKALLKGRWIGKAPRGYDQKTTKKEQIITINEEGKLIRKAFLWKANNKLSNEEIRHRLAAEGFHICKQKLSELFKNPFYCGYMAHKFLQGDIILGNHPPLIPKEIFLKVNGELSKNHSGYEQKIDKEYAPLLGSIKCPCCGKNLSASISTKMRKRFGRTDIGYYVCSRKGCKYNSSTKKVHEAFEEEVNRYALSDKVSELLKMQLTITFEYMNQENRERAKSIKANIKAKEKELEQVETNYALCTDAKKQSICEKVMTKLEKEVRDLKTEFSKVNTEILNLDKFIDFAFKMRSNLFGLWELQGLEGRRRLQKLVFPDGFIYDKNNEHIEPKRVNQFFLLKYSYPTDNGDKKKETNRGKHDSSLRVLEAGLEPAQPQWPRDFKSLVSTDSTIRASSTRESGKRDSNSRP

SEQ ID NO: 18712 - protein, 558 aa, synthetic construct
MKGKIALYSRVSTSEQSEHGYSVKEQEQVLIKEVVKNFPGYDYETYTDSGISGKNIEGRPAMKRLLQDVKDNKIEMVLSWKLNRISRSMRDVFNIIHEFKEHDVGYKSISENIDTSNASGEVLVTMFGLIGSIERQTLISNVKLSMNAKARSGEAITGRVLGYKLSLNPLTQKNDLVIDENEANIVREIFDLYLNHNKGLKAITTVLNQKGYRTINQKPFSVYGVKYILNNPVYKGYVRFNNHQNWAVQRRSGKSDKNDVILVKGKHEAIISEEVFDKVHEKLASKSFKPGRPIGGDFYLRGLIKCPECGNNMVCRRTYYKTKKSKERTIKRYYICSLFNRSGSSACHSNSINAEVVERVINVHLNRILSQPDIIKQIASNVIEELKQKHSNQTEIKYDIDSLEKQKAKLKTQQERLLELFLDDQMDSEMLKAKQSQMNQQLEVLDQQIKEAQQANQSQDEIPNFDKLKGRLILMITRFSVYLRKATPEAKNQLMKMLIDSIEITTDKQVKLVRYKIDESLIPQSLKKDWGSFFMPKFQFEIYGQNDYFIDQITTFTT

SEQ ID NO: 18713 - protein, 540 aa, synthetic construct
MAQAATAKKVVIVPIKTMDIVEGIQSIQKKKVAAYCRVSTDSEEQKESYTNQVNHYTQYIQNNLEWEMADIYADEGITGTNTKNRTHFNRMIQDARNGKLDLILVKSISRFARNTLDLLKYVRELKSLGVAVFFERENINTLDTTGEVLLTILSSLAQDESRNISENSRWGILRGFQNGKVFCNTTRFLGYDKDEHGELVINEKEAEIVRRIYEEYLDGKSYQAIARGLIRDHIKTVTGGDTWWDSSITLILTNEKYYGALLQQKTVTVDFLTHKRIRNKGQEQQYLIEDNHEPIVSKEIFDAVQKEKERRAKLKGSVMGESKRYSSKYALSSKVYCGCCGAIFKRRTWNSNNPSKKVVWQCKTYVNEGKAACDAKSVDEQVLHSAFVRLFNRMYENKERFMKTLKANIVSVLSSKVGREPLLEIEGQMQQLKSDLKELVNLKLRNQIDESVYAEETNRLSSELNELRQQMLILEEEEDQKEKIKERVDEIIQVLSSRQDILEQFVDNLFNALVEKITILSPAHFVFTLKSGMSIDEILD

SEQ ID NO: 18714 - protein, 625 aa, synthetic construct
MKCVAYIRVSSESQVEKGDSLDGQKYHIDKWCKEQGYEIVNYYEDAGYSAYSGKRRPSFEGMLQFIQSENQHEKVIDAVVVYNLSRLTRRVEEQVRLIGIFKRFDVELKSIADNLIDWDSTTTLLFNILGSVNEHQSALNGKTVTDRLYDTARKGFFTGGTVPFGYKSINAGKTNDKQRKKLVVDDSEAEYVKQIFHWAKGDISNQPMGVKKIANKLNELKITNRMKLWNKNAIGKLLNNPIYIGQYIYGKTSKYEEKEPIVVPVPPIIDEELFNTVKKGLKQRELKNRELAAWNTKYLLSGILKCPKCGSKLVMMTGKSGSYKYYDCGKKIRKGKSLCGFKPIPKDKIECIVLDKIFAEVFTPKNIMGISKDLRKRYSECFAKDANELTRLTRKLKIEEDKLHKFIQKFYNEPTEVQFSSVSDFIKKQEKEVLEVKNAVVKLSKNSKELPIMKFGEAQAQLFCTKLSKCLRESTDSNANWLLKSLITDIKVEWNEKKKLRIRGKKIVLLNCVSKTKTGTDFSVPVSVSRWWRDRDLNPRTAINGCRFSRPVLSTTQPSLQQIVINRLVHCRCCYMYTQVTIFKAWQCPTLTWGNPTLPSALLCFTSEFGMESGGSTMLWSPSKF

SEQ ID NO: 18715 - protein, 540 aa, synthetic construct
MKHAVIYTRVSSKAQLKKGDGLASQERRCREFAAYKDYKVVEVFADEGISGGLADRPGMKDMLSWLRKHRSDEPIVLIDDVSRLARDTEVHRKLRSAFGSIGASLESPSIEFGEDADSILFENIVASMAQHHRQKNGEQVVNRMKARLMNGYYAFWVPTGYKYARVKGHSGKFMLRDEPNASLIQEALEGFATGRFQTQAEVKRFLEPHPIFTRDLNGEIHPQRIKNLLTNKIYAGYYEYKPWGVPLTQGKHEALISWETFQLIQKRLNEKSHAPTRIDAAEEFPLRGFVTCGCCGHPLTAYSAKGRNKLYPYYECFNKGCDERRRSIRRDVLETEFEALLKQMRPAAGIMSTFAAMIRDIWDNRIQRIKEKCDEQKRAVNGINATIGKLTDRLIETTSPSAIRAYETKLEKLEAEKALISENLAKKPDLNRDFDKSFRTALSFLASPWNLWDSPNPMQRKTLLKLVFAAPLPYVRNQGFRTAKTTRPFKVLAALSDDENEMADREGFEPSIRLPVYTRSRRAPSATRPPVHPKQHRSPA

SEQ ID NO: 18716 - protein, 547 aa, synthetic construct
MEREDAEELRALGFTDEDLAELGLDKPAVGEPSELADVYLRRSKKREDLATLRGHLRDIVRYNRAEGLQIRHVWFEQRSASKAHIRRDEFENAKAAVLAGRSKTLEVWKTDRLDRRGMGEVGGLLDELDRRRARLVSTSEGLDSSKGGRIVFAILSERARDEAKDIALRVQIGLDSHRILGRAPGGKPPFGVKFVGEGKVGPNPVEYPTARKIAEALLAGDPATTVAHRLTADGEKTRTGRHWSANAISRMAQSPLWAGLVPYRERKTDEYGNPIDKWGWKAEPLVGADGHPVSCGTGVVSLTEWYAIRSYFSSRTVRGIKGRHGVKSPGKLLTGIMRCPHCKVGMVSGGDSYRCRTRMEGGPAACFGVRTKASRVDEAMGEFWVTHVSALDPEDPVLHEIAQRWYAYQDPEKEERRKHVSAALDDAERRSSELDDAYFVHGRMKGDRYASLSKALAEQLSALKAELTELRRQTDLTPLLDGVLLAEAWHAATLGDKRMLIRCAVDEMELLPSTGQGDRRPISDRLKIKWVSVGAPDAEGEPEEGNK

SEQ ID NO: 18717 - protein, 558 aa, synthetic construct
MTKLYSYIRFSSMRQSDGSSYERQIRMAKEIADRYNLELVNDYQDLGVSAFKGANSKTGALSRFLDEIGRSIPVGSWLFIENLDRLSRQDIISAQELFLSIIRRGITIVTGMDNKIYSIETVTANPMDLMFSILLFIRGNEESQTKRNRTNSSALLKIKAHQQNPQSPAVAIEEIGKNMWWTDTTSGRVLPHPVYFPVLQKIVQLRQEGHSAGVILDYLNEHHEPPAPTSNKKHGKWSRAMVSRLFTTKALIGVKTVNVDGVEYELRDYYPRVLSDSEFYFLRKNIIKKAWDYSHVKEKVIPLLSGIGVLRCVHCGATMVKQTAANGKREQYRYCCDGRKSGRTDCPYPNWGFRAVTLEGAVLQLLADKIWIAEDKTNPIPEIQVKIDEISRKIDNLINLSAMTGATKELANQITDLNSQREALHEEIRLFEREMYSVDSQGWDKLAQFDLSDVQNEERLKVRMKIKGALHEIECSRIDSKKNLFVLVYLDGLRQRLVIENNRGLKKGQIFVDLKTINDRQILESAGMVLHPCIEMIIDADWKAPEEIPGLLSEEFGI

SEQ ID NO: 18718 - protein, 542 aa, synthetic construct
MKLQKVLDLFNVAIYIRLSREDGDKEESDSVGNQRKLLAEYIAKKEDFILYDVYVDDGYSGTNFNRPSFQRMIADIEDGKVNCVVVKDLSRFGRDYIDTGRYLERYFPEMGVRFISVTDGIDSMKQAYDMLLPIKNIFNEQYARDISKKIQATVKSKQKAGEFIGAFTSYGYKKSPVDKNKLVIDDYAADVVRRIFSLYIQGYGKQKIAKLLNAEGVLCPAEYKKVNGENYKNCNRLESTTYWSYSTINSILHREMYVGNMVQGTKHQRMRSKQKKMPKEEWIVVENTHEPIIDKATWEKAQSLLQKRTRELDLETNKNIFAGFVKCGDCGRAMAKNMWRRADGSKTYSLYCGTYKRNGKQYCTPHTLPMVVLEDIVLGDLKAIVDNVDNLKELVQSQSFTASKVKRIADTELSKIKAELERVKKLKKSVYEDYREELISKEEFLSYREDYLKKEELYSKQIEALEEKKNDNVTEDVFETPWLKRLLELKDIEALDRNIVVEMISEIKVYENRKIKITYNFGNELEHLFSSVYSVESEEKVI

SEQ ID NO: 18719 - protein, 510 aa, synthetic construct
MSYFIYARKSRKDAELEALGIDVLERHITTLLELAKTLSLPIGAIYREVVSGDSIDARPVMTQVLSEVEACMWDGALVMDVDRLARGDTIDQGRVQRAFFYSNTRIVTPNKTYDPANEYDNEYFEFSLFMSRREYATIKRRMQRGRERSSSDGYYVGNVAPYGWERVVAQDGKHYSLAPSQTEAPVLDLMYDLCGNKQYGYQKACTYMTNMGILARSGKPFTPSTLKGIISNPANIGKVRWGHRKTVRAVKDGRVVKSRPKATDYILSDAAWAPRISADLFKRANQPKGCFSAPVRSDRPIQNLFAGLVRCSQCGRLMVRKKAQTKTPYDMLICQYAECSTVGIRIDELEEALLGWLKDYIAKYEFADTHEEDTAAIAAKELIVTNFETEHQTLLKQRESLFDFLEQGIYTKEIFIERSNALEQRIRDCMNNITAAREDLHTTIARQANRKNFVPKCKNLLSEWDSLTVSEKNSALRQLIDRIVLTKTKRNKKNQKNSEFTIDVYPKVPK

SEQ ID NO: 18720 - protein, 563 aa, synthetic construct
MLKNIQSVTTGNTFTTSPIKETDTGITALYCRLSQDDGNVGDSDSIINQKKILAEYAERNGYTPYQFYIDDGFSGTNFERPQFKQMIEDAKKGTVKRIICKDLSRFGRDYIKVGLYTEFIFPDKDIHFIAVNDDVDSNVQKDNDLAPFKNLFNEWYARDTSKKIKAVKKAKGLAGEHMSCVAPYGYRKNPDNPKEWLIDEESAEVVREIFRLCVDGYGPRRIANILTERKILIPSAYALEKGYAVRNNIPKNPCQWSSTVVVDVLERMDYLGHTVNFKTHRKSYKQKKKIENDKSEWKIFENTHEPIIDKSTFDIVQKIRANRKRPTKMGEMPMFSGILYCADCGKKLSFHRRANDPDTKHNFVCSNYRSDTHNCSMHYIRNVVVEQLVLENLREVVSYVKAYEDEFVQMVMDADIKQKSKELAKKKRVLSDKEKRYTQLDGLFQRIYEDNVSGKLSDERFVKLSQGYDAEQKDLQSEIEALRMELSQEKQQSVNVKSFLSTVKKYTEIPELTSEIVHEFIDRIIVHEADKSSGKRIQEIEIIYNHIGVFDRSKVNVYMGKAV

SEQ ID NO: 18721 - protein, 566 aa, synthetic construct
MQGKTPAYAYIRMSTTEQAKGDSERRQLGLMERFLSENNAELVEPVFLDRLSSFTGKNLKKGAIKDFLERVKQGQIPKGSVLVIESFDRISRQGGYIAHSVILDIIKNGVDIATLSPYKKYSINSEHQFIEGIEIQTLLYRAHEESKTKSDRITRQHQARREKAKDKNVVYGSLPFWLVRTADWIEFKEPEASDVKTCLSLLKTYGMYTATAKINEQRKSSKIFSKETVSHLLNRSAVCGDLQTHRIEYDEAGNKIRVPGEVIHDYYPALISRSEFEELRAEIQSRRTTKSTGRVSGFKNIFRNVMTCSYCFAPMRLSHMKWKNGEKKYLVCTKSETNQCIQSGRLWYDYGDVERVFFNEVNLSILKKSLTQKTKIDDSEIEKLRSNFLKSEEQKANILKAIETGTVSKTLVNRLEELEKDSDEIQKRIDELKAENALKRSQNEAEIFDYEQLDAALKDEEQRAIINKILRTNQAEISISKGHDGCDFVIEISIGDTLETEISYHKQDDFINRIEHQLPHNQTTDVVVHEDQTDPYADEIEGQVFEMFDSASMPIIEINQHKKTTD

SEQ ID NO: 18722 - protein, 523 aa, synthetic construct
MIADLYIRVSTDEQADKGYSQRDQEERLRLHCDRLAITIDRVIFEDHSAKSFDRPEWKNYLQSFKRSRGYREERLILFTKWDRFSRNTSEAYQMIGHLKKNNILPQAIEQPLDLSIPENKVLLAIYLSTPEVENDRRALNVTNGMRRAIKEGRLMGIAPYGYVNKCTEDGRKYVAVKQPEASNIIWAFEQVAKGHLPTAKVRVEMNKREGKNISSNAFMVALRNVTYCGKIYVRAYKNEEEDIVPGKHEALISEELFLKVQHVLKKKGTKDLRLPGGRIINEERYPLRGLLLCPNCGKNLTASSSKGHTKHYYYYHCTTACGFRHHSDKVNKLFKEELSKYDFPAGILEILKKIIVKNTKSTSENFDGERSTLKSRISELNDRISKARDMYLSDKIDEEDFRDIKNRYKGELDDLEYKLSLLVKSERKEGVEDKIGKALKIVGNISERYINASPIDKRAIVSLIYPEKIIFDGSDFQTSKINSFVDIIFLIRRELSKQKKGDLNSKNLNPRLVTSTGFKPVTF

SEQ ID NO: 18723 - protein, 532 aa, synthetic construct
MVIADLYIRVSTDEQAEKGYSQRDQDERLRKYCANNNISINKIIYEDHSAKSFERPEWKKYLLEIKKKSHKSSLVLFTKWDRFSRNTGDAYQMISLLQKNHIIPQAIEQPLDMSVPENKLMLAIYLSTPEVENDRRALNTFHGMRRAKKEGRLMGIAPYGYINRSHEDGKKYIAIKDPEASNIIWAFNEISKGHIPADHVRLQMNKREGVSMSRSAFAKAMRNPVYCGKIYIEDYKQEEAYYTEGKHEALISERLFNQVQQIMDKKRKVEGPGGRVLGNERFPLRGLLVCPRCGKNLTASGAKGKSKTYYYYHCHYKCGFRFDSDKLNELFELEISKLEYNPIIKELMKEILLDNYKQFTYDIEAKRKSISKEINLLNEKVANARDKYLVDKLDEEDYKEIKRITKSQIEQLEQELQQMVSDSKELDIRTKIENALDGMENLANLYQQGDLQTKRTIGCLIFPQKVEFDGKSFQTPKMNIVAQCIYQYNNGLGNKKNRHRRVKSSNVGLVNLTGRYPNSFFTDLESVLILFC

SEQ ID NO: 18724 - protein, 536 aa, synthetic construct
MKIADLYIRVSTDEQADKGYSQRDQHERLEKYCQQNEITIGQVIFEDHSAKNFNRPEWNNYIQNIKKRSLRSNLILFTKWDRFSRNAGDAYQMIKLLLSNNISPQAIEQPLDMSIPENKMMLAIYLAAPEVENDRRALNTFYGMRRAQKEGRLMGTASYGYINKCSEDGRKYIALKEPEASNMRWAFNEIAKGKYSINQIRLKMNTMAGTKISRTSFYRAIKNPLYCGKIYIKPYKDEDACTVDGKHESLISESLFNKVQMVLSGITTTERPKGKINAAKEFPLRGFLKCPRCGGHISGSGSKGKKSIYYYYHCNSTCGYRYRSNIINCAFEKELQKYEYHEGVNTLLKEIIFTNFKYIQEDIDAQKKEISSQIQSLNNRLNNAREKYLEDRLDYDDFNFIKNECKKKIDDLEISLQNHKLSNKNSDIKLKLDRVIKIVPNLYKLYVQGNDETKNTILCSILAEKLEFHENSFRTPKLNSALSHILLISNKLKDKKKGKSTFENAFSRKVTAEGFEPSLSEPKSEVLSIKLCSRIH

SEQ ID NO: 18725 - protein, 690 aa, synthetic construct
MSSTDLIPAALLARKAVVYVRQSTQSQVMTNLESQRRQYDLVDIARQRGFGDIEVIDDDLGRSASGTVARPGFDRLVALLCAGKVGAVLCFDASRLARNGRDWHHLLELCGLVEARVIDHDGVYNPCRPNDRLLLGMKGSISEFELGVLRARMLDAVRSKARRGELRLSVPFGYIWHREAGLGLDPDLRLQEVIRSIFTRFHELGSARQVLLSMTKDQVHFPRPSDEGRMTSFVWTPVRYRNVIGILKNPFYAGVYVYGKSEKRIAIVDGRARRTYGHGKPAGTWEVMIRDHHEGYITWDEYERNQQQLALNNYGRSGGTKSGRGGKALLSGLLTCGRCGRRLSVAYTGNPQSRPVYRCDKPNLMMGLPRCMTFGGPRVDAAVARELLRAVEPLAIEATFEAERMHRERQEDQRHIHDLELRQARYEASLAERRYAACDPDNRLIAAQLEKNWETALRRVRDLEVRKPADSPSTIEVDPDTFTNLADNLQAAWDSPDVTMRARQQLLRTLIADIVVDVDDAVREVVLTIHWKGGQHSELKVRKPQSGEHGCATTEDALAVMRSMAGRWSDEHIAASLNRMGMPTGQGKTWTAHRVASVRRVRAIHAYKSADKDGEWMTMTEAAAALGVTNHRIRHLIKTKVLSAEQVVPGAPYQIRASDLASATVQAAIARKARPCRIADAETLPMFTDT

SEQ ID NO: 18726 - protein, 551 aa, synthetic construct
MPTAYAYIRYSSKAQGEAGRDSVDRQMASIQAITKQQGIELRPENIFSDTGVSGFDGSNKNKGKLKDLIDLIINQKIQEGDFVFVESIDRLSRQKMRLSKDLVYTILDRGVTLVTTIDGQMYSRNKDGMEQDIMLSVIAQRAHEESKTKSIRRKSAWNRAKNLADEEKTIFNGHNPPYGISFNKEENRFEIVEEEAQEIRDIFESLKYVGVSLTIKKVNEYSKRKWTNRNIKHLLDTKYVLGSYMAQKRDENKKKVFERYIENYYPQIVSFELFNEAVASMKNRAHRKHYGNQTVGSLNIFRHSIKCSNCNASMLFEKQTNPKGVVYPYFQCFTRKELKNGCDQPRFRFDLAFGVFLELVKFATTSSETINPNEWNNETASVGSFHKTLFKLLTSTEKDKELEKKISHVKNLLLEQKNYQDNINKSFEAFTDGIIPAAFIKKASETEIKIEALERELAELNIESSTRNVSLMVHSYNDIIDLYSTEAGRLKINSFFTSNNIAFSFSFDQKARMLRCKIYYKDIHVDVINKKFPLHNPLKEFGIDNLNQYFN

SEQ ID NO: 18727 - protein, 564 aa, synthetic construct
MNLLERTSLEQASGDVGLRAALYLRVSTGRQAESDLSIPDQRRQTEAFCKAKGWQVVIEFVDAGLSGTDDRRPELQRLLDLAAADDAPFDVVVVHSFSRFARDHFALEYHVRRLRKHGVRLVSITQDLGDDPMSVMVRQVFALFDEYQSKENAKHVLRAMQENARQGFWNGSAAPYGYAVTAAEQRGAKTKKRLTIDPVEAEVVRLMFRLAHKGNGTSGPMGVKALTCHLNEHGYRTRRGARWGIGPLHKLLTSTTYKGEYRFNRKVWKTREEKPAAEQILVPVEPIVEPAVFDAVQARLKSRNPKTVAPRVVTGPILLTGLATCATCGGGMTLRTGKSGRYRYYTCATCAQQGKSACPGRSIPMDKLDNAVTGELSASLFTPERIHALLGGLLTRQAARSADHAQRLSALQNKVADCDSRLSRLYEAIENGVADVADPTLKERLATLKAERDNARTAHERVLRELQPEARITEEKIAAFAALMRDNIANGPIPFRRAYIRSVIDQVEVDDHEIRIHGRKDVLERLVMGDGAVPAGVPSFVRKWRTRHDSNVWPPPSEGGALSS

SEQ ID NO: 18728 - protein, 662 aa, synthetic construct
MKVAIYARYSSDNQRDASIADQFRMCRLHAEKQGWHIVEEYSDHAISGASLIRPGIQALMADAMGGRFDLILAEAMDRLSRDQEDIAGIFKRMSYADVKMFTLSEGEVTHLHVGLKGTMNALFLKDLADKTRRGQRGRVEAGKSGGGNAYGYDVVKKFDANGEPIRGDRTINEFQAEVVRRIFRDYAAGKSAKTIAFALNKEGIPAPSGGDWGFSTINGNPKRGNGILNNEMYIGKIVWNRQRFVKDPNTGKRQARPNPEEEWVIQEAPELRILDDDLWSAVKARQEKNKIARKENGEADLSRINTRRRPKYLFSGLTKCSCCGGGYSAISATLIGCATARNKGTCDNRVNIRRDELESRVLNALRTKLVDPELFAHFCEVFTQEMNRLRMEGRAEIASAEAEIAKIDRELETLLNLILKGGAADALNAKMVTLEKRKKELDLFLTEADEPPPLLHPSMALQYRKRVQQLYDALQDEDEGKRIEAADTLRSLVDQIVLTPVDGKVEIDVQGDLAGILTISTQSKNPAAGATGAQVKMVAGAGSGFAIGIFASLLGVAGGELLIPTLVVLFGLDIKLAGSLSLAISLPTMIAGFARYSQDRSFAVLGRNRRFVVVMSAGSVAGTLIGGQLLGLVPNAVLLPLLAAILLVSAYKIWRHEEAAPA

SEQ ID NO: 18729 - protein, 656 aa, synthetic construct
MTSTDLIPAALLARKAVVYVRQSTQSQVMTNLESQRRQYDLVDVARQRGFGDIEVIDDDLGRSASGTVARPGFDRLVALLCAGKVGAVLCFDASRLARNGRDWHHLLELCGLVEARVIDHDGVYNPCRPNDRLLLGMKGSISEFELGVLRARMLDAARSKARRGELRLSVPFGYIWHREAGLGLDPDLRLQEVIRSIFTRFHELGSARQVLLSMTKDQVHFPRPSDEGRMTSFVWTPVRYRNVIGILKNPFYAGVYVYGKSEKRTAIVDGRARRSYGHGKPAGTWEVMIRDHHEGYISWEEYERNQQQLALNNYGRSGGIKSGRGGKALLSGLLTCGRCGRRLSVAYTGNPQSRPVYRCDKPNLMMGLPRCMTFGGSKVDAAVARELLRAVEPLAIEATFEAERMHRERQEEQRHIHDLELRQARYEASLAERRYAACDPDNRLIAAQLEKNWETALRRVRDLEVRKPADSPSTIEVDTGTFANLADNLQAAWESPDVTMRVRQQLLRTLIADIVVDVDDEVRDVVLTIHWKGGQHSELRVRKPQSGEHGCATTEDALAVMRSMAGRWPDEHIAASLNRMGMPTGQGKTWTAHRVASVRRVRAIHAYKSADKEGEWLTMTEAAAALGVTNHRIRHLIKTNVLSGVGSGRGRNDTLS

SEQ ID NO: 18730 - protein, 558 aa, synthetic construct
MNAKASPALASPGRAALYLRVSTGRQAEHDLSIPDQRRQLQAYCQAKGIAIAAEFVEPGASATDDRRPEFQRMMDAAAQKPAPFDFIIVHSFSRFFRDQFQLEFYVRRLAKNGIRLTSITQDLGDDPMSVMMRQIMALFDEYQSKENAKHTLRAMRENARQGYWNGSRPPFGYRIVAAEQRGARTKKKIEPDPDQVETVRLMFRLARIGSDDGPLGSRQIADYLNMRGIRTQTGGRWGVGAVHQILTRETYIGRHRFNVSGKRKGEHKSEDEIVDVAVEAIIDEQEFAEVQAVMRSRSPQLRAPRFVTAGTLLGGVCFCADCGGAMTLRTSGKGDQYRYYTCCTTARQGKSACRGRTIPMDELDTMVVAHLEERLLASERLEELLAGLLKRREEHAQRLKGRVAELRKQAADAEAKLTRLYEAIENGLAEMDDSNLKGRIVELKRIRDAARADADRAENRGEGDDNRVTPELLRRFGVEARKKIRDRDGGFRRHHLQALVQRVEVGADEIRIKGSKPRLLQTLVASGGNCGVETATHGVRSFVPNWLPGPDSNRRPID

SEQ ID NO: 18731 - protein, 695 aa, synthetic construct
MKSELVKPTHLARRAVVYVRQSTPHQVISNQESLRLQYALRERARELGWHEADIDVIDADLGISGASTTGRNGFKELVGRVGLSEIGLILSIDVTRLARNCSDWYPLLDICGLRGCLIADRDGVYDPGSANGRLLLGLKGTISELELHTIRSRLTAGLLAKAERGELALMLPVGLVRDASGVVVKDPDLGVQERLELVFRTFLKFRTVAKVMRVLNDRDLPLPRRDRFGELRWARATVSAVARILKNPAYAGAFVYGRTRFRAAGRDGGSEAKTPKDIKDWRIIVKDRYPHYIDWSTYEKIRDIVRDNRAEYMRAKTRGAPRDGELLLHGIAWCGRCGYKMYVRYKGGGEYACNHLHSHSGLPDCQRVRAAQIDAAVADAFLAALAPGELDALARARQAQQQVNKALRAGAERELERKRYAAALAERQFNRVDPDNRLVASELERRWEAALSELRAAEDAVAQRASTEPAKRTGFSKDLNNKVVALFDSLPQIWANDATTDAHRKALLRCLVEKVVLDRGERDVALARIVWRGGAVTDLHVKMKVNSVAKLTRGEELRARLLELALTGVPDDQIAEILTREGHHSPNCEDKVLPITVQRLRLAAGIKAKAQRNRWTHEPTLLSAVQLAARLDIPVNWIYVQIRRKRLLIDQQSTGAYLFQNSPAVVNAVRDLRNRTINHLDLRIIQPHQEGHQHA

SEQ ID NO: 18732 - protein, 532 aa, synthetic construct
MKPKAYSYIRMSTDVQLKGDSLRRQSEESRRYADENDLDLVEDFRLEDIGVSAFHGKNVAQGALGEFLVLCEQQIIQAGSYLIVESLDRISRQNPQVATSLFLQILGAGINIVTLTDRHVYRAGSSDFTDIIVSVVIMSRAYEESRTKSLRVGAAWENKRRNIHDKKLTQVAPIWLRLSADRTAFETVPERVAVLRWIFDEADQGKGSLQISRALNQQGVPTFAPSKGWYESYVSKVLTNRAVLGEFQPHRYIDGKRMRSGEPIQNYFPAIVTREQFERIQVGRAVRRVRGAGRKGQNNINLFQGVATCGYCSARMMIVNKGTGPKGGVYLRCDRARRSADCSASGWPLDHFEGAFLWFVEELDIGAIVQGAASEEARKALEGQAATISADLETQKKIRERAFDLLGEPTSATAFVRGKIDDASMKIDELERKLASIKEATMIAAASQKRPLEEVRLMIKEIGGWQTADGDSRSRVADWIKRNVRELLLFTNGLDQSDQVAADAKLRQFSVTLTGGEFRTGLSGILCGGPVH

SEQ ID NO: 18733 - protein, 507 aa, synthetic construct
MKRVISYIRFSSERQAKGDSLRRQSKMVNDWLKAHPEYYLDESLTFRDLGVSGFTGKHLKGGLGDFLTAIEKGLVKAGDTLLIESLDRLSRQNVDRASELLRNILRSGVDVVTLSDGEHYTRESLKDPLALIKSILIMQRAHEESLRKAERIQAAWDAKKEAAKAGIKISRRCPAWLKLNDDRKSFSVIPEKVETVKRCFQLRLEGKSIWEIVRTLNDEGHQSMSQYKPGSFGQSSVQDLLKNRSVIGYFTPKGCEEIAGYYPAIIDETTFYKVQQLSHSRYGKRSVSAKPLSVNLFKGVIRCSECGHALIITGFSDTRNGIYRCPLRNENRCSAKGLSRKQTDGTLLALLSRLDRFDSDTTNTIDTLKLHREHISSNIEKLVQLSLEIEDLNAITSKLKQLKGELSQVDADIEKETQRLKSIDVGCLSDCDLTTKAGRIEAQLIIKSAVKEVVLNTAKRRCKVTFHNGKSITLSITENPSEDVTEAIQSLSEVTERGLIDVDEVII

SEQ ID NO: 18734 - protein, 512 aa, synthetic construct
MTNIPANRRAYSYIRFSTPDQVKGDSARRQIGMAESYAARHALILDDSLSLKDLGISAFRGQNAKSGALNLFLEHVRSGDVPEGSFLLIEALDRLSRQTPLEALDTLRDIMREGVTVVTLDNETVYTTETIHTSFTQLIVTLMLFSRANEESATKARRLKQAWEGKRLKAATTPLTAVCPAWLTLNNQRTAYELVPDRADTVRNIFEMCLDGLGQHTIAARLIAENTPPFGRAEMWHRSYVKKILENPAVIGRFTPHTLSVVDGRKVRTPLEAIEGYFPAVVNVDTFERVAAMSSKRGLNIALANDAAVPTANVLAGLAKCPACGSTMTRVNKGGRKGGKPYLVCTKAKAGAGCRYKQVRLEAIEEAIVSLGSYLHDLTPSPNAGSEAKYRDMRHQAEVVEEQIQNLVEAVEQGDTSKAIARAIVKNEALLDSIREEIEELGQRVADTITNRIENTVSEFCTVTKGGNIAKINAVMRQLFEKAIVDYDTGYLQLHWRHTEHSPAEVLYGFPT

SEQ ID NO: 18735 - protein, 507 aa, synthetic construct
MKRVISYIRFSSEKQSRGDSLRRQSKMVTDWLKAHPEYHLDQDLSFRDLGVSGFTGKHLKGGLGDFLTAIEKGLVKAGDTLLIESLDRLSRQDVDQASELLRNILRSGVDVVTLSDGEHYTRESLRDSLALIKSILIMQRAHEESLRKAERIQAAWDAKKEAAKAGIKVSKRCPAWLKLNDDRKSFSVIPEKVETVKRCFQLRLEGKSIWEIVRTLNDEGHQTLNQYKAGKFGQTSVQDLLKNRSVIGYFTPKGCEEISGYYPAIIDETTFYKVQQLSYARYGRKPASDKPLSVNLFKGVIRCSECGHALIITGFSDTRSGIYRCPLRNENRCNAKGLSRKQTDSTLLALLSRLDRFDSDMTNTVDTLKLHREHISNNIEKLVQLSLEIEDLSAITSKLKQLKGELSQVDADIEKETQRLKSIDVGCLSDCDLTTKAGRIEAQLIIKSAVKEVVLNTAKRRCKVTFHNGKVIDLPITENPSEDVTEAIQSLSEVTERGLIDVDEVII

SEQ ID NO: 18736 - protein, 571 aa, synthetic construct
MDKLPRGQGMLNPTKKRISVDERRASRRPFEVRAQRTAAFVYCRVSDNKSVKSDLSIPDQERQARARATEQGWDILRVYRELGVSAKTTDRPEFQKMIKEALGSHHPVQKIIVHSISRFARNVEDYNRITNQLYDQGVEIVSLTQQFSNDTGGFIAETTSAVFDEYHSRRTSTDVTRTMTAMAKEGYAVGGAQPLGYKLEPDSINPRRKRIVIDIAEKPLVERIFRLALHGDGFGPPKGVKAIVDLLNKEGHRTRAGSRFSSNALHGILTNSIYMGLKIYNANPKTKRWSPAPAERVEIPVPAIITPEEFGELQKLLQSKDPRKGTARVVSSPLLLAGIAYCKCGASMTLRTGTGASKSVYRYYHCGRVSRQGKHDCSGPSVAEGQLDSIVAESVISQVLQVERLREILGLMKEKLALEALENKERVQELKQKLQISERAFKNLIETVASSETLATQPILIAKLNETEMEMTRTRNALKSMLAHGNNDIEVSDYRVQLFSSLLSERLRDPNKLRMKSYLMSIIARVEVGEKYVRVVGRLADLKSGILEESQDANEDSDRSSVRRYKRNWCS

SEQ ID NO: 18737 - protein, 507 aa, synthetic construct
MKRVISYIRFSSEKQAKGDSLRRQSKMVTDWLKAHPEYYLDQDLSFRDLGVSGFTGKHLKGGLGDFLTAIEKGLVKAGDTLLIESLDRLSRQAVDRASELLRNILRSGVDVVTLSDGEHYTSESLKDPLALIKSILIMQRAHEESLRKSERIQAAWNRKKELISEGIKISKRCPAWLKLNDDRKSFSVIPDKVETVKRCFQLRLEGKSIWEIVRTLNAEGHRSMNQYKPGKFGQTSVQDLLKNRSVIGYFTPKGCEEISGYYPAIIDETTFYKVQQLSHSRYGKRSVSDKPLSVNLFKGVIRCSECGHALIITGFSDTRNGIYRCPLRNENRCNAKGLSRKQTDGTLLALLSRLDRFDSDTTNTIDTLKLHREHLSSNIEKLVQLSLEIEDLNAITNKLKQLKNELSQVDADIEKETQRLKSIDVGCLSDCDLTTKAGRIEAQLIIKSAVKEVVLNTARRRCKVTFHNGKVIDLPITENPSEDVTEAIQSLSEVTAKGLIDVDVVEI

SEQ ID NO: 18738 - protein, 533 aa, synthetic construct
MKRAVIYARYSTDLQNDKSVEDQFSLCRDFAARLGADVVKQFSDRAKSGASMFGRPGLADMMTAAERGDFEILVTESTDRVSRDIADLAHVHKVLKFRNIEMQCVNGGLMDTVQIGMYGIVGQMQREEGARKVKRGMTGVVRSGRNPGGKAYGYRPIDGRKGELEIVEEEACIIRRIFDMYAAGYSARLIAAALNKEGVPAPRGRHWNASTINGNGMRGNGILRNPLYVGQLVWNRVHMVKDPSTGRRVSRPNESSAVETVDAGHLRIITDDLFQEVKERKDERTGTQAHTQPKSKRLLSGLLRCSACGGSLSTIGADRSGPRVQCSTNKESASCPNSARYYVEKIERDVVDRLRGMFATTTYIDAYVEEYKAESKRLATERRNSRGTKEAALINVQEQIARVLEQVAKGTIDDDDVSSIMAKLKAERSLLKAELAAQEPPTNVIEIKPKALTKFREDVESLADILKERGAEPTMEMAKAFREVISRIIVHPRKPGGAYNYEIKGWLSAITGPDLSSVLMVAEEGFEPPTQGL

SEQ ID NO: 18739 - protein, 529 aa, synthetic construct
MRKVYSYMRFSRPEQAKGTSIERQSSFAEQYALEHGLELDKSLTMMDKGLSAFHGVHKTKGAFGQFLAAVTAGKVPSGSVLVVESLDRLSREDPLIAQAALTDLILSGITVVTAADNQVYSREEIQQNPFKLIMSLVVMIRANEESETKQRRSNAFLKSALNQYQANGKIRRLGSDPSWLDFNKDNDTYSFNERVEVIRRILNLYNQGIGSLKIARQLTEENIPTLSGKRSAWGQTTVANIVKSHALYGMKRINVQGVEYDLEDFYPALITKSKWLALQQHRTKRSKSMHGRGEVVHLITGHGKGFTTCGYCGGGLGAQTQKQYKRSGEYSRTVTRLHCLTHKETSSCCSSVFLEPIESAVLFAACIGVEPQSLVPTVNNVNYSALIDEVENKVKHIVEQVTAGAPWDLFKDAHDKLKLEKQKLIKERDSQKPDVNQSDVQKWVNKLVELAEKARANDKEARLKCRTLINSICKSIVIKLRGHDLKSEPVVTITFVTDEQFEFKVGKNGAVQFVDNGMAVNRRLKPLLA

SEQ ID NO: 18740 - protein, 545 aa, synthetic construct
MKKYHLYQRVSKQIQAEEGLGIQRQEQVCEHWISEYNKRLLDDGKSAYSKGLVYEDHGKSAYTTANFKRGELGTLMKDIESGKIAKGDLIVIELIDRFSRANVDFVRKKFQSILDAGVKVAITKWNLVFEENMEGISSVSARLLLEIGMHLAYQESSQKSTRIKASRKLLERSGKKSIAKPPFWLVRNLDLRSYTIIEENAEIVRKIFDLKLKFNYGPQKIIKSLGELEIYRYKFDDNGNLVKTTKNSPLSESSINAYIRNPNVIGKLDGKDYYPRIIDDKTYYAVQKRTRENTGGASDIFRNVFVGVGKCGCLIRNEDENGYVKFTKCGYIMAYSSRKVKNPAKGQYLKCNKKRKNAKCKSENINYYLAQNKVYSVLKSLKFDFSQSVDISHLEEKINILNKEMSKIRTFMAKYTDDDEWENHYNVKRMEREKIENEIKNSKSLITGKISSLDLDFSAEKDRVLFNQFLKDNRVIVYFTKENMEIIIGSLNNFSIKCGYDDSSRDIDHLIESYSKNGLVGIEEKVGKSEGKGLLRFNLPTVSGS

SEQ ID NO: 18741 - protein, 544 aa, synthetic construct
MSAYTGSNIKEGELGRFLADVNAGLIPTGSALICYSVDRLSRQNPWVGTHLISTLIGAGIEIHSVAENQILRSDDPVGAIMSTIYLMRANNESVIKSERAKKGYEKRLKESITNKKVLTRQMPRWLYDCDGKYAIDPNMQNVINFTFDSYIAGQSTGFIAKELNNRGLMYGNTSWRGSYVAKLIRDERLIGKHIRYSKQIKGVKRVVIETIPNFYPVVVDVEKFFVANNILTSVAKNIRGRTRVTYGDDSILRNLFNGVIKCGVCGGDTSVVQNTRKKIVNGEATYIPYKTFLRCRTRYELKNCVQSDIRYEVIERAILNHLMRLDISALLSVPVDNKIESYRTELELCKAEEVELHTLIEQREREGKRVRPRTIKAYEDVSDRIDELNKLIESYVEDTFVPDFNVDLNSIADVSNVSDRSLIKKGIATIAESICYKRISDFILIEIKYRNLSVKHVLVIDNKQSKVVVNFSIEYHENSHDYTCNGFILKYVKSPEEFHLMGVNIEDYAHMMNFVDFISDNEAKKIKEYLVSNLSRVLISNIPE

SEQ ID NO: 18742 - protein, 506 aa, synthetic construct
MRSVITYLRFSSAIQGAEGADSTRRQNDLFKQWLKKNSDAQVVASFSDEGLSGYKGKHLTGQFGDMLARIEAGEFSEGTVLLVEAIDRIGRLEHLETEALMNRIIAHGIEIHTLQDGLIYTRDALSDDLGISIIQRVKSYVAHQESKQKSFRVSQKWKQRAKLALAGEQRLTRNVPGWIDPDTFKCNEHAETVRLIFKLLLSGESLHNIARHLQANNISSFSRRKDANGFSVHSVRTVLRSESVIGTLPASQRNDRPAIPNYYEAAIDAATFNKAQEILDKNRKGRTPASDNPLTINIFKGLFRCQCGASVHPTGTKNKYAGVYRCNNNPDGRCDVPPLKRKPFDKWMLENFLGMIDVGNDGEAEGKIASLQHEVEIVTTRIKKATALLLEMDDITELKAQVKELNQKRTELQTTIDSMRRKTSLTDKELPQLKDIDLTTKAGRVECQLILSKHLKGLTLGKDSVIVTLQNDTEITIPTNPLPLNDGTSIFEIAEKELLEIDAYQL

SEQ ID NO: 18743 - protein, 508 aa, synthetic construct
MKKAIAYMRFSSPGQMSGDSLNRQRRLITEWLKVNSDYYLDTVTYEDLGLSAFNGKHAQSGAFSEFLDAIEHGYILPGTTLLVESLDRLSREKVGEAIERLKLILNHGIDVITLCDNTVYNIDSLNEPYSLIKAILIAQRANEESEIKSSRVKLSWKKKRQDALESGTIMTASCPRWLSLDDKRTAFVPDPDRVKTIELIFKLRMERRSLNAIAKYLNDHAVKNFSGKESAWGPSVIEKLLANKAPIGICVPSYRARGKGISEIAGYYPRVISDDLFYAVQEIRLAPFGISNSSKNPMLINLLRTVMKCEACGNTMIVHAVSGSLHGYYVCPMRRLHRCDRPSIKRDLVDYNIINELLFNCSKIQPVENKKDANETLELKIIELQMKINNLIAALSVAPEVTAIAEKIRVLDKELRRASVSLKTLKSKAVSSLGDFHAIDLTSKNGRELCRTLAYKTFEKIIINTDNKTCDIYFMNGIVFKHYPLMKIISAQQAISTLKYMVDGEVYF

SEQ ID NO: 18744 - protein, 506 aa, synthetic construct
MKPRAWLYARFSSQQQHGNDSLNRQQKSAESWCAAAGVSLQKTSFRDLGVSGWKSIKRPMFEQLITAMTEGKIPRGSYVLFESTDRLSRRGWRHTQQLIRTITCVHDCKLVILDKGQVYTKENVNDVVQNILLMVSADMAEKESQRKSDLVAAAYKSKRQDGDVSRWPFWIDKTDNGFVLNENAETIRLIIELRLKGVGALGIAAELNRRGIKSSRGGSWGHTSIRVVLSNSALYGTKDFYSMKTITQFDDNGEEIRVADNQLVQSMPDIFPPICDFTTWQQIQINGEKPGRKGQLSPFHNILFCKCGAALGLQIGSAGERYRKCTRSKVGSCNQKMIRNFDETLVECLGRITYVSSEIQKDEVPELQARLVKLEGVKDALMAAGALDALVDVYKDIAKAKDAIAAAQKVAVVPTTELKEVFAGSIDEQRIALKRLVEKVVVSRVENTASLKVHLTNGHFKVFGVNIGVKRESGKNIIFAKSDTEKLAQSLIALNGELEPWGIEQE

SEQ ID NO: 18745 - protein, 535 aa, synthetic construct
MPAIRRAVIYARYSTDHQSDRSIEDQVALCRDYAKREGLTVGTVYEDRARTSASLLGRDGIMNLMADARAGRFDAVIVEAFDRLSRDQEDLSGIHKRLRFAGISIFAVHDGQADVMKIGLQGLMGEMFLQQLREKTHRGLKGRVHSGQSAGGKSYGYATVPGQPGHLTIKEDEAAIVRRIYDEFGAGRSPRHIVADLNAEGITPPRGATWNASTINGHKERGYGILQNELYIGRRVWNRVKMVRDPETGKRVNRTNPRDLWVHEPVPDLRIVSDLQWDQVRHEMDRRANGPIGRAAARPKRPFSGLLRCGRCGGGMSIKKRKGSQIWLICSRSRESGTCDNRLQPRLDVIERAIFEALAQELAHPEYITAYLTAYREERERLLQSNRRDKAALERAAIRAKQTYDRSVDMYLKGVLDGDDGMQLVAEHKAEKEAAEQRLATEAPDVPKIELHPATARRHIEALASLSSDIAAGRQMSDSAVGTIRSLITQIDITPSETGQDVTVYGAIGEIIGASRSGGELVVAWGRLELPTYRL

SEQ ID NO: 18746 - protein, 407 aa, synthetic construct
MQRKVIKIEPKTFKTLAKKRVAAYARVSSGKDAMLHSLSAQVSYYSEFIQRHIEWEYVGVYADEAFTGTKDERPEFQRLLKDCRDGKIDMVITKSISRFARNTVTMLEVVRELKSLNVDVYFEKENIHSLSGDGELMLTILASFAQEESRSVSENCKWRIRKGFKEGELINLRFMYGYRIEKGKIEINEDEAKIVRMIFDDYINGLGCTKIARKLREMDIEKIRGGKWNSERVVEILKNEKYTGNAMLQKKFVKDHLTKTLVRNKGYLPKYYAEETHPSIIDLETFQKAQEILEQRRLKYSPQKEDSNHIFQRKIICGICGKKYRRKRRKDKFIWHCSTYLKYGKDTCPSKQIPEDVLIKLTLEVLGLNEFDENIISNSIKEIKVSGPRKLTFIKSNGEEVEKEWDY

SEQ ID NO: 18747 - protein, 535 aa, synthetic construct
MARTVTVIPATASSTSPFLKTKVQKKRVAAYARVSTDNEEQLQSFEAQMDYYTNHIKSNPDWIFVNVYTDEGISATSTKKRDGFNRMIEDALSGKIDLIITKSVSRFARNTVDTLTTVRKLKEKGVEVYFEKENIYTLDSKGELLITIMSSLAQEESRSISENVTWGQRKRFADGKVSLPYKHFLGYEKGEDGVLKIVEEEAKIVRMIYKMFLEGKTPLSIAEYLTENNIPTPAGKHKWHQSTVLSILQNEKYKGDAILQKTLTLDFLTKKRKKNEGEVPQYYVENSHPAIIPPEVFDLVQTEIKKRKEVKGYKTGRNCFAGKIVCGECGSFYGRKFWHSNSKYRRVIWQCNSKFKNDKKCTTPHLYEDKIKKAFVEVFNSLINNKEEILKGYEDILKALTDTTNLDMESIKIQSELEIVTEMIRKCIEENAHKAINQEDYKEKYDALVKRYESIKEELERIEEKRLEQSAKKEKILEFINELKQREGLIEEFDDELWIGTVDKVVVYTEEKISFVFKDGMEVEWELNYKINISI

SEQ ID NO: 18748 - protein, 429 aa, synthetic construct
MRVRIIEPVKKKENKKKRVCAYARVSTGSDAQGESLENQIQYYENLISNNPDYEYAGVFADRGITGTTDNRPEFQRMLNLAKEGKIDLIITKSISRFARNTAIMLQVVRELKDIGVEIIFEKENIRTLSGDGELMLTVLSSFAQEESKNISDNLKWRVKKKFERGELIINTTRFLGYDKDEYGDLVINPKEAEIVKRIFEDYLKGKGTFTIAKELNEDKVPTVAGGRWQESTILNILKNEKYKGDAILQKYYTPDHLRKVSVRNEGVIDSYYIEDNHSPIVSREMWEQVQIEIARRAKAKGNKAGDTKKYTNRYPLTGMLFCSKCGSTLRRRTWNSKHSCKKIVWQCSNYIKNGKDACSGISIDDDIISGLNIEEPIIVREEFRDGKKYYTYTCKSKQEQSGRADTTAEKENGSLLQSVNRPIRTVIKL

SEQ ID NO: 18749 - protein, 443 aa, synthetic construct
MAAYCRVSTDQLEQLLSYEAQVAYYTSYITNHPDYELAGIYADEGISGTNTKKREQFNKMIEDCKAGKIDMIITKSISRFARNTLDTLNYVRQLKELGIGVIFEKENINTLDSKGEVLLTILSSLAQDESRSISENSTWGIRRRFEQGKLHINHTKFLGYDKDEEGNLVINEKQAKIVRRIYKGYLDGKGPNRIARELEEEGIPNWNGKSKWYESSIRKILSNEKYKGDALLQKTYTVDFLTKKRAVNNGEVPMYYVEESHPAIIDKEIWEAVQLEMERRRAFAEKYNISKLDYATVDNPFAGRVICGHCGSAFGRKVWNSTDERLRRVVWRCNKKYEVKGKKSCENKHIDDKVLYHAFVNTFNAMVENKDYFIEKWNEELISENVLVRYRAKQFIEILKDAEKAEAFDIDMYFRIIEKMTVFDGEKIIVSLLDGTEIEVVIE

SEQ ID NO: 18750 - protein, 542 aa, synthetic construct
MQQLKTKRVGIYVRVSTEMQSTEGYSIDGQINQIKEYCDFHHFEVKDIYADRGISGKSMNRPELQRMLKDAKEGNIDCVMIYKTNRLARNTSDLLKIVEDLHKQNVEFFSLSERMEVNTSSGKLMLQILASFSEFERNNIVENVFMGQTRRAQEGYYQGNLPLGYDKIPDSKHELMINQHEANIVKYIFESYAKGHGYRKIANALNHKGYVTKKGKPFSISSITYILANPFYIGKIQFAKYKDWSEKRRKGLNDKPVIAEGKHSPIINQDLWDKVQMRKKQVSQKPQVHGKGTNLLTGIIHCPQCGAPMAASNTTNTLKDGTKKRIRYYSCSNFRNKGSKVCSANSVRADVIEDYVMKQILEIVKSDKVIQRVVARVNQENKVDGAALHHDIAYKQQQYDEVQTKLNNLIKTIEDNPDLTSVIRPSIQKYEKQLNDITNQINQLKNQQNEDKSLFDAKQISKLLQHIFQDIKHMEKSRLKALYLSVIDRINIRKDGNHKKQFYVTLKLNNEIIKQLFNNKQLDEVHLSTSSLFLPQTLYLTI

SEQ ID NO: 18751 - protein, 449 aa, synthetic construct
MKQVIGYLRQSTMKQQSLAAQKQAIEAIAEKHHIQHINFYSDKQSGRKDNRSGYRQMTQLIQQGQCDILCCYRLNRLHRNLKNALKLIKLCQTYRVHILSVHDGYFDMDQAFDRLKLNIFISLAELESDNIGEQVRNGLQEKAKQGRLITTHAPFGYDYHNGTFIINQNESPTVKAVFNYYIKGHGYKKIAQLLEEDNTYINRQPYQVRNIIINPNYCGRVNNQYGQFDNMFPSIVSTSIYEQAQRLRLQKQTKQTSSDNQLKQKIKCPCCNATLTNMTIRKKNHTLRYYVCPKNMNASRFVCDFKGINAQTLEDKVLEVCRDFYQNQRIYTKIKGAIDKRIKRQRNIEKHHILTQEQLIEKLAQGIIDAETFREQTQSLRQQPQRTTSINGHQIQHTIQNIIQKRFTLNILYPYIETIHITKDKNLIGIYFKNEPLNIVNQAMQSSIA

SEQ ID NO: 18752 - protein, 481 aa, synthetic construct
MITTNKIAIYVRVSTTNQVEEGYSIDEQKDKLSSYCDIKDWNVYKVYTDGGFSGSNTDRPALESLIKDAKKRKFDTVLVYKLDRLSRSQKDTLHLIEDVFIKNGIEFLSLQENFDTSTPFGKAMIGLLSVFAQLEREQIKERMQLGKLGRAKSGKSMMWAKTSYGYDYHKETGTVTINPAQALTIKFIFESYLRGRSITKLRDDLNEKYPKHVPWSYRAVRTILDNPVYCGFNQYKGEIYPGNHEPIISKEEYDKTQSELKIRQRTAAENVNPRPFQAKYILSGIAQCGYCGAPLKIMLGVKRKDGSRLKKYECHQRHPRTLRGVTTYNDNKKCDSGFYYKDKLEAYVLKEISKLQDDADYLDKIFSGDNAETIDRESYKKQIEELSKKLSRLNDLYIDDRITLEELQSKSAEFISMRGTLETELENDPALRKNKRKADMRKLLNAEKVFSMDYENQKVLVRRLINKVKVIAEDIVINWKI

SEQ ID NO: 18753 - protein, 481 aa, synthetic construct
MITTNKVAIYVRVSTTNQVEEGYSIDEQKDKLSSYCDIKDWNVYKVYTDGGFSGSNTDRPALESLIKDAKKRKFDTVLVYKLDRLSRSQKDTLHLIEDVFIKNGIEFLSLQENFDTSTPFGKAMIGLLSVFAQLEREQIKERMQLGKLGRAKSGKSMMWAKTSYGYDYHKETGTVTINPAQALAIKFIFESYLRGRSITKLRDDLNEKYPKHVPWSYRAVRTILDNPVYCGFNQYKGEIYPGNHEPIISKEEYDKTQSELKIRQRTAAENVNPRPFQAKYILSGIAQCGYCGAPLKIMLGVKRKDGSRLKKYECHQRHPRTLRGVTTYNDNKKCDSGFYYKDKLEAYVLKEISKLQDDADYLDKIFSGDNAETIDRERYKKQIEELSKKLSRLNDLYIDDRITLEELQSKSAEFISMRATLETELENDPALRKNKRKADMRKLLNAEKVFSMDYEGQKVLVRGLINKVQVTAEDIVIKWKI

SEQ ID NO: 18754 - protein, 481 aa, synthetic construct
MITTNKVAIYVRVSTTNQVEEGYSIDEQKDKLSSYCDIKDWNVYKVYTDGGFSGSNTDRPALESLIKDAKKRKFDTVLVYKLDRLSRSQKDTLHLIEDVFIKNGIEFLSLQENFDTSTPFGKAMIGLLSVFAQLEREQIKERMQLGKIGRAKAGKSMMWAKTSYGYDYHRETGTITINPAQALAIKFIFESYLRGRSITKLRDDLNEKYPKHVPWSYRAVRTILDNPVYCGFNQYKGEIYPGNHEPIISKEEYDKTQSELKIRQRTAAENVNPRPFQAKYILSGIAQCGYCGAPLKIMLGVKRKDGSRLKKYECHQRHPRTLRGVTTYNDNKKCDSGFYYKDKLEAYVLKEISKLQDDADYLDKIFSGDNAETIDRESYKKQIEELSKKLSRLNDLYIDDRITLEELQSKSAEFISMRGTLETELENDPALRKNKRKADMRKLLNAEKVFSMDYENQKVLVRRLINKVKVTAEDIVINWKI

SEQ ID NO: 18755 - protein, 559 aa, synthetic construct
MSKEKIKVYLYTRVSTSIQIEGYSLEAQKSRMKAFAIYNDYEIVGEYEDAGKSGKSIEGRIQFNRMMEDIKSGKDGVSFVLVFKLSRFARNAADVLSTLQIMQDYGVNLICVEDGIDSSKDAGKLMISVLSAVAEIERENIRIQTMEGRIQKAREGKWNGGFAPYGYKLEDGKLFINEEEAVAIRTIFDQYVNTTIGANGISKYLENHGIRKIPRQNGKNPLFDAGLIRKILKNPVYNGKIAFGRRTLEKVHGTRNEYKQVEQDEYLISEGIHEAIVSDEVWQAAQVKLKSQAKKYEHVNKGKDTRTHLLSGIVKCPICGVGMFGNKCIKKKKDGTKYKDFYYYGCNHRQMIRGHKCTFSKQIREELLDDAVAEVIVKIVSNPKFASMMQEKINMKVDTSEIEKEIDNYQKELRKSHSTKFKLIEEIDNLDVEDKHYKRRKQDLDDRLYRMYDKIDELESSLIDAKAKKQTIEAEKLTGDNIYKVLIYFDKLYKVMNDVERRQLISALISEIQVYEEKQSNGQWLKSITFKLPIIEENLNIGLDNDEQVECVSLLEKRS

SEQ ID NO: 18756 - protein, 538 aa, synthetic construct
MKQQIYNTALYLRLSRDDELQGESSSITTQRSMLRLYAKEHHLNVIDEYIDDGWSGTNFERPSFQRMIEDIEAGKINCVVTKDLSRLGRNYIMTGQYTELYFPSHNVRYIAIDDGVDSEKGESEIAPFKNIINEWVARDTSRKVKSAFRTKFAEGAHYGAYAPLGYKKHPDIKGKLLIDDETKWIVEKIFSLAYQGYGSAKITKILREEKVPTASWLNFTRYGTFAHIFEGKPESKRYEWTIAHVKAILKNEVYIGNSVHNMQSTVSFKSKKKVRKPESEWFRVENTHEPIIDKEVFYRVQEQIKSRRRQTKEKATPIFAGLVKCADCGWSMRFATNKANKTPYSYYSCSFYGQFGKGYCSMHYIRYDALYQAVLERLQYWANAVQQDEEKVLNKIQKVGNAERIREKKKKASALKKAENRQNEIDRLFVKMYEDRACEKITERNFVMLSSKYQKEQIELEQQITNLREELSKMEQDMIGAEKWIELIKEYSVPKELTASLLNAIMIEKILIHEATTNEDNERIQEIEIYYRFIGKVD

SEQ ID NO: 18757 - protein, 528 aa, synthetic construct
MKIAIYSRKSKFTGKGESIQNQIEMCKEYCNKHFGQCEFIIYEDEGFSGGNTDRPQYKRMMEDVRKKKFQAVACYRLDRISRNVSDFSQTLEELNNKNIAFISINEQFDTSTPMGRAMTYIASVFAQLERETIAERVRDNMLQLARSGRWLGGIAPTGYKSEPITYLDSNMKEKKMYKLSPVKQELEVVKLIYKKYLEFQSLSQLETYCLQNNIRTVNNRDFQKYTLRTILTNPVYSKADQSVYNYFYSREAQICNNKNEFTGKYGIMAYNKNLVKKGQSVKTKNMDEWIIAIGKHKGIIEGSEWVMVQNTLNKNKSLAPRQGTSAAAMLSGLLYCKNCGNFMRVKYGQKKKNSDERHYYYVCSMKDNSRGSRCNMKNLKGEDTDQYVIEKLKEMIESGILKDIDNAKKNIEDKKKINKNVYDKITANEKAIENLLKQLSQNENETVAKYIFSEIEKLDKENKELKSKLDKYDSETNITNLELFKEAVVRFYESIDGVPYEQKRNLIQGIVKRIEWDGKDLHIDIFDI

SEQ ID NO: 18758 - protein, 523 aa, synthetic construct
MKVALYCRLSEEDKDKINPSDVSESIQNQRALLEGYALANNWQIYDVYSDDDWSGLDADRPDWNRLLKDAEAGKFDTIICKSQSRFTRDMEAVEKYIHKKFIEWGIRFIGLVDNADTSNKGNKKQRQIIGLTNEWYCEDVSDNVKAAFDVKRKSGKFIGSFAAFGYIKDPNDNNKLIVDEEAAKIVRQIYDWYLEGFGIQRITHELNKRQIPNPTIYKKRSGSNYKKTVDNNSLWNRTTVKRILQNPLYAGHMAQGKIKKVSYKSKKFVTIPKDEWIVVKNTHEPIVKESVFLEVQRRFKLRQRSTCEGQAHIFATKVKCLDCRSTMEKGTTSKDKGKYSFLRCKLYLKTPKENKMCTSHYIRLDTLEEVVTNKIKEYINNYLDEDNAVNILKIESEANNKVKSLEKEFDKTDMYLEEQTQLLKSLYIDKVKGIISEEMFVSLNSEFNKRKEFCEQKKKNIEKQIEEISNKANDIGEWTKTVKKYRDFDKLTHTMVNELIDFIEIGEKNKITGEQVVKIHWLF

SEQ ID NO: 18759 - protein, 464 aa, synthetic construct
MDKKAAIYIRVSTQEQATEGYSIQAQTDRLTKYVEAKDFILYKKYIDAGYSASKLERPAMQELIQDVQSKKVDIVIVYKLDRLSRSQKDTMYLIEDIFRPNDVELISMQESFDTSTAFGSATVGMLSVFAQLERKSISERMITGRVERAKKGFYHTGGQDRPPAGYQFNSDNQLIINEYEAAAIKDLFRLYNDGLGKSSISEYLKKNYPGKNKWLPSSIDRMLKNSLYIGKVKFSGAEYDGIHEPIIDEVTFYKTQKEIARRKQTNTKRYNYVALLGGLCECGICGAKMANRRAVGRKGKVYRYYRCYSKKGSPKHMMKTDGCSSKAQQQFIIDEAVINNLKNIDVEAELKRRSAPQTNTSLISSQIESIDKQINKLIDLFQVDSMPLDVISEKIDKLNKEKQSMEKLLERKNKLDKTELQHRFDILKSFDWDNSSIESKRVVIEMLVQKVIIHDNSIEIILVE

SEQ ID NO: 18760 - protein, 452 aa, synthetic construct
MKAAIYIRVSTQEQIENYSIQAQTEKLTALCRSKDWDVYDIFIDGGYSGSNMNRPALNEMLSKLHEIDAVVVYRLDRLSRSQRDTITLIEEYFLKNNVEFVSLSETLDTSSPFGRAMIGILSVFAQLERETIRDRMVMGQIKRVESGLPLTTAKGRTFGYNVVDAKLYINEEEAKHLQLIYDIFEEEKSITTLQKRLKKIGFKVKSYSSYNNWLTNDLYCGYVSYADKVHTKGVHEPIISEEQFYRVQEIFSRMGKNPNMNRDSASLLNNLVVCGKCGLGFVHRRKDTVSRGKKYHYRYYSCKTYKHTHELEKCGNKIWRADKLEELIIDRVNNYSFASRNVDKEDELDSLNEKLKIEHTKKKRLFDLYISGSYEVSELDAMMSDIDAQINYYEAQIEANEELKKNKKIQENLADLATVDFNSLEFREKQLYLKSLINKIYIDDEQVTIEWL

SEQ ID NO: 18761 - protein, 590 aa, synthetic construct
MKVIQKIEPTKPKIAKRKRVAAYARVSVDKGRTMHSLSAQVSYYSKLIQKNPDWEYVGVYSDGGISGRTTESRNEFKRLIKDCKDGKVDIILTKSISRFARNTVDLLETVRDLRAINVEVRFEKENIHSLSGDGELMLSILASFAQEESRSISNNIKWSIQKRFKEDKHNGRFNIYGYRWVGQELIVEPSEAENIKLMYANYMNGLSAEFTAKQLTKMGVTAMKGGPFKATSVRQILKNITYTGNLLLQKEYTPDPITGKSRYNNGEMPQYFVENHHEAIIPMEEWQAVQDERLKRRKLGAHANKSINTTCFTSKIKCGNCGKNFRRSGKRQGKNKELYHIWTCRNKSEKGVKVCNARNIPEPALKKYATEVLGLEVFDEQIFIDSIEEIVASEGNMLQFKFYGGREVEVKWTSTARKDYWTPEVRRAWSERNKRKESRTWNGRTTEFTGFVVCGRCGANYRRQAVTSKTDGTVRRKWHCSNSAVACNEGKSRNCIYEEDLKVMVAEILGIPTFNEPTMDEKLSRISIIDTEVTFHFKDGHDEVRTFEIPKKKARTFSEEERARRRLVMKKRWEEKKRDEESNNDTSDNH

SEQ ID NO: 18762 - protein, 433 aa, synthetic construct
MRVRIIEPVSWVQLKRKRVCAYARVSSGSEAQGESLENQTTYYRKLIAANPEYEYVDIFADYGTTGTKEARPEFQRMLALARTREIDLILTKSISRFARNTTLVLETVRELKELGVEVVFEKDNISTFTRDGELMLTVLSSFAQEESKSASENLKWRYRRKFEQGELALNVTRFLGYDKNKHGELVINPIQAKVVERIFADYVSGKGSFVIARELNAAGVRTVAGGKWHSGTVLNILKNEKYKGDAKLQKTYSKDHLSKKKCVNHGEVESFYIENNHPPIVSREIWDETQRLIILRAKAKGNVEETKNKYQNRYPLTGMLLCSKCGAPLRRRTWNSKYCCKKVVWQCSTYIKNGKNACQGTTIEDDEIGRVNIQTETVVEEVMTNGKKHYRYTSQGEPDKPCGKPRATEKTCSRVLPGIDRSGRAVIKLRSPG

SEQ ID NO: 18763 - protein, 427 aa, synthetic construct
MRVKIVTPKSELLEVKKLKVCAYARVSSDSLKQEDSLENQTSTYERLISSNPDYEFAGVYADQGISGYCENRPAFQSMLEKAKNHEIDLIITKSVSRFARNTVTVLKVARELKELGIGIFFEEQNINTLSGDGEMMLAVLASFAQEESRSMSENNKWTMKKKFERGEIMVNTTRFMGYDKNEFGELVINREQAKIVRRIFDMYLSGIGMFRIAALLNDENVPTITGGKWYEGTIRGMLKNEKYKGDCILQKYYTPENRRNTSVRNNGEVQSYYIEENHPAIVSKAEWDKVQQIMQRHKEQRKIAADGTDKYKNRYPLSGILICPYCGKALRRKQVYNKRIEWWCSTYIHDGKTACKGVKISDEEASKQNITEPTVVEEVKINGEKYYSYTSKEEFDRGIRNKPSDRPNKDGGILPRIHRPRRTAIKL

SEQ ID NO: 18764 - protein, 499 aa, synthetic construct
MNAVIYARYSSDNQREESITAQLRVCREYCRKKGYILTHEYTDEAMTGTNDDRAGYIQMIKDAQKHLFDIAIFHKIDRNARNEYDYYINKMKLLRAGIHVEYASLGFDIETPEGQLMENQLVGIAAYYSRNLSTEVRKGLKENALQAIHCGGRPPFGYKVIEKKYYIEEHEAMIVRFIFDMYVKNYTYGRMVAACRDKGYKTRAGRDWCKNSLREITRNNKKYSGVFIYGRENQSKLYPGRKNEIIEVPGGMPAIIDPETYRIAHDREKNFVFTQGQHHAKVNYLLSGLIYCGVCGRAMVACRAVSNGKRPYDYQYYKCRQNVAGAEQCKVKTIRKDFIEGIAKKYVKGIVGSKEAVEDICHSINERVEKENKTGSNEVRALEREERSLNRKMENLLNIVEDGALSDVIRGRIKTLHERLSQISDRMIELREEDKPKLDADRVYEAIKVWQDAEDDASLASMFKAFISQIRVFPKTIEIDFFLDINGRKYIMKQKKRPV

SEQ ID NO: 18765 - protein, 470 aa, synthetic construct
MKGESELDKKAAIYIRVSTQEQATEGYSIQAQTDRLTKYVEAKDFILYKKYIDAGYSASKLERPAMQELIQDVQSKKVDVIIVYKLDRLSRSQKDTMYLIEDIFRPNDVELISMQESFDTSTAFGSATVGMLSVFAQLERKSISERMITGRVERAKKGFYHTGGQDRPPAGYQFNSDNQLIINEYEAAAIKDLFRLYNDGLGKSSISEYLKKNYPGKNKWLPSSIDRMLKNSLYIGKVKFSGAEYDGIHEPIIDEVTFYKTQKEIARRKQSNTKRYNYVALLGGLCECGICGAKMANRRAVGRKGKVYRYYRCYSKKGSPKHMMKTDGCSSKAQQQFIIDEAVINNLKNIDVEAELKRRSAPQTNTSLISSQIESIDKQINKLIDLFQVDSMPLDVISKKIDKLNKEKQSMEKLLERKNKLDKTELQHRFDVLKSFDWDNSSIESKRVVIEMLVQKVIIHDNSIEIILVE

SEQ ID NO: 18766 - protein, 452 aa, synthetic construct
MKAAIYIRVSTQEQIENYSIQAQTEKLTALCRSKDWDVYDIFIDGGYSGSNMNRPALNEMLSKLHEIDAVVVYRLDRLSRSQRDTITLIEEYFLKNNVEFVSLSETLDTSSPFGRAMIGILSVFAQLERETIRDRMVMGKIKRIEAGLPLTTAKGRTFGYDVIDTKLYINEEEAKQLRLIYDIFEEEQSITFLQKRLKKLGLKVRTYNRYNNWLTNDLYCGYVSYADKVHVRGIHEPIISEEQFYRVQEIFSRMGKNPNMNKESASLLNNLVVCSKCGLGFVHRRKDTVSRGKKYHYRYYSCKTYKHTHELEKCGNKIWRADKLEELIIDRVNNYSFASRNIDKEDELDSLNEKLKIEHAKKKRLFDLYINGSYEVSELDSMMNDIDAQINYYEAQIEANEELKKNKKIQENLADLATVDFNSLEFREKQLYLKSLINKIYIDGEQVTIEWL

SEQ ID NO: 18767 - protein, 563 aa, synthetic construct
MKRAALLLRCSTNIQDYNRQKLELEKVASRFKLKVAKVFGEHVTGKDDIRKGNRKSVDELIDACENDEIDVVLISEVSRLTRNFLYGVTLVDKFNRDYSIPIYFRDKRKWTIDVETGEVNLEFEKELRKAFEQAEEELASIRFRMASGKRDSAGLGQWFAGIPPFGYTRQKNGYLVKNEYAPIVKEMFDKYLEEGQALITTTRYIYGKYPDIKKLKSIGNTKFILNNKAYTGRAEANIYDEIDKVTDTFYFDIPAIIDEETYNKVQKKLANNRTTTPYPKATKYLLQKLIKCSICGAFYTRLHSNKRDTVHFKCTSDKNSLTGCKSQVYLNERIVNPIIWNFVKEQLFYVGKMNVEQRLEAIAGENDNKSKAIEEQEALKISYKEQETKLTRLEDLYLDNDIDKNRYKERKSKIEKELSSIKAQMDRLTDRIRLSDFNIKRFNSTDFTEQYFKEVEADLEKQMKVLREYVKGIYPLYIDKVYCFLKVDTIEGMFNIFYEPRKAQQKCAYFIKDTLAQYHPDIRNFYTPNNTLLTDSDEVDAYYTLEEMKEICSKNGFEVRYRE

SEQ ID NO: 18768 - protein, 645 aa, synthetic construct
MKGVMYLKKAALYIRVSTSHQIDKDSLPFQRQELSNYSKYVLGIDDFEIFEDAGYSAKNTDRPKYQEMMSRIKNNEFSHLLVWKIDRISRNLKDFTEMYDELKDYGVTFISKNEQFDTSSAMGEAMLKIILVFAELERKLTAERVFSIMLSRAEKGLWNGATVPLGYKWSKEKKFPVIDEEEARTVKYIYDLYEKKASTSKVAFQLNSEQVKTKRGGKWTSKTVNDILRNPFYIGTYRYNVKNSPNRRWKDEKEWVVVENNHPGFVSKEQFEKVNKMLSDNYKGNGEFQRANTNTHIFSKILFCGKCGLGMNAGLDRARKDGYRPSRYTCYSNHFTENTRNCNNFVSDITLMPFVLNYISNFINLQNKITQKHSLRDIERILLRGKSFVDVECIDRKGLEETYIAFAVGFDDKAYNNSNEEESAENLELESLKKEKLKYEKALKRLEDLFLFSDEAMSNKDFLFKKRDLTQHLERVNEKLSELHRRNADMRLTTDVAFLNKASNFLMSKHLSGKRNIDYRELLAVVDKTLIQDFIQTVIDKIIVIDKRVHSITFQNGITHNFLYKAKEKQKMRPKQKFLYRSYEPILIQYLKEHESVSRKEVEDLIGMGRTGAGSILKEFVDRGIVEKKGNSVATRYFLKEKKTT

SEQ ID NO: 18769 - protein, 452 aa, synthetic construct
MKAAIYIRVSTQEQIENYSIQAQTEKLTALCRSKDWDVYDIFIDGGYSGSNMNRPALNEMLSKLHEIDAVVVYRLDRLSRSQRDTITLIEEYFLKNNVEFVSLSETLDTSSPFGRAMIGILSVFAQLERETIRDRMVMGKIKRIEAGLPLTTAKGRTFGYNVIDTKLYINEEEAKQLQLIYDIFEEEKSITTLQKRLKKLGFKVKSYSSYNNWLTNDLYCGYVSYADKVHTKGVHEPIISEEQFYRVQEIFSRMGKNPNMNRDSASLLNNLVVCGKCGLRFVHRRKDTVSRGKKYHYRYYSCKTYKHTHELEKCGNKIWRADKLEELIIDRVNNYSFASRNVDKEDELDSLNEKLKTEHVKKKRLFDLYISGSYEVSELDAMMADIDAQINYYEAQIEANEELKKNKKIQENLADLATVDFDSLEFREKQLYLKSLINKIYIDGEQVTIEWL

SEQ ID NO: 18770 - protein, 452 aa, synthetic construct
MKAAIYIRVSTQEQIENYSIQAQTEKLTALCRSKDWDVYDIFIDGGYSGSNMNRPALNEMLSKLHEIDAVVVYRLDRLSRSQRDTITLIEEYFLKNNVEFVSLSETLDTSSPFGRAMIGILSVFAQLERETIRDRMVMGKIKRIEAGLPLTTAKGRTFGYDVIDTKLYINEEEAKQLQMIYDIFEEEKSITSLQKRLKKLGFKVKSYSSYNNWLTNDLYCGYVSYADKVHTKGVHEPIISEEQFYRVQEIFSRMGKNPNMNRDSASLLNNLVVCSKCGLSFVHRRKDTVSRGKKYHYRYYSCKTYKHTHELEKCGNKIWRADKLEELIIDRVNNYSFASRNVDKEDELDNLNEKLKTEHTKKKRLFDLYISGSYEVSELDAMMADIDAQINYYEAQIEANEELKKNKKIQENLADLATVDFDSLEFREKQLYLKSLINKIYIDGEQVTIEWL

SEQ ID NO: 18771 - protein, 527 aa, synthetic construct
MEERAKAVIYARFSSDKQREESIDGQIRECTAYAESQNLEVIGAYIDRALSARSDNRPDFLRMIADSARKAFQYVIVYQLDRFSRSRYDSAIYKNKLKKNGVRVLSAKEHIGDDPSSIILESMLEGYAEYYSAELSQKVKRGMTENILEGKWVGCRVPLGYKLTADKKLQIVPRDADAVRLIYKMYNSNERIIDIVRYLNAHRYKTAAGRTFNRSSLTKILGNKIYIGTYTWDGHVIKHFAPPILADGVWEAAQKRTKQHKQHPRPKRRSADYALTGLIYCGECGNPMTGQSGHSKNGSAYHYYRCSTKNNYHSRGKKQHINCKSRNISREKVEDLVLDATVRILSNPKAIKLIAKQAADVQRIDPTAQEQVRIAQERKTIQAKLENSIAAVEKGLCSKTIAENIERYESQISELDQKIDELKFAYAPIRIDAIAVEFFLKSLLDKKKDHDKYRLDMFRTFIRQVIIYSDKVEIRYNYTNCPPILKNPVSIALTGSPECSDKAFMVRLEGFEPSHPVPETGALSPEL

SEQ ID NO: 18772 - protein, 454 aa, synthetic construct
MRMKAAIYIRVSTQEQVENYSIQAQTEKLTALCRSKDWDVYDIFIDGGYSGSNMNRPALNEMLSKLHEIDAVVVYRLDRLSRSQKDTITLIEEYFLKNNVEFVSLSETLDTSSPFGRAMIGILSVFAQLERETIRDRMVMGQIKRVESGLPLTTAKGRTFGYDVVDTKLYINEEEAKHLQLIYDIFEEEKSITFLQKRLKELGFIVKSYSSYNKWLMNDLYIGYVSYSDKVHVKGIHEPIISEDQFYRVQEIFSRMGKNPNMNKESSSLLNNLIVCEKCGLGYVHRAKDTVSRGKKYHYRYYSCKTYKHTHELEKCGNKIWRADKLEEIIISRVKNYSFATRNLDKEDELDSINAKLKVEHLKKKRLFDLYISGSYEVSELDAMMSDIDAQINYYEAQIEANEELKKNKKIQENLADLATVDFNSLEFREKQLYLKSLINKIYIDDEQVTIEWL

SEQ ID NO: 18773 - protein, 516 aa, synthetic construct
MAGKKVTVIPMKPRQWAAENTEEKPKLKVAAYCRVSTEMEEQASSYEAQVQHYTDYIQRNPDWELAGIFADEGISGTGTKKRDGFNRMIEACQKGDVEYIITKSISRFARNTVDCLQYIRQLKDLHIAVFFEKENINTMDAKGEVLLTIMASLAQQESQSLSQNTKMGVQYRFQQGQLRINHNHFLGYTKDEDGNLVIEPKEAEVIKRIFREYLEGSSLQEIANGLMSDGILTGGKRKLWRGEGVRLILRNEKYMGDALLQKTYTTDFLTKKRVKNDGSYAQQYYVENSHPAIIPRDIFMQVQQELDRRKSMKNKHSQCFSGKYALSGITVCGDCGNAYRRVHWKNRGTVWRCKSRVDKREHNCSGRTIYEKDLHEAIIKAINETVVDREDFLQQLSENINSVLTDGLTGRLEELDSKLKELESEIISMAIGGQGYDELASQIFSLRDERDAVAKQIAANTNLQQRVDEMVVFVKEHDVINEYSEVLVRRLIEKVTIFEKNIVVDFKSGVRVTVEI

SEQ ID NO: 18774 - protein, 473 aa, synthetic construct
MAKKVSEVRSAAVYARISADVEGKSLGVQRQLEDCRKLAAERGWVVGHEYVDNDVSAFSGKRRPGYEAMCSDLAAGVRDAVIVYNLDRLHRRPAELEDFVALCEAAGVNQVATVTADIDLGNDDGLFMARIFAAFAAKESGRKSARMKRKYEQKAAQGLPHGPNRPFGYEDDKITIRESEAEVIRELVARVIAGESVNSLTVWLNETGVAPVRGARWASTAVRGIVSSPRIAGLRAYKGEVVGQAAWEPIIDTAQRDQVLAALAVRSWNRKRSPRKYVLSGLCRCGRCQSRMFSAARLEAGASKRRYVCSSSPDHGGCGRMTVVAEPLEKLIADAVLTRLDSRVLADALAGKVRANPDTAALSAQVEAAQARLDELTGLYSSGAITAREWIMARDPITNTMTRLRREIADTADTGPLADLAGKGSALRAQWDDLGLDRCHAIIRAVIDHVVINPGQPGARGLDMGRIDPIWRT

SEQ ID NO: 18775 - protein, 511 aa, synthetic construct
MENGTNRALIVTRLSRVTEATTSPERQMEICQGLCNDRGYEVVGHAEDLDVSGSVDPFDRKRRPNTSRWLANEVEPFDVIVVYRVDRLTRSLRHLQKLVHWAEDNGKLVVSATEPHFDMTTPFAPVLIALIGTVAEMELEAIRERNSSAARHNIRAGRWRGGQPPWGYVSSNASGEWRLVPDPEQVELVNEVVARVLTGEPLQRIAHDLTSRGIPTPKGKAEWNVTPLKRSLTSEAMLGYVISDFKPLRNDDGSPIIRAEPILSREVFDRVKVELESRSRRGQPTKRSSSLLLRVLYCGVCQQPAYQFNGGSHSKSPRYRCSSNARSKSCENLTFRMDLADEALNENLLDLFGDSERLERVWDTGSDHSAELSDINEMLEDLTGLVGTGPYKVGTPQRSALDTRIETLAVRQAALSSEAVRPSGWVWRPTGEIFANWWSNQDTESRNVWLRSMNVRMTYDNSSGAISWGLDWGDLKKFEEQLKLGKSAIEAIERLKTMDDDEGATVGADGL

SEQ ID NO: 18776 - protein, 523 aa, synthetic construct
MILARNITMIPARRMVGTQKPTEKPQKLRVAAYARVSTEFEEQESSYDVQVEHYTSYIKSNPEWELVDIYADDGISATSTTKREAFNRMIHDAKDGKIDMILTKSISRFSRNTVDCLKYTRELKDLNIAVFFEKENINTLDAKGEVLMTIMAALAQQESESLSANVRLGIQFRNQQGKVQINHNRFLGYTKDEEGNLVIVPEEAKIVRRIYAEYMDGRSFLQIKRSLEKDRILNGAHNKRWHESNIRQILTNEKYIGDALLQKTFTLNTLEKKRVANNGIAPKYYVEGSHEAIIDRDVFLRVQAEISRRANILNGGKKRIYSSKYALSSIVFCGHCGDIFRRIKWNNRGCKSTVWRCVSRVLKKTSGIDCPAKTIREEDLQAAVLTAVNDTFNKKEEIIPILMEIIQDVINEDSQESLEKLDIKIKDLQVKLLEAGKEQKIIDEIGDKIITLRKEKHDIMTKAAKNIELQERINDMFSFLEEQTQAITEYSDTLVRRLIEKITIYDNKVVVEFKSGLQSEVEI

SEQ ID NO: 18777 - protein, 513 aa, synthetic construct
MKRITKIEPVNKKANKKLKVAAYARVSTDRDDQLISLDVQKNHYEKYIKARPNWEYAGLYFDEGISGTHMEKRNGLLKLLEDCERGKIDYVIVKSISRFSRNTIDSIETARKLCEKGIYIFFEKENIDTGKMDSELLLSIFSSLAESESRSISENNKWGIQKRYQNGTFKIGYPPYGYHNIDGQMVIDENQAEIVRLIFSEVLVGKSPGLIAKELNEKKIPSKRGKKWSSGVIHGMVRNEKYTGDVIFQKTFTDENFKHHVNYGERNQYYAKDHHEPIVSHDTFEKANNIIEKNGKEKGIEKYTDKYKNRYALSGKIVCDECGGKWKRVKLNSYFGFACNTHIKNINMCSMKTIPEDSIKLAFATMMNKLSSAREVVLLPLERNLKRSSNDMQLSRLEELESLLEKNTERKNQVMDFFTSGLLDPAVNSEEIMRLEEERKTIAKEQDLISKNLSGGHERQKSLEDILSYTAKKNIITEFDDALFLKYVDHIIVYSRTEIGFVMKFGPIFKERI

SEQ ID NO: 18778 - protein, 490 aa, synthetic construct
MQDQRNTLQHNTSAAIYCRISRDKTGAGLGVERQEGDCRELAQRLGVTVSHVLVDNDLSAYSGKPRPSYLSLLELMKNGQIGMVIAWHSDRLHRSMVELEEYVTASEVGGVTTHTAKAGPLDLSTPSGRLIARQLGSVARYEVEHMIERQRAAKLQAAKSGKYLGGQRPYGFEPQRTAIRESEAAVIRELAHRFTNGASYWSLAIDLNQRGILTQHGKDWNALKIRNLLIRPINAGIVDHKGVEYVAESAAILTKDEWDDLQAAISLSKRTSVHPGRTRKHVLQGYLFCGLCGKKLFHKSKQQRDGSYKTTAACGKTDSQTGRPNGCGKVSRMVEPIIDLLSDCIMARLESPELAASLATYESDTTTLRELHVRQRALEGRSVEITNDYYVSGLLNRDEFERMKSSVDLELRAVETSIQQQTSSRVTTEAAIEFRSKWENSGIHWQRDLLSTLGVEIVVHPRPTHEGYTYPKYKDKWRFDPELIEIKWKA

SEQ ID NO: 18779 - protein, 499 aa, synthetic construct
MEQSKHVGIWIRVSTERQVKEESPEHHEQRARHYVQAKEGWQVLEVYRLEAVSGKSVIDHPEARRMLADIRRGHITGLVFSKLARLARNTKELLEFADIFRREQADLISLAENIDTSTPAGRLFFTIISAMAEWEREEIASRVQASVPIRAKLGKSLGGQASFGYQWKGNDFAIHPAEAPVRKLMYELFLKHQRKFAVAEELYTRGFRPRKGVKFTATTVDRLLRDSTAKGMRRANYTKSPGKDRNWTVKPESDWIYMPCEAIVSEETWNECNAILDAQTKRRTPVGKKAVYLLSGFVFCTCGTAMYVYHSSKSYACKKCKIRIAVADLDEIYQLYLKEYLVSINHADYVTRCDMQLKECTVLLEASRKERQKLSKRINDLLDLRLDGSLTKERYMETYVPLEAQLQQLDAELPRLEAEIDVRTISLMSSDSVLTEVRTLHDEWNNLAFEQRRGIVETITTSIEIGQADITINLAYAPPLPQNPKNTSHHFRDSYSPPT

SEQ ID NO: 18780 - protein, 546 aa, synthetic construct
MNKEKIIYFQYARKSSEGEDRQALSIPAQLRDNAQVINRNNLTIVDTLTDEASASIPFNRAGYTDMIRRIKKGEASGIVVWHVNRLIRNPMEEGEFKWLLQTGVIKSIWTPNREYRSEDNALLFSIEASMATQYTRDLSVNVKRGMRQQYERGEPAGIAPLGYLNTKFPISGTNYTKENPVVLHILRKGFDLMLTGAYTVKEVGTILYQEYGLRSKDGRQISKNALYKLFINPFYYGYFTRNGIMYKGNYKPIITVQEYDQIQHILGKKGKPRYKRLSFPFTGFITCGSCSCAVTATEKLKMTKAGELKSYVFYYCTKRRKGSEHCPEKQYTTKAEMEALIINELSKYEIVPAFKEWATEYYKTYYQAEIDKRNSLAQAELMHEQKLTQELDTLLDLRITNSISEEKFEEKKFEKEQLLIRVTAKRNKYENVHNDWLSIIEDNIEFAIGAVEAFKNGDEKAKKKICNQFGWNWTLKGKKLFIDKQEWLRPIKNMIEIYNYYLRRLEPEKTLIKSDFDPLTEYLSFSMSALCSYVRNHKPNYTQDSG

SEQ ID NO: 18781 - protein, 558 aa, synthetic construct
MTKLYSYIRFSSMRQSDGSSYERQIRMAKEIADRYNLELVNDYQDLGVSAFKGANSKTGALSRFLDEIGRSIPVGSWLFIENLDRLSRQDIISAQELFLSIIRRGITIVTGMDNKIYSIETVTANPMDLMFSILLFIRGNEESQTKRNRTNSSALLKIKAHQQNPQSPAVAIEEIGKNMWWTDTTSGRVLPHPVYFPVLQKIVQLRQEGHSAGVILDYLNEHHEPPAPTSNKKHGKWSRAMVSRLFNTKALIGVKTVNVDGVEYELRDYYPRVLSDSEFYFLRKNIIKKAWDYSHVKEKAIPLLSGIGVLRCVHCGATMVKQTAANGKREQYRYCCDGRKSGRTDCPYPNWGFRAVTLEGAVLQLLADKIWIAEDKTNPIPEIQVKIDEISRKIDNLINLSAMTGATKELANQITDLNSQREALHEEIRLFEREMYSVDSQGWDKLAQFDLSDVQNEERLKVRMKIKGALHEIECSRIDSKKNLFVLVYLDGLRQRLVIENNRGLKKGQIFVDLKTINDRQILESAGMVLHPCIEMIIDADWKAPEEIPGLLSEEFGI

SEQ ID NO: 18782 - protein, 544 aa, synthetic construct
MKTAYSYIRFSSSRQADGDSIRRQTELARSYADKNGLDLQDVSISDFGVSAFRGSNATEGALGAFLRLVDEQKIDSDCHLLVESFDRLSRQAVEDALALLMQVVNRGITLVTLSDSHEYKRGELDMTKLILSIVTMSRANEESEMKSQRTSAAWNKARLDAIEGKKAKNSRLPDWLSWNDDKTDFVVNQSAKEIIQRVFELSAGGSGIEIIARSLNEEGCRTFKKSKEWRSSGVSKLLRNRAVIGEFQFYKKDTQGKRSPIGEPIVDYYPRVITKPLFLAVQQGMDLRNKRGSGNRSGQFTNLFTGLIRCGECGAAVVTSSQTSKTPQGYLKCTLRCESQARMNYKYTEPQVLSALSSLQSVIEKYRSPISDETASLELDIRALSDKLSSLESLLDNAFTPRIAERLQEAELQLADAKALLSAEQLRVSTQQNREQIVLGLEPLESIGDRRAFNSKLRTVIDRIEMIEHPHRKGSALVYFISDRPVMEQHFTKLKGAHGTGSEVYELHVDDVPTYLGRTNSKKQLEFIIDETEDILSFMPTQLV

SEQ ID NO: 18783 - protein, 530 aa, synthetic construct
MRKVYSYMRFSRPEQAKGTSIERQSHFAEQYALEHGFELDKSLTMMDKGLSAFHGVHKKKGAFGQFLAAVTAGKVKSGSVLVVESLDRLSREDPLIAQSALSALILSGITVVTAADNQVYSREEIQQNPFKLIMSLVVMIRANEESETKQRRSNAFLKSALNQYQTNGKVRRLGADPSWLDFNKDDGTYSFNERIEVIRQILGLYNQGFGSLKIARRLTEENVPTLSGKRSAWGQTTVANIVKSHALYGMKRINVQGVDYDLEDFYPELITKSKWLALQQHRTKRSKSMHGRGETVHLITGHGKGFTTCGYCGGGLGAQTQKQYKRSGEYSKTVTRLHCLTHKETSSCCSSVFLESIENAVLFAACIGVEPQSLVPTANNVNYSALIDDIENKVKHIVEQVAEGAPWHLFKDSHDRLNSEKQKLIKERDSQKPDVNQSDVQKWVEKLIELADKARADNKEARLKCRTLINSICKSIVIQLRGHDLKSEPLITITFVTDEQFEFKVGKDGAVRFIDNDMAVNKRLKPLLTE

SEQ ID NO: 18784 - protein, 644 aa, synthetic construct
MALIPYARVSSGKQLSGLSMKHQNDQEYLQGLAVEHHTTLSPLVYADHGVSSFKGKNAKTGELSRLLKDIEANVIRSGDIVVMRALDRLSRQNLTSGEMLYNQIISRGVRILTTIDNFIYKADDPMSAIMKTLALNTANEESAKKSYLTNKNASFRIDQFKRNERPEGGHSWDVGVGRHPFWIALDEKKVIQHPVNWNFARQMVDMTLDGVGVTHIQRFAHSVGLELSYTACAKMFNSKAIYGTLVITHQDETHVLEGYYPALATEEEFYKIRAIKDAQTKTSNAGRNKVSLLAGINKFYCGDCGSFMCIGRNVKQQIEYYRCGCRMKKCFPYLKQELLDRLVLRSIASRNWDDDNSSTVDTKAIELELQAKTEEYQSEQRFVIQNRDLFDDSMIQSLKDKKSELEQLATKLEDLKLSTAKTEVFDFVDKDVITLYQEHCDKVEGYINGDIDLKTEARVVISKLVERITVDHRHLLKIEYQDGYVDYYVLLRRRDERKIHQRFFIKLIVVSEEQYQVIIETQPELTPNFTTVDRLDGYSVYFEDCHSYTPVTPIKILTPEQDFFDLLVDDVYEWKRASIMNAGATTTQWQENKDADVSSYGWNKSKVEITTRHYTKKVVTCIYKGDVDIGKVCALFDARSATVI

SEQ ID NO: 18785 - protein, 514 aa, synthetic construct
MKAYLYIRFSSKQQEQGDSVRRQEKAAHEWCKVNEVELSDMTFEDLGVSAFKEGGKRPALADLIEAIEMGKISRGSYVLVENDDRLSRLGWYATQQMIRHMVIDLGVKLVVLSSSTVYDTSNIEDIAQNILLMFNADRAYKESLRKSDMIRAARQKRRDDETLTGKLPFWLDRVDGDIRLNKRADVVRLIVELKKSGKSNQATARFLNDQKIPSASGVQWNASAVRVVFSNHAIYGAKAYFITDSKRKMHLDKIVENKLPPIVTKADFDAVQVVKKNVGNKSTKTPFSNLLKCGACGGGMVQRTSTYKEKKMIYRKCIGSLEGRCEQTKQIREPDVILVEALKDIKYIDSVQQHVSKVGELNKQIDTIKQTEQRLLELGNIDALTNLYTRLTDLESKLIGAKKEDEAQEQKPMDFDYKRVFDIEDTSEQNAMLKRVIESIVIQYLGVVDRKSSSRWRVKVIQRNGHHQSFVINQTHGFGNWKIVQETNTEKFKEELEKLTSGIDELDDWQDTEI

SEQ ID NO: 18786 - protein, 512 aa, synthetic construct
MELDAALSLRDEGLSAYHQRHVRQGALGVFLRAVEDGQVPPGSVLIVEGLDRLSRAEPLQAQAQLAQIVNAGITVVTASDGREYNRERLKAQPMDLVYSLLVMIRAHEESDTKSKRVKAAIRRQCQGWIAGTWRAPIRVGKDPHWVRGSEGGGFELIPERAEAVRHVIAMFRQGHGAVRIVRDLAERGLTVTDSGRTQSSNLYRLLANRMLLGEKSVEVDGEAFRLENYYPALLTPAEFADLRYLAEQRGRRKGKGEIPGVVTGLGITHCGYCGAAIVAQNLMGRKRLPDGRPHAGHRRLHCVTYSQGAGCKISGSCSVVPVERALMLYCSDQMNLTRLLEGDSGVTALNAELAQARAAVGTLERQIARVTEALLIDEEQAPAALLRKMRDMEAELERERHRCDALDLKVQAVASAETPAAADAWSALVRGVEQLDYDARMQARQLVADTFSRIVVFQSGFYPETDDGLIGLMLIAKRGSTRLLHVDRRSGEWRSADDVAIGTDLPLPHDAG

SEQ ID NO: 18787 - protein, 378 aa, synthetic construct
MSNTKITGQTALYERLSRDDEMQGESNFITNQKQLLESYAKRNGFVNIYHYTDDGVSGTTFDRKGFQKMIKAVEENKVSTVIVKDMSRFGRDYLKVGFYTEILFKEKGVRFIAINNGIDSEKQAESDFTPFLNIMNEWYARDTSRKIQSIFRARMEEGKRVSPSVPYGYYRNPKNKQELLVDKESAKVVKRIYRLVIEGYGVTHIADILTKDKVLIPSAYAQIHYPENNHSSKKRGIEDPYFWTPTTVGYILEKREYMGHTVLGKTICLDYKTKKRRKAKEDELIIFKNTHKAIIDEETWNNAQRLRKTVRRSPKYGTTSHPFTGLLICADCGGKLSYREPAEYKEKKYDCDYYFVCQHYRHRKGSCSIALHQGKNSE

SEQ ID NO: 18788 - protein, 609 aa, synthetic construct
MRNFEKITALYERLSRDDELQGESNSIINQKKILEEYASKNNLSNIIHFTDDGISGTQFDRPGFMAMMNGVNQGNIGCIIVKDMSRLGRDYLKVGQCMEILRQKGVRLIAINDNVDSFYREDDFTPFRNIMNEWYARDTSRKIQSTFKSKGESGKHTASTPPYGYIKDEKDKNKWIVDEKAAEVVRRIFNMTMQGNGPYRIAKILESEKVDIPAFHQQKLGYGLYQSKNFEHPYRWCSSTIASILKKQEYLGHTVNFKTRKHFKDKKSKYVSEDNWLIFENTHEPIIDQETFDNVQRIRGNVKRYPDGWGEYHPLTGLMYCADCGSKMYVHRTSNYKNIPYYTCSAYTKTPCGMLCPSAHRIKAEVVLNLIQDTLKDIKKYLDEDNEAFIRSIQNEMEEKEKTEIEKKRTRLIDSKGRLQELERLMCRIYEDMILNKIPNSRYEILNNQYETEQITLSKEIRDLELAILRYEKETDRAKKFISLISRYENFDELTTTMINEFVEKIIVHERDRKGSQTSKQKIELYFNFIGNYELPQAELSEEEKQKLEEEERKIKERKDKLHQNYLKRKASGKQKEYEDKYEARREQKKQEKLKVLKRTGIPLSEYKK

SEQ ID NO: 18789 - protein, 590 aa, synthetic construct
MKKDVKVIKGDTTLKRTASGCVERSIKRVAAYCRVSTDTEDQINSYNSQVEHYTEFIKKNKEWTLAGIYADEAITGTQVDRRIDFQRLINDCMNGDIDMIITKSISRFARNTLDTLKYVRKLKEFNVAVFFEEENINTLTMDGELLLTILSSVAQQEVENISANVKKGLRMKMERGEMVGFQGCLGYDYDPETKSISINEKEAEIVRYIFRRYIEGVGGMVISRELEEQGYLSPRGNKRWTETTVLGIIKNEKYKGDLMMGKTYTVDPISKRRLDNFGEQDKFYIENHHEPIISEEDFEKAQGIRLRRSKNRNTVANNGGKREKYSRKYAFSSMLECGFCGHNLSRRNWHSSSEYTKVIWQCVNATKNGKKYCPHSKGIEEEAIEKAFMESYRQVCHNNVEITNEFLKTVEEELKDNSLAKDLKKITNQLDKILKKEKDLVELRLNESISMDIYQDKYNEIAISKEKLLAEKRTLEVTLTDEKALKKRLEGFKKLLESNKYLEEFDRAVFESIVDKIIIGGTNDEGEIDPAMITIIYKTGKKDSQDGRLFKSRRKNAKEVNEETDNKLYPHSSDEVNNLCSYPMDNTSRP

SEQ ID NO: 18790 - protein, 444 aa, synthetic construct
MAAYCRVSTDQGEQLLSYENQVNYYTNYISENPLYEYAGTYADEGISGTNTKKRDEFNRMIADCRAGKIDMIITKSISRFARNTLDCLNYVLELKDLGIGIIFEKENINTLDAKGEVLLTILSSLAQDESRSISENCTWGIRRRFETGKHKMSTKRFLGYDTDETGKLVINRTQEPIVVRLYQEFLDGKTTDYIKRIFEREGVKNWDGGTKWQSTTLMSMLENEKYKGDALLQKSYTVDFLTKKRTQNKGEIQMFYVEDDHDAIISKRIWECVQLEIKRRKKYLEEHGTNSYSHRPESNPFASKIICGDCNKVFARKGWRSSTGVDRKVWQCSERYKVKGVMGCANRHVEEETLIKAYLMAWNALVENREDFMEQWTEQLQSENLLEGYRAEKFIEYTDGAEPLTEMDTDFMLKTLDHIKVFEDGTLLVVFLDGTEIECKNEEE

SEQ ID NO: 18791 - protein, 595 aa, synthetic construct
MQKQFVASPGSRAVIYLRVSTGKQAQKDLSIPDQRKQLKAYCKHSAYSIVGEFKDAKSGTTDKRPGFQAMVDAILYGGLECELIVVHSYSRFFRDQVVGELYIRSLAKRGVRVVSLTQQTDESPEGNLMRRILAIFDEYQSLETAKHVRRSLHENALQGFWNGGNTPFGYKVVEVERRGKARKKGLVIDERDASVVRCMFDLALKGDGSSGPMGIKAIACWLNERGYRTRRGKKWGVSGVHRHLTDRTYTGEFTFRSGENGGVEIPLQVPAIVSEDEFLQLRDFLDARNPKKTPPRVVTGDVLLTGLVTCPHCGNGMTTQTGKGGRYRYYSCSNQMRTGKSGCQGHRVPMGALDELVLQHVRADLLTSEKANALLDPLRTRQEKAEEDQAERLATRDAEVQAAKKSLDALYDMIRHGLVDLAEEDFKQRFLSAKEHHLRAKKERDQVAAELAPEARVSHQKVSAFVSGIQESLAQPSIAGKRGFLRAIIDEIKVGADQITILGRRSQLERAIVSGETIASTVPTFVRKWRRDRDSNPGDGLPPTHFPGVRLRPLGHLSVGRTFDGSRGQLQERKQQKIHSFPNLFPRPAQSPKCR

SEQ ID NO: 18792 - protein, 524 aa, synthetic construct
MSYPFGQDFPGTQLNAILYARVSSAEQAKSDLSIPDQMESMRKHCRQAGITVAHEFSDARSGRSLDGRSLGEILDIIKSGTVTINLLIVHSFSRLARESYEAEWLWRELEKLGVQIVSITQPIEDSPTGGLLRQMINVFDEYTSNEIAKHVTRTMKFNAEHGFWNGGLPPFGYVAAVAGMRGKKVKKKLAVDPNEAEDVRLIFTLYLDGDGKTGPMGVKKVAQWMNSHGHSRRGRNWTTGQLHRLLTDAVYVGDYLFGKKKPKDSQVIVKVPAIIDAPTFDKVQARLREHHPILKAPRQVSSPVLLTGIARCGHCGGGMVLATGKSNRYRYYTCSNHKRKGKSVCQGQNVPMEELDKIVTDALILALDDTERSQAVLEALNQRMDARDVDEKSRTAELRRVLKDKEQAVTRLFQGVEKGLFDLDDELFQVQYQTARSERDIIKGKIEALTRNRSMRMHMSPEKVAQFGHFLSEVLLAGPVGFRKRYIQAFLDSVVVKDRVINIIARENSPQINIDCGKSPEKLM

SEQ ID NO: 18793 - protein, 583 aa, synthetic construct
MATRLYSYVRWSTDKQSGNTSLDRQTDKAKAFASLHGLEYVQILDAGISAFRGKNTTQGALAGFIEAVKAGAIPNDSYLYVENLDRLTRQDVMTALNLFTGLLSLGLTIVTGMDGKVYSQDSVKNNVTDLMMSLFLFSRANEESLTKQKRAHETALKLIDRHRAGLPVNIKSAGSAPWWIDASMGTYEAVKPHPVHWKAAQKAVELMLEGWGCFRVASYLTDNPDLYPPPRGNRGKGKKRSECWAVANLKAMRSNRALYGEKVITIDGVTHRLSNYYPAVCSQTDFARLQDVACSNRHKVGEVRQTITLLSGLGLLRCGHCGGSMSFFSKEGRIRYVCETGKNKTSSCRVWSVSGLLVERCLLVPLIRGYMDIMMGKQGLREDLTQAIADKRGELNGIESQISNITSAITMGGNIPALVASLQALEHTKSGVLVELERLTQRQALQDGKDHQLESMVDFYELLTPDLLEDTTDERRLKVREVVRAVVRSVTLSKGPDKALTLSYELQDKTAYVYTGTLTAEGKKGYTLEVVNGDIQINGTEDNEEAQRLISVIQDAEQEYHKAISKILAGFPAPVGSHFFGKR

SEQ ID NO: 18794 - protein, 518 aa, synthetic construct
MEINAVNHIKDVAIYLRKSRGQEEDLDKHREELVELCEKNGWRYVEYGEIGSSQKLMDRPELSRLLKDIQEDMYDAVVVMDKDRLSREGVGQAQINKILAENDCLIVTPTRVYDLTNESDMMVSEFEDLMARFEYRAIVKRLKRGKRRGAKQGKWTNGTPPIPYIYNPKFRDKTDKSIEKGEDLDSLIVDEEKLEIYRFIVDSFLNGMSPYTIAWELNKRKIASPRGSTWNNTGIRRLLKDETHLGRIIANKTTGSKKRLSTGRLDYKVNKREDWIIVENCHKAVKTKEEHEKILIEMQKRKRDSYATTGENALSGLIVCSKCGATMAQKKSKIESERYSYVEACKNFLEDGITKCDNHGGSTMYLMKEIERQLVMYRDDIEKENERVSKGGGLTKTIESEKKKKEERIIELEDELEQVTTLALAKFFTPEEAVQQKKKILDNISKLESELYALNLQTDNLGNMTRSEKVNAINKFLEVMDMPHISNSDLNRLYKTIIHSIIWDKSNPDELKVTINFL

SEQ ID NO: 18795 - protein, 590 aa, synthetic construct
MRVAIYARYSSDNQCEASIADQFRMCRLRAEKDGWTVVEEYSDHSISGASMIQRPGIQALVLDSARGRFDLVLAEALDRISRDQEDIAGIYKRMRYADVKMFTLSEGEISELHVGLKGTMNALFLKDLADKTRRGLRGRVEDGKSGGGNSYGYDVVKRFDANGEPIRGDRTINEAQAAVIRRIFADYDSGLSSRAIAMALNREGVPGPMGREWGPSTIHGNRERGTGILNNELYVGRLVWNRLRYVKDPDTGRRVSRLNPESEWVTQDVLDLRIVDQALWDAVKARQGELAFSTRSRPEGNPLNDRRRPKHLFAGLVKCGCCGGGYSMISKDLLGCSTARNKGTCNNRVNIRRDALEASILNGLRKHLMEPELFQEFCAEFTMEVNRLRMERGANLEGWRQELKRIDRELDKIVDAILEGFPPSKLKDKAEKLEARKAELTEKLANANEPPPLLHPNMAALYAQRIVELSENLQHEDSRAQAAGILRALVDQVTLVPEDGELAIVLRGDLGAILRFAAGKKDPDFLSEAEALDNLLAQSGGSQKPSRGQQKTSAAEALEVSQLSMVAGAGFTNCFAMSKAIIPPCPATAA

SEQ ID NO: 18796 - protein, 578 aa, synthetic construct
MISSAPRAAIYARYSSEHQREASLEDQIRICRRLIAEKGWTVAGIYSDAAMSGASALRPGYQNLQDDAGRARIDVVVAESIDRISRDQEHIAAFYKQMSFLGIPLITVAEGEISELHIGLKGTMSALYLKDLAQKTHRGLEGRVRGGKSAGGISYGYRVRRELMSDGTISTGERMIDPDQADIVTRIFTEYASGLSARTIAAALNEEGIASPDSGKGAGTWGPSTISGNWKRGTGILNNELYIGRLVWNRQRFVKDPASHKRQARPNPPEDWIIEDVPELRIIPDDLWQAAKARQGAIRAEMNPAGVQSARPRPELARRPDYLFSGLVKCACCGASYTLINKTRYGCAAARNKGDAICSNRATILREEVESRVLDGLRDKLLHPELIAAFVEEYRKAFNAAAGDRSNALDHARRELKQVEKKIAGILSAIEDGLYHPSMKAKMADFESRKAQLTVSIEDTPEPPALRLHPRLSDLYREKIANLSQALQEPGLRLEATQILRSLITEIRMVPAPGATGGHEIELIGELAGILALSEADMTKPPRLARAGAGLGSESVVAGARNQRYLRLVERQIPKLAA

SEQ ID NO: 18797 - protein, 598 aa, synthetic construct
MDEKPRIAHIYSRVSKGTQVKGDGLRRQIEIASKFIEDVNISNSRDGLPVYTLADSPIYDRGLSAYFGLNTDENAGLGAFLKAAENGQVEKGTLLIVEAIDRISRLPVDDARALFARFKKYGIDVAICRFNLIIYHDKSSDLGQDLLITTAIHLAHLESEQKSKRIRARFTHKRLLEKEGGERRTSMSPSWIELSKDKTHFVLIPERARIVRKMVDLKLQGWGAHRITVYLNEQGYPCWNRSNTWYTNIVDKYLKMIQLVGDFQPVEHVHGEKGVRKEPVGDVIKGYYPALITEEEWIRLKASFKRSGGRQTGAFSNLFSRMLYCPTCGYCMSYFKPNRGRIKVRCRKQIDKQGCDQRALNYEEIEPRLIKALAGLDYAKINNNSFASLQKELNTLEAQVVELEASADDIKTQMLEESDPRIISAYVNKLKAIYTEQDKAKARFEKLSTQTSDYDVNTLEQLQLERNEDRERYNGFVRSFVKYVIASDSKLGKPLRIVFKSEAVGEVPVFFNDDKNNKAISDIFTAQKDVNEAAPIRLINMSRVHGNLGKLAAIDTVPVPDDLGDTLERIKYLFAVRQAVLQNPEKWQAIADDARLFE

SEQ ID NO: 18798 - protein, 538 aa, synthetic construct
MTVRVAAYYRVSTQRQAKEGLSLEDQQRAVRADCAARGEVIVEEYIERGVSGRTDERAELQRLLADANSIPRPFDAVAVHSFSRFFRDAAVLELTVRDLRANGIQYRSITQPTGNDDAGDMVRQVFAIFDEYGSKENAKHVRRTMVANAKEGFWNGAAPPYGYKTIVAEVRGKKQKKKLEVDAVEAPVVRLIFDLASKGVGKSGPLGVKKIVSHLNDNGFRTRNGNFWHIGPLHQLLIRSTYKGVHQYNRSDSRTRAKRSEDEIVEVAVPPIVSVDQWSAVQEILRSKNPKVSPPHTVSGPILLTGVARCAECGAAMTIRTGKSGRYRYYSCANAQARGKSACSGLSVRMERLDEAVTSALCERVLEPSRLENLLRDIGDRMQEVDSRDRGELFRVEAELAEAKLRLDRLHEAIERGVVDASDPQLASRVAKATTDRDVAAVAKERILARRVHGIDITPDKVVAFGSVMRDAITAGEIPFRKTYLRLLIDEIRVGKEVALIRGRNDRLRSRVAGGSPFDGGMVPTTVQEWRARRDSNP

SEQ ID NO: 18799 - protein, 523 aa, synthetic construct
MRQVITYLRFSSKPQERGDSIRRQKGLFERWLKDNPDAKVVDEFSDEGASAYHGHHLKGDFGRMLQNIQDGKYLSGQTVLLVESETRLNRQKARNTENLVDLITGKGVDVICLESGKIYTSTNIDDLDTSIQLKIAAHIAHQQSKEKSIKVSAAWENRAQLALEGKQQLTKNVPGWIDPDTRKLNEHSSTVVTIFDLLLSGESLHNIARYLQANNIKSFSRREKANGFSVHSVRTILRSESTVGTLAASKRNDRPAIPNYYEPAIDVATFNKAQEILSKNRVGRAPASDNPITINLFKGIIRCQCGASVHPTGVKATYQGVYRCNNVPDGRCNVPTIKRKPFDKWMLDNIVGFLERDDGNNTDKRKAEIEYQISLVTSKLKKATTLLLELDDVTELKEQVKELNIQRSNLQSELDELNQRETLSDKPLHHLSEIDLTTKAGRVEAQLILSKFVQSIELQREMIIITLRNGTVIGKSRDLSPVLSQDLMKQVVSSPSPTDIDMFSVITSDEEFRKSGKQVTKRS

SEQ ID NO: 18800 - protein, 523 aa, synthetic construct
MRQVITYLRFSSKPQERGDSIRRQKGLFERWLKDNPDAKVVDEFSDEGASAYHGHHLKGDFGRMLQNIQDGKYLSGQTVLLVESETRLNRQKARNTESLVDLITGKGVDVICLESGKIYTSTNIDDLDTSIQLKIAAHIAHQQSKEKSIKVSAAWEHRAQLALEGKQQLTKNVPGWIDPDTRKLNEHSSTVVTIFDLLLSGESLHNIARYLQANNIKSFSRREKANGFSVHSVRTILRSESTVGTLAASKRNDRPAIPNYYEPAIDIATFNKAQEILSKNRVGRAPASDNPITINLFKGIIRCQCGASVHPTGVKATYQGVYRCNNVPDGRCNVPTIKRKPFDKWMLDNIVGFLERSDGNNTDKRKAEIEYQISLVTSKLKKATSLLLELDDVTELKEQVKELNIQRINMQSELDELNQRETLSDKPLHHLSEIDLTTKAGRVEAQLILSKFVQSIELQREMIIITLRNGTVIGKSRDLSPVLSQDLMKQVVSSSSPRDIDMFSVITSDEEFRKSGKPVTKRS

SEQ ID NO: 18801 - protein, 595 aa, synthetic construct
MNEKKIEFIKADRKLIDRSKSEEHKLQRTAAYCRVSTNSEDQLNSYRSQVTYYTDLINQNLEWVMAGVYADEAMTGTQASKRESFQKLINDCMNGDIDVVITKSISRFARNTLDTLRYVRMLKEKGVAVYFEDEKINTLTMDGELLLVVLSSVAQQEVENISSNVKKGLKMKMKRGELVGFQGCLGYDYNNKDKTLSINEEEAEIVRYIFNRYIQGVGTHIIATELTSMGYKTKRGNSKWPDSTVLGILKNEKYKGDVLLGKTFTLDPISKRRMRNFGEEDKYYIHDHHEPIVSDDVFEKVQEILLKRGSSRDTVEKNGRRKKYTREYAFSSLLECGFCGGNASRRSWHAGKDHRQIVWQCSVATKKGKKHCPHSKGLVESAIEQAFMESYRLICADNTTILEQFLKKIERGLVDDGVKKKITKLKNGIQNTEKKRNNLVDMKIDGLIDDASYEEKYTELSAKLDELSYDLEELETTSHNENDIKKRISSFRKNLEQNQFLEKFDRYVFESIIEKVIVGEVEEDGTVDPYRLTFVYKTGIFDGQDSAKFKPKRRNAKSNNSPSELSSQTTNDPEKMYTQPSDDTCGMCNGVGTIK

SEQ ID NO: 18802 - protein, 583 aa, synthetic construct
MEIQKVAIYARVSTEEQASEGYSISAQLQTLRQYANLYNWEIVDEYVDEGISGKNITGRPAMQRLVADVEQEKFQAVLVWKISRLSRNMLDTLTLLDKFEDYGVKFISYSENFDTSSPIGRLVVQLMASIAEMERNTLSENVKLGMKQRALEGSWNGGVIFGYDSIEKELVKNKEEAEVVKLIYTLYSQGKGLKAIANQLNKNGYRTKRDRHFSINGVATILDNPVYNGKISWLKVENWDKKRRRGRNDNPILVEGQHEAIINDELWSLVQSRRKSKSFKQRQSNEPFLLSSILRCPDCGQGMVPSITTYTLSDGTKRKHRYYVCSDFHNKGSAACKANSVKAYDAENALFQRIESFLSNKQKFYETINSLTKTSIESIKKLKKELEETDSKLEETLALQNRYLEAFEQNLFPVTVLQERLQQVAIEKSAIEQKRNNLITEISKSDTKVIPPELVHLLLGKFVEVYKSSTRDKQKQLLQLLVKQITVGRTNDQLRQIDKVELEFDFTEVNLSNTFTLIHMLYLETEKEGLSTPSISESNGKYPPYLQLFLPLFVVRFSPVNPVCPIHLLHQNQPHQLMRKRHF

SEQ ID NO: 18803 - protein, 506 aa, synthetic construct
MSKNKKNMRNKEVRRKKRAYAYLRKSPNKFTDNTSIEKQLEEIKKYCEENDIELVDTFTDDLKSGKSFEGRDGFKEMYNNVIRSKDNVDYIIVFKQDRISRDTLDTLYIMKRLNSLGKHLISIKDNVNTEDPASKILVHILALVAELEREFINMRTFSGMEKRAEEGKFLGGKVYGYKTSNKKLVIEPKEAKVVQFIFKKYAIEKWGYKKIASYLNLQGIKTKNKQYWTINAVKTILENQIYIGNTKWRGEYRKGVHKKIIELPLWDLAQETMKTRSYKQEKVHPGSYPLSGLLKCPECGSSMVQGNSSSKYKYYQCSKNKNSGKAACSSNLVKKEYAEETILHELNNFFQSLNLAPYIKSATDSLLCFELEPLYKEAEKIEKEIKHINKKMETVMDLLDDETVPFDEKVFKNRLLGYQEQLNKQKLILEEINVQIRFKKSQISNEIIAYSVKNFSDLYEVLSDEERKSLCHYIIKEIHIFKEEKTKQRKIKSIIYNFSPDNLSLV

SEQ ID NO: 18804 - protein, 520 aa, synthetic construct
MKKITKIEGNLANSFIKPKTRVVAYCRVSTDSNEQLVSLQAQKAHYETYIKANPEWEYAGLYYDEGISGTKKENRSDLLRMLSDCETGRIDLIITKSISRFARNTTDCLEMVRKLIDLGVHIYFEKENINTGSMESELMLSILSGLAESESISISENTKWAIQRRFQNGTFKISYPPYGYQNIDGQMIVNPKQAEVVKYIFAEVLSGKGTQKVANDLNQKGIPSKRRGRWTATTIRGILTNEKYTGDVILQKTYTDSHFNRHTNYGEKNMYLVENHHEAIISHEDFQAVDAILNQRAKEKSIEKRNSKYLNRYSFSSKIICSECGSTFKRRIHSSGRKYIAWCCSKHISNITECSMQFIRDDDIKTAFVSMMNKLIFGQKFILRPLLEGLRNQNNAASFHRIEELEIKIENNMEQSQVLTGLMAKGYLEPALYNKEKNSLVQERERLLAEKDQLTRFVNGNLAKVEEVNHLLRFATKSKMLTAYEDELFENYVEKIIVFSREEVGFELKCGITLKERLVN

SEQ ID NO: 18805 - protein, 448 aa, synthetic construct
MDNLALAYYRVSSKRQGDRWSLVAQQEAVQKVARQRSYSIALECQDVKSGSSMDRSGLRKILAEVETGQYNYLLVWRLNRLTRSLADFLKMTAICQDNDTQIVSLMEPAQEDAIGRLQQQIYVMFGEWQLGVLKDNQKMAYQQKMNEGKLLSSSVPLGYEYVAGQAKVVAAESQIVQYIYAEYSLGRLGYRKLAECIHQKFDYALTPNGVAKILRNRVYTGVLENQYGRQANLFPRIIEDRQFEHVQRIRQSRQVTKKHASNEFLQHKVVCPVCGGSLTPTHMIRGHRQYDYWYCARSACSGIRINEADLLAQLDAHLMTLIDNHLRERLLEEIRQRSVMKPMVSQMIDQTKLFQQFETGELSSEELAEQLAQAKVIKQRVTTNQIAQKQLELKVRGLLSKLDQTGTEGLLAGLDIDHIEINGLKQVTGLFIQPVPKINLFKLGDVDT

SEQ ID NO: 18806 - protein, 472 aa, synthetic construct
MKIVGYVRLSRASREESTSITRQRQLIEKTCELRGLNLVEIVEDVDVSASRSRLDRPGLRRVRARIAEGTADAVMVWRLDRLVRSVVDVGVLLDEGLQIISATESLDTTSPMGRAMVEILQVFASMEAKTIGLRVSASQEHLRKVGRFPGGVVPYGYRSIPHPDGVGRALEPEPKEAAAVRRVADEVLAGSSVYAACARLNADGIKPRRAEQWGPTALQRMLRSNAVLGRVKARGEILRDDETGLPIVFWEPILSVADVERLRVITDWKPTPGRAEATRQGRQRRRASRMLSGFLTCPGCGGNLIVKQRPAPARPIYACAAAAQGRVCAGGIAVECDRVEDEVGRKFLALVGRYLVTEKVITQRDVAHLAGLEEAIRETTDAMREPGADVGALVARLARLQAERARLDAEPVEPTVELVETDETFADRWDRTEWLDRREMLLAAGVVVEVAPAKRRGLWDPARVSISVGHGD

SEQ ID NO: 18807 - protein, 469 aa, synthetic construct
MERQPLLRDCRERRCQVKSKKTEKKKTIRCAIYTRKSTEEGLDQDFNSLDAQRESAEAYIKSQASEGWTALPQHYDDGGFSGGNIERPALKRLLADIEEKKIDAVVVYKVDRLSRSLLDFTKLMEVLDRNECSFVSVTQQFNTTHSMGRLTLNILLSFAQFEREIIAERTRDKMSAARKKGKHVGGVPVLGYDLDPKGGRLLVNEEEAAMVREIFGLYLERPAMLATVNELTARGWRRKRWTTRKGIESGGGAWDKGNLHRLLTNIIYTGQVKYQDVVYPGEQPAIIETAVWEKTQELLHRNAKEGGKRVRESHGALLRRLLHCPHCNHAMTHSWTKKTDGRCYRYYVCVQAIKRGYGSCPTGSLPAAEVEKFVIERIRAIGRDPALIKEVLRQSRTKEPRIAPEELRAALEQFDPAWDNLVSSEQERLLHLLVERIAYDATAGTMAIAFRPSGIKSLGTETTPTPAAA

SEQ ID NO: 18808 - protein, 504 aa, synthetic construct
MQIKIIEGSTVRKGKQRVCAYCRVSTDAEEQENSLDNQIAYYKGFIQSNPDYEYAGVYSDFAISGYKEKRPGFQHLMEDARKGKMDLILTKSVSRFARNTAIVLKATRELKELNVGVFFELQNINTLSGEGELMLSIIAAFAQAESESGSMGAKMVYKRKYEAGIPVQYLERSFGYTKNEAGKFVPESTEAKWVKKIYKMAAEGYTAAAIKRILNQNGVLTVGGVKWIDSTVFRLIENEIYEGDYIMQKSYVNEERKQVKNRGEVNAWYITDDHQPIVSRELWQRAQDGLNQKREYLATGSIVEDFSEENYPYRNKIFCAECGQPLYHRIYSNGNRLCWDCSGVKRYGKKYCKGINVPDSVIREWNFDENIFIKVADRSKGVKQFSYTKESSWRRRNKQKEYITTAPPCTQDNYPYISKIHCAICGSKLTRHIQKGNKVIWICGGYKRKGKAFCEGVRVPDSVIRRFDITTDVYISERKDKHGKKHYGYSGKKPGRNTAGCQTD

SEQ ID NO: 18809 - protein, 428 aa, synthetic construct
MSTDQEDQIHSFDAQVAYYTKYIETHEKYEMAGIYADEGISGTNTKKRVEFKRMIADCEAEKIDMVITKSISRFARNTQDCLMYSRKLKNLGIGILFEKENINTMDSSGELLFTILSSLAQDESRNISENCKWGIRTKFKNGELHLNTFKFLGYDKDENGKLVINSEEAKTIRRIYREFLWGLNPQEIAKELEDDNVLGCLGQTKWYASTVLGILKNEKHMGDALLQKTYTADFLTKRQVKNQGEITQVYVKDSHKGIIDKETWNAVQEELERRKVFREKHGVKSYNYGAECNPFTNKLYCDLCGHVFGRHTWKTRGIAQWQCSNHRSDGKLTCKNEFVDVRNLEQGFVKAMNRITANREKYMKKWERMIEEGTPLQRVRANQMIEITAEPPLEAYVSELAQLTVIEVTVFGAKEFEFEFMDGSKIKI

SEQ ID NO: 18810 - protein, 532 aa, synthetic construct
MKFAAIYARSSLGKARQGDTVEHQVAMIKEFAKRTNMDVIFDDKFIYEEDGESGFKTTLLQRPAMRRLLGDIDKGLVDTVFFKGISRFARDSGETITTAKRLGNKGIRVLSLEENYDSFRDEPTMFQIYAVMAEQESRKTSIRVSLGNKQKARNGDWPGTTTPIGYKKVKDLPDEELRNALIAQGRRPKSLHPDEYADVVQKIFHLFVKENMGRKKIASTINDLGYRTREGELFQDKSIIDILGNEAYIGNIVYGKTRYNYIEDEIGNKKVQQVVHIDEEDWARCDGAHPPIIEKEVFYMAQAKIEENKKMFAHPRKFNAAKHPLTGLLVCGRCGAPMICQKRTNKKKDGTKIEYRYYVCSTYHKKGRNVCPQANVNADHLEEDVWNFIEKKLKHFEDLDMTDKVKEKDNKKQEILTDIYQIEGMLKKKLNASKTLLESRQFYDIETFIELNNELQQEVVKLREQKGKLEEAFQSLSDEDKRLDIVALYNEFKNHKTADIAHKRLVFHKLVDSIVFQDEMIKEINFDTALPL

SEQ ID NO: 18811 - protein, 536 aa, synthetic construct
MRKAISYIRFSSKAQATGDSTKRQSRLITNWLKQHPDYYLDDSLRFQDLGISGFSGANAKTGAFGEILAAIQSGFIEAGSVLLVESLDRVSRQDIDLAGEQLRKILRAGVDVVTLVDNEHYTKESLKDALSMIKALLVMERAHEESVMKSHRLRAVWASKRDKALSDGTIMSKRCVAWLKVSDDRKTFEFIPDNVMAVQRVFQLRLEGLSHIKIARQMNIEGFATLNQYSPKANNGWSQTSVTELLSNRAVIGVKVPSKSMLAKGTPDIPNYYPAVITSEQFYAVQQLKILSKGRRPSSDNPFATNLFKGVMRCSECGLIMIVSGATADGKRQGLYKCSNKGVGRCNSAGISRLQTDKALVQGLLYNTNRLDLQATSDITPLQEELSELVTRKEKLLKLAELADDVQSVAIRLKELNANITSVNAAIADHHQRLASSHTETLLHLDLSEKKHRVEAQIIIKRIIKSIVMNTAKRTCDITFHNGVKLNNYPLSYIIDGSRFGDMVSLMDDKEFTFTENSRAFTPPHIRPDWVSEYDE

SEQ ID NO: 18812 - protein, 553 aa, synthetic construct
MTKAYSYKRISSLKQAEGQGLDRQEDSVNKWLAAHPDVVLDTRFSFSDIGKSAFKGRHLAADAGLGMFLDAIEKGHIEKGSYLLIEAFDRFGRDDVDDARNRMVTIIKAGVSIVTLMDGREHNESNRGDIAYMITSLLQMHAAHDYSLKLAERVGKAKRAKRIAAKESLTVMSKQCPSWLDIVKDKCGKETFIHNAGAKTVQLIYAMREKNSGLPAITAYLNEHIEQYPPLTRQKKTRVWSQTTVRDILRAVSVLGTLPESRLKDSNGQPKYPAVAGYYGLPVISLDQWNKVQSLNVNGGGYKERSFPHGINLFRGLIRCSKCDGLMTIEGCRAGYHGSITCRKLSGKGCDAPRLPMRLFEAAIVNRLLINMTTEEYDKTLQKSLNTLVTEISVLGDEMKALHTAMRYARSEVVIEDIVSSIESITSLITEKQKQLDLLRQQSTSTKKHLFRDCNLKTNEGRIEARGLVFSYVKNITLNTTMKSCDVIFHNGKRVNNFSLVEVITGSEQALPILEGGYLDGWSNLMEDTGTLDFKDLNDFKSESEAVKIILGK

SEQ ID NO: 18813 - protein, 507 aa, synthetic construct
MRIAIYRRISTEEQSDFSLSAQEAKCLAYIEEHQWTHIKTYTDEGISGAKESRPALDQLRYDAQNKRFDVILVHDLSRLARGMRIQENILHEFMNLKVRLIALKDGFDSANPQSMLMAQFMGIINQQYRDNLRWHTQKGLQEKAARGHWVGTVPWGYRALDKNTIVPDESAQYVRQIFSLYATGQYSLSELADHINGLQTRHCTRDFIRAVLSSRAYLGYVHCGKEYQGNHEAIVTEDVWQACQAIRNSRSGERRIMQKPKATIKGLIMSIVCCERCGAAMWQHVNSNMGKATPIYYYRCSGNSRRTCNAPLSRMTKVDQMVLDMLASFMLDDDQIQRVMDGLRHRQPTPQPALDHATIQARIDRLALAWSHGNLSDAVYTREVAKLKARFDEKPKQPQSIDIEKAASYLRNVPMLLNAVGLQEQRRIVQELLVKVVVYEGVIVRIKPTAAFAPLFPQQFDVVFGAGDETRTRNHLLGRQMRYHCATPAFDLLAPMMPEVAEFVKSE

SEQ ID NO: 18814 - protein, 504 aa, synthetic construct
MRAVIYTRVSTREQAENSSLASQERDCQAYAQRHGWHVVQVYQDAGKSGRNADRPAFMQLREDAARKPRCFDVVLVWKLDRCARNTSLQLRVVDEFHALGIQLISITEPIEMDTAAGRFNLTMLGAGAELYSRLTGERVARARRAAAESGKLPGPVPTGYQRNEHGVLVPSADAEHQRMLFTLYATGLYSFSTVADAMNQRGARVWNTQQGRYVPYTKDNVASMLRNQAYIGKVSYKGQTYAGQHEALIDQQTWDAVQVLLDRRGQKRGWTPVSQGRGLLSEILYCEQCGSRMWQHYKRTTNVVYYECSQHRYNQCPMAMVRNDVLDQHMIAVLDALAFPSDWKRDILRVAQQQWDAHQQPAPEAPNIEAELAALKRLFLNDHIRADEYEQRKSALLAQAQAPRQKPAASFNMEQALDLLESISWTFKQKRALAEKRVALQSLIAAVWGTKKGIVAYQPREPFLELVGSLQQSRLVSRVGIEPTTSGLKVRCSTTELPAQRVRV

SEQ ID NO: 18815 - protein, 550 aa, synthetic construct
MSRKKQVNQKITALYCRISLEDGGDNESMSISNQKLMLRDFAEKNGMFQYEYYVDDGYTGRNFNRPSFQRMIADIQAGKIGCVITKDLSRLGRNYIEAGSYIEIFFPKHNVRYIAITDGVDSLTRQEMDITPFKNILNDMYSRDISKKVLAGRMTRSRQGKFCGGQPPLGLMRDPEDKGHLIRDPETAPVIRKIYDMALDGWGCMRIAKQLMDDKVPITRVKSNTECDVNYYSWGSARISHILRNPFYKGAHLVCRTHQKGIRSNTYDIIPREDWEIIEDCHEAIISPEEWEQVQEIIDRRPTIMKGNSCPFYNLFHGIIYCATCGKSMQVRYEKVGRTGKNRFTGEQREPIDKAYYICQTYNRLGKNACTSHKIEARDLYNLVLKDIQELAKTALKDADAFYQRLSSRMERRYLLDVSQTQKECQRLESRNREIDEMFLSLYTDKAKGILTEQRFMKLTATLEQEQEANQKRLQDLLLMMRHSDEQENEVRTFIKEIRRYAAIEELDEAVLNRLISKILVGEVKKIDGQKVQEVRIVYNFVGEIPEITA

SEQ ID NO: 18816 - protein, 543 aa, synthetic construct
MGKNGARVYSYLRFSDPRQATGSSADRQLAYASAWASKHGMELDATLTLRDEGLSAYHETHVKQGALGAFLRAVDEGRIPAGSVLIVEGLDRLSRAEPLLAQAQLGQIVNAGITVVTASDGREYNREGLKAEPMNLVYSLLVMIRAHEESDTKSKRVKAAVRRQCEAWVAGSYRGRIVSGKDPQWLAWDGDSWQFIPERVEAVRFALDAYRSGIGAARLVRLMHEKGMVLSDWGIAAQQVYRLVRLPALRGAKRISIDGEDFMLEDYYPRLLSDEEFSELETLVGQRYRRRGKDEIVGIVTGIGITRCGYCGTALVAQNLMQRVKADGSLEDGHRRLHCVSYSKNGGCNGGSCSSVPIERAVLAYCSDQMNLQRLLEPTSAGEDLRPRLVEAQKGVAEIERQLERVTDALLADDSGAAPLAFVRKARELEEDLERHRSAVRALEQELVAKSASAPAAGASKWAELAERAKSMADVDAREQARQLVMDTFETLVVYMRGVIPNPKGRYIDVMMKSRAGQTRWIRVDRRTGVWKEGADRPTTRRP

SEQ ID NO: 18817 - protein, 598 aa, synthetic construct
MNKIIPYGYLRVSSLEQVRTGGGLDTQDEEVRRYITQNSEKFDIDRMVVMSDAGMSAYTGSNIKEGELGRFLADVNAGLIPTGSALICYSVDRLSRQNPWVGTHLISTLIGAGIEIHSVAENQILRSDDPVGAIMSTIYLMRANNESVIKSERAKKGYEKRLNESITNKKVLTRQMPRWLFDCDGKYAIDPNMQNVINFTFDSYIAGQSTGFIAKELNNRGLMYGNTSWRGSYVAKLIRDERLIGKHIRYSKQIKGVKRVVIETIPNFYPVVVDVEKFFLANNMLTSVAKNIRGRTRVTYGDDSILRNLFNGVIKCGVCGGDTSVVQNTRKKIVNGEATYIPYKTFLRCRTRYELKNCVQSDIRYEVIERAILNHLMGLDISALLSVPVDNKIESYRTELELCKAEEVELHTLIEQREREGKRVRPRTIKAYEDVSDRIDELNKLIESYVEDTFVPDFNVDLNSIADVSNVSERSLIKKGIATIADSICYKRISDFILVEIKYRNLSVKHVLVIDNKQSKVVVNFSIEYHDNSHDYTCNGLILKYVKSPEEFHLMGVNIEDYAHMMNFVDFISDNEAKKIKEYLVSNLSRVLISNVPE

SEQ ID NO: 18818 - protein, 531 aa, synthetic construct
MTKPLAIPYLRFSSGKQAQGNSYERQHQMIAAWLQLHPDFLLATMRFEDLGISGWNGEHLDYGFGKLIAAIREGYIPAGSVVLVEAIDRIGRLQPIEMIRHLSNILSNGVNIITLDDGIEYTKDSVNGQHLFLLAAKVQQANLFSENLSRRATASWDAKRKQADRGEPVKRRLPIWINPDNTLNQDIAPIVVEIFELYASGFGTRRIQHRIKQRCQEKGISIKISNAGIQHWVSMKLAIGYWNDSPNVHPAVISEELWWRVQKERERRSKGKKLSAPTKHPLAGLVVCGVCGCTYRVKAETGKSKVMHCSRRDELDNRNCSNKKAIPVAVLETVRMMTGLEYIEKAILSTQPSVNTTRLAEIDQKLSALHSQLKSLADTIVSVGALPEIVAKASELKNERESLELEQTILLQQTDTTDIRSIVKAEATLLLDDPLRLNALLQKVGYKISVFPDARITVDDQSFRYAGYERKTDRFKLIDLMVEVGQLIYINKNEREKEARLKAVASTTKDPSPLLVLMKRKNAYISKAENL

SEQ ID NO: 18819 - protein, 538 aa, synthetic construct
MKNGAKVYSYLRFSDPRQATGSSADRQLQYAQTWAAARGLELDETLSLRDEGLSAYHQKHVKQGALGVFLLAVDEGRIPAGSVLIVEGLDRLSRAEPLQAQAQLAQIINAGITVVTASDGREYNREGLKAQPMDLVYSLLVMIRAHEESDTKSKRVKASIRRQCEGWQAGTYRGLIRNGKDPQWVRWTGEGWELIPERVEAVRAALDLYRSGLGAGRAAKLMHAQGHMLSDWGIAGQQIYRLVRLPALRGAKRISVDGEDYLLEEYYPRVLSDAEFDELQLLAGQRYRRRGAGEIPGIITGVGLAWCGYCGTALVAQNIMNRRREDGTLADGHRRLHCTSYSKNGGCSAGGSCSVVPIERALLAYCADKMNLQRLQQAAVDGQDLRQQLAEARLQVEELDKQLAKITDALLADESGAAPLAFVRRARELEQQQTAAQARVRQLERELSVASVHVEPAQAERWAELAALVEQDDYAAREQVRQLVLDTFERLVIYMRGIAPDGRQGRTIDMVMVPKGGAPRLLQIDRRSGAWVASEDWD

SEQ ID NO: 18820 - protein, 606 aa, synthetic construct
MSAIQKPRAYSYIRFSNATQAAGDSYRRQREAAEKYCAEHGLELVDAKEYSFFDQGKSAYKARHLDDTGELARFLSYVQDGTIPKGSTLLVESLDRLSRERVKDALPRFLDLLNQGINVVTLADGRLYTSQYNELDLIISIVQMSRAHEESATKGKRVSAAWRQIQDEARKHSRPIGKLRPLWLDFTPEGYVPIPERVEVVRRIFKLAQGGYGHRAIAAELNQAGIPSFTADRKNASGLWGNSSVSHLLKSRSVLGEYHPHQFLDGERVPCGSPILDLYPPIITEDEFYAAQQAVSSRRQTHATKPGKRFNIWQGVARCGLCDGAMHIATRSSSRILRCFNGAKGVCPAKAVMLPRSEEVFREILTKVDSLSLVQSNQGKLQQQIAVCDGKIAETTERLSILQAQIMNLGGSLPTSIVTVMQRLEDDLSKHQQEREALKEDIAREQIIDKEDFFSRLDLVTYEGRARANSLLKSLAARVNIERIGDARGAKAPVRYRVTVESGKGGFDIIDMNGMILFLPNTYASFELGREQGEVLPVLLGPLRVDGNREQVIQELLEFLASLGGLSRQSLADRENVDVDSVDAWLSAEVNRLMAPFASGQAFGNE

SEQ ID NO: 18821 - protein, 533 aa, synthetic construct
MKRAAIYARYSTDLQNDKSVEDQIRLCEAHAQRIGAQIVKTFHDRAKSGASMFGRAGLSQLMQDAENGTFDVLISESPDRVSRDIADLAHIHKTLKFRGVEMNCVNGGVMDTMQIGMYGVVGQMQREEGAKKVKRGMVGVVRSGRHAGGRAYGYEPVPGKPGELRILPDEAQIIVRIFKQYAAGTSPRTIAGALNEEGIAPPRGEKWNASTINGSGTRGYGILRNPIYDGRMIWNRVSMVKDPSTGRRVSRTNDASEHETIDVPHLRIVDEWLFQKVQERKAATGGEHKMMQPRSKRLLSGLLRCGACGGGMVIVGPDRGGNRIQCSTYRESGTCDNRRRFYIDRIEEQVIDSLRMAFSDTSVIEAYVKTYEEELKRRRGNAFKSRAAAQRGLNDAKDGITKIIDKISKGLIEDDEAAVLLTGLRENRNKYQAILDSVEEPVNVIELQPKALMRFRASIESLAKILRSSDGNVPMELGETFRQLVAAVVVEPTPAGEAYSVSLKAYLSSLMSSDLSVIKLVAGEGLEPPTRGL

SEQ ID NO: 18822 - protein, 558 aa, synthetic construct
MTRVALYARYSSDNQRDSSIEDQLRQCRERAAREGWTVVETYSDRAISGASLIRSGIQSLLADAQAGRFDMVLSEALDRLSRDQEDVAGVFKRLSFAGVRIFTLSEGEINELHVGLKGTMNALFLKDLAIKTHRGIRGRVEAGRIGGGNTYGYRVVHRLDTRGEPIRGERDIIEEQAEIVRRIFRDYAAGKGPRRIAAELNRENIPSPTGKRWNDATIRGNRAISSGILNCELYIGVIRWNRQKKLKNPDTGRFTYRLNPESEWIRAEAPELRIVPQDLWDATKRQQDKLTNLYRKQIDGARDAMHMARQKNGRLNATHRPRTLLSGLVFCGCCGGSYARRGQDRFTCTNHMLGNGCDNARTVPGKDLETRVLAGLRERLMTPEMITEAMSAYAQETNRLNRERRSAAETTRRDLAETVKAIAEIVRVIEQGGWHRALSDRLTELEARQDSLTARLSDIPEDVPDLHPGIVETYRRRIERLTETLAHPDQALEAAEIIREVIDRIVVTPGDKRGSYSITLQGELGTILDWIDRTSKPGYKPKPDTVQSRLSVSVNARA

SEQ ID NO: 18823 - protein, 559 aa, synthetic construct
MKTKLYSYIRFSSMRQSDGSSYERQIRMAREIAAKYDLELVNDYQDLGVSAFKGANSKTGALSRFLDAIGRSVPVGSWLFIENLDRLSRADIVSAQELFLSIIRRGITIVTGMDNKIYSLDTVTANPMDLMFSILLFIRGNEESQTKRNRTNSSALIKIKSHQENPQNPAVAIEEVGKNMWWTDTTSGYVLPHPTYFPVVQEIVELRKNGRSTAEILDHLNETYAPPPAVSNKKHSKWSRAMVERLFHTRALIGIKEVSVDGVNYELKDYYPRVIDDATFYHLKKNIGARAWNFGDKEEAKPIPLLSGIGLLKCDHCGCAMVKVKGTNKRSDQYRYTCDATRSRRLDCEHPNWSFRGDQLEKAVLQLLADKIWIAEDKANPVPALKVQVDEISRKIDNLIALSAMTGATKELADQITTLNSERETLYNQIKMAEEEMYSVDSQGWEKLAEFDLEDVYNEERLKVRFKIKQALKRIGCSRIDRNKNLFVLEYIDGKTQRVVIENSRGTRKGRIFIDLKTINDRQILESNGLVLHPCLDMLTDKNWKPEEEIPGPLQEFGI

SEQ ID NO: 18824 - protein, 545 aa, synthetic construct
MQDEFPGNQHSSGPVRAYSYVRMSTRKQLRGDSLRRQLERSKTFADEHSLLLDDSLQDLGVSAWRGRNFKTGALGRFLSMVESGEIPKGSYLLIESLDRLSREAVPDALTLFMAIINAGIIIATLGEDRQIYSRDRLNGDWTKLIIGLAVMSRGHEESQTKSERISAVAKRKREQAREGKGHITSITPAWIDAKRIDANRYEFTLNHHAETVRAIYEMAMRGLGATAIARKLNVDGVPAFKSKDGWYQSIIKALLTRHDVIGTFQPHRMQDGKRVPDGDPIEGYFPAAIEKDLFLRVQAMRSNPGRPGRKGDMFANLFTGLCHCAHCGGPMTMKLSRVKGNENGRYLVCANYVRGHRCKDGKRHFRYEPLEAVILDHVKEINLAETLHAAKFDDTLRELDEAIAGLTLQLEGLRRKEQRLAQAIEDDNEPPNAILNLLRVRQSERQAVEAELRHQQTERQRQSIRHDNFANMADRIAKLRVAWENAEETTRYELRSEAHNAIRELMTEISFDSPSYTAVVIIENGVSAYRIKDGMISALFRAFAA

SEQ ID NO: 18825 - protein, 700 aa, synthetic construct
MLISSTVADERLTTAHRAKLAYVYVRQSSVNQVRQHQESTELQYRLVDRAIGLGWPPERVQVIDEDLGKSGAGAVDRHGFQKLIAEIGLGNAGLVVSLDASRLARNNRDWHQLLELCSVFGVLIADGERLYDPRAYHDRLLLGLSGIMSEAELHQLRMRLHQGERQKAARGELRLPLPAGLAYDRAGTIILNPDEEVQARLHLVFAKFQELQSARRVMRYLERNGLSLPVRPLLGPSPHEIVWRAPDSARVLNILQNPAYAGAYVYGRRQKDPSRCRPGSLTGTVKVAIADWAVCLHAAHPGYISWEEFMANQGRLADNVCRYEAGHSGVPRKGAALLQGIAVCGRCGRRMSMRYTGPNADYPVYCCRSDRDQQGSALCQEVRALAVDALVERVVLDALMPDQIEIALAAVGQLEQESRQLERQWALRAERARYDAERARRQYDAVEPENRLVARSLERVWEEKLRVVETVEQEHARWRAQEPLLIGPAERAGLQALGESLPRIWNATITSAADRKRILRFVIREVVLDQKRTRGQVWLKIVWQTGATSEHHVQRRVHAYRDYIDIDRLRQRIVELNAEHKMDAEIAAILNQEGIVAALGCAFSGKNVWVLRTRWGIRTVKINGMDRNPMRWPDGSFSIQGAAAELGVTAQTVFDYLARGLLAGRQLAKGQPWQIELSDEQIKQLRNRIRRTKRSKKEAS

SEQ ID NO: 18826 - protein, 543 aa, synthetic construct
MGKNGARVYSYLRFSDPRQATGSSADRQLAYASAWASKHGMELDATLTLRDEGLSAYHETHVKQGALGAFLRAVDEGRIPAGSVLIVEGLDRLSRAEPLLAQAQLGQIVNAGITVVTASDGREYNREGLKAEPMNLVYSLLVMIRAHEESDTKSKRVKAAVRRQCEAWVAGSYRGRIVSGKDPQWLAWDGDSWQFIPERVEAVRFALDAYRSGIGAARLVRLMHEKGMVLSDWGIAAQQVYRLVRLPALRGAKRISIDGEDFMLEDYYPRLLSDEEFSELETLVGQRYRRRGKDEIVGIVTGIGITRCGYCGTALVAQNLMQRVKADGSLEDGHRRLHCVSYSKNGGCNGGSCSSVPIERAVLAYCSDQMNLQRLLEPSSAGEDLRPRLVEAQRGVAEIERQLERVTDALLADDSGAAPLAFVRKARELEEDLERRRSAVQALEQELVAKSASAPAAGASKWAELAERAKSMADAEAREQARQLVMDTFETLVVYMRGVIPNPKGRYIDVMMKSRAGQTRWIRVDRRTGVWKEGADRPTTRRP

SEQ ID NO: 18827 - protein, 575 aa, synthetic construct
MENFELKGFAKGKKQQKEQVGGNAIIYTRVSSSEQVDGQSLEVQIDKCREYANMHSYNIVGEFGGTYESAKSDKERKEFSRMLTFIKQSNKKGSNQIVKTVIVFSTSRFSRTGSTTIIEEVEARGAYVVSATSNYDPRTPVGKYMQLMELANARFQNDEKRATTVENSVKALLKGRWIGKAPRGYDQKTTKKEQIITINEEGKLIRKAFLWKANNKLSNEEIRHRLAAEGFHICKQKLSELFKNPFYCGYMAHKFLQGDIVQGNHPPLIPKEIFLKVNGELSKNHSGYEQKIDKEYAPLLGSIKCPCCGNNLSASISTKMRKKFGRTDIGYYVCSRKGCKYNSSTKNVHEAFEEEANKYVLSDKVSELLKLQLTITFENMNKENKERAQSIKSNIKAKEKELEQVETNYALCSDTKKQEICVKVMTRLEAEIKGLQVEYSKVNTEILNLDKFIDYAFAMRSNLFNLWELQGLEGRRRLQKLVFPDGFIYDKNNEHIEPKAINQFFLLNYSFPTNNGDKKRETNSENHRSSLQVLEAGLEPAQPQWPKDFKSFVSTIPPFEHPFKESGKRDSNSRP

SEQ ID NO: 18828 - protein, 478 aa, synthetic construct
MLAFIKQSNKKGSSQPVKTVIVFSTSRFSRTGSTTIIEEVEARGAYVVSATSNYDPRTPVGKYMQLMELANARFQNDEKRATTIENSVKALLKGRWIGKAPRGYDQKTTKKEQIITINEEGKLIRKAFLWKANNKLSNEEIRHRLEAEGLHICKQKLSELFKNPFYCGYMAHKFLQGDIVQGNHPPLISKEIFLKVNGELSKNHSGYEQKIDKEYAPLLGSIKCPCCGKNLSASISTKMRKRFGRTDIGYYVCSRKGCKYNSSTKKVHEAFEEEVNRYALSDKVSELLKMQLTITFEYMNQENRERAKSIKANIKAKEKELEQVETNYALCTDAKKQSICEKVMTKLEKEVRDLKTEFSKVNTEILNLDKFIDFAFKMRSNLFELWELQGLEGRRRLQKLVFPDGFIYDKNNEHIEPKKVNQFFLLKYSYPTGNGDKKKETNREKHDSSLRVLAAGLEPAEPFTCPATLSLQLAWSQN

SEQ ID NO: 18829 - protein, 545 aa, synthetic construct
MNKYHLYQRVSKQIQAEEGQGIQRQEQACEHWISDYNKRLLSEGKSAYSKGLIYEDRGKSAYTAANFKRGELGALINDIENGKIEKGDLIVIELIDRFSRANVDFVRSQFQRVLDAGVKIAITKWNLVFEENMESVSSVTGRILLEIGMYLAYQESSQKSSRIKASRKLLEDSGRKSIAKPPFWLARNLDLKSYTIIEENAEIIRKIFDLKLNFNYGPQKIIKSLGDLDIYRYSFDENGNLIKTTKNSPLNESSINAYIRNTNVIGKLNGKDYYPRIIDDRTFYAVQKRTRENTGGVGEIFRNVFVGVGKCGCLIRKENENGCGSLAKCGYIMAFSSRKVKNPTKGMYLKCNRKRKSTKCNSENINYYLAQNKIYNVLKSLKFDIDQSVDISHLEEKINAIDKSMSKIREYMTQYSDDEEWENQYNIKRMEREKIENEIKASKSRITGKLSNLDIDFSEEKDRVLFNQFLKDNRITVYFTKERMEIIIGSLNNFSIKCGYDDSSRDIDHIIESYSKNGFVGIEEKSSKSESKGLLRFNLPTASRS

SEQ ID NO: 18830 - protein, 475 aa, synthetic construct
MKTMNKVAIYVRVSTTSQVEEGYSIDEQKDKLEAYCKIKDWKIYDVYVDGGFSGANTQRPELERLISDVKRKKVDIVLVYKLDRLSRSQKDTLFLIEDVFAKNDVAFISLQENFDTSTPFGKASIGMLSVFAQLEREQIKERMMLGKEGRAKNGKSMSWTTIPFGYDYSKETGVLSVNPTQALIVNRIFTEYLNGKTVVKIIRDLNAEGHVGRKRPWGETITKYLLKNETYLGKVKYKDKVYEGQHEPIITQELFDLVQLEVERRQISAYEKYNNPRPFRAKYMLSGLMKCGYCGASLGLRYTRKDKNGISHHKYQCRNRHSKDLEKRCESGWYSKEELERVVIKELERIKFDPKYKNETLAKKEETIKVEEIKKQLERINNQVSKLTELYLDEIITRKELDEKNDKIKTERQFLEEQLENQKSNVLSIRKRKLTRLLKDFDVEKLSYEDASKIVKNIIKEIIVTKDGMSITLDF

SEQ ID NO: 18831 - protein, 612 aa, synthetic construct
MRNFEKITALYERLSRDDELQGESNSIINQKKILEEYASKNNLSNIIHFTDDGISGTQFDRPGFMAMMNGVNQGNIGCIIVKDMSRLGRDYLKVGQCMEILRQKGVRLIAINDNVDSFYREDDFTPFRNIMNEWYARDTSRKIQSTFRSKGESGKHTASTPPYGYIKDEKDKNKWIVDEKAAEIVRRIFNLTMQGNGPYRIAKILESEKVDIPAYHQQKLGYGLYQSKNFEHPYRWCSSTIASILKKQEYLGHTVNFKTRKHFKDKKSKYVSEDNWLIFENTHEPIIDQETFDNVQRIRGNVKRYPDGWGEYHPLTGLMHCADCGSKMYVHRTSNYKNIPYYTCSAYTKTPCGTLCPSAHRIKAEAVLNLIRETLKDIKKYLNEDNEAFIRSIQNEMEEKEKIEIEKKRTRLIDSKGRLQELERLMCRIYEDMILNKIPNSRYEILNNQYETEQITLSKEIKDLEQQVSRYEKETDRAKKFISLISRYENFDELTTTMINEFVEKIVVHERDRKGSQTSKQKIEIYFNFIGNYELPQAELSDEEKQKLEEEERKIKKRKDKLHQNYLKRKASGKQKEYEDKYKARREQKKQEKIKVLKRVGIPVSEYIKTNI

SEQ ID NO: 18832 - protein, 609 aa, synthetic construct
MRNFEKITALYERLSRDDELQGESNSIINQKKILEEYASKNNLSNIIHFTDDGISGTQFDRPGFMAMMNGVNQGNIGCIIVKDMSRLGRDYLKVGQCMEILRQKGVRLIAINDNVDSFYREDDFTPFRNIMNEWYARDTSRKIQSTFRSKGESGKHTASTPPYGYIKDEKDKNKWIVDEKAAEVVRRIFNMTMQGNGPYRIAKILESEKVDIPAYHQQKLGYGLYQSKNFEHPYRWCSSTIASILKKQEYLGHTVNFKTRKHFKDKKSKYVSEDNWLIFENTHEPIIDQETFDNVQRIRGNVKRYPDGWGEYHPLTGLMYCADCGSKMYVHRTSNYKNIPYYTCSAYTKTPCGTLCPSAHRIKAEAVLNLIRETLKDIKKYLDEDNEAFIRSVQNEMEEKEKIEIEKKKIRLTESQNRLQELERLMCRIYEDMILNKIPNNRYEILNNQYETEQVALSKEIKDLEQQVSRYEKETDRARKFISLISRYENFDELTTTMINEFVEKIIVHERDRKGSQTSKQKIEIYFNFIGNYELPQAELSEEEKQKLEEEERKIKERKDKLHQNYLKRKASGKQKEYEDKYKARREQKKQEKLKVLKRVGIPMKDYMK

SEQ ID NO: 18833 - protein, 485 aa, synthetic construct
MAEKRKVAVYCRVSSMHQAIEGYSIEQQRDSLTKYCEAMEWNIYDIYIDAGFSGGKLERPAMDKLIREAEAGKFDTVAVYKLDRLSRSVQDTLHLIRDVFKEHDIDFVCLQENIDTKSAMGNLFLTLLSAIAEFEREQITERMAMGRHGRAKSGKSMMWARPAYGYRYDRESQTVSVVQSEAMIVKRIYKEYLEGKSVSQIKNDLNSEGHITKEKPWVYKRITYILQSRVYTGVNEYKGEIYDGKHEAIIDTETFELTQMEFAKRQQQTKDKKNNPRPFQAKYMLSGLARCGYCKAPLKLRLGAVRKDGTRAMVYDCHNRWNRKVTYLTIYNDNKQCTESGRYQKADLEAYVLDKIKELQLNPDTIREKMDLNEKPTANTEEIKKQIAKTNQQIDKLNDLYLNDLITVEKLKERADKLKKERELLEAELSKNSDHLFKAKKKQLNDLLMNKDIDSMTYEEQRNLVKMLIYKVDVTKEDINIIFDF

SEQ ID NO: 18834 - protein, 516 aa, synthetic construct
MAGKKVTVIPMKPRQWAAENTEEKPKLKVAAYCRVSTEMEEQASSYEAQVQHYTDYIQRNPDWELAGIFADEGISGTGTKKRDGFNRMIEACQKGDVEYIITKSISRFARNTVDCLQYIRQLKDLHIAVFFEKENINTMDAKGEVLLTIMASLAQQESQSLSQNTKMGVQYRFQQGQLRINHNHFLGYTKDEDGNLVIEPKEAEVIKRIFREYLEGSSLQEIANGLMSDGILTGGKRKLWRGEGVRLILRNEKYMGDALLQKTYTTDFLTKKRVKNDGSYAQQYYVENSHPAIIPRDIFMQVQQELDRRKSMKNKHSQCFSGKYALSGITVCGDCGNAYRRVHWKNRGTVWRCKSRVDKREHNCSGRTIYEKDLHEAIIKAINETVVDREDFLQQLSENINSVLTDGLTGRLEELDSKLKELESEIISMAIGGQGYDELASQIFSLRDERDAVAKQIAANTNLQQRVDEMVVFVKEHDVINEYSEVLFRRLIEKVTIFEKNIVVDFKSGVRVTVEI

SEQ ID NO: 18835 - protein, 452 aa, synthetic construct
MKAAIYIRVSTQEQVENYSIQAQTEKLTALCRSKDWDVYDTFIDGGYSGSNMNRPALNEMLSKLHEIDAVVVYRLDRLSRSQKDTITLIEEYFLKNNVEFVSLSETLDTSSPFGRAMIGILSVFAQLERETIRDRMVMGKIKRIEAGLPLTTAKGRTFGYDVIDTKLYINEEEAKQLRLIYDIFEEEQSITFLQKRLKKLGFKVRTYNRYNNWLTNDLYCGYVSYSDKVHAKGIHEPIISEDQFYRVQEIFSRMGKNPNMNKESSSLLNNLIVCEKCGLGYVHRAKDTVSRGKKYHYRYYSCKTYKHTHELEKCGNKIWRADKLEEIIISRVKNYSFATRNLDKEDELDSITEKLKTEHSKKKRLFDLYINGSYEVAELDKMMADIDAQINYYDSQIEANKELKRNKKVQESLAELATVDFDSLEFREKQIYLKSIINKIYIDGEQVTIEWI

SEQ ID NO: 18836 - protein, 452 aa, synthetic construct
MKAAIYIRVSTQEQIENYSIQAQTEKLTALCRSKDWDVYDTFIDGGYSGSNMNRPALNEMLSKLHEIDAVVVYRLDRLSRSQRDTITLIEEYFLKNNVEFVSLSETLDTSSPFGRAMIGILSVFAQLERETIRDRMVMGKIKRVESGLPLTTAKGRTYGYDVVDTKLYINEEEAQHLQLIYDIFEEEKSITFLQKRLKKLGFKVKSYSSYNKWLMNDLYIGYVSYSDKVHAKGIHEPIISEDQFYRVQEIFSRMGKNPNMNKESSSLLNNLIVCEKCGLGYVHRAKDTVSRGKKYHYRYYSCKTYKHTHELEKCGNKIWRADKLEEIIISRVKNYSFATRNLDKEDELDSITEKLKTEHSKKKRLFDLYINGSYEVAELDKMMADIDAQINYYDSQIEANKELKRNKKVQESLAELATVDFDSLEFREKQIYLKSIINKIYIDGEQVTIEWI

SEQ ID NO: 18837 - protein, 515 aa, synthetic construct
MKTAIYLRKSRADLEAEARGEGETLAKHRSTLLKIAKEMNLNVLSVREEIVSGESLVKRPEMLALLEEIEDNKYDVVLCMDMDRLGRGGMKEQGIILETFKRSNTKIMTPRKTYDLNDEWDEEYSEFEAFMARKELKIITRRMQRGRVASVEAGNYLGTHAPFGYDIHRLNKRERTLTINPEEASVVRMIFDWYANEDMGASAIRSKLNDLGYKSKLGNDWNPYSILDILKNNVYIGKVTWQKRKEVKRPDVVKRSCARQDKSDWIIADGKHEPIIPESLFEQVQEKLNSRYHVPYNTNGIKNPLAGIIKCSKCGYSMVQRYPKNRKETMDCKHRGCENKSSYTELIEKRLLEALKEWYINYKADFEKHKQGEKLKETQVIQMNEVALRKLEKELVDVQKQKNNLHDLLERGVYTVDIFLERSNVVSDRINEITSTMENLKKEIKTEIKKEKVKKDTIPQVEHVLDLYFKTDDPKKKNSLLKSVLEKAVYKKEKWQRLDDFELVLYPKLPQDGDI

SEQ ID NO: 18838 - protein, 491 aa, synthetic construct
MGLAAIYLRLSRNEEQLNIDEILLNHRNALTKLAKQQKLTYDIYQEISSGVNTERPELNLLLSRLDDYDALLVMDIDRISRDNAHAEEIKKMLIIHDIKILTPQGAIDLSQESNEMLFSFQAMMANFEYKQIRKRLGRGRLAAAEQGKWTMSNRVPLGYKKNEEKRLEVIEEEAKIIRFIFQKTLERVSANEIAKQLDILGWRSRQGKVLTSTHISNMRRNVVYYGVVKAGRKVNGRVVDEVFVEDAHEPIVSKQMFLEVQKILEENTTGNFFNKLKATRKLQNLIYCNCCKRKRYIQCDGNGIDYIKSCIYKVDNNKCRDRGYKYEPIEQFVLQKIKEKKPSFEQELQMLKSLDTTEIEKKLFIQRESLEKQINRFNKRQRNLKEMRMDGEISKAEFYEMRDENEEQIKQVKQQMELIDIKLENLSNTDEEQARLQDAIKKLDKLEELKAESCNTFLKKFIKKIWFSSNTEANHDTTRPKEDATIEIEWL

SEQ ID NO: 18839 - protein, 452 aa, synthetic construct
MKAAIYIRVSTQEQIENYSIQAQTEKLTALCRSKDWDVYDIFIDGGYSGSNMNRPALNEMLSKLHEIDAVVVYRLDRLSRSQRDTITLIEEYFLKNNVEFVSLSETLDTSSPFGRAMIGILSVFAQLERETIRDRMVMGKIKRIEAGLPLTTAKGRTFGYDVIDTKLYINEEEAKQLQMIYDIFEEEKSITSLQKRLKKLGFKVKSYSSYNNWLTNDLYCGYVSYADKVHTKGVHEPIISEEQFYRVQEIFSRMGKNPNMNRDSASLLNNLVVCSKCGLGFVHRRKDTVSRGKKYHYRYYSCKTYKHTHELEKCGNKIWRADKLEELIIDRVNNYSFASRNVDKEDELDNLNEKLKTEHTKKKRLFDLYISGSYEVSELDGMMADIDARINYYEAQIEANEELKKNKKIQENLADLATVDFDSLEFREKQLYLKSLINKIYIDGEQVTIEWL

SEQ ID NO: 18840 - protein, 516 aa, synthetic construct
MAGKKVTVIPMKPRQWAAENTEEKPKLKVAAYCRVSTEMEEQASSYEAQVQHYTDYIQRNPDWELAGIFADEGISGTGTKKRDGFNRMIEECKKGDVEYIITKSISRFARNTVDCLQYIRQLKDLHIAVFFEKENINTMDAKGEVLLTIMASLAQQESQSLSQNTKMGVQYRFQQGQLRINHNHFLGYTKDEDGNLVIEPKEAEVIKRIFREYLEGSSLQEIANGLMSDGILTGGKRKLWRGEGVRLILRNEKYMGDALLQKTYTTDFLTKKRVKNDGSYAQQYYVENSHPAIIPRDIFMQVQQELDRCKSMKNKHSQCFSGKYALSGITVCGDCGNAYRRVHWKNRGTVWRCKSRVDKREHNCSGRTIYEKDLHEAIIKAINETLVDREYFLQQLSENINSVLTDGLTGRLEELDSKLKELESEIISMAIGGQGYDELATKILALRNERDMVEREIAADANMQQRIDEMGDFVKNHDTISEYSEVLVRRLIEKVTIFEKDIVVDFKSGVNIAIEI

SEQ ID NO: 18841 - protein, 447 aa, synthetic construct
MKVAIYLRVSTQEQVDNYSIEAQRERLEAFCKAKGWTVYDVYVDAGFTGSNTDRPGLQRLLMELDKVDVVAVYKLDRLSRSQRDTLTLIEDHFLKNKVDFVSLTEALDTSTPFGKAMIGILAVFAQLERETIAERMRLGHIKRAEEGLRGMGGDYDPAGYKRQDGRLVLVPEEAQHIQEAFNLYEQYLSITKVQKRLKELNYPVWRFRRYRDILSNKLYCGYVQFADKHYKGQHESIITEEQFDRVQILLSRHKGRNAFKAKEALLTGLAVCGECGESYVSYHCRAKGKHYRYYTCRARRFPSEYPEKCHNKNWRSEAIEKFIQDALYTIADEKETSEREFVAIDYGTQLKKIDQKLERLVDLYADGSIEKSVLDKQVTKLNNEKRDIAEQQAAQTERAARSVNRKQLQDYAIVLESAAFPDRQAIVQKLIRRLAIHKDRLEIEWNF

SEQ ID NO: 18842 - protein, 546 aa, synthetic construct
MLRLGIYARVSSDDQAERGTIENQLEFARKYADLHQLEIVKWYKDDGVTGTIPLEARPAGRELLQDAKNGIIDLLLIYRLDRLGRSARIILNSVHELESDGVKIRSMTEPFDTGDPSGRFLLTILAGVADLERETIIERLWYGANRAARAGKWLGGIVPYGYRVDSDGYLQICEDLLPNSDMTEAGVVRLIFHMLANQGHSCIKVSDYLNALGVPTAYAKDERKITRGKRKENTAGIWRPSRIRGIITNTSYKGVHFYGKRSTRKRDVIEREVPAIVDVETWEKAQKVLRGNQIEAMRNIKNQYLLRSLLKCQCCGLTYVGIHYPGSKRALKGYYTCTGKQAYKGPMQGKCTSKNLPQDWIEDLVWRDCLAFINQPGEALQEIAAAREVKQTEKVDLESEIALIQKSIDDKDVERQSILDLFRKSIITFTDLEKQIQKINQEKEILEQRIKEIRTSLQVDRDYSTKVKNAFQLLTSLRNKLDDNPSFETRREIVKTLVHRIQVHTAPSEGSKRPRASVTVQYCFSKDIIYTDKDCTNQLTETEREK

SEQ ID NO: 18843 - protein, 544 aa, synthetic construct
MSLPTTVETIIGYIRRSRQDLLREKKTNQDTLAEQHELISGILKRYEKEHGVHTELLSEIESGDSIEGRKEFKKLLEFLKKVSPRTVAVCVKELSRLGRGSMEEMGIITNILKRKHVYIITPYRVYDPQNKDDARMIDFYLFMARMEFLSIKERMVESRYTYAAMGRHMGGSSAIPYGYKLNERTQKLEPDERTAWVVQKIFHHYVVDKVGYNGISTILKKEGIPSPGGRGYWHPQTIRRILINRAYIGTLEFKKTYRQPEKNAEGKTIMKVYERAEHEQIIVPNAWEPIIDEDTFNKAQEILTGRRNSPTTRLDFEPNPLASLVICSTCNKKMIRQSGTQKYPKKDGTFSVYQKEFLMCKDCHIYVKYKSVEEEIIRILQEECIEVDPDILKERLKDLTDFSSIKKQDYDPAKQIEKLRAEIERHKDGLGNAGYKNTMGMMNDQVYELTVARLMREIEQKELYIEQLLAELQEEHTEGLDMDEVQFRFKTVLEYYLNGDFSKGEKNELLRGVFDYIVLEFISKGKFNLHVMFNPKMFFNATLH

SEQ ID NO: 18844 - protein, 452 aa, synthetic construct
MKAAIYKRVSTQEQIENYSIQAQTEKLTALCRSKDWDVYDIFIDGGYSGSNMNRPALNEMLSKLHEIDAVVVYRLDRLSRSQRDTITLIEEYFLKNNVEFVSLSETLDTSSPFGRAMIGILSVFAQLERETIRDRMVMGKIKRVESGLPLTTAKGRTYGYDVVDTKLYINEEEAQHLQLIYDIFEEEKSITFLQKRLKKLGFKVKSYSSYNKWLMNDLYIGYVSYSDKVHAKGIHEPIISEDQFYRVQEIFSRMGKNPNMNKESSSLLNNLIVCEKCGLGYVHRAKDTVSRGKKYHYRYYSCKTYKHTHELEKCGNKIWRADKLEEIIISRVKNYSFATRNLDKEDELDSITEKLKTEHSKKKRLFDLYINGSYEVAELDKMMADIDAQINYYDSQIEANKELKRNKKVQESLAELATVDFDSLEFREKQIYLKSIINKIYIDGEQVTIEWI

SEQ ID NO: 18845 - protein, 452 aa, synthetic construct
MKAAIYIRVSTQEQVENYSIQAQTEKLTALCRSKDWDVYDIFIDGGYSGSNMNRPALNEMLSKLHEIDAVVVYRLDRLSRSQRDTITLIEEYFLKNNVEFVSLSETLDTSSPFGRAMIGILSVFAQLERETIRDRMVMGKIKRIEAGLPLTTAKGRTFGYDVIDTKLYINEEEAKQLRLIYDIFEEEQSITFLQKRLKKLGFKVRTYNRYNNWLTNDLYCGYVSYKDKVHVKGIHEPIISEEQFYRVQEIFTRMGKNPNMNRDSASLLNNLVVCGKCGLGFVHRRKDTVSRGKKYHYRYYSCKTYKHTHELEKCGNKIWRADKLEELIIDRVNNYSFASRNVDKEDELDYLNEKLKTEHVKKKRLFDLYISGSYEVSELDAMMADIDAQINYYEAQIEANEELKKNKKIQENLADLATVDFDSLEFREKQLYLKSLINKIYIDDEQVTIEWL

SEQ ID NO: 18846 - protein, 558 aa, synthetic construct
MTKLYSYIRFSSMRQSDGSSYERQIRMAKEIADRYNLELVNDYQDLGVSAFKGANSKTGALSRFLDEIGRSIPVGSWLFIENLDRLSRQDIISAQELFLSIIRRGITIVTGMDNKIYSIETVTANPMDLMFSILLFIRGNEESQTKRNRTNSSALLKIKAHQQNPQNPAVAIEEIGKNMWWTDTTSGRVLPHPVYFPVLQKIVQLRQEGHSAGVILDYLNEHHEPPAPTSNKKHGKWSRAMVSRLFNTKALIGVKTVNVDGVEYELRDYYPRVLSDSEFYFLRKNIIKKAWDYSHDKEKVIPLLSGIGVLRCVHCGATMVKQTAANGKREQYRYCCDGRKSGRTDCPYPNWGFRAVTLEGAVLQLLADKIWIAEDKTNPIPEIQVKIDEISRKIDNLINLSAMMGATKELANQITDLNSQREALHEEIRLFEREMYSVDSQGWDKLAQFDLSDVQKEERLKVRMKIKGALHEIECSRIDSKKNLFVLVYLDGLRQRLVIENNRGLKKGQIFVDLKTINDRQILESAGMVLHPCIEMIIDADWKAPEEIPGLLSEEFGI

SEQ ID NO: 18847 - protein, 539 aa, synthetic construct
MLRQTTQKITALYPRLSHEDELQGESNSISNQKRILENYAKQNGFGNLKWYTDDGYSGANFQRPGFQSMLADIEAGLVGTVIVKDMSRLGRNYLQVGMYTEMIFPQKNVRFIAINDGVDSAQGDNDFAPLRNIFNEWLVRDTSKKIRAVKRSKGMSGKPVTSKPVYGYLMDEDENFIIDEEAAPVVKQIYSLCLAGNGPTKIARVLTEQQTPTPGTLEYRRTGSTRRYHPGYECKWATNTVVHILENREYTGCLVNFKTEKVSYKVKQSKENPAEKQVIFENHHEPIIDRDTWERVQELRKQRKRPNRYDEVGLFSGILFCADCGSVMYQQRYQTDKRRQDCYICGSYKKRTADCTAHFIRTDLLTEGVTENLRKVTSYAAKHEARFMKLLTEQTEDGSKRRNAAKKKELEAAEKRIAELSAIFKRLYEDSVAGRISDERFTELSADYEAEQKELKERAAVLQGELSRTLEATANAVKFMKVVRKYTSFEELTPTLLREFVEKIVIHESEALDGKRRGKLRRQEIEIYYSFVGKVELPD

SEQ ID NO: 18848 - protein, 511 aa, synthetic construct
MNIAAYCRVSTDKSDQLNSLEAQKKFFAEFTERNGHNLVRLYADEGISGTKIKNRKEFQKLMRDAKQGLFDMVVVKDISRFARNTVDFLQSIRALKALGIETTFLTANMTVLGNSEFVLTIFGALAQEESANTSKRVKFGKKMNAEKGRVPNIVYGYDKTIGDYFNLEINKEEARNVRQIYKWYIDEGYGAAKIANMLNEQGIKTKRNCAWSQNAICRILTNELYTGKIINGKEEVEDFLTGVRTTKEESEWLITDKPELRIIEPEIFDKAQEVLKSRHKAFKLNKERQSNKYIFSTLIKCKECGWSFRRTVRTYKNTYIRWVCSGHNGKGVDNCPNAVTIDEAELIQALDEYFKEILKDKKNIINRIVKEFNRIYKKKEDNEQYENELMTELAKLKKTREKYMDMYTDDLISREELNEKIGGMKKKIEKLENELKLVEYNLNKGDQLEEIVQHTFKNIEGITSVADMTNEQLKQIIQKIEVDKEGNVDIYLRIFGDLGLDDSVLISYDHT

SEQ ID NO: 18849 - protein, 567 aa, synthetic construct
MKRKVAIYARVSTEHEAQINALENQIQYYDNILAQHPEWELVGRYVDEGITGTSVKKRKNFLRMMEDAKNGMFSLILTREVSRFARNTVDTLQETRKLKSYGVEVYFTEDNIRTSDDTDGELRLTLMATLAQNESKKTSVRVKAGQKISFENGVLYGNGNILGYDRVGRELVVNPEQAETVKMIFNMYHDGMGCKQIAYELEKRGRVTSTGLTHWQPGTISRLLRNSFYCGKIVYRKQYVPDYLEQKKINNYDEVDKIEIMGKHEPIISEELFNDCQRRLDAKTVNRLRGKHAINPPKSAYARILKCQCGSNFERRKWHKYKDGRIRYGFECYKQKNHGSYRTRLKKGLDTTGCCTTKMFPEWKLKIVAHWLFNDLWKERDKIINRAIEMLNATIKDENVVDYTDEVKELNKKRKKYEEKLSNLVELRVEGDISKEVYEEKKGAFKKRIGYIDSELLKRDVKNSAIVSNVKTQIQLLTDLLGKKYDVISGDIPEDIVETFIDQIVVHDDYFEWRLRTSTEPVLCKVEGNEKDNTIIFLENDSHKVATQYRQLLLTSNTLISEKNIIT

SEQ ID NO: 18850 - protein, 597 aa, synthetic construct
MSDPEVFLTKPLAYSYVRMSTDIQLKGDSLRRQTERSKKYADDHDLHLVEDFRLEDIGVSAFKGDNLSTGELGKFLEAVKAGRIPKGSYLLVESFDRLSRQKLSAAVPLFFDITSNGINLVTLSDNQLYKAGEAEFAQLIISIAMMARANEESEIKSQRLSAAWDAKRKAIDDKKLTGLCPAWLALSDDRKSFGVLEDRAQIVRRIFEDSASGQGSFVITRRLNDLGTPAFGRSNGWVQSYVTKIIQTRAVLGEFQPHTKQNGKRIPFGDPIPGYYPQIVDEELFLRAQFARGKRRIEGGGRKGEALRNLFTHLAKCGNCGSPMHFLNKGFGPGGGTYLKCSQALRGLACVSTPWRYQDFERSFFLYVREIDLGEILAASATKSDAIALDNRLTSLKEKRNQLEVQRERSYALINQAISIDFVSAKLKECENDLAGVDVQIAEVELQLSAIREQQSISPDEVHRLIDQLQETEGPDAFAQRTMLAGRLREIVRDLRLDVEGNKPRLEKAEALFDQAGTDPTERQRILEVIRRTNFEAKRYNRSFTVVLADGVSRRIVLNNDDPTDFVAEVTVDAAGNPAGSERCMDLETLFGLRSGG

SEQ ID NO: 18851 - protein, 696 aa, synthetic construct
MKSELVKPIHLARRAVVYIRQSTTHQVVTNQESLRLQYALRQRAIELGWHEAGIDVIDADLGISGASAAQRSGFKELVGRVGLNEVGLILSIDVTRLARNCSDWYPLLDICGLHGCLIADRDGVYDPGSANGRLLLGLKGTISELELHTIRSRLTAGLLAKAERGELALTLPIGLVRDPSGVVVKDPNLEVQERLELLFETFLKLRTIAKVMREFNDRGLELPRRDRHGDLHWARATTAAVAAILKNPAYAGAFVYGRTRLRKPSEGRLPTKAPKPIEQWRIIVKDRYPPYIAWQSYEKIRGIVSDNRAEYMRNKTRGAPREGELLLQGIAWCGRCGHKMYARYKRRAEYVCNHLRSHQGLPACQYIRAPRVDAAVAQAFLTALAPAEIDALSCARRAQQQTYKAIRSNAEQQLERRRYEAALAERQFNRVDPDNRLVAAELERRWEAALKEARAAEETLARLKSPQAIAQITFGNKALNDKVVHLSGRLPEIWTDSSTTDAKRKALLRCLIDKVILDRGEHDLVKVRIVWRGGAVTEIEVKVRVNSVENLTQGVEMRERVLELARTKLHDDEIAAILTGEGHRSPKCPDGVLPITVQRIRFQAGLKGLTEQRTRWRHSPDLLSAQELAGVLNIPVNWLYVQIRQGRLLIDRHPSGAHLFSNTSRVIEAVRKLRNHELDHLDLRITEPHEEGHQHA

SEQ ID NO: 18852 - protein, 495 aa, synthetic construct
MSQYVIKHVAVYLRKSRGDEEKDLEKHRAELLSMCEQNSWAYVEYAEVGTADSISLRPKMTELMSDIEQGMFDAVLVIHIDRLSRGDEVDRATLSKLFARSETLLVTPQRVYDYNNDTDMLMAEFEGMMARMEYKQISRRFRQGKARNAKQGLWSNGVPPFPYIRNAQTGRAEPVEENLPTYRFMVEKCMSGWSSTDIAWELNKMGIKSPRDGMWNPAVVRRILCDEVHLGKVIVGKKRKMSNTGDLVYKPKDEWIIYNNCHTAVKTQLEHDKIMFIIGSQIKTPKASRSGKNALSGLVICGKCNHTMSIQKRTGRSYDTLKSCTHRNPFGERCSNLGDRSDVVTNFILNALIIKKKQIEDAIAEGLSSSDMSNLADIAQTKIQEIKKQENAIERIHDFLEDGTYTKEKYLERLNRANEILNKLEEEYRVIKTQLDNSLNAKNEDMLISVNDVLNQITKTKDPKELNRAYKSIIHNVIWTKNDFDDKPMVTVNFL

SEQ ID NO: 18853 - protein, 515 aa, synthetic construct
MKAAIYLRKSRADEEAERRGEGETLAKHRKALLKHARYVGANIIEIYEEIVSGESLVHRPQMLKLLKDVEAKLYDAVLVMDIDRFGRGNMQEQGLILETFRNADTKIITPRKTYDLHDEFDEEYSEFEAFMARKELKIITRRMQGGRVRSVEEGNYLGTRPPYGYEIEDITNGRTLKPHPVQAPIVRQIFEWYVHSDPEHQKGSSKIATALNALKIPSATGKDWIPSTVLNILKNAVYTGKIQWKKKQTKKSTEPGKRRTVRTRDTQDWISVQGKHEAIIDEVTFAKAQERISGSYHAPYQLDENGKPKITTALAGLVKCENCGMTMVYRPYTSQPAHLRCNTPSCNTRSSQYKMVEAKIIEGLKEWLADYKVKWSKREKKAPDESIDFRKTALDALEKEMKELEAQKERLYDFLERGIYTEDVFLERSQSLSQRISAAEQAIERTIQEISLEQRKQKAQHNVIPIAESVVKSYYETDDPVKRNKLLKSVLHKVVYKKEKPQQGADFEVYLHPRL

SEQ ID NO: 18854 - protein, 485 aa, synthetic construct
MESKRNVGIYVRVSTTNQVEDGYSISEQTDKLRKFCDVKDWNVYKVYTDGGFSGSNIKRPGIELLIDDVKNHNINTVLVYKLDRLSRSQKDTLFMIEDIFNKNDCAFISLNENFDTSTAFGKAMVGILSVFAQLEREQITQRMQMGRVGRARNGLFNGSQVPMGYKYIDSRLIVDELTAPIIKDIYNKYLDGWSLNKLLVYLNENGHLGRELPWNFHVLRYVLTNRTYIGMVGYAKQWYQGQHKPIISIDKFNNVQKMLGERALKNSNYTNNPRPFRSKYLLSGLLRCGKCGSNFDMGISKNSKTGKVINRLYRCHLRSSYHVKMAGLPESSRCTTSKTYSMTKLEQKVINRITKLSFDDGKLSKLLDRNGHKVQDPTPVLNRLSDIDKEVSKIMDLYTIANLPIDAINERSAKLAEEKNSLQIKLKDIEAEKANQGIIDFKKHIKQAPSVFENGTLEEKKRFINQLVNSIILDDNKMTIQWNFG

SEQ ID NO: 18855 - protein, 571 aa, synthetic construct
MSVKAYSYARFSSKAQAEGDSLRRQLKAAFDWADKHGLQLDTRHRDLGVSAYTGAHRVKGALASFIRSVEDGEITRGSYLLVDSMDRLSRESETEVLHLLLTLTRNGIKVVNLAENHVLDEKAEFTDYIRVLIHASRSNAESVEKGRKVGLKRAENKRLAREEGKVWSASGPGWLEAIVTGTKPNRHIEWKVIKERKQVVQMMFDFAEAGLGTVAITQRLNDEGYKSFRYDRPWQQTVVLDMLRNRAVIGEYQPKFATSGSNSYNRPNDGDPISGYYPEIIKPEQFHRVQAIIGARKPKQGRSAGSKVFNNLFIGLGSCHECGGTVGIHVVKAKAEGRAEYQALRCINSARNAIGSTNVNNVCTNRTRYSYRKLEASILAHVGSYKIPNSKSGRNRESDLADAIAMRDDLAKKVENLLDLVEDGNRGMVARYNERVTQLEAQEAEVAKLKIAVEQTTYQVPLDTRRKALAGLIERLNTVEGAALYQLRASVALALKGVVDQIRFHKDGNVDVIQAGGGRAYRFKDGDFIATANLLPDLEIEADDIGVRLRAGLTSHDPEGEERLKRVIAAE

SEQ ID NO: 18856 - protein, 579 aa, synthetic construct
MGRARLAPTPSPASRAAVYLRVSTGRQAEHDLSLPDQRRQLDAYCAGKGWKVATEYLEPGNTATDDKRPAFQDMIEAAMTKPAPFDVILVHSFSRFFRDQFQFEFYVRKLAKNGVKVVSITQELGDDPMSHMMRKIMTLFDEYQSKENGKHTLRAMKENARQGFWNGSRPPLGYRVIIAEQRGAKLKKKLEIDPIQAEKVRRIYKLALFGVDGSGPLGLKSIATYLNDNNVRTKDGGRFGIDAVHKVLTRTTYKGEHRFNFTDHKNRARKPDEEHAVAKIPAIVTEDEWQAVQDHLKLRSPTCMASRFVTSQVLLGGICFCGLCGGAMTLRTGKNGRYRYYTCSTKARMGKSGCTGITVPMDKLDDAVVNHLERRLLQPDRLCMLMGNVLDRRHEWVERRRSHVAELRKRSTEAANKLVRLYAAIEDGLVGHGSEGLSDRIRELEAIKKEAAADAERAEAAIDKLGPMITPEAIERMAQATREGLRAPDGSYRRAHVRAVAQRVEVLSTAELKIMGGRTELLRTLAASGGDQSAILEVRSFKPKWRAGRDSNSACPRRLEPIRASHFPYVFRTRKWKIL

SEQ ID NO: 18857 - protein, 519 aa, synthetic construct
MNTGTIKQIKKVAIYNRKSRPDETDDGLKKNLAFLIDKCTQYDWDYEVFQEVGSSQDINRPELQKMLDKVQGFHYDAVVVTDQDRLSRTTAGFSQIKEILTNYGVQVVTSSKIYNYETQEDDLMSDMQSIVAKQEYLNIKKRLVRGKRQSAKEGNWVGGQTPYGYSYDHKTKKLVPNDDAPIVKRMYEKYLSGKTSTDIERELELEGVLTPTGTTFKKARISVILANPVYKGTVIYGKTKVSKTSKKPSGSPRQDKTDKDAQISIDNAHEPIVSPEEWDKVEAIRKGRNSKPPSARIGKVAFTGLIRCSLCGRTHSFQRRKGKELRITSCQTRNWIDDENYKICENKGVRLENFEQAFYFQFQDYVKALELYLDEVKNNIKPDTSNPADEKAHLESQIKRIDAQIKKTQQGFIMEIFTEDEAQAQIKQLKAQKEHIEAELERINTKTEDESIDELEATVNKLRDILSGDTELETKDINALLSKQIDYIEYKRVGDHKAEMEIKIHYKGQTEEQEDEQVS

SEQ ID NO: 18858 - protein, 554 aa, synthetic construct
MHNPNLRVAIYARVSGESQAKEDTIASQLEVVTQRVADDGLECDPESCFVDDGVSGSILVRPGLEQLRDQAAAGAIDRLYVLDPDRLSRKYAYNVLIIEELDHCGVEVVFLRNPPGHGPEENLLLQVQGMIAEYERAKIMERCRRGKQHAARHGSVNVLSGAPYGYRYVGKHDGDGEARYQIVAEEARVVRKIFGWVGQERCSIGEVCRRLKDEGVTTRTGKSAWDRSTVWLILKNPAYKGTAAYGKTRSGPPKRLRLRPQRGRPEHPRRPASRVDTSLEDQILIDVPGLVSEDLFGAVQDQLEENRQRRRDRPGVGCYLLQGLVVCQRCGYGCYGKPTSRTSAKGKVPYAYYRCTGSDAYRFGGQRLCWNKQVRTDVLDAAVWDDVRQLLSEPDRVRAEYERRLQAAESGPSHEVEHLDKQVKNLKKMIARLIDAYSDGLLDKSDFEPRILAARERLGKLEHECRQRISEASQEAELRLVIGQLEEFARRVSQELQEPDWDTRREIVRALVKKVEIDEQEIRIVYRVSPSPFEGRPQHGSLQHCWGRDDRPLG

SEQ ID NO: 18859 - protein, 540 aa, synthetic construct
MNHKSEVAFTKIINYLRRSRKDEEREKRTGEDTLSEQKALMTNVLDGMGIPYTQKQEIGSGDKISTRPVFQEIINELKNGIYDAIAVKEISRLGRGSMSDMGVIYDLIIEHRIYIITPYKIYDPKNESDLRQIRFEMFLSREEFESIRSRMIGAKHTYSMQGKFMGGNSAYGYDVDEQKMILIPNEEKAKIVRLIYELYNNGLNGGRPKGIRSISTYLSKMGIKTASGKSTWTIGAVKNILTNPVYKGEIRYRTTQSKNGKKTARPEDEHIIVKEAHEAIVSEELWETTQSKMKSVKKKPSLNENQEEKELTGIVRCAACGYKMTANLYTRHWKKKNGEISTRYVERVRCSNYYTNDCGSLEYRSVEEALVEAMYQFSNIDIEQYRKLYDSIFSESDNNIEVYDVISTNTEKELKALQNRLDFVYEKYESGIYDDNEFIKRRDKLEDEIKKIKSVQSSSLPANNNEDNLKITLKDFSSLLLNAYEIYKSASEDKNFKLCNQILKNVFDDVTVGIIDKGNRAEDAKFNIDVVFNKRYFKDN

SEQ ID NO: 18860 - protein, 472 aa, synthetic construct
MEDSSNKSVGIYVRVSTDEQAKEGFSISAQKEKLKAYCISQGWASYKFYVDEGKSAKDTHRPSLELLLRHIEQGIIDTVLVYRLDRLTRSVRDLYTLLDYFDKYNAVFRSATEVYDTGSATGRLFITLVAAMAQWERENLGERVKMGQNEKARQGEFSAPAPFGFIKKGKSLVKNHEQGEILLEIIDKVKKGYSTRQIANYLDDSGLLPRRGYRWHPGTILTLLKNPVLYGSFRWGDEIIKDTHEGYISKDEFDRLQEILKERSIVKKRESYSTFIFQSKIVCVGCGNRLASERHQYFRKKDKRYVQNNNYRCQTCAQNRKPSVMGSEKKFQKALVKYMQNVTPKLEPVIPEEKKHDYEKVHQKILNLEKQRIKYQKAWSLDLMTDEEFEQLMHETKEALKSAQNKLAEAHSSDYQNPKVDFERAKEIVKMFNENWSVLTNEEKRNIVQELIKHINFTKKDGEIIITHIEFY

SEQ ID NO: 18861 - protein, 384 aa, synthetic construct
MPKAISYIRFSSKIQASGDSTKRQNKYIYEWLKNNPDYQLDESLRFQDLGISGYSGANAKSGAFGEFLAAVESGVIQAGSVLLVESLDRVSRQDIDTARERLRKILLAGVDVVTLADNSWYKKESLNDPLSLIKAVLIMQRANEESATKSKRLRSAWDAKREDAAKGKIMTRRCVAWLRVSGDMSHFELIPDNVKAVQRVFQLRLEGLPFVRIARQMNEEGFYTLNQRNPVKGAWSHTTVKALLDNRSVIGFKVPSNCTVTQGVKEIPNYYPAVISEEQFYAVQQLKQGAGRRPSSEKPLLTNLFKGVMRCGECGFVTVVNCATEKWHGVYRCSMRYEGRCDAKSINRRLADKALVQGLLYNTNRLSLNRGNGSAIGSDLLPVD

SEQ ID NO: 18862 - protein, 483 aa, synthetic construct
MNIREDAIYGRQSVDRKDSISIESQIELCKYELRGGNFRQYTDKGYSGKNTDRPKFQELMADIKRGLIKRVVVYKLDRISRSILDFATMMETFQAYNVEIVSSTEKFDTSTPMGRAMLNICIVFAQLERETIQKRVTDAYYSRCQRGFHMSGAAPFGFQLEPTTIQGIRTKMMKPDPETADIARYFADEGILIYDKELTRGFISQMLRNPIYAQADLEMYEFFKSQGTVVINEAADFAGTNGCYLYQGRDVQARKNKHLKDQILVVAPSEGMVSADVWLRCRKKLMANTTFQNGRKAKNTWLAGKVKCGRCGYALMSVGNPSGVQYLRCSKRADNKSCPGCGTLRTREFEQFIYGEMVKKMAQFHSLTGKRETVNPKLTALKVELAHVEDEIEKLLNTLTGASAVLLSYANTKIEELDAQRQTLSKEIAALSAESMSPEQIERLSVYLNRWEEIDFDDMRQVADSLISQIRATGECVPIKWKI

SEQ ID NO: 18863 - protein, 538 aa, synthetic construct
MCLVENGGKEAQQVAEVLCIPKTIPEHTGYQIRRIRVCAYCRVSTDDDGQYHSYDAQMEYYKGLIQKNPDWEFCGIYADEGISGTSRWGREDFQRMLEECEKGRIDLILTKSITRFARNTVDTLSTVRHLKEIGGSVYFEKERLNTMTEESEGILTIYGAVAQQESENISQNVHWSAVNRFRHGTFVISRRPYGYDKDDEKELAVKEDEAAWVRRMASMYMNGMSGVRIADCLNQNQVPAPYGGRWSSEAVLRILFNEKTVGDCLHQKTYSTGTVPFRTEKNYGKKPQYYIRDDHEGILNRDEQMRLQQIKGHRLGNQARINPRGSGGAYILSGKVVCGECGRAFIRKKEKKQKGVSIKWRCPGHRSEACRCFTNEIWEEDIERMFVNTFNTLKEHADEILDPVIRGMKKMQETNGFHEALGSLSQKKLELKEQRHILRQLKANECIDSALYFEESQKIERELSRCRSEEKQLHSRGAHQDTITGLQSTLHQLQGYDGKMQAFDDGQFILLVREVSVGKGRELGYHLRCGLILHEPVI

SEQ ID NO: 18864 - protein, 604 aa, synthetic construct
MKKVFVYHRVSSDQQLDGSGIARQAELLEGYLERTGICAEMDDPAPVVLSDQGVSAFKGLNISEGELGAWMEQVRNGMWDSSILVVESIDRFSRQNPFDVMGYINALMVHNVAIHDVMANIVISRSNSKDLPFVMMNAQRAYDESKYKSDRIRKGWAKKREQAFNKGTIVTNKRPQWIEVENDKYVLNHKAAVVKEIFALYQTGMGCPTIAKQLQKKEGEQYKFNRPWTGELVHKILTNRRVTGKIFISEIIRNHDDIDNPVTQKKYDMDVYPVVINEEEFELVQELLKSRRPNAGRVTVKKDGQEEVLIKSNLFSGIARCTECGGTMYHNVVRAKRTPKKGDPKIEEYRYIRCLNERDGLCENKAMTYETVERFVVEHLLGMDLSTVMKEQEFNPEIEVLRIQIDQAMDQITNYENGIERRKSTGKPISFEMREELDDAKSELERLLARQASLATVQVDVPVLQDVNVTELYDVNNVDIRTRYENELNKIVSIIRLKRNGTSYTIDINYKQNEVKRHVLFIENKKKEQKLISEVIIEDVDGTKFYYTQSFVISFKDGEIRFQQTKKDLSIIDYSLLLNYVDAVDRIDAVGVWMRNQFNFLTSN

SEQ ID NO: 18865 - protein, 422 aa, synthetic construct
MLEPVQNKIPKKKRVCAYARVSTDSRKQGESLENQISSYERSLKTNPEYEFIGVFADHGISGFSRNRPEFQRMVQMAKDGQIDLIITKSISRFARNTAVLLETVRELRLIGVAVYFEEQNINTLSGDGEVMFTVLASFAEEESRNVSENRKWSIRKKFERGEYMINTERFMGYDKDEFGELVIDPKEAMAVRFFADMYLLGVGSSRLGQLADFLGVPSVTGGKWTGGSFMGMFKNEKYKGDFHLQKYYTPEDKRNQTVRNHGGVQSYYMEDSHPAILSTEVWDALQERIEENKRGRNIAQSDTQKYQNRYPLTGMMYCPHCGKTLRRRIGYKKKVEWLCSTYIEEGKQACPGVRIPDESAARQDIIEPMVAEEVYSNGKKHYRYTSKAEFDSRGRECRAEEETAGGGILPGEYRPRRTAIKL

SEQ ID NO: 18866 - protein, 496 aa, synthetic construct
MKQFVALARVSSREQEREGYSLDVQEDALRRYATQAGGEVVKLFRIAETASKTDERKTFRELIAYAKKNAPFLEALLFYKVDRAARNLFDYVELERLESEYDLPFISVSQPTENTPAGRMMRRTLANMASFYTEQQSVDVREGHARRVREGWFVGAGPYGYLNVRKNGRGVIEVDPVTAGNVKRIFHLYAHENVTLDGLVAKINSEGRVFRPSQPEFPRSSVANILKDRAYIGEVEYRGEWHPGKHEPLVDRATWNRVQTLLGGHIYQSHSLVYAGNLIECAHCGHPVTGERVRKKTTSDDRFYIYYRCALYNKPGHPRVRVREADLEAQVMSVFEKMRVEDEGVRDWFRLVLASQTRDAQAESMAQRSELLRQETLLIRQQDRLLNMRLSEDIDQEIFGRKHTEIRDRLASIKLKLEALNRGHDENAELASKVFELSQTLKEQWLTADFAAKRRILEIVFLNCRLDGATLCPTMRKPFDVLAEGLLLKKDRAGGI

SEQ ID NO: 18867 - protein, 527 aa, synthetic construct
MSRRSPAALPVPNAERVRCAIYTRKSTEEGLDAEFNSLDAQREAGEAFVASQKHEGWTILDTRYDDGGYSGGSMERPALKRLLDDMAAGRIDCVVVYKVDRLSRSLLDFARLMDQFERQRVSFVAVTQQFNSATSMGRLVLNVLLSFAQFEREIIGERTRDKMAAMRRKGKWIGGLTPLGYDRDPVNSRLVINHEEAERVRAIFQLYLDHGSLLPVVEELGERGWANKRTVTRRGTTRGGQAITRTSLHRLLTNVVYIGQIQYRNELHAGEHSAIIDHETFRKVQSQMHRHGTTGGAEVRNPSKAMLQKVLRCAACDCFMSPTHTKKGNKRYGYYVCTNAAKNGHRTCPSKSIPAGGIERAVVDRIRLIGRDPALIRETVRQARELDEARHREDDAEIRSLERERNQGESVVRELSLRLAGTADPTILRQLADWQERLGQLETRLLKATARRDSNQRPGLPEHEAREALARFDDVWDQLTPKERSKIVRLLVDRVDYDGRARTVSLTFHPDGLAALTAETQPRDNSR

SEQ ID NO: 18868 - protein, 569 aa, synthetic construct
MTDIKDVFKHHKSRVDKIDTIEEKTKKDTYGVLIRVSDVKQVTKDSIPMQRERAYKFIKERDGILYKEYIEEAVSASKNSIKQRPVLQELLKDIEDGKINKVIAYKRDRLSRIQKDWLTILDTIFKNNCDIEFTSAEEQPISSNPMVRGIMEPVLGFLANMESNNTSMRVKETRASIAAKGRWTGGTLPYGYDLNKNKEIVVIKEVIPSLIEIEDLYLNGIGVGSITRYMNGHEVKHLGKRKKGADIKRVVYKGRKTYWTESAVEGVLFNPFYAGIIEYSKEGNKHLQYDQDKFVREKGFHEAIRTLDKQEKIYEMKSKKSISAPRKFSTTFLLTGLVYCSECGSPIQSRTVLKKERNNEKYCYYVCASKQNKDKTSRNEICPSKNFKQNILEDFVVSKLLEMFDGFNKDNLKEEILKGIDQGKSTIETDIVSAQAELKELQSELVSIMNLMKRVSPESPLYVEIITDYEKSYTETLLKKKEIEEKLESLQQSIKENNDKEIEQNIVLDALKNFSIVFKEASQVQRKILLDSIIKRIDISQDGKLNILCNFEIPKDEKSYVHSINRRPV

SEQ ID NO: 18869 - protein, 567 aa, synthetic construct
MLILKGDQKLNTEQIMSLIGKVNALIYARVSTTDQAKKGFSIESQLDRCKERAMSKFGYKDSELIALVEPGGMGDDPNRPALNHALYLLQKGLGKKFLVLHPDRLTRDNTLQGVISRRIWGMGVDIEFIEFEVNPNDPESMLMYNIQGSIAQYNKAKIHANSKRGRLAKAKKGEFPSFKRLYGYKFNTVTDLPEYNEEEKEILLEMKDMLLNKKLSSNEIAKELSRRGVAAPNGKTWFQSTVSRMLQNEDYTGDFYYGKSKVVQVNGKKKQIATPKDEWILIKIPPMWDHETRDQIIKQLKANFKGRSRSTRDYLLKGKAVCGRCGGSCGSGITSKTKSGIYKYYSCCNKSTKAYQNGKELFKCKGKNWRVDIVDEVFWKWFKKLIKNPKKFLDQFLEEASNEKSIEDIKIKINRLQKQHEEIDSEIANYVILFGKGKIKESMFDELTRPLELNKEHVENELEILQSQLNANKKVEDRNEQTIKYMNSFAEMVDKDLSMSEKRNFLDFFIEKVTLYDDDHMEVVWKNKTLNEDRSQTVDFTEGEPEEASDNQHKRLNRIQAYGRQTA

SEQ ID NO: 18870 - protein, 508 aa, synthetic construct
MFFEEKNTEELIRYEDYPYAVYARVSSEKDSQTTSIQNQIDICHHWIEKNNYEWKDEAIQLDDGISGTILLDRKAMQLILNKAKNHKLKMVVFKSISRLARDLKDALDIKEVLLAHGVRVVTLEEGYDSLYEGKNSMKFEMFSMFAAQYPQTISVSASSALAAKARRGEHSGRVPYGYKKNGKFLEIYEEQAKVIRMIFDLYNNHGYGQKRVVHKLNEELLLGNIPKPQQNERWQLSTVQRILQNPIYCGVFIANRYTQVKIGGRKKFIRNPEEKWTIYKDWAPKIITLEDYEKANNKKHVLKKRRFNPKNELRGLMKCGVCGANMVILFSYRRRKKDGVKVEHNYVKCSAYRRGGKNMCISHPPIQYKDLREIVIEKLKEKGRKLKLNVKSDYEEKKKRRIRETKVQIEAAEKKHKRLLELFLEDQMISKAEFQSKRKEIEDQLEQLNDKLFLLEREEEESIDITNIKIAFSLLKKKDQDLYEAFHALIEKLVIHEDGTVDFHYKFQ

SEQ ID NO: 18871 - protein, 569 aa, synthetic construct
MTDIKDVFKHHKSRVDKIDTIEEKTKKDTYGVLIRVSDVKQVTKDSIPMQRERAYKFIKERDGILYKEYIEEAVSASKNSIKQRPVLQELLKDIEDGKINKVIAYKRDRLSRIQKDWLTILDTIFKNNCDIEFTSAEEQPISSNPMVRGIMEPVLGFLANMESNNTSMRVKETRASIAAKGRWTGGTLPYGYDLNKNKEIVVIKEVIPSLIEIEDLYLNGIGVGSITRYMNGHEVKHLGKRKKGADIKRIVYKGRKTYWTESAVEGVLFNPFYAGIIEYSKEGNKHLQYDQDKFVREKGFHEAIRTLDKQEKIYEMKSKKSISAPRKFSTTFLLTGLVYCSECGSPIQSRTVLKKERNNEKYCYYVCASKQNKDKTSRNEICPSKNFKQNILEDFVVSKLLEMFDGFNKDNLKEEILKGIDQGKSTIETDIVSAQAELKELQSELVSIMNLMKRVSPESPLYEEIITDYEKSYTETLLKKKEIEEKLESLQQSIKENNDKEIEQNIVLDALKNFSIVFKEASQVQRKTLLDSIIKRIDISQDGKLNILCNFEIPKDEKSYVHSINRRPV

SEQ ID NO: 18872 - protein, 510 aa, synthetic construct
MALHENSKIAVYSRKSREDRDSEDTLAKHRNELEYLIKRENFKNVQWFEEVVSGETIDERPMFSMLLPKIENGEFDAVCAVAMDRLSRGSQIDSGRILEAFKQSGTLFITPKKTYDLSIEGDEMLSEFESIIARSEYRAIKRRTINGKKNATREGRLHSGSVPYGYKWDKNIKAAVVVEEKKKIYRMMIKWFLEEEHSCTVIAEMLNELKVPSPSGRSIWYGEVVSEILSNDFHRGYVWFGKYKKSKSNNSIVQNKNLDEVLIAKGHHETMKTDEEHALILNRIEKLRTYKLAGRRLNMNTHKLSGIVRCPYCHKAQAIEQPKGRKKHVRKCLRKSATRTKECEQTKGIHEEVLFQSIMREIKKYNEALFSPTEQDVNDDTYTTQLIGLREKAVKKAKGRIERIKEMYLDGDISKTEYKEKLKISQETLQKAENDLAELIASTEFQNALSAETKKEKWSHHKVQEMIESTDGMSNSEINLMLKMLISHVTYAVEDLGDGTKNLNIKVYYN

SEQ ID NO: 18873 - protein, 530 aa, synthetic construct
MKTCIYARRSTLKQGQAETIENQIKICERKAKELGLTIVDIKTDSASGTDDNNRPEVKELLKGAINKEYDCVIMKGISRIYRKTSKGLELIEKLDRHGVRVITVEEHFDSHARENRNGIGNLDTSRITMYLMFAEKESQKLAERIKFTQIEKAYAGEWNQASNAPIGYTYDSTTKKLSIDNSKSYVVRKIFKLYEQGMGMKAIAHYLNGDNPDKKTYPSSKGGRWSEYTVGYILKNRAYVGDVVYNKRSKKERPYKAPEALGKTSDDICIINDYNKEEDWIIAENAHEPLIERELFDKIQTMISTKSRRKGIRSNTSLFAGIAKCAKCGTGMTFKRGRKNSLGQVVSKDNYYCMNYIRYGKQYCDSHHVGARELQEAIFSDLEHILNSKDKLQRVLDKNKIVMSLDEKKAKERIVGIQKEMDSLIKKMDKLLEKNLAGDISDTQYKTFNEKYSAELDNLTEELKKAKLIIANMSEQADNEMRFRQKLSNAIGIRNKTIEEQRHILLGLIDSIVINGNDIEDISYKFERVD

SEQ ID NO: 18874 - protein, 577 aa, synthetic construct
MTTAPIPSTFRAVKLTPYVGYIRVSTWKEEKISPELQRAAIQDWAKRNEAEITEWVEDLDTTGRNFKRKIMRAIEIVEKGREKGIAVWRYSRFGRDRAGNAINLARVESIGGQLISATEPVDATTAIGRFQRGMILEFAAFESDRIGEAWAETHQHRRAQGLPATGRPRFGYIWHRRWNPRTETLQEEKYEPHPELGPIVAELYRRYIHPTKAQGFSVLCGWLNSLGHLTTRETQWTTQTLTRYMDGGFAAGLLRIHDDGCKCNGRKTNGGCPNYYFAQGAHEELIDYDLWQKYRAKREQIKNTPPRARNALYMLTGTVRCGQCRGGTSMSSNRWRKATGEVIMLNGWAYRCSQRAASGGHKCEGVWMPRRDVEPAVEKWLMREAATGIDAAPPTEGTEQPQVDERALAKQARGKLQGEYDAIEAALTRLIMDANENPEKYPAGAFERARDMYLERQRKIKQQLEGLVDVEQTPKRADFTRLIVGVAEEWRTLNTTERNAMLKQLVRRVALVRLKDENGEPIRGAEGVEVQVHPLWEPDPWAPARICRGPFGTATAGSWLAADLWTQPETREEIPQR

SEQ ID NO: 18875 - protein, 576 aa, synthetic construct
MNKVAMYCRVSTIDKQDYQRQISDLKPEIFKHKFLESDIDEYSEKVSGYKKERPELNKLLTKIEENPSYYKCIYVTEISRIGRNPKHTREIVDRLTELRVPIFIKSIGQSTLDEKGNRNIIVSIILQVLMEFADLETQTFKERSRSGLKQSASIGRVGGGGNPPYGYTKGENKMMIVDDEEAEIVKQIYQLYSQNNGTKVISNILNEIGVPTRYNKKEKGKTLTINNIEKDVELIQWSDKQILDILKNTIYIGQRKFKDEIFDAPRIIENELFDKCKNIRENKTHRNYLTNYTYLFKDIIKCGCCGKNYFAKYKPVPNGDKVYVCSSRLKKGGNCGNGGVNISLIESTIYNELINSDSILKYLQSPNNLKTELQSEIQKLEQQLKIETKNQTNKNNELNRLLDLFLSSTNSNMQLYQQREEKLNNEIKLLTDKVALIRKELLNKKITLKKFDEKKASYQMLKDAKHNRTELALIYKQIISRVVVNVIDVKNAFITVYIQLNGKELDNPLKIILDLHGVKSKPKKFRYTPILSLSNEPKFNNGVLINLNKIGDEIIEKNEFMDWIHIHNKNVLMVEN

SEQ ID NO: 18876 - protein, 533 aa, synthetic construct
MKRAAIYCRYSTDLQNDKSVEDQIRLCAAYAERMGANVVGEHFDRAKSGASMFGRPGLSRLMESAERGEFDILIAEAPDRISRDIADLAHIHKTLRFRGIEMNCVNGGVMDTVSIGMHGVIGQMQREEGAKKVRRGMVGVVRSGRNAGGKAYGYRPVAGRKGELEIVEEEAAVVRRIFDMYVAGIGPRIIAGALNDEEAPPPRGARWNASTINGNDKRGYGILRNPLYVGKLVWNRVQMVKDPMTGRRVSRVNDESVVETMEAPHLRIITDEVFEAARRRKEAVGGTHARTAPKNKRLLSGLLKCAECGGGLSTVGADRSGPRVVCSTHKESRSCSNNARYYVEKIERDVIDRLREIFADTSYIDAYVEEYRRETKRIAAERRGSRQSKEAALADVQDRIVRVLDQVARGTIDDEDIPLILKPLKAEREKLKADLAAAEPATNVIEIKPKAIDKFREDIETLAETLKVRGSEPSPEMAMRFREVVSSIIVHPRKPGQDYRYEINGWLAAVAGPELSAVLMVAEEGFEPPTQGL

SEQ ID NO: 18877 - protein, 606 aa, synthetic construct
MEQSEIRQTAYSYIRMSSQQQMKGDSFRRQLELSRQYAAENNLVLDESLTDIGISAWTGANVQDGALGRFLQLIQSGLIKRGSYLLVESLDRLSRQQVRNAIGPFIDIINAGVTIVTLADKQVYSETTVDENWTQLMMSLAIMSRAHEESQTKSKRLKEAHANKKKLAAQGIGRYSHNIWGWIDQIEVAANKFEYRLNEHAATVRKIYEMADAGIGQLVITRKLNDEGIGTFRASKNGWQQPNVGSILRNEAVIGTYQPTHAVNGKATPNGPPIKNYLPAAVPEELFWRVQRNKQRRVSSGRKGKQLTNLFTSLCVCQHCNGPIRVRLAGTSGKTHRHLHCDNRYRALGCPSAGGGFRYDIMEAAILDKIKEFDIDIGTGRQTADREVLLHEIMSKETHLDEMEKRKNKLLRALELSDDDAAMSDILSQLSERRTTVEQLTTQIAEMKGDLARIDTEAIALASAVERLQLERLIWSTGSDDEVYESRSRISAMMHSYIDVIAFDFNRKTYRVSIGGHLILYEFYRDGRLLKKIDNRSLTRKHGIPVIWKDKDENGHAIEGTGEKVIPISWSAETLTTAIPQSRQDPNTHLVDKRKRIVRTLINKKH

SEQ ID NO: 18878 - protein, 567 aa, synthetic construct
MLILKGDQKLNTEQIMSLIGKVNALIYARVSTTDQAKKGFSIESQLDRCKERAMSKFGYKDSELIALVEPGGMGDDPNRPALNHALYLLQKGLGKKFLVLHPDRLTRDNTLQGVISRRIWGMGVDIEFIEFEVNPNDPESMLMYNIQGSIAQYNKAKIHANSKRGRLAKAKKGEFPSFKRLYGYKFNTVTDLPEYNEEEKEILLEMKDMLLNKKLSSNEIAKELSRRGVAAPNGKTWFQSTVSRMLQNEDYTGDFYYGKSKVVQVNGKKKQIATPEEEWILIKIPPMWDHETRDQIMKQLKANFKGRSRSTRDYLLKGKAVCGRCGGSCGSGITSKTKSGTYKYYSCRNKNAKAYQNGKELFKCKGKNWRVDIVDDVFWKWFKKLIKNPKKFLDQFLEEASNEKSIEEIKIKISRLQKQLEEIDSEIANYAILFGKGKIKESMFDELTKPLELNKEHVENELEILQSQLNANKKVEDRNEKTIKYMNSFAEMVDKDLSMSEKRNFLDFFIEKVTLYDDDHMEVVWKNKTLNGERSQKVDFTEDEPEEDSDNQHKRLNRIQAYGRQTA

SEQ ID NO: 18879 - protein, 540 aa, synthetic construct
MMKSGGRVFSYLRFSDPRQATGSSADRQLAYAAAWAAKHGMDLDATLTLKDEGLSAYHQRHVKQGALGVFLRAIEDGRIASGSVLVVEGLDRLSRAEPIQAQAQLAQIINAGITVVTASDGREYNRAGLKAQPMDLVYSLLVMIRAHEESDTKSKRVKAAIRRQCEGWVSGSFRGVIRNGKDPQWVRLTNEGWELIPERVAAVKRALELYRLGLGAGRAANIMHEEGFQLTEGGISGLQIYRTIKLPALRGVKRLSLEGEDYELEEYYPRVLSDAEWNDLQYLAGQRLRRRGAGEIPGIITGVGLAYCGYCGTALVAQNIMKRRRVDGSIADGNRRLHCTSYSKNGGCSAGGSCSVVPIEQALLKFCTDQINLQRLMQPSDDGQAVQRQLVNARAAVAKITGQLGKVTDALLADESGAAPLAFVRKARELESQLRDAEQSVSTLEYEVSSISAGAAQPAQAERWADLSAQVEAGDYGARESVRQLVMDTFSRIVIFMRGVDATDREGLFIDVQLFSRTGQHRLLRIHRKTGDWVASEDWD

SEQ ID NO: 18880 - protein, 552 aa, synthetic construct
MSDEVRRAAGRAVIYLRVSYQGQVDNDYDPEGNSIPAQRKACRRKAEELGVDVVEEYVDPGRSALEVKNRPEFQKMMARIRSRRDVDYVIVYARSRMHRNATDALLTRRELKQLGVALISIRDFTDDSDMGDMIGTILDAVNEYQSRASGADVAFKMEAKAKNGGTPGAAPLGYLNVVEEIDGRKVNTVAVDSERAPYVRAMFELYSTGKYSFAQLRDEMTEAGLRTRSTKRFPGGRAVSIHKIGKLLRDRYYLGYVIHKGKESPGRHEALIDQGLFDQVQEVIEAKQSSGIRQRVHDHPLKGPLECGRCGGRLYLDRGNNSRGTVYFYFSCLGWLVRSCDLPRLKAELVQAAVEDHHATLRLPQPTVDTTNKALSSDTRERRQIGQGLRRKLKVERARFIEQQGQYLDLVGNPDWPQEVLAEKMREVRDRIARIDKRLETIDDDPVEQAGQAVRALLELLEGPRSYFRSLTDQGQQLTLACFAKLVVEADQDTQAPWIERDEVKAPFSPLVGRYEKRQRMVYPLASAAALPAVCSSNELLARPEGFEPPTF

SEQ ID NO: 18881 - protein, 644 aa, synthetic construct
MLRPICYERVSSIQQVEMGNGLDDQRSSLTAYLDKNSDKFTNDRVFITDAGLSAFKNANISPESQLGIFLQDVGNRKYGKGDALIVISLDRLSRRSSWAESTIQYIVNSGVEIHDISTNLVLRADDPMSKIHMELIQHRSHNESLMKSVRAKLAWDNKILRALQNGEVISNRMPNWLKNVDNKYQVIPEQAELIVKCFEWYREGLSTGEIVKRIGKKWQMVTVSRLIRDRRLLGEHERYNGEVVPNVYPKIIDEDLFLTANRMMDRVMLEKKKPAEDLLLEPDVVREIFKLYESGLGSGAIVKRLPKGWSTVNVLRVLRDKKVVTMKIIDNLTFERVNEKLSRSGIANRIRKDITIAQDDYITNLFPKILKCGHCGGNIAIHYNHVRTKYVICRNREEKKICDAKSFQYTRIEKNILQLVKNIDFNNLMMEGQSDSDLLLTSLREELSTLKKEEETYQIKINERKVAGKKTSLPLMTGLTEVQDRIEEIESEILNAKNIKEIPVFDFDINKVLDPMNVELRAKLRKELRLVLKSVKYWIFGKRIFVQLEYFNEILSHVLVIDNKRGGGEVLHEIVISESNGERVYTVNEEGKTVFIASVLIGTDAWSLALSRTKKIIDVGNYLDLLSREKIEMIIHEKDIEWID

SEQ ID NO: 18882 - protein, 558 aa, synthetic construct
MMKVALYARYSSDNQRDASIEDQLRICRAYAEKQGWPIVRNYTDHAVSGASLFRSGIQALIADAQQGHFTAILTEALDRLSRDQADVATLFKNLQFMGVRVFTLSEGEITPLHIGLKGTMNALFLKDLAEKTHRGVRGRVEQGKSGGGNAYGYDVVAETDGHGNVMRGARVINDAQAVIVRRIFQDYAAGKSAKKIAVSLNEDHVPCPTGGAWGFSTINGNRTRGTGILNNEIYIGRLVWNRLHYLKDPKTGKRVSRLNPEAAWVIRDVPDLRIIDQDLWDAVKARQKTLEASPDIRASHSHDHFRARRRPKYLFSGLLRCGCCQGGYSMISKHLLGCSNARNKGICANLQNIRREVLEDRVLDALRHRLLNPELFRLFCEEFTKEVNRQRLQGAVDITAAQAELSKVKGKQEKLLDLYLEDQVSRESLAQQSLKLETRRTELEALLASSKAPPPLLHPEMAGVYREQIIRLHEALNSELETQRQEAAEIVRSLIETIILTPSDDGMRIDVCGDLASILTIASGTQKSANAGMRSRFDPRSQVQMVAGAGFEPAAFRL

SEQ ID NO: 18883 - protein, 406 aa, synthetic construct
MPQLYSYVRWSSDKQTKGTTLERQMASAKLFANDNGLDLVEIIEPGVSAFKGKNAKDGKLGDFINAVEAGAIERDSWLYVENLDRLTRQSATEAQTLFIRLLNLGLTLVTGMDKRIYTLDSVNNNPTEFMISILLFSRANEESKTKSERTKGNVLALIARHKEGLPVNIKSVGKHPWWIDDSGSQYEAVREDEKYWPIAREIIDLYLAGKGAYKVKRHLDTKYPNGYEGKEWDYQMLIRMRKNKALYGERTLNINGKAFKLVNYYPSLCTDEAEYLRLQELKRKNDYQSKDKDDVVNIKLLSGLSLLRCGKCGGTMSSFMNKEKPRYICLNGRHLQKNCHGWSVNALLIEYCLIATLVIGYINDKKDSQIDNTENTSLLEKDLGELERLDKTIANVSYALEQGVNL

SEQ ID NO: 18884 - protein, 481 aa, synthetic construct
MITTNKVAIYVRVSTTNQVEEGYSIDEQKDKLSSYCDIKDWNVYKVYTDGGFSGSNTDRPALESLIKDAKKRKFDTVIVYKLDRLSRSQKDTLHLIEDVFIKNGIEFLSLQENFDTSTPFGKAMIGLLSVFAQLEREQIKERMQLGKLGRAKAGKSMMWAKTSYGYDYHRETGTITINPAQALTIKFIFESYLRGRSITKLRDDLNEKYPKHVPWSYRAVRTILDNPVYCGFNQYKGEIYPGNHEPIISKEEYDKTQSELKIRQRTAAENVNPRPFQAKYILSGIAQCGYCGAPLKIMLGVKRKDGSRLKKYECHQRHPRTLRGVTTYNDNKKCDSGFYYKDKLEVSVLKEISKLQDDADYLDKIFSGDNAETIDRESYKKQIEELSKKLSRLNDLYIDDRITLEELQSKSAEFISMRGTLETELENDPALRKNKRKADMRKLLNAEKVFSMDYENQKVLVRRLINKVKVTAEDIVINWKI

SEQ ID NO: 18885 - protein, 481 aa, synthetic construct
MIATNKVAIYVRVSTTNQVEEGYSIDEQKDKLSSYCDIKDWNVYKVYTDGGFSGSNTDRPALESLIKDAKKRKFDTVLVYKLDRLSRSQKDTLHLIEDVFIKNGIEFLSLQENFDTSTPFGKAMIGLLSVFAQLEREQIKERMQLGKLGRAKSGKSMMWAKTSYGYDYHKETGTVTINPAQALTIKFIFESYLRGRSITKLRDDLNEKYPKHVPWSYRAVRTILDNPVYCGFNQYKGEIYPGNHEPIISKEEYDKTQSELKIRQRTAAENVNPRPFQAKYILSGIAQCGYCGAPLKIMLGVKRKDGSRLKKYECHQRHPRTLRGVTTYNDNKKCDSGFYYKDKLEASVLKEISKLQDDADYLDKIFSGDNAETIDRESYKKQIEELSKKLSRLNDLYIDDRITLEELQSKSAEFISMRGTLETELENDPALRKNKRKADMRKLLNAEKVFSMDYENQKVLVRRLINKVKVTAEDIVINWKI

SEQ ID NO: 18886 - protein, 481 aa, synthetic construct
MITTNKVAIYVRVSTTSQVEEGYSIDEQKAKLSSYCDIKDWSVYKIYTDGGFSGSNTDRPALEGLIKDAKKRKFDTVLVYKLDRLSRSQKDTLYLIEDIFIKNNIAFLSLQENFDTSTPFGKAMIGLLSVFAQLEREQIKERMQLGKIGRAKAGKSMMWAKTSYGYDYHREIGTITINPAQALAVKFIFESYLRGRSITKLRDDLNEKYPKHVPWSYRAVRTILDNPVYCGFNQYKGEIYPGNHESIISKEEYDKTQSELKIRQRTAAENVNPRPFQAKYILSGIAQCGYCGAPLKIMLGVKRKDGSRLKKYECHQRHPRTLRGVTTYNDNKKCDSGFYYKDKLEAYVLTEISKLQDNAGYLDKIFSGDNAETIDRESYKKQIEELSKKLSRLNDLYIDDRITLEELQSKSAEFISMRGTLETELENDPALRKNKRKADMRKLLNAEKIFSMDYEGQKVLVRGLINKVQVTAEDIVINWKI

SEQ ID NO: 18887 - protein, 560 aa, synthetic construct
MSKEKIKVYLYTRVSTSIQIDGYSLEAQKSRMKAFALYNDYEIVGEYEDAGKSGKSIEGRVQFTRMMEDIKSGKDGVSFVLVFKLSRFARNAADVLSTLQIMQDFGVNLICVEDGIDSSKDAGKLMISVLSAVAEIERENIRVQTMEGRIQKAREGKWNGGFAPYGYQLIDGKLLINEEEAIAIRTIFDQYVNTSIGANGISKYLENHGIRKIPRQNGKNPLFDAGLIRKILKNPVYNGKIAFGRRTLEKVHGTRNEYKQVEQDEYLISEGIHEAIVSDEVWQAAQVKLKSQAKKYEHVNKGKDTRTHLLSGIVKCPICGVGMFGNKCIKKKKDGTKYKDFYYYGCKHRQMIRGHKCTFSKQIREELLDDAVAEVIIKLVSNPKFASMMQEKINMKVDTSAIENEIDNYQKELRKSHSTKFKLIEEIDNLDVDDKHYKRRKQDLDDRLYRMYDKIEELESLLIDAKAKKHTIEAEKLTGDNIYKVLIYFDKLYKVMNDVERRQLISALISEIQIYEEKQANGQWLKSITFKLPIIDEDLNISLDNDEQVECVVLLQRSKG

SEQ ID NO: 18888 - protein, 518 aa, synthetic construct
MTTSKAVAYARFRSDNQIDESIDAQIRAINEYADKNNIQVVKIFIDRAKSATSDKRPEFQNMIKFCEADTTGISMVIVHKLDRFSRDKYDSAMYKQKLKVKGIRVVSVLENLDNSPESLILESVIEGMAQYYSANLAREVAKGQKENALKALHNGGDAPLGYDVAHDKTYTVNEEEAQAVKIIFDRYITGYSYSKIIDELNDLGYKTKRGNKFGKNSLHGILNNEKYTGVYVFNKTQRKGVNGKRNGHKQKNEDEIIKIEGGMPQIIDKEVFQQAQEMMQKRKKTPGAHKATTNYLLTGLIKCGECGHSFQGNKRKDAYGNDYISYRCGCRKQKRECDNREIKRDYLEEFILQELEKNILNDEAIPALSKALNEKMNDKNESNEELLKSLEQKLDKVNKEISNILNAIMNGIVNNMLKDKLDELEQVKLNLDLKMNELKIENRVADDVCVTEEQIRSMFSRFKEFVLERNIPECKKFIGDYIKEVIVYKDHVEVVFNVVFSFVDNEITHNLNVIIMRK

SEQ ID NO: 18889 - protein, 560 aa, synthetic construct
MTKLYSYIRFSSMRQGEGSSYERQIRMAKEIADRYDLELVNDYQDLGVSAFKGANSKTGALSRFLDEIGRSIPVGSWLFIENLDRLSRQDIISAQELFLSIIRRGITIVTGMDNKIYSIETVTANPMDLMFSILLFIRGNEESQTKRNRTNSSALLKIKAHQQNPQSPAVAIEEIGKNMWWTDTTSGYVLPHPVYFPILQKIVKMKQEGHSTGSVLDYLNEHHTPPAPTSNKQHRKWSIAMVSRLFKTKALIGVKEVTVDGVQYELKDYYPRVLSDSEYYFLKNNLIKKAWSFGHAQEKTIPLLSGIGLLKCAHCGSPMVKRKAANGKVEQYRYTCDGEGSGRTDCLYPNWGFRASSLEGAVLQLLADKVWIAEDKANPIPEIQVQIDEISRKIDNLINLSAMTGATKELANQITDLNTQREALHEEIRLFEREMYSVDSQGWEKLAQFDLSDVQNEERLQIRLKIKGALRSIECARIDRNKNLFTLVYLDGLRQRLVIENNRGIRKGQIFVDLKTINDRQILESAGMVLHDHIDILIDEKAFYDGLPKEEDGPLSKFGI

SEQ ID NO: 18890 - protein, 452 aa, synthetic construct
MKAAIYIRVSTQEQIENYSIQAQTEKLTALCRSKDWDVYDIFIDGGYSGSNMNRPALNEMLSKLHEIDAVVVYRLDRLSRSQRDTITLIEEYFLKNNVEFVSLSETLDTSSPFGRAMIGILSVFAQLERETIRDRMVMGKIKRIEAGLPLTTAKGRTFGYDVIDTKLYINEEEAKQLQMIYDIFEEEKSITTLQKRLKKLGFKVKSYSSYNNWLTNDLYCGYVSYADKVHTKGVHEPIISEEQFYRVQEIFSRMGKNPNMNKESASLLNNLVVCSKCGLSFVHRRKDTVSRGKKYHYRYYSCKTYKHTHELEKCGNKIWRADKLEELIIDRVNNYSFASRNVDKEDELDSLNEKLKTEHVKKKRLFDLYISGSYEVSELDAMMADIDAQINYYEAQIEANEELKKNKKIQENLADLATVDFNSLEFREKQLYLKSLINKIYIDDEQVTIEWL

SEQ ID NO: 18891 - protein, 532 aa, synthetic construct
MKAAIYSRKSRFTGKGDSIENQIQLCIDYAKSIGVKDFLIYEDEGFSGSNIDRPQFKKMMQDAKDKKFSYLVCYRLDRISRNVSDFSTLIEKLNELNISFISIKEQFDTSTPMGRAMMFISSVFAQLERETIAERIKDNMYELARSGRWLGGNTPHGFNSEKITFLDENLKERSMYKLQVNNEQMEVVKLIYNKYLELRSLSKLYKYIYNNGIRGPRGGKFDPSSLSRILRNPAYVKANDEILDYLKNSGMDVVGTPDRKCGILTYAKNTANSIAAIAKHHGVIEPEIWLEVQNQLDKNRDKTPRISTGKTALLSGLIKCGKCGSNMRITYKGKKTDKDLKYYYICGTKKTLGSDSCNCKNLNGPLVESLVIDKIKNCKEESIISAFNSNNIKADNVFNAFKSETNLLKNQILDKERLIKNLVIELAKNTGSTASDYIVSQIESLNNEISILKDKINTLESSNINISSDSINIDIIVSNLKRFNDEVDNASLDDKRLLLSTIINSVVWDSSLGNLNIVYMGAEMDNSVSLSN

SEQ ID NO: 18892 - protein, 605 aa, synthetic construct
MNLENESSEEPRGSALVYANAPQLKRGRHARAAGHQGFPDGAKPLRAVLYLRVSSKRQVSTDFDPEGISLPAQRLACEQKAQQQGFEIVDEYVEPGRTGTEMSKRVAFQQMLARIREQRDVDVVLVYKLSRLHRNRYDEVNTMMTLQQHNVILVSATEQIDATPVGQLMQGILSSFNQYRSAEDGADISYKLGEKAKKGGTVFRAPLGYENVGVRVEDREVRTVQFDKERAPLVAIAFELYASGKYSIPALVDELTARGLTTRATSARPAGPISENQLQRLLQDPYYLGLARLKDQVYEGRHDALVNGEVFARVQEVIASQSTGERRRTHDHYLKGSLFCGRCFDTDGTIGWMIMANVRGRGGDYQYFFCRRRQEHLCDAPYIQLPRLEDAVVRFWQRQQVTEAFSRALREGIQRTVEEDQRATRSLHQQVNANLTKLDTQEQNLLDLAADGLIPRATIQKRVSAITKQRAIMTAQLDNVERKLADVLDYVDAAVSFLERPGEVYASATDEIRRLMNQALFRRLYVQADEVTGAELNAPFDALMAADDAFQKQRTPADGEGASMSQESREILNIALDDISSKRNMVGPVGLEPTTRGLKVRCSTD

SEQ ID NO: 18893 - protein, 630 aa, synthetic construct
MSMPELDTTAAFLTAPPPLRSAKIEMTEDEVVASITSDNPLVPSSLPKGTRAVLYLRVSSKGQVDTDYDPEGISLPAQRISCARKAEQLGLTVIGEYVEPGRSATEMTKRVAFQAMLERVSRQHDVDAIIVHDLSRFARNRIDDAIVMADLRKRGVTLISATESIDATPVGQLMHGLLAAFNEYRSAKDGAEVSYKMGQKAMNGGTLGRAPLGYLNVTDNIEGRKINTIAVDEERAPFVKLAFDLYARGQMTFQDIADELTDRGLLTRATARWPAGPVSDSKIHQMLRDRYYLGEVRYRGEYYEGRHEALIDVKLFDRVQELLDTRGYSSERRRKHDHYLKGTIWCGRCRLEADTNRRMILMHVNSKTKATYSYFFCRGVQDHTCDAPYSNIDRIEEAVERHYKTLSLRPEFVQAVRTLMEAAVNDQIGAQKMLQEQAKTQLQRLATQEDNLIDLAADGGIDTSRVRSKLRDIARQRKELEVELASVTDDIAPGMAYIDAHLELLTQPYELYRYASDQTRRMLNQAIFRHVYVVNEEVVGDELNTPMRELLASQRGWSVFEDTGDDVLARELATAEAQRHAGVGETKQATVSGGLLDDFIPALLTDRAETVGICSKPSMVRPKGLEPLTF

SEQ ID NO: 18894 - protein, 511 aa, synthetic construct
MTSPTIRIAVYARYSSDIQSPTSVADQIAACRAFIERIFLTEAVEVTVFEDAALSGATMNQRAGIQSLIRHVQAEQIDVVVAEGIDRLSRSIADMAALFDLLVHSGTRLITIHEMEVSDLHVGMKGTMNKMFLKDLKARIRRGQAARTEQGLVMGPAPFGYRVVKVVGGEVVSGVKEIDPDEAEIVRHIYERFTSGNTLASIVSEMNERKIPRRRATKWLESMVRKILSGPIYKGEVIYQRTTKSRDPLTGKLHIQRVPRSDWVSSQNEQLRIVSDELWRDAQVRMVAGREKAVRPLKEIASHQRVLTDYVFCGACGAVKHVAHEGRYTCSGNRYYRSCKNARGTKEDAAREALFAALEKTVKRLPPLRPSVLQIYDADIRRRHDLDRRRAEVADRIDRLMQAIEDGVDVAAAVERIKALQLEQTKLAKTINFEQIPHIGTDLEIRDGLLLGLDRLRSEIEREPVREMLSILKPRIVMTPISGQYRGETISIEVSKEVDPWARLWVQLQKG

SEQ ID NO: 18895 - protein, 558 aa, synthetic construct
MTKLYSYIRFSSMRQSDGSSYERQIRMAKEIADRYNLELVNDYQDLGVSAFKGANSKTGALSRFLDEIGRSIPVGSWLFIENLDRLSRQDIISAQELFLSIIRRGITIVTGMDNKIYSIETVTANPMDLMFSILLFIRGNEESQTKRNRTNSSALLKIKAHQQNSQSPAVAIEEIGKNMWWTDTTSGRVLPHPVYFPVLQKIVQLRQEGHSAGAILDYLNEHHEPPAPTSNKKHGKWSRAMVSRLFATKALIGVKTVNVDGVEYELRDYYPRVLSDSEFYFLRKNIIKKAWDYNRDKEKVIPLLSGIGVLRCVHCGATMVKQTAANGKREQYRYCCDGRKSGRTDCPYPNWGFRAVTLEGAVLQLLADKIWIAEDKTNPIPEIQVKIDEISRKIDNLINLSAMMGATKELANQITDLNSQREALHEEIRLFEREMYSVDSQGWDKLAQFDLSDVQNEERLKVRMKIKGALHEIECSRIDSKKNLFVLVYLDGLRQRLVIENNRGLKKGQIFVDLKTINDRQILESAGMVLHPCIEMIIDSDWKAPEEIPGLLSEEFGI

SEQ ID NO: 18896 - protein, 535 aa, synthetic construct
MTHIRNAVIYCRVSSARQLKEGHGLSSQESRCREYAKHKNYCVEAVFYDEGVSGGMVERPAMLELLDFIADRKPEETIVLIDDISRLARGLEAHLQLRTTIQQAGGKLESPSIEFGTDSDSMLVENLLASVSQHQREKNKEQVFNRMQARVKSGYWCFCPVPGYKYDKLPEHGKILVKQEPVASIIREGLEGFASNRFETQTDIKRFFESFEAFPTDKKGRVSHQRVADILTKPLYAGYLSVPKWNIYMHPAKHEALINFETHQAIIDKIEKAARKPQQSFISDEFTLRGHISCSCCNQPMTAGMVKGRSKKYPYYWCSQKGCEKYGKVIKREAIDQDFNELLQSLRMPKDIFFLAQEALKILWEKKRSNSSMDLGIVNQEKTKIEQKLDKLVDRLLDTDSPTLIKTYEKSIKQLEKQKVLLDEKLKVGRKRQPSFERAFKTALVWLTNPAVLWDTGCLADRKSLLKVLFTDNLRYDKESGFLNRPIAQPIRLCGLVGDGGTKMVGWRHVNRFRNLLKLNKKSNVNSYWCYFGCY

SEQ ID NO: 18897 - protein, 535 aa, synthetic construct
MAKKVVKKITKIEPVSSGSAANAVEVKRVCAYCRVSTNSADQKNSFEAQVDYYTRLIGEKEGWVLAGIYADEGRTGTKLYRRDDFQQMMEDCRQGKIDLILTKSVTRFARNTLDSIKAIRELKALGIGVYFEKERVNTLMEKSEQMITILSSIAQGESESISTNNKWSVVRRFRNGTFIISSPPYGYENNEYGELVIKKEEAEIVRWIFDEYLGGKGSYTIAAELETAGIPTIRGAKEWLDSVVKGILQNCAYEGDLLLQKTYTTDGVPFIRKNNRGELPQYLIADDHEPIITREEAAAIRQIYVYRRERQCVEDTSVYQNRYAFSSRILCGECGTKFRRQKIYIGKPYEKIQWCCYQHIKDSKKCSQKAVREDVIQAAFLRLWNRLASNYEEILIPMLAALKAIQGNPEQDREMQEIEQNIQELKRQGYRLGRVLTEGSISSAIFIERQNQIEAQLEADRRRLRQLQGQKAFEWEISQTEYLISVFRNRPAILEAYDEELFLLLVERITVLPGRRLVFRLKNGLELEENEQEVS

SEQ ID NO: 18898 - protein, 507 aa, synthetic construct
MQEQQETSYEAQVNYYTEKINSNPEWVFAGIYADDGKSATMTRKRNDFQAMIDDCMAGKIDMVITKSISRFARNTVDSLTHIRKLKAKNIAVYFEKENINTLGDGGEMLITILSSQAQEESRNLSENVHWGYVRQFENGVVYVNHNKFLGYTKDEEGNLVIVPDEAKLVRRIFRLYLEGNSINKIAETFTKEGIRTVTGNTVWHATVISKMLMNEKYMGDALLQKTYTVDFLEKKRVVNKGIVPQFYIEGNHEAIIPRELFYQVQEERARRANVYRPANKKGTTIRGKYSSKYVLADIMYCKECGQPYRRQVWVNGETKKPVWRCYSRLKSGTKKCKHSPSLEEKALHEAIMEAVNSVVKDEGEFIDAFRDNVIRILGSYSDNVEPTEYDEKIDALQKQMLALIEDSAKTESADEEFDRAYREIADQIRAFKKKRTELIREKQLAEAYNQRVEGMGQYIQKTNYLKRQFDDELVRRLIKAIKVISEDKIEIQFHSGIVMTQRINDYD

SEQ ID NO: 18899 - protein, 541 aa, synthetic construct
MRIYIYSRKSVYTGKGESVENQIEMCREYISAKIPESDKAEIVVYEDEGFSAKNTNRPQFQKMLRDIKLNKPEYVVCYRLDRISRNVSDFSSLIEDLNSYNISFVCIKEEFDTSKPMGKAMMYIASVFAQLERETIAERVRDNMLMLARTGRWLGGTTPTGFTSEKIQEIIIDGKIKTSCKLKDNPEELKTIDCILEKFLELRSISGVSKYLIKQGIKSRTGKIFSLLGIKEILQNPVYCIADEDAWEYFTEHHSDVCFEKTECSNKYGLLTYNKRDYRKKNAPRQGMDKWIVAIGKHKGRISGKKWVAIQNILKDNIPTGTKPAIMHNDYSLLSGLIFCDKCQSRMFAKQRSGKGGNRELYYYICNNKLRGGLKLCDCQNLNGQQADDIVCEYLMQYTDENSGIYKLLEKLKQDLQGQTQKSPLSVLDDKITKCNSEMDNLINTLSHGNLGTAFIERVNARIMELDKELASMKEEKKRLQKDVSVITDREIQVDMLSTALSSFKDNFHTLTIEEKRTLIKLMVKKIVWDGKDLHIFIDGE

SEQ ID NO: 18900 - protein, 535 aa, synthetic construct
MAKKVVKKITKIEPVSSGSAANVVEVKRVCAYCRVSTNSADQKNSFEAQVDYYTRLIGEKEGWVLAGIYADEARTGTKLYRRDDFQQMMQDCRQGRIDLILTKSVTRFARNTLDSIKAIRELKALGIGVYFEKERVNTLMEKSEQMITILSSIAQGESESISTNNKWSVVRRFRNGTFIISSPPYGYENNEYGELVIKKEEAEIVRWIFDEYLGGKGSYTIAAELETAGIPTIRGAKEWQDSVVKGILQNCAYEGDLLLQKTYTTDGVPFIRKNNRGELPQYLIADDHEPIITREEASAIRQIYEYRREQQCVEDTSVYQNRYAFSSRILCGECGTKFRRQKIYIGKPYEKIQWCCYQHIKDSKECSQKAVREDVIQAAFLRLWNRLASNYEEILIPMLAALKAIQGNPEQDREMQEIEQNIQELKRQGYRLGRVLTEGSISSAIFIERQNQIEAQLEANRRRLRQLKGQKAFEWEISQTEYLISVFRNRPAILEAYDEELFLLLVERITVLPGRRLVFRLKNGLELEENEQEVS

SEQ ID NO: 18901 - protein, 507 aa, synthetic construct
MQEQQETSYEAQVNYYTEKINSNPEWVFAGIYADDGKSATMTRKRNDFQAMIDDCMAGKIDMVITKSISRFARNTVDSLTHIRKLKAKNIAVYFEKENINTLGDGGEMLITILSSQAQEESRNLSENVHWGYVRQFENGVVYVNHNKFLGYTKDEEGNLIIVPDEAKLVRRIFRLYLEGNSINKIAETLTKEGIRTVTGNTVWHATVISKMLMNEKYMGDALLQKTYTVDFLEKKRAVNKGIVPQYYIEGNHEAIIPRELFYQVQEERARRANVYRPAKKKGTTIRGKYSSKYVLADIMYCKECGQPYRRQVWVNGGTKKPVWRCYSRLKSGTKKCKHSPSLEEKALHEAIMEAVNSVVKDEGEFIDAFRDNVIRILGSYSDNVEPTEYDEKIDALQKQMLALIEDSAKTESADEEFDRAYREIADQIRAFKKKRTELIREKQLAEAYDQRVEGMGQYIQKTNYLKCQFDDELVRRLIKAIMVISEDKIEIQFHSGIVMSQRINEYD

SEQ ID NO: 18902 - protein, 543 aa, synthetic construct
MTKAQAYSYLRFSTPDQFKGDSFRRQTVMAEDYANKHGLELQELRFKDLGVSGFKGMNLKAGALGRFKQEVESGSINPNSWLLIEAWDRFSRMPTEYVLPEMLSLIDMGITIVTLKNGGKVHRKGNLDMTTLLTCVIEMSQANEFSQNLVRRISAAKESKRQSIKLTGTGRMSSNCPLWMKPKGSDGFELIEERAAVVKKIFELTIEGHGRKAVCNYLIKNEVKPFSPKARTWHTSYIEKIIKNHQAYGSVQLYKNREPDGDPIRGYYPAAVSEDVYLAALHATRKRKIADNKGVTRKSRVNIFSGLLWCKCGDMLRLKNNGKGQFYYKCINVLEHRGCTARTLKQKPTDEMLIQALYLLGDKLVISGGVDKEDMSNVVAIRLKEELVKTESKRDVAMNRLLEFDSDALSSAFRALDEEVKTLQSRLNVLEQETASVRVSLDTEELGSLLDNLSDTLNGTCVESKVKTANALSQVVERIEFGNGKVAVQLKTKLPDYFDDMPKRDVLNIFIKDHGKTWATEGLRAKTEESIYSQRKPEGFKKS

SEQ ID NO: 18903 - protein, 600 aa, synthetic construct
MIHPKEQLDAYIYSRVSKDVQVLGDGIRRQIDGAIRFVESKNKENLQNGLPTYAIADEFITDRGLSAYKGFNTAANGGLGAFLEAARKGDIKRGSLLVVEAVDRISRMPADESRKTFSLFKEYGIDVAIVKFGIIIKHSESTTLENDLLITAAIHLAHMESQQKSNRINDYFENKRMKEKEGGEKRTSICPSWMKLSEDKRSFELIPDRERVMKRIINMKLDGLGCHRIASTLNSEGVPYFNGKTWSTEIVRKYCKMIQLYGAFQRVKHVRTDAGTKKQPWGDIEQNYYPAIIDEQTFLRLKKSFKRSGGRQTGAFSNLFSKLLFCPQCGSSMSYYKPNRGRKKVRCRKQIDNQGCTQRALNYEEIETRLVKALAGLDYAKINDSSFTDLSAELSSLEANIAELNENVEVVTKQLMENTNPRLYSILTDKLTKLDDEINSEKAKFDELSILHRNYDTTIINSLKLDNNEDRERYNNFVKQFVKYIICTDEEQGGSLRVVFKADAIGELPFSFSDEKNDKAVSEVFTANRSISDTQAVRSINLDKSSGMYLPLLKEITDVKQPNDLSDSRELIRYMHAVRMAVRRNPQKWKNIAKQAQLRY

SEQ ID NO: 18904 - protein, 454 aa, synthetic construct
METIIKKAACYCRVSHEEQKLHGLSIEAQKEDLKQYCKRNNYKIYKFYIDEGLTAKNTKRQGLQNLLSDLDKFDIVLFTKLDRLSRNIIDANLLDQQFKSNNVCMKAIFEDDIDTSTADGKFTFNLKLSLAERELDKTSERIKDVFRYKIERNEVISGSVPKGYKIVDKKLAIDENTAWVVKKSFDLVEELMSARAAFIQINNVYNQPTSFRSFNKLLKNIIYTGTYKSKNYYKENYCEPIISLEQFSNVQRILKNNKQYVSSNRKETYIFSGLLKCAHCGYKIVGHYSNRSGKNVIKTYRCNRYSIYKDCDQKKSINEKKLEKVLLNCIVEEYKNYLYSFDVSSKKSSSTDISQNKAKIQKKIDKLRELYLNDLISLEDYKKDYAIFNQALEEIKNKEVAKVAPKDADKLLSILDNIEDIYYNLDATERKRFWTSFIDVITIDGNYNIEIKFL

SEQ ID NO: 18905 - protein, 504 aa, synthetic construct
MKSALYCRVSTTHDDQNTSYELQQKYQNEQFEIVQIYAEKTTGRYLKKRPEMQQLLNDCGVEITFNNNQPIFIETDRTPMYENIIVANTSRFGRNIVEVKQIIEILHKKNVAIWFDDLGKFSNAKDLSLTLDLLFLLDENYSKQVQQKVIHGLERARKEGYLHINSTFFGMDYMSESNTLVPNDESKIVVEIFNKYKEGDSLRKLAALYNFTQSRVKDIIDNPRYAGYNFYNKYIEGTKKKKPIEELEIFESDRITPIISLDLWKECQEIKKSRKCGTRGINNQTYALSSKIICCKCGTKFFHKQANIRPNSDLWKCRLSHNEPHKCDMKGISEKTIIKYLKSEYGLKAIRDTLKFKIDLAISNIEIEDKESIELKLEPLKQKMERLKKLYIMGDITEEEYIESRAEFKSNYDKYVNLLEDISNKQLNIIKLNSLKKDYNKILDNYEVLLEENPQELFRKIEYIKVDKIQDIIKNRYNSFVREVMFNDFLPIKEYYGQFIILEE

SEQ ID NO: 18906 - protein, 543 aa, synthetic construct
MKIAIYSRKSIFTGKGDSIENQISMCQEYIYSKLGKDVEISIYEDEGFTGKNTNRPEFQRLMKDIKNKKIDRIVCYKLDRIGRSVAQLSNMFEMLDKYNCSFTSITEQQFDTTTPMGRAMINIASTFAQLEREQLAERVRDNMLQLSKSGRWLGGQSPLGFTPEKMIYIDEEMKERTLMKLTPDEEELNIIRFIFKAYLEERSINEVTRQLNIKCVKGKNGGNFDTTQVRRILRNPLYVKSDESTHKYLNDIGTNVYGEYNGNGYLTYNKKRQTTIGRNIEDWIVAISNHKGIINSEEWLKVQCSLDKNKAKQSIRLGTGNSNNACLSGILKCAKCGCNMIVKHGHPSKVNGYKKFDYYVCSNKQNKYVDRCDNPNIGVDKLDPIVIAEIKAYNKDLLIDELTKSLISSDTTLENGQIKELNTQIKAKRLASSNLVKQLSLAPNNDVAGIIMNEISSLNDEIKELEYNLNNIESDKNDIINQTVNLELIINSLKHFNENMDIVDDISKKRLLIQSVARKILWDGDNYKTTVEISDMDNSKKIF

SEQ ID NO: 18907 - protein, 530 aa, synthetic construct
MTPIAVADTIHSDMLVPLGMYRRVSEDKTLKGRTSTWREIEEQVKEQESAIRAFAKTLPFEAAITRDYCDNNTPASDPFIIRDDFERMLKDLEAGVIRGILFLHSDRLARLVYDAARVCRVFEMNPEYVGLSVEGSVDLSTVEGRGMFVMQATVGNMEIGNIKRRVTRTNRRVAEKGVMHGAPRPFGWNDDRRTLHNEEAKIVRDAILAIPGGYTVADFKRKLTEYGYVPKQTKRSGEGRRAIQHSAAEAILINPRVAGYRLHVPESVRRSAKARLWLPDFITYKDGKPVVGDWEAITTHDEWKAATDEIKARKAANKTGLKGKKHTTTATHLCSGIARCGKCSTPMWSNPYSEKHHPTAFKLYGFRYACLTSQGGCGGVTRVGPPVDTFVEHAFLAHTNRGLGDSVEKAAQLDESIHDSRLDEIADEIADVNERRRVKRISTSAALDMIEELEAERDALLSERGKIALQKRQQALLSPEALSDWENLTMSEKRARLKTSIRAVIVHPSGRGKRFDEDLIEIVWKDNPAA

SEQ ID NO: 18908 - protein, 542 aa, synthetic construct
MSIRRAALYARFSTELQSDRSVDDQIALCRNFAERGGFEVVRTYDDRAKSGASMIERDGLLRLLADAKSNQFDVVIVEALDRVSRDQEDMAAIYKRLKFLGIDIIAVHDGKADTIQIGIRGLIGAIYLEDLKHKVRRGMSGRVRDGLSAGGKAYGYKPVLGKPGELVIDEDEAAVVRRIFREYALGRTPRQIAIDLNRDGIVPPRGAVWNASTLNGSKARQNGMLRNPIYYGVLIWNRVTMVRDPETGKRVSRNNPESEWQRKDVPALRIVDEETAAKVQARIEERTFNMSPERAPKRPRMLSGILKCGKCGGGMTLDGYNRGRMRVRCVRTRETGACDHKRKYHLEDIEAGTVEMLRQQFSKPELLQAYLDAFLQDRRQKAAEINNTRSILEKRLARLESELERAIDLCIKGVLSEDKLMERKKEIDPEIVRIKADLSMQPPPPKIDVHPATIAALRGDMEELGRILTKGPVEITEAVVQTLRSVVDSVVVYPTEPRTAPVVQVRGKLARLLGEDIENGFLPKAANKMVAEEGFEPPTQGL

SEQ ID NO: 18909 - protein, 698 aa, synthetic construct
MITPNTNTQKKKRYVIYTRCSTDDQAQGDFTTLDAQAYHCKNMLDAFGYELAEIGKKGIIKDDGYSGKDLNRPGIQLILTNVKQKKFDGIIFFRLDRLTRNPRDLYALIDLFRDTRIDFISVRENLDSSTAIGRVVIGILGLLSAFERELTGERVKASCLARVRQGKWVGGNVPFGYKLIDDGDPLPNGRQPHKIIVDPENGTKLRFIWEMAADNRSLYDIAQELIRRGIKTPSQKVWRKQSVAWIIKNPFHKGYVKYGNEIHKGHHPAIVDEHLWEKANKILTAKLPGHRFAKQPQEYIYLLSGILKCGKCGSHYVCESGNGHSEKFFYYVCGRSKQGLGCEASRLSAKGFDDALIDYFKRASRDQDIIVKAIGDAILDSQIKLENLEKLIKPLQEKLLSVQKEANKLLELAMNSKVSQGKTYKDKMAKLDEEIIRLEDDLEKLQAKKSVAQMSANSGEFLHSNLRFAMQYLDQAPPDARKALIKALIKEIIVYQDYIEIKMYIDQPTVDSLSCRLSVPEAHKPPQNDKRPAGETCKALVTASNARCSPERQDWLPRVVASRTAQPQVVQLVVKMEIRRSKRILLSLVDPLPPKPIRLPPVYPNTIVEALKIKAFMSQGPTMLTWAQTRKALNISEAKLAHLLKIVKTLPPDFVENMKSCTDESMLKIFHGRRLLKISRLKTEKERRSEIERLLLKI

SEQ ID NO: 18910 - protein, 566 aa, synthetic construct
MKVAIYTRVSTEDQAREGYSIEVQREYLLDHARRMGWEVYKVYTDDVSGYVIDRPALNEMLEDARQKRFELIITYKLDRFSRKLKDLLNIVDDLAGYGVAYKSATEPFDTSTSAGKLMFQQLGSFAEFERNRIKERVFPGMIKGVQQGNWQGARYAPYGYYYNKEKKLLEVVPEETNIVKLIYTMYLANRTSGQIAEYLYLKEYKTRSGGRFNSALVCKILKNPIYLGKLVWNQNHYDTNQRTLTRKGYRYVRNDPSKVVIAQGRHQPIICQDDFDEVQAKLRSNRRGVLHRINVLDYPLTGILYCAKCGYRYQGTSNMSNHRLKKRKRWYKCSCMGTYHVRCSNRPVKAEDIEPRIFEIVQKIFSHKDAVQGRLENLVKANLYLNNEDVRKDLDGLSEQLKLNLEKQRKLNDAFMDNFVGSELYREKVSALREEEKKINMAIAKCKIKLVEKERSEAYLKTLKLAIENFDETKEEIGIVDKKELLKLIFESVHINGGQMVSVRLYQPFQQMYEEVLKECNTLTNQEVTKKIKPKRGVCILEPSVGRCLPYRHSMADLAEALIGAD

SEQ ID NO: 18911 - protein, 561 aa, synthetic construct
MRVALYTRVSTEDQAREGFSLEVQRTYLLQYAKNFGWDVFCSMSGRDVYMDDGYSGGNMDRPALQRLLFDARNKQFDLVLVYKQDRLSRRLKDLLGLLEEIDSLGVGYKSATEPFDTTSSAGKMAIQMLGSCAEFERNRLVERVFPGMVVGVKRGHWQGARYAPYGYRYNKEAKKLEVHPEEAKIVKEIFSMYINGKSTSQIAGHYYMLGIPSRQGGKFYTKFISDILKNKVYLGMLVWNKRRYDTKIKTKNGEGKGYCYIKNDPSKIIEVPNTHEPIISQREFDEASTLLKRNRTNGIVRFRNNVYHLSGILKCNECGGNYRGMTHIVNHRTKMRRPWYRCSSRGIRYIKCNNKSVTADAINKQVWDIVEVIRKNLHVLEELGDMIRLNASEPERVYMEQLEEKEALLKKNVEKQRAIYELFSEDKINMGLYKDRAELLSNEEKKLKQDIKAIHLKILDKRNSVNLVKATQDFLLRLRSTPESDNHQLDYLIKTFMRIVFKSITIQNQEIVKFELNEPWKTCYEEGMKWLKTNEKTTIQAIPEAKARRSYVCFCAPSDVR

SEQ ID NO: 18912 - protein, 548 aa, synthetic construct
MKTMSASADQGAPLRAALYLRVSTGRQAESDLSIPDQRRQAMAFCAARGWTVAAEFVDAGLSGTTDNRPELQRLLEIATGGGSPFDVVLVHSLSRFMRDAFLQEMHVRRLAKAGVRLVSMTQEVGDDPVGVMVRQVFALFDEYQSNEIRKHVSRSMNENARQGFWNGAAPPFGYTTVAAGERGARIKKKLAVEPVEAETVRLIFRLLMEGDGISGPMGIKAAVCWLNERGYRTRGGARWGIGPLHNLVTNTVYKGEAVFNRKDSKTRKEKPASEHIVVACDPIIDPAKFDALQASLKARNPKASPPRVVTGPILLTGVATCASCGGGMTIRTGKSGRYRYYVCATCAQKGKSACKGRSVPMDRLDDAVMERISEQLLTPERVGTLLRGLMYRQTRKDEDHVSRLSALRGKLSDAENRLNRLYQAIENGIADATDPTLKDRVAAIKTERDIAQTAFDRAVAEMRPDARITEDKIAAFVEVMRQNVLTGDTSFRRSYLRAVIDKVEVDDTEIRIHGRRTVLERLVMGGGAAPAGVPSFVREWRTRQDSNL

SEQ ID NO: 18913 - protein, 518 aa, synthetic construct
MNKYHLYQRVSKQIQAEEGQGIQRQEQACEHWISDYNKRLLSEGKSAYSKGLIYEDRGKSAYTAANFKRGELGALINDIENGKIEKGDLIVIELIDRFSRANVDFVRSQFQRIIDAGVKIAITKWNLVFEENMESVSSVTGRILLEIGMYLAYQESSQKSSRIKASRKLLEDSGRKSIAKPPFWLARNLDLKSYTIIEENAEIIRKIFDLKLNFNYGPQKIIKSLGDLDIYRYSFDENGNLIKTTKNSPLSESSINAYIRNTNVIGKLDGKDYYPRIIDDRTFYAVQKRTRENTGGVGEIFRNVFVGVGKCGCLIRKENENDCGSLAKCGYIMAFSSRKVKNPTKGMYLKCNRKRKSTKCDSENINYYLAQNKIYNVLKSLKFDIDQSVDISHLEERINTIDKSMSKIREYMTQYSDDEEWENQYKIKRMEREKIENEIKASKSRITGKLSNLDIDFSKEKDRVLFNQFLKDNRITVYFTKERMEIIIGSLNNFSIKCGYDDSNRDIDHIIESYSKMV

SEQ ID NO: 18914 - protein, 598 aa, synthetic construct
MDEKPRIAHIYSRVSKGTQVKGDGLRRQIEIASKFIEDVNISNSRDGLPVYTLADSPIYDRGLSAYFGLNTDENAGLGAFLKAAENGQVEKGTLLIVEAIDRISRLPVDDARALFARFKKYGIDVAICRFNLIIYHDKSSDLGQDLLITTAIHLAHLESEQKSKRIRARFTHKRLLEKEGGERRTSMSPSWIELSKDKTHFVLIPERARIVRKMVDLKLQGWGAHRITVYLNEQGFPCWNRSNTWYTKIVEKYLKMIQLVGDFQPVEHVHGEKGVRKEPVGDVIKGYYPALITEEEWIRLKASFKRSGGRQTGAFSNLFSCMLYCPTCGSCMSYFKPNRGRIKVRCRKQIDKQGCDQRALNYEEIEPRLIKALAGLDYAKINNNSFASLQKELNTLEAQVAELEASADDIKTQMLEESDPRIISVYVNKLKAIYTEQDKAKARFEKLSTQTSDYDVNTLEQLQLERNEDRERYNGFVRSFVKYVIASDSKLGKPLRIVFKSEAVGEVPVFFNDDKNNKAISDIFTAQKDVNEAAPIRLINMSRVHGNLGKLAAIDTVPVPDDLGDALERIKYLFAVRQAVLQNPEKWQAIADDARLFE

SEQ ID NO: 18915 - protein, 584 aa, synthetic construct
MTKHKIHVYTRISKTYQQEGSGLDEQLSRIDAYIKSKPEFLGSEITYWQDVGVSAFKNKNIHDGQLAEFIKQVESGSIGSGHALVIYSLDRLSRRSSWDEDTIQKLVKNGVDIHDVSTPVVLKRDDPFSKIIMELIVARGNNESKIKSERSIAGWEKRLKETREQGKVFTRKLPRWLSTDENGYVVITEQAELIKRIFLEYTNGLSSPMIARRLNEEGIKSTGRSMWRPNTITKLIKDERLRGYLRRSTDQALIPDIFPVVIDEEIFVLANRILKNNATGIKGRPRENNITREVNNILTGIVRCGKCGARVTTSKNSRGVRYVVCLNRRNYEMCGQKSIKLDEFEKIVISHAQQVDMSKVFSYDKVDTSRESTLNSELSNLEIDEKNCIDDIDARKKAKKTASLVLANTLVEIQDRIEEIKQQLLELKIKEPLPEIQHFSINDLINPSNIELRMSLRKFLTQAVDKITFRSLDNNILIEIKYHNNAYRHILITDKKVKEVLHEVDIVKNGEVINYTTNGFLITENEHENTCIFHGIYNVHYTDYFLLANYIGSLKNKHWIVDKMYETENMSIVMTNEKQKSHYN

SEQ ID NO: 18916 - protein, 529 aa, synthetic construct
MKKVYSYMRFSRPEQAKGSSIDRQSQYAEQYALEHGLELDESLTMMDRGLSAFHGVHKTKGAFGQFLSAVTAGKVPSGSVLVVESLDRLSREDPLIAQAALTDLILSGITVVTAADNQVYSREEIQQNPFKLIMSLVVMIRANEESETKQRRSNAFLKSALNQYQTNGNIRRLGADPSWLDFNKDDNTYSFNARVDVIRRILSLYNQGIGSLKIARQLTEESIPTLSGKRNAWGQTTVANIVKSHALYGMKRINVQGVDYDLDDFYPALITKSKWLALQQHRSKRSKTMHGRGEVVHLITGHGKGFTTCGYCGGGLGAQTQKQHKRSGEYSKTVTRLHCLTHKETSSCCSSVFLEPIESAVLFAACIGVEPQSLVPTVNNVNYSALIDEIDNKVKHIVEQVTAGAPWELFKDAHDKLKLEKQKLIKERDSQKPDVNQSDVQKWVNKLVELADKARANDKEARLKCRTLINSICKGIVIKLRGHDLKSEPVATITFVTDEQFEFKVGKNGAVQFVDNGMAVNRRLKPLLT

SEQ ID NO: 18917 - protein, 507 aa, synthetic construct
MKRAISYIRFSSEKQSRGDSLRRQAKMVTDWLKAHPEYYLDESLTFRDLGVSGFTGKHLKGGLGDFLTAIEKGLVKAGDTLLIESLDRLSRQDVDQASELLRNILRSGVDVVTLSDGEHYTRESLKDPLALIKSILIMQRAHEESLRKAERIQAAWDAKKEAAKAGIKISRRCPAWLKLNDDRKSFSVIPEKVETVKRCFQLRLEGKSIWEIVRTLNAEGHQTLNQYKAGKFGQTSVQDLLKNRSVIGYFTPKGCEEIAGYFPPIIPETDFYKVQQLSYSRYGRKPASDKPLSVNLFKGVIRCSECGHALIITGFSDTRNGIYRCPLRNENRCSAKGLSRKQTDGTLLALLSRIDRFDSDMTNTIDTLKLHREHISSNIEKLVQLSLEIEDLSAITSKLKQLKGELSQVDADIEKETQRLKSIDVGCLSDCDLTTKAGRIEAQLIIKSAVKEVVLNTAKRRCKVTFHNGKAITLPITENPSDNVTEAIQSLSEVTERGLIDVDEVIV

SEQ ID NO: 18918 - protein, 531 aa, synthetic construct
MTIAYSYIRFSSSQQSQGDSLRRQTQLAEKYCIENNLTLSDTTFRDLGVSAFHSTNSQEDSGLGQFLSALNQGRISEGSYLLVESLDRLSRAKVQTALRQMLNIIELGVKIVTLMDNRIYDQESDTTDLIISLTIMERAHNESKTKSERIKAAWVHKRQNPTTTNRHSSTPFWLSLNADKKTYKLKEKYVEIVRKIYQLSIDGWGVIKIVRHLNESNIKAPKGGSWATTTVSRVLTSKAVLGHYEPMQNRKSLNLTIEDYYPSIIDEATYYLSRQRQNERSKPEAAGRKTDYPNPLNQIAKCKLCGSSMYYENKSKSLKYLTCREFKKGNCTNKPIRIELIYRFIYEVFNSPMFHQCQAKLVEKSNQKGSNRLEELTAKQTEEENALRGLLSLSNDFSNTIIQEEIKVRSERIESFKKQIENVKAEQAVEHTRSVHINFTEALQLAVSAFRFPLGEVEVEELSREELFNTRVRLNRILKRAFNSLSIYHSGESKRITIETEVMEGFTEGLKYETTRQSIKEPVSSRIWSVC

SEQ ID NO: 18919 - protein, 366 aa, synthetic construct
MKRVISYIRFSSERQAKGDSLRRQSKMVNDWLKAHPEYYLDQDLSFRDLGVSGFTGKHLKGGLGDFLTAIEKGLVKAGDTLLIESLDRLSRQDIDIASELLRRILRAGVDIVTLSDGEHYTRESLKDPLALIKSILIMQRAHEESLRKAERIQAAWDAKKEAAKAGIKISKRCPAWLKLNDDRKTFSVIPEKVETVRRCFQLRLEGKSIWEIVRTLNDEGHQTLNQYKAGKFGQTSVQDLLKNRSVIGYFTPKGCEEIAGYFPPIIPETDFYKVQQLSYSRYGRKPASDKPLSVNLFKGVIRCSECGHALIITGFSDTRNGIYRCPLRNENRCSAKGLSRKQTDGTLLALLSRIDRFDSDMTRLAP

SEQ ID NO: 18920 - protein, 559 aa, synthetic construct
MKTKLYSYIRFSSMRQNDGSSYERQIRMAREIAAKYDLELVNDYQDLGVSAFKGANSKTGALSRFLDAIGRSVPVGSWLFIENLDRLSRADIVSAQELFLSIIRRGITIVTGMDNKIYSLDTVTANPMDLMFSILLFIRGNEESQTKRNRTNSSALIKIKAHQENPQNPAVAIEEVGKNMWWTDTTSGYVLPHPTYFPVVQEIVELRKNGRSTAEILDHLNETYAPPPAVSNKKHSKWSRAMVERLFHTRALIGIKEVSVDGVNYELKDYYPRVIDDATFYHLKKNIGARAWNFGDKEEVKPIPLLSGIGLLKCDHCGCAMVKVKGTNKRSDQYRYTCDATRSRRLDCEHPNWSFRGDQLEKAVLQLLADKIWIAEDKANPVPALKVQVDEISRKIDNLIALSAMTGATKELAEQITTLNSERETLYNQIKMAEEEMYSVDSQGWEKLAEFDLEDVYNEERLKVRFKIKQALKRIGCSRIDRNKNLFVLEYIDGKTQRVVIENSRGTRKGRIFIDLKTINDRQILESNGLVLHPCLDMLTDKNWKPEEEIPGPLQEFGI

SEQ ID NO: 18921 - protein, 537 aa, synthetic construct
MNTIRPLVSLRSPTAYSYIRFSSAIQAQGDSLRRQTKLAQEYCQKHSLTLSEQSFTDLGVSAFNSANTNEDNGLGQFLKALEQGVIPSGSFLLVESLDRLSRANVMTALSQLLNIIGHGITVVTLIDNRTYSSESETTDLIISLAVMERAHNESKTKSERIKAAWANKRANPTTTNRTSLAPFWLKLNKDKRTYTVIEKNAETVRRIFQMSIDGHGIVGIARRLNEEKIPSPKGGSWSNTSICRILNSKAVIGEYTPNIGRTSTNAPISDYYPSIIDEDTFYFSQSRKAERSKPESAGRKTTFPNVFNQVAKCGVCGATMYYDNKSPTLKYLTCREFKKKNCTNRPIRLELMHHFVIEQFLHPQHFERFNELVAKGTTVDSNVAVLKGKLEASKETYKQLLSLASNFSDPVIQDEIKRRSESVQSLTQQIEAAKAQTIEATNSVHMNFRESCQLVADALQTETYGYQPTSLPNEELLKARVKLNRSLKQAFKEIQVSHCPDTKKASITANDFVFEAHKSAMKTGFNDTTWWVQKKEA

SEQ ID NO: 18922 - protein, 512 aa, synthetic construct
MKAYLYIRFSSKQQEQGDSVRRQEEAARKWCKAHDVELSDMTFEDLGVSAFKEGGKRPALADLIEAIELGKIARDSYVLVENDDRLSRHGWYATQQMIRRMVLDLGVKLVVISSGTVYDSSNIEDIAQNILLMFNADRAHKESLRKSEMIRAARQTRRDDETLTGKLPFWLKRVDDKILLDQQKADIVRMIVELKKSGKSNQATARFLNDQKINSATGGKWNASAIRMVCSNHAIYGAKAYFITDGTRKMTLDKVVEDKLPAIVTKADFDAVQTTQKHRGRRSTKTPFSLLLKCGKCGGGMVQRTSMYKEKKMIYRRCIASLEGRCDQNKLIREPDVILSNALKHMQYIDSVEQYVSRVSSIQAQIDTLKQTQDRLIELGQVDALTNLYTRLAELEQKLVQARIEDEANEQKPIDFNYKNVFDLEDASEQNAMLKRVIDSIEIHYLGVVDKKTSSKWRIKVNQRNKHHQGFVINQYHGFGNWEIIHMTDTEKFKKELEALTDDIDDCIDFDE

SEQ ID NO: 18923 - protein, 449 aa, synthetic construct
MKQVIGYLRQSTMKQQSLAAQKQAIEAIAEKHHIQHINFYSDKQSGHKDNRSGYRQMTQLIQQGQCDILCCYRLNRLHRNLKNALKLIKLCQTYHVHILSVHDGYFDMDQAFDRLKLNIFISLAELESDNIGEQVRNGLQEKAKQGRLITTHAPFGYEYHNGTFIINQNESPTVKAVFNYYIKGHGYKKIAQLLEEDNTYINRQPYQVRNIIINPNYCGRVNNQYGQFDNMFPSIVSTSIYEQAQRLRLQKQTKQTPSDNQLKQKIKCPCCNATLTNMTIRKKNHTLRYYVCPKNMNASRFVCDFKGINAQTLEDKVLEVCRDFYQNQRIYTKIKSAIDKRIKRQRNIEKHHTLTQEQLIEKLAQGIIDAETFREQTQSLRQQPQRTTSINGHQIQHTIQNIIQKRFTLNILYPYIETIHITKDKNLIGIYFKNEPLNIVNQTMQSSIA

SEQ ID NO: 18924 - protein, 547 aa, synthetic construct
MRTAYSYVRLSSKKQIQGYGQERQWEAIQAAALAHGWSLSEKTFSDLGVSGWKGANIETGALSQFLQCVEDGYIEKGSVLIVENVDRLSRAGVQRAVSLLMQLLASGISIYTFTDSKLYEPDSHNPLMDLMAWALSAQRAFEESERKSQMILNAKAKAREKARLTGEIITRRCPSWLRVNQDKTEFELIPERVETVRKIFDLYVNGYGTPRIGRLLTEEGRKPLTGRAWYPRSISRILQYRAVLGEYQPTLNGKPEGEAIKNYYPAIIDEDQFNEVQAVLKEGGAGKGRRGKEMRNYFAGLLRCSCGEGMHIVSSCVKGKRYYQLRCLQYRISCFDSPWNFYRLSSFVLFALRRLPILEVMGSQDNNNIKELNAKERELTFLLEDTRRQLDNTINAIAALGLNDQLQSKFRELKTSVTNIEKQLSNVKTELETSQGKLVIQKQDSEMLTGRFLELIDSTKDIDGRIKLNQVLRRYLSKIEMHADKKEEYRYIKIYRKDGDELVSIQCDHSLKGALFESKDDLETFELLPANDAKRNEISNTLLCTPK

SEQ ID NO: 18925 - protein, 515 aa, synthetic construct
MKTAIYLRKSRADLEAEARGEGETLAKHRTTLLKIAKEMNLNVLSVREEIVSGESLVKRPEMLALLEEIEDNKYDVVLCMDMDRLGRGGMKEQGIILETFKRSNTKIMTPRKTYDLNDEWDEEYSEFEAFMARKELKIITRRMQRGRVASVEAGNYLGTHAPFGYDIHRLNKRERTLTIIPEEASVVRMIFDWYANEDMGANAIRSKLNDLGYKSKLGNEWNPYSILDILKNNVYIGKVTWQKRKEVKRPDAVKRSCARQDKSEWIIADGKHEPIIPQSLFEQVQEKLNSRYHIPYNTNGIKNPLAGIIKCAKCGYSMVQRYPKNRKETMDCKHRGCENKSSYTELIEKRLLEALKEWYINYKADFEKHKQDDKLKETQVIQMNEAALRKLEKELVDVQKQKNNLHDLLERGVYTVDIFLERSNVVSDRITEITSTMENLKKEIKTEIKKERVKKGTIPQVEHVLDLYFKTDDPKKKNSLLKSVLEKAVYKKEKWQRLDDFELVLYPKLPQDGDI

SEQ ID NO: 18926 - protein, 498 aa, synthetic construct
MKRIAIYSRKSVYVENSESIETQINMCKAYFTRQFKDCEFEIFEDEGFSGKNTDRPAFKRLMKLCSIKSFDAVAVYKIDRLARNIVDFMNIYNELEKLEIKLISITEGFDPTTPIGKMMMVMLAGFADMERMNIAQRVKDNMISLAKKGCWTGGIIKRGYTVEEKEDGKKYLKLENEDFIKFTFENFLKGYSMHKLSKMQKENYGSYGLGSAIAVRNMLRSPVYVKSSKDVSDYLEKKGFEVVGKEDNLHGYLTYGVSSKEPCAIVSKHKAIIDPIEWLKVNTKLDNIKSKALTKTSKCYWLTGVLKCPYCKANYVLANVRGNSYYTCSTRLKRGANNPKTCENRKYVNAIELENLIEDLIIKLYSKDYFDSFFCNSEKVYEDNTLELEAKLKRNEKSIMNLVEKLALIDNSNPATKFITDKIEKLSREISEIKINIEENKFNKLEQKLNQSTPDIIYNNISNFAECKTLEENRLRLKLIFESIYYEPNTKSIEVEFI

SEQ ID NO: 18927 - protein, 479 aa, synthetic construct
MRYAVYVRVSTDKDEQVSSVENQVDICRYWIEKNGYEWDQSAVYFDDGISGTAWLERHAMQLILQKVRKNELDTVVFKSIHRLARDLKDALEIKEILLGHGVRLVTIEEGYDSYYEGNNDMKFEIYAMFAAQLPKTLSTSISAALSAKVRRGEHIGTIPFGYDRIDKKLIINDEEALLVKEMFDWYEDGRGYRMIANNLNEKGCRTRFGNLWSEASVKTIVTNSLYTGEHVMHKYKTVKVDGKKKTVKNPKEKWLVFKNHHDAIISKEQWERINLVSDVKDKKTKSDYRNEFRGIVWCAHCGKRVRAIYAGVRSKYERVYMKCSTYKAYGTCVNHIPIRYEDFRNLILERLKQKQEYIETRLVAQIKDKLQGKIAKSKKTIKQLESKKEKLLELYMDSFIDKETFVNRNRKLEDEMTAQELQLLKLKDKDIQNRETKDIQDAFMLLQEEQDLHKAFQKLIKKIVFYQDGKLDIEYTFDI

SEQ ID NO: 18928 - protein, 503 aa, synthetic construct
MNNRIDAIYARQSVDKKDSISIESQIEFCKYELKGGNCKEYTDKGYSGKNTDRPKFQELVRDIKRGLIAKVVVYKLDRISRSILDFANMMELFQQYNVEFVSSTEKFDTSTPMGRAMLNICIVFAQLERETIQKRVTDAYYSRSQRGFKMGGKAPYGFHTEPIKMDGINTKKLVVNPDEAANIRLMFEMYAQPTTSYGDITRYFAEQGILFHGKELIRPTLAQMLRNPVYVQADLDVYEFFKSQGTVIVNDAADFTGMNGCYLYQGRDVKPSKKNDLKDQMLVLAPHEGIVPSDIWLTCRKKLMNNMKIQSARKATHTWLAGKIKCGNCGYALMSIFNPSGKQYLRCTKRLDNKSCPGCGKIITSELETVVYQQMVKKLASYKTLTGRKKAAKANPKIAALQVELAHVDSEIEKLVDSLTGANNVLLSYVNVKIAELDGRKQELLARIAELTVETISPEQVSQISGYLDTWENVSFDDKRRVVDLMITTIAATSDSLNITWKI

SEQ ID NO: 18929 - protein, 515 aa, synthetic construct
MKTAIYLRKSRADLEAEARGEGETLAKHRSTLLKIAKEMNLNVLSVREEIVSGESLVKRPEMLALLEEIEDNKYDVVLCMDMDRLGRGGMKEQGIILETFKRSNTKIMTPRKTYDLNDEWDEEYSEFEAFMARKELKIITRRMQRGRVASVEAGNYLGTHAPFGYDIHRLNKRERTLTINSEEASVVRMIFDWYANEDMGANAIRSKLNDLGYKSKLGNEWNPYSILDILKNNVYIGKVTWQKRKEVKQPDAVKRSCTRQDKSDWIIADGKHEPIIPESLFEQVQEKLNSRYHVPYNTNGIKNPLAGIIKCSKCGYSMVQRYPKNRKETMDCKHRGCENKTSYTELIEKRLLEALKEWYINYKADFEKHKQDDKLKETQVIQMNEAALRKLEKELVDVQKQKNNLHDLLERGVYTVDMFLERSNAVSDRITEITSTMENLKKEIKTEIKKEKVKKDTIPQVENVLDLYFKTDDPKKKNSLLKSVLEKAVYKKEKWQRLDDFELVLYPKLPQDGDI

SEQ ID NO: 18930 - protein, 452 aa, synthetic construct
MKAAIYIRVSTQEQVENYSIQAQTEKLTALCRSKDWDVYDTFIDGGYSGSNMNRPALNEMLSKLHEIDAVVVYRLDRLSRSQRDTITLIEEYFLKNNVEFVSLSETLDTSSPFGRAMIGILSVFAQLERETIRDRMVMGKIKRVESGLPLTTAKGRTFGYDVVDTKLYVNKEEAQHLQLIYDIFEEEKSITFLQKRLKKLGFKVKSYSSYNKWLMNDLYIGYVSYGDKVHVKGVHEPIISEEQFYRVQEVFSRMGKNPNMNKESSSLLNNLIVCEKCGLGFVHRVKDTVSRGKKYHYRYYSCKTYKHTHELEKCGNKIWRADKLEEMITDRVKNYSFATRNLDKEDELDSLNEKLKIEHTKKKRLFDLYISGSYEVSELDAMMSDIDAQINYYEAQIEANEELKKNKKIQENLADLATVDFNSLEFREKQLYLKSLINKIYIDGEQVTIEWL

SEQ ID NO: 18931 - protein, 479 aa, synthetic construct
MRYAVYVRVSTDKDEQVSSVENQVDICRYWIEKNGYEWDQSAVYFDDGISGTAWLERHAMQLILQKVRKNELDTVVFKSIHRLARDLKDALEIKEILLGHGVRLVTIEEGYDSYYEGNNDMKFEIYAMFAAQLPKTLSTSISAALSAKVRRGEHTGTIPFGYDRIDKKLIINDEEALLVKEMFDWYEDGRGYRMIANNLNKKGCRTRFGNLWSEASVKTIVTNSLYTGEHVMHKYKTVKVDGKKKTVKNPKEKWLVFENHHDAIISKEQWERINLVSDVKDKKTKSDYRNEFRGIVWCAHCGKRVRAIYAGVRSKYERVYMKCSTYKAYGTCVNHIPIRYEDFRNLILERLKQKQEYIETRLVAQIKDKLQGKIAKSKKTIKQLESKKEKLLELYMDSFIDKETFVNRNRKLEDEMTAQELQLLKLKDKDIQNRETKDIQDAFMLLQEEQDLHKAFQKLIKKIVFYQDGKLDIEYTFDI

SEQ ID NO: 18932 - protein, 452 aa, synthetic construct
MKAAIYIRVSTQEQIENYSIQAQTEKLTALCRSKDWDVYDIFIDGGYSGSNMNRPALNEMLSKLHEIDAVVVYRLDRLSRSQRDTITLIEEYFLKNNVEFVSLSETLDTSSPFGRAMIGILSVFAQLERETIRDRMVMGKIKRIEAGLPLTTAKGRTFGYDVIDTKLYINEEEAKQLRLIYDIFEEEQSITFLQKRLKKLGFKVRTYNRYNNWLTNDLYCGYVSYKDKVHVKGIHEPIISEEQFYRVQEIFARMGKNPNMNRDSASLLNNLVVCGKCGLGFVHRRKDTVSRGKKYHYRYYSCKTYKHTHELEKCGNKIWRADKLEELIIDRVNNYSFASRNVDKEDELDSLSEKLKIEHVKKKRLFDLYISGSYEVSELDAMMADIDAQINYYEAQIEANEELKKNKQIQENLADLATVDFDSLEFREKQLYLKSLINKIYIDGEQVTIEWL

SEQ ID NO: 18933 - protein, 559 aa, synthetic construct
MKTKLYSYIRFSSMRQSDGSSYERQIRMAREIAAKYDLELVNDYQDLGVSAFKGANSKTGALSRFLDAIGRSVPVGSWLFIENLDRLSRADIVSAQELFLSIIRRGITIVTGMDNKIYSLDTVTANPMDLMFSILLFIRGNEESQTKRNRTNSSALIKIKAHQENPQNPAVAIEEIGKNMWWTDTTSGYVLPHPVYFPVVQEIVELRKNGRSTAEILDHLNETYAPPPAVSNKKHSKWSRAMVERLFHTRALIGIKEVSVDGVNYELKDYYPRVIDDATFYHLKKNIGARAWNFGDKEEVKPIPLLSGIGLLKCDHCGCAMVKVKGTNKRSDQYRYTCDATRSRRLDCEHPNWSFRGDQLEKAVLQLLADKIWIAEDKANPVPALKVQVDEISRKIDNLIALSAMTGATKELADQITTLNSERETLYNQIKMAEEEMYSVDSQGWEKLAEFDLEDVYNEERLKVRFKIKQALKRIGCSRIDRNKNLFVLEYIDGKTQRVVIENSRGTRKGQIFVDLKTINDRQILESNGLVLHPCLDMLTDKNWKPEEEIPGPLQEFGI

SEQ ID NO: 18934 - protein, 515 aa, synthetic construct
MYHPQELDVFIYLRKSRKDLEEEKKAIEHGQHYDTLERHRTQLLELAHKEHHNIIDIFEEVVSGEYISERPMMQKLLREVESGIADAVLVMDLDRLGRGDMVDQGTIYRVFCYSETFIITPTEIINPNDENQELTFSIKSLIAREELKTIVKRMQRGRRASAKEGKSISRVPAYGYLRDNNLKLYPDPEKSWVIPIIFKLMVNGMGRQAIAQELDRLGISPPKGEYWNPSTISSITKNEVYLGHIIWGKIRYTKQNGKYIRKKVPKERWQRHDNAHPPLVSEELFQKANMAHSKRWRPPTIKTKKLSNPLAGILLCELCGHSMLYQPRKDRPNPQVRCVQPSCKGIQKGAALALVEQRILDGLQQIIESFEIQKNMVEKKQSKNNIQLQQKAVERKEQQVNDLQKQKNKLHDLLEKGVYDIETFLERQKSIVLRLKTTQEEIEQLEQEIKYIAEKEKHMHEFVPKIRNVLEAYYVTEDIDKKNHLLKSVLEKATYLRKTTWNRRDEFVIELYTKI

SEQ ID NO: 18935 - protein, 562 aa, synthetic construct
MKAAIYSRKSKFTEEGESIENQINMCIDYAKNLLGITEYEIYEDEGFSGSNTNRPQFKQLIKDIKNKKFSHLICYRLDRISRNVADFTSTLEILNEYNCSFISIKEQFDTSSAIGRAMMNVSATFAQLERETIAERIKDNLRELSKTGRWLGGPAPLGYKSIEVENNDSTGKNRKKHILKVDEENSYIVYKVFELFLKYKSFQTVSITLENEGIYSRTGKVFSRQLVKQMLNNPVYVIADQKILNYFKECGCEIYKQDYINGKYGIMPYNRRDKKGKMVPVKDWIISIGEHDGLISSDTWLECQNISKEIKTIVSNRQCTSYHALLSGLVICKHCGSSMAPRKQKNIAADGTETLYRYYSCNLKNKAGNRCDNTALNAYDAEDYVVKKIKSTTQEDILGLYLSSKERSDIKINNKKMIEKLTAQINANKKSISNIVRNIAKFDDYIPDVINSYENEIEKISNENKLLQDKIINLQNENENIIDLQKDISQIVTLYEDFNRLYDDADDFEEKKRLIRSVVKFVVWDSDTEVLDVIPIGSSLKRSDFGNFAFRSTEQKKWPMLR

SEQ ID NO: 18936 - protein, 452 aa, synthetic construct
MKAAIYIRVSTQEQIENYSIQAQTEKLTALCRSKDWDVYDIFIDGGYSGSNMNRPALNEMLSKLHEIDAVVVYRLDRLSRSQRDTITLIEEYFLKNNVEFVSLSETLDTSSPFGRAMIGILSVFAQLERETIRDRMVMGKIKRIEAGLPLTTAKGRTFGYDVVDTKLYINEEEAKQLQMIYDIFEEEKSITFLQKRLKKLGFKVKSYSSYNNWLTNDLYCGYVSYKDKVHTKGIHEPIISEEQFYRVQEIFSRMGKNPNMNKESASLLNNLVVCSKCGLSFVHRRKDTVSRGKKYHYRYYSCKTYKHTHELEKCGNKIWRADKLEELIIDRVNNYSFASRNIDKEDELDSLNEKLKIEHTKKKRLFDLYISGSYEVSELDAMMSDIDAQINYYEAQIEANEELKKNKKIQENLADLATVDFNSLEFREKQLYLKSLINKIYIDDEQVTIEWL

SEQ ID NO: 18937 - protein, 597 aa, synthetic construct
MKKEVKVIKGDTTLKRTASGCVERSIKRVAAYCRVSTDTEDQINSYNSQVEHYTEFIQKNNEWTLAGIYADEAITGTQVDRRIDFQRLINDCMNGDIDMIITKSISRFARNTLDTLKYVRKLKEFNVAVFFEEENINTLTMDGELLLTILSSVAQQEVENISANVKKGLRMKMERGEMVGFQGCLGYDYDPETKSISINEKEAEIVRYIFRRYIEGVGGMVISRELEEQGYLSPRGNKRWTETTVLGIIKNEKYKGDLMMGKTYTVDPISKRRLDNFGEQDKFYIENHHEPIISEEDFEKAQGIRLRRSKNRNTVANNGGKREKYSRKYAFSSMLECGFCGYNLSRRNWHSSSEYTKVIWQCVNATKNGKKYCPHSKGIEEEAIEKAFMESYRQVCHNNVEITNEFLKTVEEELKDNSLSKDLKKISNQLDKILKKEKDLVELRLNESISMDIYQDKYNEIAISKEKLLAEKRTLEVTLTDEKALKKRLEGFKKLLESNKYLEEFDRAVFESIVDKIIIGGTNDEGEIDPAMITIIYKTGKKDSQDGRLFKSRRKNAKEVNEKADSKLYPQSSDEVNNLYSYPIDNTCGDGSVIVQT

SEQ ID NO: 18938 - protein, 528 aa, synthetic construct
MRTVIYARFSSDNQNPRSTADQIELCRKRAADEGWTVIGAFEDAAISGAAGIGADQRPGLNAMMRMVEAGGVDQVLAESTDRISRHVADAHILRERIEFAGARLFTLFDGTVTPMIGLIKGFTDAQFRTDLAKRVRRGQLGTLKQGRIPGSIAYGYRQANRLDDRGQVVRGLREIDSDKADIVRRIFREYAAGRSPNAIAAGLNADGIPGSRGGIWHETAISGDTRHKRGILRNETYVGVVTYGRSRTVVNPQTRQRLMRPNGDDVVERQEIAHLRIIDDDLWQQVQARLASNQGVRPERLRRPKHILSGLGVCEVCGARWVLRSSKFWGCSNYRYGKACTNNRLVGTHIFERMVLADLKEGMLSPDVVSAYVREYHRDFARQSADMGRDRAKLERKLEEAERRMKRMLQAFTDGGSEFEEIRDMLTSARADKEALQRQLASMDAVPNVLALHPHVEEVYRRQVEELEAALADPEAQLEAIPRLRSIIASIIVSPRLDRERGVVVQVIRQMDEILSIATGGQQFSQLR

SEQ ID NO: 18939 - protein, 503 aa, synthetic construct
MNNRIDAIYARQSVDKKDSISIESQIEFCKYELKGGSCKEYTDKGYSGKNTDRPMFQELVRDIKRGLIAKVIVYKLDRISRSILDFANMMELFQQYNVEFVSSTEKFDTSTPMGRAMLNICIVFAQLERETIQKRVTDAYYSRSQRGFKMGGKAPYGFHTEPIRMDGINTKRLVVNPEEAANVRLMFEMYAEPTTSYGDITRYFAEQGISIYKDGLSRPALGHILRNPVYVQADLDVYEFFKSQGTVIVNDASDFTGMNGCYLYQGRDVKETKYQHLKDQMLVLAPHEGIVPADVWLACRKKLMGNTKIQTARKATHTWLAGKIKCGNCGKALMSVTNPSKKEYLRCTKRLDRKSCPGCGKIVTLELEAVIYQQMVKKLDSYKTLTGRKKAAKANPKITALQVELAHVDGEIEKLLDSLTGANNVLLSYVNVKIAELDGRKQELLARIAELTVEAISPEQVSQISGYLDTWDNVSFDDKRRVVDLMITTIAATSDSLNITWKI

SEQ ID NO: 18940 - protein, 521 aa, synthetic construct
MKSKKAVVYARFSSDNQRDESIDAQLRAINEYADKNNIKIVNQFIDRAKSATSDKRPEFQNMIKFCEADTTVISMVIVHKLDRFSRDKYDSAMYKQKLKVKGIRVVSVLENLDNSPESLILESVIEGMAQYYSANLAREVAKGQKENALKALHNGGDAPLGYDVAHDKTYTVNEEEAQAVKIIFDRYIKGYSYSKIIDELNDLGYKTKRGNKFGKNSLHGILNNEKYTGVYVFNKTQRKGVDGKRNGHKRKSEDEIIKVEGGMPVIIDKEVFEQAQEMIQKRKKTPGAHKATTTYLLTGLIKCGECGHAFQGNKRKDSYGNEYVSYRCGCRKQKRDCNNREIKRDYLEEFILQELEKNILNDEAIPALSKALNEKLNYKNESNAELLKNLDQKLEKVNKEISNILNAIMNGIVSSMLKDKLDELEQVKLNLDLKMNELKIENKVVDGVGVTEEQIRSMFSRFKEFVLERNIPECKKFIGDYIKEVIVYKDHVEVVFNVVFSFVDDEIAHNLHITVSRVKVK

SEQ ID NO: 18941 - protein, 637 aa, synthetic construct
MKKAALYVRVSTLHQIDKDSLPFQRQELENYAKYALNIEEVEIFEDAGYSAKNTDRPKYQEMMKRIRSGEFTHLLVWKIDRISRNLKDFSEMYEELKDCKVTFVSKNEQFDTSTAMGEAMLKIILVFAELERKLTAERVFSIMLSRAEKGLWNGATVPFGYVWSEEEKFPVIDPDESKIIQYIFNSYESLRSTLKVAYRLHEEKIATKRNGQWTAKTVRDILRNPFYIGTYRYNMRESGGSRRLKNKEEWVVVDNNHPGIIEQEQFDRVNKLLSDNYRGLTDVQRADIHKHIFSKMLYCGKCNSLLTAGLDAARKDGYRPSRYTCVTSGGAKRCSNYVSDIIIGPFIFNYVSNLIRLQERITPKHSLRDMERALLRGNSFIDVVGVDNESLKETHFALTGNMSGQEYSLNTKDEIEVPNIEIERLQKEKAKFVRALKRLEDLYYFGEEEDAISQKEYIFKKRDLQERLEEIDDEINLLKQKNEDKTSDVFIDYAQHFLITKEMQQARQVDYRELSEIVGREALSDFMQTIIDNIVVIDKRVQSITFKNGITHTFAYRSLLQSKSSAPTKKQYKNYEGPVLEYLKENGPASRSDLQKATNITRDGIFTLLSELIEREIIIKTGQSTATRYHYNEKQNN

SEQ ID NO: 18942 - protein, 558 aa, synthetic construct
MTKLYSYIRFSSMRQSDGSSYERQIRMAKEIADRYNLELVNDYQDLGVSAFKGANSKTGALSRFLDEIGRSIPVGSWLFIENLDRLSRQDIISAQELFLSIIRRGITIVTGMDNKIYSIETVTANPMDLMFSILLFIRGNEESQTKRNRTNSSALLKIKAHQQNPQSPAVAIEEIGKNMWWTDTTSGRVLPHPVYFPVLQKIVQLRQEGHSAGVILDYLNEHHEPPAPTSNKKHGKWSRAMVSRLFHTKALIGVKTVNVDGVEYELRDYYPRVLSDSEFYFLRKNIIKKAWDYSHDKEKVIPLLSGIGVLRCVHCGATMVKQTAANGKREQYRYCCDGRKSGRTDCPYPNWGFRAVTLEGAVLQLLADKIWIAEDKTNPIPEIQVKIDEISRKIDNLINLSAMTGATKELANQITDLNSQREALHEEIRLFEREMYSVDSQGWDKLAQFDLSDVQNEERLKVRMKIKGALHEIECSRIDSKKNLFVLVYLDGLRQRLVIENNRGLKKGQIFVDLKTINDRQILESAGMVLHPCIEMIIDADWKAPEEIPGLLSEEFGI

SEQ ID NO: 18943 - protein, 575 aa, synthetic construct
MRGVIYSRVSTIDQDYSKQTNELKDFAKKNNIDIVHIFEEKESGFNNDRPEFKKVQQLTKDDVDILLVWELSRLSRRSIYIQQQVKDFADKGICIYTKKENLYTLNEDGTENKSAMLLIGFTSIIAEQEVATLKERTISSKRNRIIKEGYSYTYNAPYGYIYDKETKKLSINPIEAEVVKRIFELSANGYSAYRIPVLLNADGIPTKTGKKWTLPTIATILTNTVYKGEAHYKLKGEKPKEGKRYSRTTEYATVETPAIVTSELFDLSRKMMKERLSRSKSSGVKYNPLLRGLIVCPYCNVKYIFNRRDNLYSCHERYEKATNKTIQCFSKSISINKIDEIIWNLVKILFSKELAAGKTDEQIEPINRELESYRLQVVNLEHKQNELTQKANIIANAAIDIKIQFPNLPDLYLNKLKEVESINKEAGKYLNEIKHLEKLMESCRNKIQAINTLSDESIVVESIIDETEKYDLVHKVIDNIIIYGEGHYTLVVVTFQTGQVAYIGYYSFKRYKYYTIFYPSQSVWFDTEKRLGYITTMKDPKSLELSLETVTKEYSITDFINMFDTPENRHYYENH

SEQ ID NO: 18944 - protein, 587 aa, synthetic construct
MNHKKAIAYIRVSTTHQDVERQKIKFKEYCKNNNLQANEEIIDFGISGAKSDRPGYLRLQALTGKDADILVVSELSRLSRQEEILETINIIQNIVYNGLSLIFLDAPSKVYEAHSTLDITELIILLVGAFRAAQDRKEIKRKNQEGKQALLSQNPYAVVDAKIPYGYNAIYNPNGSRPKKILIENEEEVANVKKIFQLALEGYSLGKIAKYFNNRNILFRGHFVTRQLLSVLVRNILYKGIRRRIHSFDRKDNPNIIENKITPIISESDFERVNQMLKDNHKFCSTGNNYFNTLRGIIKCRCGRGMMVKDKGYASGIKKMVYRCNDVSAKDNPIHCQYKDEISYQFTNEVIFNVFKYIHNTDEIFIFMAKTEQKIYEIDEEIKGIERKIENKNIEIESLNKDNKRLIERYIHAKSQSIANAIQDEQLTIENKIHKLEDEISHCNKEKVKLITNKESLINYIDTEELSSLGNEERAELFKKHLEKVIYLPVTLMQGFYIITFKSKMQRIVAIRKTAKSPIAAILPDGYTVDMNTKLITEYYQSIQTGGCSYPISSSFKQLTIQEYFKKLPQIGNFGILEIDYSYRKGK

SEQ ID NO: 18945 - protein, 522 aa, synthetic construct
MTNRNVTVIPARKRIGNSAKAEEMPKLRVAAYCRVSTDSEEQATSYEAQIEHYTNYIKSNPEWELAGIFADEGITGTNTKKREEFNRMIEECMQGKIDMIITKSISRFARNTLDCLKYIRQLKDKNIPVYFEKENINTLDTKGEILLTIMASLAQQESQSLSQNVKLGIQYRYQQGKIHINHNRFLGYTKDKDGNLVIVPEEAEIVKRIYREYLEGSSMLQIARGLEADGILTGAGNPRWHTSTINKILRNEKYIGDALLQKTYTVDFLSKKRVPNNGIVPQYYVENSHEPIIPREIFMQVQEQLVKRRCVHISKNGKKRNYSNNHPLSQMVFCGNCHEIFRRVHWNNRGKKSIVWRCVSRLENTGLFCTASTILEDTLKEKIVEAINVAVSGKNSFLAILKKNIETVLSEDLDESTANIDKRLEELQTELIQKANSKEVYNNIVNEIYRLRDLRQETLSRNALRQDKRDRIAEMTDFLDMQTGDITEFDDKLVRKLVEKAIVYDDRIMIEFKSGLEIEVNL

SEQ ID NO: 18946 - protein, 522 aa, synthetic construct
MRKVTRIDGNNALQAFKPKVRVAAYCRVSTDSDEQMASLEAQKDHYESYIKTNPDWEFAGIYYDEGISGTKKENRTGLLRLLADCENKKIDFIITKSVSRFARNTTDCIEMVRKLTDLGVFIYFEKENINTQRMEGELVLTILSSLAENESLSIAENSKWSIRRRFQNGTYKISYPPYGYDYVDGKLFINKEQAEIVKRIFSEALDGKGTQIIADGLNSDKIPTKRGSHWTATTIRGILSNEKYTGDVLLQKTYTDENFKRHYNHGEKDQYMIKDHHEAIISHEEFEAAQEILKQRGKEKGVIKGSSKYQKRYPFSGKIKCAECGSNFKRRIHGSGDRKYIAWCCTKHIKDASSCSMKFVREDAIHQAFVVMINKLIFGHKFILRPLLQSLKKTNYSDNITKIQEMETKIKENTERVQVIMGLMAKGYLEPALFNTQKNELLKEAAILKEQKEAIKRAIDGSMTALVEVEKLLKFATKAEKQIDAFDSRIFEDFIEEIIVFSQEEIDFKMKCGLNLRERLVK

SEQ ID NO: 18947 - protein, 522 aa, synthetic construct
MTTRNVTVIPARKRIGNSAKAEELPKLRVAAYCRVSTDSEEQATSYEAQIEHYTNYIKSNPEWELAGIFADEGITGTNTKKREEFNRMIEECMQGKIDMIITKSISRFARNTLDCLKYIRQLKEKNIPVYFEKENINTLDSKGEILLTIMASLAQQESQSLSQNVKLGIQYRYQQGKIHINHNRFLGYTKDKDGNLVIVPEEAEIVKRIYREYLEGSSMLQIARGLEADGILTGAGNPRWHTSTINKILRNEKYIGDALLQKTYTVDFLSKKRVPNNGIVPQYYVENSHEPIIPREIFMQVQEQLVKRRCVHISKNGKKRNYSNNHPLSQMVFCGKCHEVFRRVHWNNRGKKSIVWRCVSRLENTGLFCTASTILEDTLKEKIVEAINIAVSGKNSFLAILKKNIETVLNEDLDESTADIDKRLEELQAELIQLANSKEAYDNIVNEIYRLRDLRQETLSRNALRQDKRDRIAEMTDFLNMQTGGITEFDDKLVRKLIEKATVYNDRLVVEFKSGLEIEVNL

SEQ ID NO: 18948 - protein, 522 aa, synthetic construct
MRKVTRIDGNNALQAFKPKVRVAAYCRVSTDSDEQMASLEAQKDHYESYIKANPDWEFAGIYYDEGISGTKKENRTGLLRLLADCENKKIDFIITKSVSRFARNTTDCIEMVRKLTDLGVFIYFEKENINTQRMDGELVLTILSSLAENESLSIAENSKWSIRRRFQNGTYKISYPPYGYDYVDGKLFINKEQAEIVKRIFSEALAGKGTQKIADGLNSDKIPTKRGSHWTATTIRGILNNEKYTGDVLLQKTYTDENFKRHYNHGEKDQYMIKDHHEAIISHEEFEAVKEILKQRGKEKGVIKGSSKYQNRYPFSGKIKCAECGSSLKRRIHGSGDRKYIAWCCTKHIKDASSCSMKFVREDAIHQAFVVMINKLIFGHKFILRPLLQSLKKTNYSDNITKIQEMETKIKENTERVQVIMGLMAKGYLDPALFNTQKNELLKEAAILKEQKEAIKRAIDGSQTILVEVEKLLKFATKAEKQIDAFDSDIFENFIEEIIVFSQEEIGFKMKCGLNLRERLVK

SEQ ID NO: 18949 - protein, 694 aa, synthetic construct
MLILKGDQKLNTEQIMSLIGKVNALIYARVSTTDQAKKGFSIESQLDRCKERAMSKFGYKDSELIALVEPGGMGDDPNRPALNHALYLLQKGLGKKFLVLHPDRLTRDNTLQGVISRRIWGMGVDIEFIEFEVNPNDPESMLMYNIQGSIAQYNKAKIHANSKRGRLAKAKKGEFPSFKRLYGYKFNTVTDLPEYNEEEKEILLEMKDMLLNKKLSSNEIAKELSRRGVAAPNGKTWFQSTVSRMLQNEDYTGDFYYGKSKVVQVNGKKKQIATPKDEWILIKIPPMWDHETRDQIIKQLKANFKGRSRSTRDYLLKGKAVCGRCGGSCGSGITSKTKSGIYKYYSCCNKSTKAYQNGKELFKCKGKNWRVDIVDEVFWKWFKKLIKNPKKFLDQFLEEASNEKSIEDIKIKINRLQKQHEEIDSEIANYVILFGKGKIKESMFDELTRPLELNKEHVENELEILQSQLNANKKVEDRNEQTIKYMNSFAEMVDKDLSMSEKRNFLDFFIEKVTLYDDDHMEVVWKNKTLNEDRSQTVDFTEGEPEEASDNQHKRLNRIQEQGFNFYVTSKIGIPKPESNYTYQWEQYSGKLEQIKRLHFDELKTVGEISKELNIPDWSILNLFKAKKVDKLSYSELSKRRRAKDFDLLYDLHFNKKMSLKEIGRKYDYSPPYIRQVFKDQGIKHLAFKNQNKN

SEQ ID NO: 18950 - protein, 688 aa, synthetic construct
MTAGNLLPMALLRRKAVVYVRQSTPQQVNANLESQRRQYELVDVARRWGFRDVEVIDEDLGRSASGAVERPGFERLVEDLCTGHVGAVLCLEASRLSRNGPDWHRLLELCGQVDARVIDIDGIYDPAKPNDRLLLGMKGNISEFELSVIRARMYEAARQKAQRGELRISVPIGYIWHRDYGLSFDPDIRVQEAIRHIFARFHEIGSARQVLIALTAEGMHFPRPSDGKMMISFDWVPIRYRNVISVLKNPFYAGVYVYGKTEKRTEIVAGRIRKSYGHRKSYDEWAVMLREHHDGYVSWDEFEQNQKVLATNAYGKAGGVKSGRGGKALLAGMLTCGHCGRRLCVVYVGRRIGYHVYRCDRSNLMLARPRCMTTNGIRTDAAISEELLRAVAPMAIEAALEAERMHLEGEAQRRQMVELDLQQARYEASLAERRYAACDPDNRLIAAQLEKSWEATLRRVEACEARLNDRHADQGDMPDFAGMARDLKAAWADPDVDMRFRQRLLRALVKDIVATTDKHAQEVELTIHWQGGQHSQVRIRKPKSGEHTKSTPEEAMAIIRSMATRWSDADVAATLNRMGMRTGQGKSWTGHRVSSLRRVHKIEGYKSAGTTGGEWLTMLEAATKLGVTSHKIRRAVEAGLLPTEQIMPGAPHQIRAVDLEKPEIRAAISRKGPCRAHDQNQESLFSAI

SEQ ID NO: 18951 - protein, 414 aa, synthetic construct
MWGMAAKARVYSYLRFSDPKQAAGGSIDRQIEYAARWAANHEMELDATLSLRDEGLSAYHQRHVKQGALGVFLRAIEDGQVPAGSVLVVEGLDRLSRAEPLQAQTQLAQIVNAGITVVTASDGREYNRDRLKAQPMDLVYSLLVMIRAHEESDTKSKRVKAAIRRQCQGWIAGTWRAPIRVGKDPHWVRAAEGGGFELIPERAVAVRLVVEMFKQGHGAVRTVRELTERGLKISDTGRTAASHIYKLLANRMLIGEKSVEIDGETYQLERYYPSLLTAAEFADLRYLAEQRGRRKGKGEIPGVVTGLGITYCGYCGAAIVAQNLMGRKRQSDGRPHAGHRRLHCVTYSTGAGCKVSGSCSVVPVERALMLYCSDQINLSRLLEGNSSTTSTSAQLAHSRQRAADLEAQIQRFTV

SEQ ID NO: 18952 - protein, 551 aa, synthetic construct
MVREDSAALSALGLAAEDLVALGLDRPASGVPEKLVDAYIRRSKKREDLATLRAHLRDVARWARNEELEIRHVWFEQLSASKAHVRRDEFEKAKEAVLAGRSRTLAVWKTDRLDRRGMGVVGSLLDELDRRRSRLVSVSEGLDSSRGGRIVFAFLSERARDEAKDIALRVKIGLDAHRVLGRAPGGRPPFGVTHLGDGQVGPDPGEYPTARPIAEALLRGHAGTTIAHRITAEGARTRNGRHWSANAISRMANSPLWAGLVPFRERKTDEFGNPIDKWGWKAEPLIGPDGRPVSCGTGVVTVTEWYAIRGLLASRTVRGLKGCHGAKQAGKLLTGILRCPLCRVGMVSGGLTYRCRTRMEGGPAACPGIRTKADRADQAVSGAWIRRVSALEPDDPVLHEIARRWLRYQDPETDERRRHVVAALDETERRARDLDDAYYVHGRMNPKRYAALSAALAEQTQALNAELAELQHHSDLTPLLDGVLLSEAWDEATLQDRRMLLRCALDHVTLLPSTGQGDRTPILHRLDFHWIEAAPGRTLLIPHSPGMALAS

SEQ ID NO: 18953 - protein, 528 aa, synthetic construct
MRAVIYARYSSDKQNVASIDDQVRICQNLAEKNGYVVVDVLTDAALSGSDLNRPAVQTLLDNCHKYDVVICEAIDRLSRDQADMPTLFKHFEYQNVKIVSVNEGLINEMHIGLKGTMNAMFLKELANKTRRGLAGRVLKGKSGGGNSYGYDVINTINEDGTITKGDRAINKEQAKIVERIFYEYTELNYSAKTIAKKLNKDGIKSPSGGEWSASTISGNRRRGTGLINNELYVGKLVWNKLKYTRNPITKKRDSRLNSENEWVIAQVPDLRIIDNEVWQKTKNKLRTLSLLNGAEPKKRATYLLSDLIKCNSCGGGFSMINSSRYGCSTSRNKGTCDCRISIKRDQLEQTVLDFFKEELITDEFIDLFVKEYNSELESLNKNQKKHKTDRLHRKKELKKQQENLILSIKEGLPFNLAKDELSKIEAELNELEIITKEVQKNKIDNDGLASKYKNMIKSLSARELKQDALVTFRGLIEKIVLREINGVLGVDLYVDYRGLVPKKNRPVVSNRSDRVVAGAGFEPTTFGL

SEQ ID NO: 18954 - protein, 523 aa, synthetic construct
MAVSRNVTVIPAIKRIGNNKSSESKPKIRVAAYCRVSTDSEEQASSYDIQIEHYTNYIKKNKEWELAGIFADDGITGTNTKKREEFNRMIEECMAGKIDMIITKSISRFARNTLDCLKYIRQLKDKNIAVFFEKENINTMDSKGEIMLTIMASLAQQESQSLSQNVKLGIQYRYQQGEIQVNHKRFLGYTKDENKQLVIDPKGAEVVKRIYREYLEGASLLQIARGLEADGILTAAGKAKWRPETLKKILQNEKYIGDALLQKTYTVDFLSKKRVKNNGIVPQYYVENSHEPIIPRELFMQVQEEMVRRANLRGGKSGKKRVYSSKYALSSIVYCGHCGDIYRRVHWNNRGYKSIVWRCVSRLEERGSECTAPTINEETLQTAVVKAINDLLAKKESFLSTLQINIATILNEENDTATDDIDGKLEELQQQLLIQAKSKNDYEDVADEIYRLRELKQNALVENAEREGKRQRIAEMNDFLNEQSCGLEEYDEQLVRRLIEKVTIYEDKLTVEFKSGIEIDVEI

SEQ ID NO: 18955 - protein, 521 aa, synthetic construct
MKKITKIEGNLANSFIKPKTRVVAYCRVSTDSNEQLVSLQAQKAHYETYIKANPEWEYAGLYYDEGISGTKKENRSDLLRMLSECETGRIDLIITKSISRFARNTTDCLEMVRKLIHLGVHIYFEKENINTGSMESELMLSILSGLAESESISISENIKWAIQRRFQNGTYKISYPPYGYQNIDGQMIVNPKQAEVVKYIFAEVLSGKGTQKVANDLNQKGIPSKKGGRWTATTIRGILTNEKYTGNVILQKTYTDRHFNRHTNYGEKNMYLVENHHEAIISHEDFEAVDAILNQRAKEKGIEKRNSKYLNRYSFSSKIICSECGSTFKRRVHSTGTKKYIAWCCSKHIRQINECSMRFIRDEDIKTAFVTMMNKLIFGQKFILRPLLNGLRNQNNAASFRRIEELETKIESNMEQSQVLTGLMAKGYLEPALFNKEKYSLEAERERLLAEKDQLTRSVNGNFSKVDEVERLLKFASKSKMLTSYEDELFENYVEKIMVFSRKEVGFELKCGITLKERLVN

SEQ ID NO: 18956 - protein, 559 aa, synthetic construct
MKKKVFCYVRFSSKKQEHGDSIERQQRLINDYLEKNNAEVVEQFNDLGVSAFRGKNVKAGQLSRFLDRVKKGEIGTGDTLIVESLDRISRQKELDTISILASILNAGVVIFTLADQRVYNAQDEDHANLIFQINFIISRAHDESLTKQRRSISAWTRKHEEARSGKAVMTRKLPYWLRTIEDNGTTKIVVIEERAKEVRRVFELASYKLGAQAIATKINSEGAEKRWTLIAIRHLLSSKSVYGSFEAFKTKSLSGTLEKNQTYEEIEGYFPPVIEKSEFYKVQASLEKNKEIYATRGRTPKGFRNVFKGLIKCLDCDSYLHQSFMKRKGKEYMYLICHKSLVNACPSGKKVIIPYRHVLEPFLLFFKNYGVEKLLSSSNSQELKNKLSAVNQERISKNESLLRISSDIEKNNGETPKTLMSLMTKIESQLSKLEEEYNVLLGQLENLEASDVIKNEITRTELHELLDSEEGRLKFNSLLSIQKIEVLISRNFGEEYSSMFIFFHEKGFSENIKFNRKEAILPFTGRYNFYTRTYSDGFVGEPTPIENVDHENFKIDWSL

SEQ ID NO: 18957 - protein, 581 aa, synthetic construct
MSSKQKLYSYVRWSSEKQSSGTSFERQTSRAKSFALEHDLEYVEIKDAGISAFKGQNTTQGKLGVFITQVEKGVIPKDSWLYVENLDRLTREDATTANELFLRLLRMGLTIVTGMDNKVFTREGVNRNPTDLMISILMFMRAHEESKTKSDRVNSHVLALLAREKQGLPVNIKAVGRHPFWIDDSGPSNEKVKKHPDYWQPAQEAVKLFLEGYGAFYVTDYLNKKYAPPPAFKNKTRKAGGWSQQALNKMRSNEALVGVKLFNLAGKNYRLENYYPPLCTPGEFAQLQDIKANNNRYSGKVSTAISLLGGMQIIRCGHCNGTMTAFLQRGQLRYICEYGRAGGNCNAWSVKASIVERCLMPVLITGFLMGAYKTHSDLTSLDEESDELKEKLNKIQSQQDHVIDAITEFGRTTKFDAKYKELEKEEQVISGKLQQLAQLKALYATTKDFSENIAGFVAEQCHWLIISDVHNSRREQLRENVRRVIKSVIVTKKNRCIRIEFQLITGEPFVFTGSKSLDYEVFLPRRIHDIPPDATEDEKSEWKRSDHEYNKNFLKLWYEVVNKGFLSHYPEIDGKDFWPRR

SEQ ID NO: 18958 - protein, 445 aa, synthetic construct
MRIEKLDSQTASPEHRKKRVAAYVRVSTEKEMALNSLENQAEFYTAQIQADPDWEFAGIYEDRGISGTKEMRPAFQQMLADCRTGKIDLILTKAFTRFARNTVVLLSTLRELKALGIDVYFEKDNIHSLSETGEFLITLLAAYAQAESYSASENQKWRIKKAFEEGRTTIGKMIGYRLKDGVLTVVPKEAEIVRQIFEDYLSGMGENAIAKKLIRMGIAPMRNQRPWNRTSIRYILTNEKYCGNMLLQKTYIENYISKKPVRNHGERTQYLVENSHEAIIPKEMFDAAQTERRKRREKMKADGRQWSRRYPFSGIIECGECGMHYRRRTVRSGTPYEQSVWICRTFDTYGKEFCHSRQIPEDILTAKTAEVLGSDDLENAVPAMLSAIRVAEASHLVYVFRDGSRQDVFWKHHSRKESWTEEKRQKARELALERNRRRKEGNSDA

SEQ ID NO: 18959 - protein, 475 aa, synthetic construct
MPEKTIRVIQPTASRHNIEDTAAPVKRRVAAYARVSTDEDEQLNSYENQINYYTRYIQSRPEWEFVGLYSDEGISGLNTKKRDGFRQMVEDALNGKIDLILTKSISRFARNTVDTLVTIRQLKDKGVEVYFEKENIYTLDSKGELLITIMSSIAQEESRSISENITWAKRKNMERGKVSMSYGQFLGYEKGEDGKPQIVEKEAAVVRRIYNLYLEGKSVREIARILTAGKVLTPSGKNCNWSVSTIMSILRNEKYKGDALLQKVYTADFLNKKVVKNTNVLPQYYVENSHPAIIDGETFDLVQVELAKRGGCSRGRRAKSVFDRKVICGDCGHFYGQKLWYSDSKERVYVWRCTHKYDTEPNCQTPVVRESDLQAAFLVTFNHLLRGREGYVAELEREVETAQPARAGEIRRYLKSLKTQPETVRTFSESAFIALVDKITVRADGHMTVRYKDGLEVSVSEGREWRGSDDSRKTF

SEQ ID NO: 18960 - protein, 452 aa, synthetic construct
MKAAIYIRVSTQEQIENYSIQAQTEKLTALCRSKDWDVYDIFIDGGYSGSNMNRPALNEMLSKLHEIDAVVVYRLDRLSRSQRDTITLIEEYFLKNNVEFVSLSETLDTSSPFGRAMIGILSVFAQLERETIRDRMVMGKIKRVESGLPLTTAKGRTYGYDVVDTKLYINEEEAQHLQLIYDIFEEEKSITFLQKRLKKLGFKVKSYSSYNKWLMNDLYIGYVSYSDKVHAKGIHEPIISEDQFYRVQEIFSRMGKNPNMNKESSSLLNNLIVCEKCGLGYVHRAKDTVSRGKKYHYRYYSCKTYKHTHELEKCGNKIWRADKLEEIIISRVKNYSFATRNSDKEDELDSITEKLKTEHSKKKRLFDLYINGSYEVAELDKMMADIDAQINYYDSQIEANKELKRNKKVQESLAELATVDFDSLEFREKQIYLKSIINKIYIDGEQVTIEWI

SEQ ID NO: 18961 - protein, 565 aa, synthetic construct
MTASTVPLRAALYLRVSTARQAEHDVSIPDQKRQGEAYCEARGLRLVETFIEPGASATNDRRPEFQRMIEAGTSKPVPFDVVVVHSFSRFFRDHFELEFYVRKLAKNGVKLVSITQEMGDDPMHVMMRQIMALFDEYQSKENAKHVMRALKENARQGFWNGSLPPIGYRTVAAEQRGAKTKKKLEIDPLHVDTVRLIYRLALEGDGTTGQMGVKNIVSYLNKRRIFTRDGGRWGIGQVHRILTRRTYMGEHEFNKRSKTKELKPVSEIVTVPVPPIIDKEIFEAVQKLLKARNPKVMPARVISGPTMLTGLIHCAKCGGAMTIRTGKGGRYRYYACSMKARQGPTACTGMAVPMEKLDDLVVNHLEKQLLQPERLETVLAAALDRREEHAERRREHIAELNKRAAESELRLKRLYDAIEAGVADLDDPALKDRIDGLKAIRDQAKADAERAQGMLQNTGQKAVTPQMLRKFAATARDRIRLEGGGYRRDHLRALAQRVEVAEGEVRIMGSKSRLLQTLVAESGVNSVPTQGLKWRMGWDSNPRYGLPHAGFQDRCLKPLGHPSGL

SEQ ID NO: 18962 - protein, 514 aa, synthetic construct
MSTEYAIYLRKSRADLEAEAHGEGDTLARHEHILMELAKSRALPIGAIYREIVSGERIANRPVMQQLLSEVEDGRWKGVLVTETSRLARGDTIDQGIVAQAFKFSGTLIVTPSKTYDPTQEADEEWMEFGLFMSRQEYRMIRRRQLAGTRASKKEGHYVPGRPPYGYERYKLDGRGWSLRPVEPQAGVIRTIYDMYLSGKGFSEIANELNAMKIRTPLDKKWVPATTRAILQNPHYAGFIPSAMKVNTKIVQKGKLITKRPVNKNCELYEGIHEAIIPRDVWYSVQQRMKDTVTPRVPRKYQQMNPLAGLVYCDQCGKLMSRHPYRREDKVRFGCENPSCSTVSSLFEDVESLVLQSLREFLHKIELSSPALLDTKSEEIALQNIEKQLTDINHRLQRTYELLEDGVYSKETFLQRQSAISQDQTALLNTKHEIERKLHNKQTDIEAQKNSAPLIRHVLDVYPTLEDPKEQNLLLKQVIRRIDYHKTVRVYGKAKSDLHLTIHPKIAIPQTSNI

SEQ ID NO: 18963 - protein, 530 aa, synthetic construct
MYEDLSYTYGSGAYAIYLRKSRKDLDAEAMGEGETLSRHLDILKALAKRMELNVVKIYAEVVSGESIDARPQMQELLRDVETGIYDGVLVVEVERLARGDTSDQGRVAKTFKFSNTLIITPSKTYDPNNEFDEEYFEFGLFMSRREYKTIRRRLVAGSDASRREGKYTGNVPPYGYARKKLKKEKGWTLEIIPDQAQVVRMIFDWYRNGMQGIPVGYTAISDELNRLSIPSPSSTRWTPNGIQGILRNPVYAGYIKSGYRKEVKKIVDGKLTRSRPLNNDYTLYPGRHESIISQETWDAVHNRMLKRVLPSSSSRVKPQQNPLAGLVCCSQCGRIMQRRPYQSGRTATLICPTKGCSTVASDLSMVEQRLLDALDQWLVSGTLPDPDHLPDNSDRLDLLRQAVSSCSEDLSEADRQLQKQYDLLEKGIYDEVTFFERSAIMKKRKSELTSRLKDLQTELQTETERNEAVKNLLPTLQTIHDTYPKLTSAELKNRLLKEVIDHVEYSKSENGRWGHPDNFSLKIYPRVTPA

SEQ ID NO: 18964 - protein, 478 aa, synthetic construct
MKKVAIYVRVSTQEQAAEGYSIQEQTERLTKYCEAHGWVIVKVYTDPGFSGANRDRPALQMLCSDVKKSMFDTVLVYKLDRLSRSQKDTLYIIEDVFEKNHIAFVSMLENFDTGTPFGRAMIGILSVFAQLERDQIRERSQMGHDARAKEGYFHGGGYAPIGYNYENGLLSINEYEATIVRRAYELFLDGLPVHSIYLTMEKEFPAGTRFGRITYSSVESMLKTILYAGFITWKGNIYPGKHEALIPYETFQEVQAIMKRRQIEEPQRLTAFQHTTILGGIVFCGYCGARYFCKTNTASKKSRIVQKYYTCYSRGKCNKKMIRDPNCQNKSWNSKKLDAVILEEISKLNLSRDFASYENAPDNSDRIASITAALSATDKKLEKLVDLYASDTIPVQILNERVAKLNAEKETLEAELDALQNAPVPDLSTEKANEILDGFQAVLASGDRDMLRNFIRSLIDSIIIRGNDIEIHWKFTVF

SEQ ID NO: 18965 - protein, 502 aa, synthetic construct
MEIQIREGNSRQKQKLKVCAYCRVSTDADEQENSLENQIRHYKEVITSNPDYEYAGVYSDFAISGFKEKRPGLQKMLADARKGKIDLILTKSVSRFARNTSIVLEATRKLKELNVGVFFELQNINTLSGEGELMLTILAAFAQAESESGSVGAKMVYQRKYEAGIPVQYLERSFGFKKDERGVYIADEEEAVWVRKIYDMAAQGYTLAAIKRYLNENNVKTVGGAKWLDSTVLRILENEIYKGDYIMHKYFVNEERKLVRNRGEVDAWYIEDDHEAIVSPELWQKAQDALEAKRDYLAEGSVIEEFTEENYPYMNKIYCARCGHPLYKRIYSNGNRLNWGCSGTKRYGRSFCEGINIPDGVLRGAWHFDENMYIGEKQTDKGKKEFTYLKEASWKRRHKKKKPEPIPENTETEYPYREKIFCGLCGSRLVRHVNTKNHKVIWVCNGRKRKGKDFCDGTRVPDTIIKGWGEIKKDIYIQRKDDKNGKKRYSYTSKKPKGADRA

SEQ ID NO: 18966 - protein, 464 aa, synthetic construct
MARSVTVIPARSQKVRTGHKAVQEKKIRVAAYCRVSTDQEDQLHSFEAQVEYYTKYINEHENYEMAGIYADEGISGTNTKKREQFKKMIADCEGGKIGLVITKSISRFARNTQDCLAYSRKLKNLGIGIIFEKENINTLDSTGELLFTILSSLAQDESRNISENCKWGIRTKFKNGEMHLNTFKFLGYDKDENGKLIINREQAKTVRRIYRDFLWGLNPAQIAKELEEEQVSGCLGQTKWYASTVVGILKQEKHMGDALLQKTYTADFLTKRQVKNNGEVAQVYVKDSHKGIIDKETWNAVQEEFDRREKFMQKHGTDRYSYGSECNPFCEKIFCGECGSLFTRHSWKSRGIIQWQCKNHRKDGKVACTNAYVDNANLEKGFVKAFNRLVNEREKNMERWNAMKAEGTPLEKIRAVQMMEATESGQLQKYVPEAAQLVLEEITIFGVKKYEFAFLEGSRVKVSV

SEQ ID NO: 18967 - protein, 584 aa, synthetic construct
MKNKKIKCDIYTRVSTTMQVDGYSLDAQKEKLKRYAEFQNMEIVNEYSDEGKPGKSVEGRPEFQRMLDNIENGTDEVQFVLVFKLSRFGRNAADVLNSLQRMQDFGVNLICVEDGIDSSKDSGKLMISVLSAVAEIERENILVQTMEGRKQKAREGKWNGGFAQYGYELVNGELQIAEDEAEIIRLIYDKFIHTNMGISAIAAWLNQHGYKKKKRQNNTLDAFAASFIKGVLDNPVYCGKLAYGRRKNEKVSGTRNEYRIVKQENYMLHDGIHEGIVSETDWELAHQKREKTGVKYEKTHSLEHEHILSGILRCPLCGSGMYGNVNRKKKKDGTLYKDYFYYACKHRRLVDGHKCGYRKQWSEEKINNAVEEVIRKLVKNPKFEEAILNKIGSRIDTEEIEKEIERLEKQYRQLTGAKARLGQQMDSLDIMDKFYEKKYQDMETRLYRLYDEIEGVENSIEEVKNRLLNIQQQKISEENVYQFLLYFDKLYDKFTDLEKKEFLNSFVEQVDIYEQEQPDGRFLKHIKFRFPVYFGDREIQELCWDNESTVETVCLLSNRKPDTTVKLSVDMDDYYRIKDGKEPK

SEQ ID NO: 18968 - protein, 540 aa, synthetic construct
MKQPYNTTIYNTALYLRLSRDDELQGESGSIQTQRMMLRQYAAEHGLTVVDEYIDDGWSGTNFERPSFQRMIDDIEDGKINCVVTKDLSRLGRNYILTGQYTEIYFPSKGVRYIAINDNVDTINGESELAPFLNILNEMHARQTSKKVKAAMHTRFANGAHYGAYAPLGYVKDPDKKGHLLIDPETRWIVEKIFDLAVHGRGAASITRILVEEKVPTPGWLNYERYGTFANIYAGAPAEKAYAWTIAQVKSILKEETYIGHSIHNKQSNISFKNKKKVRKPQEEWYRVENTHEAIISEEVFQKVQELIASRRRKRRNGTTQIFAGLIKCADCGWSLAYGENKQNKNPYGYYHCSKNGQGLRQCSMHYIRYDVLYAYVLARLQYWSMLAQKDEDNLLKRLLNASDRERNSAKKKQAAELKKAEKRKAEVDGLFAKMYEDWSAGRITEYNFNMLSEKYQNEQKELEAKIRQLHETMEAAVQTAADAEKWIALMKQYVNPVELTAELLNTLIEKITVHEAVKGEDGSREQEVEIYYRFIGKID

SEQ ID NO: 18969 - protein, 464 aa, synthetic construct
MARSVTVIPARNRQRETGRRAVQEKKIRVAAYCRVSTDQEDQLHSFEAQVDYYTKYINDHENYEMAGIYADEGISGTNTKKREQFKRMIADCEGGKIDLVITKSISRFARNTQDCLAYSRKLKNLGIGIIFEKENINTLDSTGELLFTILSSLAQDESRNISENCKWGIRTKFKNGEMHLNTFKFLGYDKDENGKLVINKEQAKTVRRIYRDFLIGINPAQIAKELTEEKVPGCNGQTKWYPSTIVGILKQEKHMGDALLQKTYTADFLTKRQVKNNGEIAQVYVKDSHKGIIDKETWNAVQEEFERRERFMKDHGTDRYSYGADCMPFCEKVFCGECKSLFTRHSWKSRGIVQWQCKNHRTDGRVTCSNAYVDNSNLEKGFVKAFNKLVADREKFMERWNQMKTDGSPLEKIRAEQMMEATENEPLGRFVPEISQLVLAEVTVLGAKKYEFFFLEGSRIKVSV

SEQ ID NO: 18970 - protein, 509 aa, synthetic construct
MPQPNNGIAYSYVRFSSKRQEQGDSLRRQSEMAEEYALKNNLKLSSKNFQDLGISAFKEGKRPSLVDMLSAIDEGQITSGSTIIIEALDRLSRRGIDATQETVKEILRKDVQVVSLSDGLLLTKDSLNDLNSVIRIAVAADLAHKESERKAERLRQTKGQQREAALAGKPINKILPFWLVRTTAGYAFSDKADVARKIIRLKQSGKGSNMIAKILNNEGIAGIRAAQWNHGSITKMVKHPALYGAYQTGETNKERHFIIGELIENYFPALITKEEWLLLQSDQSKSKRGTRTEDNPYSGLLRCSCGGSLVKVKTTVRDKLYVYHKCLNAKDGRCTQKLSIKGLDDALPKILGRLEFKKSQTPDQSSIEEVKQLEQRINHLNEQLMTLTEPPLSVMQTISRLEIQKKTLTDTITRSQREQQGIDSIKPEMLSTVTGLELNMMLKRVLECITVSPAGTNWRVQIKHISGDTQGFILTDGEVRFVSDTIQLRRQLAEFKDGYREEDNHSDND

SEQ ID NO: 18971 - protein, 547 aa, synthetic construct
MRTAYSYVRLSSKKQIQGYGQERQWQAIQAAALAHGWELSEKTFSDLGVSGWKGANIETGALSQFLQCVEDGYVEKGSVLIVENVDRLSRAGVQRAVSLLMQLLASGISIYTFTDSKLYEPDSHNPLMDLMAWALSAQRAFEESERKSQMILNAKAKAREKARLTGEIITRRCPSWLRVNQDKTAFELIPERVETVRKIFDLYVNGYGTPRIGRLLTEEGRKPLTGRAWYPRSISRILQYRAVLGEYQPTLNGKPEGDAIKNYYPAIIDEDRFNEVQAVLKEGGAGKGRRGKEMRNYFAGLLRCSCGEGMHIVSSCVKGKRYYQLRCLQYRISCFGSSWNFYKLSSFVLFALRRLPILEVMGSQDNNNIKELIAKERELTFLLEDTRRQLDNTINAIGALGLNDQLQSKFRELKTSVTNIEKQLSNVKTELETSQGKLVIQKQDSEMLTGRFLELIDSTKDIDGRIKLNQVLRRYLSKIEMHADKKEEYRYIKIYRKDGDELVSIQCDHSLKGALFESKDGLETFELLPATDAKRNEISNTLLCTPK

SEQ ID NO: 18972 - protein, 480 aa, synthetic construct
MRVGTYRRVSTEMQREDGVSLQTQDERLKAFIQSQGWSLVEDYADEGYSAKNMDRPALKRLIEDIKRQKIDVVLVYRLDRFVRSVSDLHHLLQVMDKHDVKFKSCTEVFDTTSATGRMFITIIATLAQWERETIAERVFDNMLHRSEQGKRNGAPAPYGYTLEDGILTPDENEATWVRYIFQKYKTNGSQNIAKYLNVRGIRTKKGEVWSDYSVRYILKNPIYAGYVRWNLRSAAKGKNTETVIAKYEQENFEPLISKSDWDDIQGLMKERSFMAFRSDNHYPFSSIAKCEECGHSFTGAFKKRKSGGVHRFYKCAGRFRTGTCKVTVIAEEAIEKAFLETMYFSMYDEKEYLAEKEPEIDAQQIQKELVHIQGKKARIKELYVDGDIAKEDYKKKIAELQERENDLLLQLETEDVRASEEEVRMWISSVKANWNTLSYESKKAAVHAIFRSMTIRVIEPPKVGKVAAPPVVEIVNFELR

SEQ ID NO: 18973 - protein, 576 aa, synthetic construct
MATAVTYLRVSTKRQLYTAIDIDPDGNSITTQREVTESKANALEARIDREFIEPGHSAKTLDERPVFRELLAYLHENREIDYVIVYMRSRAFRNHFDAAIVQTQLKTLGVRLVSAKEDFGEGPTAVAMEGMLDIMNGLQNTLQGLDVATKMRNKAKAGGTVSLAKLGYKNVRVDHHGRQINTIALDPERAPLVRKAWELYATGDYAVDRLEATMADLGLTARPTKRSPAGTPVSASKLHRMLSDPYYVGFVVYKGEMYPGRHEPIVSQALFERVQEVLNARSARGQRDRIHQHYLKGMLFCQRCRDAGRTSRMIYTQSKGNGGVYAYFACRGRQDKLCDLPHLRVELVENAVSVHYSTLRLPIDFIQDVRNRLEETVTDSQTSTRELHASLTRRLRQIDVKESRLIDLAADGDMPRDKIRAKLNAFKVERANIEASLARTGEELSIGATVLRDALHLVEDPQTLYASVPNDVRRHLNQTFYERLYVDDLDIIDGHRTPLFTDLHAAKHAYIRRKGARGISANAIAATDPTKEENPNQAGVLQTTGTDSLTLASVFLDTGSSKNVLVGLTGFEPATT

SEQ ID NO: 18974 - protein, 436 aa, synthetic construct
MAAYCRVSTDQDEQLSSYENQVRYYREYINQNPLYELVGIYADEGITGTNTKKRTEFNRLISDCRQGKIDRIIVKSISRFSRNTLDCLKYVRELRELGIGVTFEKENIDSLDAKGEVLLTILSSLAQDESRSISENATWGIRKKFERGEVRMNTTKFMGYDKDENGKLIINPEQAETVKFIYQKFLEGFSPESIAKYLNENDIPGWTGKANWYPSAIQKMLQNEKYKGDALLQKTFTVNFLTKKRSANDGQVNQYYVEDSHEAIIDKETWELVQLELARRKAVREEHQLNFYIMQNADNPFTSKVFCAECGSAFGRKNWTTSRGKRKVWQCNNRYKVKGLIGCQNNHIDEGTLEKAVVMAVELLGENVDLLHGKWNKILEENRLLEKHYSVLLAELINKDCWEYDSFEMCQVLDSILISEDGQITVRFLEGTEVDL

SEQ ID NO: 18975 - protein, 407 aa, synthetic construct
MKAEKKRVCAYTRVSTMTEKQQDSLTNQQSYYNHFYQNKKDVDFIGVYYDQGISGKLAKRPGFQQMLEDCRAGKIDVIHTKSISRFARNTELLLTVSRELKTIQVDIFFEEQNLHTLSNEGEVMLTVLASYAEEELRNMSENQRWAFQNKFQRGELVINTKRFLGYDKDENGELIINPEEAKIVKRIYNLYLSGMGVHVIAKLFNEEKVSTVDGGKWYSSTITNILKNEKYKGDAILQKYYFAEIKAKQRLNQGQVQQYLITDNHEAIVSREDWEAVQKRLKQNRKANLSIDYNRRYPLSGLLKCEHCGSTLKRQKYYKGKVVWVCSKYIREGKEACIGMRVPDSVVQDWRVTKPTIVKEEIINGKKHYCYSSKENDSSGNREACPENPNGGLLSGVYRPRRTAIKL

SEQ ID NO: 18976 - protein, 535 aa, synthetic construct
MKKAVAYCRFSSDNQRTESIDAQVRAIEEYCKKEGYTLIKIYKDEAISGTSIDDREEFLKMIEDSKNKEFNYVIVHKFDRFARNRYDHAINEKKLNENGVKLISVLEQLNDSPEAVILKSVLTGMNEYYSLNLAREVRKGQKENALKCIHNGGIPPLGYDLTEDKTYTINEEEAKAVRLIFKMYLEGRGYAYIADELNSLGFKNKLGKPFKKISIRDTLYNEKYIGNFIFGKKDKKGNLTGKEIKIENGIPAIISKEDFEKVQIMLQKKVRSSSGRSTALTTYLLTGLCECGECGGSYSGGYRSVNRNKTVSYGYQCRNRKDKVNDCKNTPIRREVLEDLVITTLKENIFSTSQIEVITDKVYDYVQDTFKRSNKELIKIDKSLEKLKAKAEKLLDLTLDGTISDYEYRNKKGEIDMEILNLKEERFKYTDAPKFMDKQKIKNHLIELGKNLDSKDENLLKILIQTFVKKIVVHRDSIALELRIFPGLTPAKVGGDDGNRTRVRNYQRHRLLQCLVYYFISQQSLPQTGLTEAIL

SEQ ID NO: 18977 - protein, 561 aa, synthetic construct
MIAAIYARKSTEQVGFNDEEKSVTRQIEHATEFAVRKGWTVAQEHIYSDDGISGAEFLKRQGFLRLMNALKPRPAFQVLIMSEESRLGREAIQSSYAFKQIIDSGVRIFFYLTDQERKLDNALDKVMLSLTNFSAEMEREKASQRTYDAMLRKAKALHVTGNKVFGYDNVPVYSSQANNDGTPHRQHVVRRINTEQAKTVVRIFEMYASGFGLASIAKALNEDRVPPPHGGNLGWCPTALRDILQRDLYRGMVLWNRTQAIQLGGTRKQRKRPQSEWLRIDAPELRIISSMLWEQVEQRRTQNRNAYLRGEGGRLISRPTGEDHRSSYLLSSIAKCVVCGGSIVAIKRTAKQRYDRTVYRCAYHHKRGHTVCSNNVEVRQDILDSAILHAINNMLDDQVLEASVAEALERIRKEQKNLPDERIIVERELSLIETRLHHLVEHIANGKATDAIDASLRQEEARKKTLLGELTRLDQLAQMAYVNEKQLVKELRTRLGDIPGLLTRQVPLARQMLRKLLDGHISCEPVEEGGKRGYRFTATGTFDRLLTGVKVINQSGGGQGS

SEQ ID NO: 18978 - protein, 506 aa, synthetic construct
MRTVITYLRFSSAIQGAEGADSTRRQNDLFKQWLKKNSDAQVVASFSDEGLSGYKGKHLTGQFGDMLARIEAGEFPASTILLVESIDRIGRLEHLETEALMNRILGNGIEIHTLQDGLIYTKDALADDLGISIIQRVKAYIAHQESKQKSFRVSQKWEQRAKLALAGEQRLTKMVPGWIDPDTFKCNEHAETVRLIFKLLLDGESLHNIARHLQANNISSFSRRKDANGFSVHSVRTILRSETTIGTLPASQRNDRPAIPNYYEAAIDVSTFNKAQEILDKNRKGRTPASDNPLTINIFKGLFRCQCGASVHPTGTKNKYAGVYRCNNHLDGRCDVPPLKRKPFDKWMIDNFLGMIDVGNDGEAEGKIASLQHEVEIVTTRIKKATALLLEMDDITELKTQVKELNQKRTELQTTIDSMRRKTSLSDKGLPQLKDIDLMTKEGRVECQLILSKHLKGLTLGKDSVTVTLQNDTEITIPTNPLPLNDGTSIFEIADKELLDIDAFRL

SEQ ID NO: 18979 - protein, 507 aa, synthetic construct
MKRVISYIRFSSEKQAKGDSLRRQSKMVTDWLKAHPEYYLDESLTFRDLGVSGFTGKHLKGGLGDFLTAIEKGLVKAGDTLLIESLDRLSRQNVDRASELLRNILRSGVDVVTLSDGEHYTRESLKDPLALIKSILIMQRSHEESLRKSERIQAAWNRKKELISEGIKISKRCPAWLKLNDDRKSFSVIPEKVETVKRCFQLRLEGKSIWEIVRTLNDEGHQSMSQYKPGSFGQSSVQDLLKNRSVIGYFTPKGCEEIAGYYPAIIDETTFYKVQQLSYARHGRKPASAKPLSVNLFKGVIRCSECGHALIITGFSDTRNGIYRCPLRNENRCSAKGLSRKQTDGTLLALLSRLDRFDSDTTNTIDTLKLHREHISSNIEKLVQLSLEIEDLSAITSKLRQLKGELSQVDADIEKETQRLKSIDVGCLSDCDLTTKAGRIEAQLIIKSAVKEVVLNTAKRRCKVTFHNGKLIDLPITETPSDNVTEAIQSLSEVTERGLIDVDEVII

SEQ ID NO: 18980 - protein, 507 aa, synthetic construct
MKRAISYIRFSSEKQSRGDSLRRQSKMVTDWLKAHPEYYLDQDLSFRDLGVSGFTGKHLKGGLGDFLTAIEKGLVKAGDTLLIESLDRLSRQNVDRASELLRNILRSGVDVVTLSDGEHYTRESLKDPLALIKSILIMQRSHEESLRKSERIQAAWNRKKELISEGIKISKRCPAWLRLNDDRKSFSVIPDKVETVKRCFQLRLEGKSIWEIVRTLNAEGHRSMNQYKPGKFGQTSVQDLLKNRSVIGYFTPKGCEEIAGYYPSVIDETTFYKVQQLSYARHGRKPVSDKPLSVNLFKGVIRCSECGHALIITGFSDTRNGIYRCPLRNENRCSAKGLSRKQTDGTLLTLLSRLDRFDSDTTNVIDMLRLHREHISSNIEKLVQLSLEIEDLSAITIKLKQLKGELSQVDADIEKETQRLKSIDVGCLSDCDLTTKAGRIEAQLIIKSAVKEVVLNTAKRRCKVTFHNGKVIDLSITENPSEDVTEAIQSLSEVTEKGLIDVDEVII

SEQ ID NO: 18981 - protein, 506 aa, synthetic construct
MRSVITYLRFSSATQGAEGADSTRRQNELFKQWLRKNSDAQVVASFNDEGLSGYKGKHLSGQFGDMLSRIESGEFPEGTILLVEAIDRIGRLEHLETEALMNRIIAHGIEIHTLQDGLIYTRDALSDDLGISIIQRVKSYLAHQESKQKSFRVSEKWKQRAKLALAGKQRLTKMVPGWIDHDTFKINEHAETVRLIFKLLLDGESLHNIARHLQSNGIKSFSRRKDANGFSVHSVRTVLRSESVIGTLPASQRNDRPAIPNYYEAAIDAATFNKAQEILDKNRKGRTPASDNPLTINIFKGLFRCQCGASVHPTGTKNKYAGVYRCNNHLDGRCDVPPLKRKPFDRWMIDNFLGMIDVGNDGESERKIAALQHEVEIVTARIKKATALLLEMDDIDELKIQLKELNQKRTELQTTIDNMRRKASLTDKELPQLKDIDLTTKAGRVECQLILSKHLKGLTLGKDSVTVTLQNDTEITIPTNPLPLNDGSPIFEIADKELLDIDAYQL

SEQ ID NO: 18982 - protein, 507 aa, synthetic construct
MKRAISYIRFSSEKQSRGDSLRRQAKMVTDWLKAHPEYYLDESLTFRDLGVSGFTGKHLKGGLGDFLTAIEKGLVKAGDTLLIESLDRLSRQDVDQASELLRNILRSGVDVVTLSDGEHYTRESLKDPLALIKSILIMQRAHEESLRKAERIQAAWNRKKELISEGIKVSRRCPAWLRLNDDRKSFSVIPEKVETVKRCFQLRLEGKSIWEIVRTLNDEGHQTLNQYKAGKFGQTSVQDLLKNRSVIGYFTPKGCCEIAGYYPSIIPESDFYKVQQLSYARGGRKPASGKPLSVNLFKGVIRCSECGHALIITGFSDTRNGIYRCPLRNENRCNAKGLSRKQTDGTLLALLSRIDRFDSDMTNTIDTLKLHREHISSNIEKLVQLSLEIEDLSAITSKLKQLKGELSQVDADIEKETQRLKSIDVGCLSDCDLTTKAGRIEAQLIIKSAVKEVVLNTAKRRCKVTFHNGKVIDLPITEDPSEDVTEAIQSLSEVTERGLIDVDEVII

SEQ ID NO: 18983 - protein, 553 aa, synthetic construct
MLCYSYVRFSTPDQAKGDSYRRQMEFASNYCKLHNLTLVEDLNFKDLGVSAYKGNNLKSGALGKFLELVVSGQIPSGSTLVIESFDRLSRQTAIKAQAVFFEIISAGITIVTAMDNRSYNLQSIADNPFDLMYSLMIMIRANEESETKSKRVKEAIKSKIDNKKIVPSKLPYWIRHNKDEDVLELIPERVKTISYIIEKYLSGFGINKLTRHLNEKIPPFAGKAWYPLYLQKLLRSVSLYGERQYNMNGTLYIMDDYYPAVIDKSKFALIQENLDARAPTRGGKIPSAITGIRKAYCGYCNGVLVSQSTKRNGRIVDGLRRARCGTNNNAGSCITSSFRISIVESAIAEYCSQHFDLSLLAPNSNSSKLDLANYRLELNKLDIKISNYVKFISEGNISPAIISALDETEKSKNDLQQKIQKSELNTLTNNSNEITEKWKLIKTNLSEYDEENILKLRELIRISIKRILVFQYGPWANAEPVTTASGKTINPHRGNFSIQITFNNGVRKILELGEKVKDHEVDTINKRITENGITYTSDEYILMIQSTLKNKKA

SEQ ID NO: 18984 - protein, 506 aa, synthetic construct
MRTVITYLRFSSAIQGAEGADSTRRQNDLFKQWLKKNSDAQVVASFSDEGLSGYKGKHLSGQFGDMLSRIESGEFPEGTILLVEAIDRIGRLEHLETEALMNRIIAHGIEIHTLQDGLIYTRDALSDDLGISIIQRVKSYVAHQESKQKSFRVSQKWKQRAKLALAGEQRLTKMVPGWIDPDTFKCNEHAETVRLIFKLLLDGESLHNIARHLQANNISSFSRRKDANGFSVHSVRTILRSETTRGTLPASQRNDRPAIPNYYEAAIDAATFNKAQEILDKNRKGRTPASDNPLTINIFKGLFRCQCGASVHPTGTKNKYQGVYRCNNHLDGRCDVPPLKRKPFDKWMIDNFLGMIDVGNDGEAEGKIAALQHEVEIVTARIKKATALLLEMDDITELKTQVKGLNQKRTELQTTIDNMRRKASLTDKELPQLKDIDLTTKAGRVECQLILSKHLKGLTLGKDSVIVTLQNDTEITIPTDPLPLNDGTSIFEIAEKNLLNIDTFQL

SEQ ID NO: 18985 - protein, 507 aa, synthetic construct
MKRAISYIRFSSEKQSRGDSLRRQSKMVNDWLKAHPEYYLDQDLSFRDLGVSGFTGKHLKGGLGDFLTAIEKGLVKAGDTLLIESLDRLSRQNVDRASELLRNILRSGVDVVTLSDGEHYTRESLKDPLALIKSILIMQRSHEESLRKSERIQAAWNRKKELISEGIKISKRCPAWLKLNDDRKSFSVIPEKVETVKRCFQLRLEGKSIWEIVRAMNAEGHQTLHQHKAGSFGQTSVQDLLKNRSVIGYFTPKGCEEISGYYPAIIDETTFYKVQQLSYARYGRKPASDKPLSVNLFKGVIRCSECGHALIITGFSDTRNGIYRCPLRNENRCSAKGLSRKQTDGTLLTLLSRLDRFDSDTTNTIDMLRLHREHISSNIEKLVQLSLEIEDLSAITIKLKQLKGELSQVDADIEKETQRLKSIDVGCLSDCDLTTKAGRIEAQLIIKSAVKEVVLNTAKRRCKVTFHNGKVIDLSITENPSEDVTEAIQSLSEVTERGLIDVDEVII

SEQ ID NO: 18986 - protein, 505 aa, synthetic construct
MRGVITYLRYSSAIQGVEGADSTRRQNDLFQQWLKKNSDAQVVASFSDEGLSGYKGKHLSGQFGDMLSRIESGEFPEGTILLVESIDRIGRLEHLETEALMNRILGNGLEIHTLQDGLIYTKDALADDLGISIIQRVKAYIAHQESKQKSFRVSQKWEQRAKLALAGEQRLTRNVPGWIDPDTFKCNEHAETVRLIFKLLLSGESLHHIARHLQSNGIPSFSRHRANGFSVHSVRTVLRSESVIGTLPASQRNDRPAIPNYYEAAIDVSTFSKAQEILDKNRKGRTPASDNPLTINVFKGLFRCQCGASVHPTGTKRTYQGVYRCNNHLDGRCDVPPLKRKPFDKWMIDNFLGMIDVVSDGESERKIAALQHEVETVTARIKKATALLLEMDDITELKAQVKELNQKRTELQTTIDTLKRKTSLTDKELPQLKDIDLTTKVGRVECQLILSKHLKGLTLGKDSVTVTLQNDTEIIIPTDPLPLNDGSPILEIAEKELLEIDAYQL

SEQ ID NO: 18987 - protein, 547 aa, synthetic construct
MKLLVTYIRWSTKEQDSGDSLRRQTNLIDAFYSKHKEEYYLLPAHRYVDKGKSGFHQQHKNQGSDFRRMFENVMSGVIPEGSLIVVENFDRFSRADIDTAIDDVRQILRKGVSILTLGDGELYDKSALTDPVKLIKHIIIAERAHQESLVKQKRIAQVWNHKTQLARELKKPMGKQAPGWLELSEDGSHYIVDEDKASLVNIIYDKRLSGMSMFAICKWLNEQGYPTINQRKVRISKTKKPDGNWSALSVKHILTSRSVLGYLPAKISTEDRKTVLREEIESFYPQIVTDSKFYAVQQLLEETGKGKTSSGDHWLYVNMLKGIIRCKCGLVMTPTGIRKPVYQGTYRCNGNKESRCSYGTVSRKLLDTQLCSRLFSKLSQLHDEATDTAKLDELQRRLNTIDGELEKLTETLIQLPNITQIQEALRVKQEEKDELIVQLSREKARVKSVSSLDLSGLDMESVEGRTEAQIIIKRLVKEIVVSGNEKLVDIYLHNGNMIRGFPLDGKDDHTLTLEEATDEMQSLDDMLIFGEPVTRIYPAGDMEEVDA

SEQ ID NO: 18988 - protein, 449 aa, synthetic construct
MKQVIGYLRQSTMKQQSLAAQKQAIEAIAEKHHIQHINFYSDKQSGRKDNRSGYRQITQLIQQRQCDILCCYRLNRLHRNLKNALKLIKLCQTYHVHILSVHDGYFDMDQAFDRLKLNIFISLAELESDNIGEQVRNGLQEKAKQGRLITTHAPFGYEYHNGTFIINQNESPTVKAVFNYYIKGHGYKKIAQLLEEDNTYINRQPYQVRNIIINPNYCGRVNNQYGQFDNMFPSIVSTSIYEQAQRLRLQKQTKQTPSDNQLKQKIKCPCCNATLTNMTIRKKNHTLRYYVCPKNMNASRFVCDFKGINAQTLEDKVLEVCRDFYQNQRIYTKIKSAIDKRIKRQRNIEKHHTLTQEQLIEKLAQGIIDAETFREQTQSLRQQPQRTTSINGHQIQHIIQNIIQKRFTLNILYPYIETIHITKDKNLIGIYFKNEPLNIVNQTMQSSIA

SEQ ID NO: 18989 - protein, 558 aa, synthetic construct
MKGKIALYSRVSTSEQSEHGYSIHEQEQVLIKEVVKNYPGYDYETYIDSGISGKNIEGRPAMKRLLQDVKDNKIEMVLSWKLNRISRSMRDVFNIIHEFKEHDVGYKSISENIDTSNASGEVLVTMFGLIGSIERQTLISNVKLSMNAKARSGEAITGRVLGYKLSLNPLTQKNDLVIDENEAHIVREIFDLYLNHNKGLKAITTILNQKGYRTINQKPFSVFGVKYILNNPVYKGYVRFNNHQNWAVQRRSGKSDKNDVILVKGKHEAIISEDVFDQVHEKLASKSFKPGRPIGGDFYLRGLIKCPECGNNMVCRRTYYKTKKSKERTIKRYYICSLFNRSGSSACHSNAINAEVVERVINVHLNRILSQPDVIKQIASNVIEELKQKHSKQTEIKYDIDSLEKQKAKVKTQQERLLELFLDDQMDSEMLKAKQSQMNGQLEMLDKQIKEAQQATESQAEVPNYDKLKSHLTMMISRFSVYLREATPEAKNQLMKMLIDSIEITTDKQVKLVRYKIDESLIPQSLKKDWGSFFMPKFQFEIDGRKNYFIDQITTFTT

SEQ ID NO: 18990 - protein, 616 aa, synthetic construct
MTDYSKITALYSRLSVGDEDRDGGESNSIQNQKIFLENYAKGQHLTNIRHYIDDDESGRFFDRSAYSRMMDDVENGKIGVCIMKDLTRWGRDYLQVGNAMEIFRRNNVRFIAVNNGIDSEKPDTLEFAPFINIMSEWYAKDISKKVKTGIKTKGMSGKPIVTEAPYGYVKDPDNKDFWIIDEEAAEVVRLIFRLFIGGKNRNQIAVHLKNEQIPTPTFYMKDRGRGTCKNKTLNEDSRCKWNKATLTNILTRQEYCGDVVNFKTTKHFRDKHNHYVDRSQWHITENVHEPIIDRTDFENVQRILENAPVKRPNGDGEIHPLSGLLFCKDCGAKMHIRIDYRYGSKRHVAYCSEYHKGKAKNPKCSSPHIMDADLLMQTVAEVLKKIEDYSISNRAEFEALVKKNLAMQQTDQTKKQQKRIPQITTRLEQIDKVLNKLYEDNALGTIPQDRYEQMSQKYSEEYYALKAELATLQEQLSAYENAGGRAQKFLKLTERHAAFTELTPAILNEFISRIEVHERDQKRARYAIQHISIYFNYIGKFENEVTQLAEPTEQEIRQMREEIEEAKKEKSRAYHRQYSREYRARNLEKQREYDRIKAREYRAKKKAQAAAAQPTQ

SEQ ID NO: 18991 - protein, 479 aa, synthetic construct
MNKVAIYVRVSTKGQADEGYSIDEQIALLTSYCSIHKWKIYDTYVDAGVSGATIERPELSRLSRDAKKKKFNTMIVYDLKRLGRSQRNNIAFIEDVLEKNGIGFISLTENFDTSSPLGKAMVGILSAFGQLDRDTIRERMMMGKIGRAKAGKPMMTSTIAFGYTYDRVTSSLNINQAEAIIVKTIYNEYILGRSLTKLRDYLNENGLLRNGKPWSYQGVSRILRNPVYKGMNRFRGEVYQGTHEPIISAELFDRTQKELKKRQIEAYKRNNNRRPFRAKYMLSGIIRCGVCGSPMEITLGFKRNDGTRNMRYQCINRFPRQTKGITVYNDAQKCDTGLYEKSDIEIHVLSQVRLLQLNKAKLESMFERTDVINVEDIQNQIETLNNKMRRLNDLYLNDMIDLDDLRSQTQNFLKQKELLENELENNPALNQEQDKEQFKELLGTKDITQLDYDKQKLIIKNLIDKVFVKPGNIEIKWRI

SEQ ID NO: 18992 - protein, 449 aa, synthetic construct
MKQAIGYLRQSTTKQQSLAAQKQTIKALAEKNNIQHITFYSDKQSGRTDKRNGYQQITELIQQGQCDVLCCYRLNRLHRNLKNALKLMKLCQTYHVHILSVHDGYFDMDKAFDRLKLNIFISLAELESDNIGEQVKNGIKEKARQGKLITTHAPFGYHYHNGTFTIDTVKSPTVKAVFNYYLHGYGYKKIAQYLEADDKLINRKPYQVRNIILNPNYCGRVINQYGQYENMFPAIVSTTIYEAAQVTRTQKQVKRKLSENQLKQKIKCPYCDSTLTNMTIRKKNHTLRYYVCPKNLNASRFVCEFKGINAQELETSVLATCQDFFQNQQLYSKINHTIQQRLKRQRDVETKTTLNHEQLIEKLAQGKIDAETFREQTQSLHQQSKPISSISAYQIQKAFQNIIQQRFTLNMLYPYIDEIHINKNKTLTGIYFKNEPLNIVNQTTQSTIA

SEQ ID NO: 18993 - protein, 519 aa, synthetic construct
MTAVIYARYSSDNQREESIEGQIRECTAYAEKNDITIVKHYIDRAISAKTDNRPQFQQMIKDSDKKLFDIVLVWKLDRFARNRYDSARYKTQLKKNGVKLMSATEIISEGPEGIILESVLEGYAEYYSADLAEKVVRGQTENILKGRCNGGRGTFGYTLDSERKFHIDPLASPFVLESFTKYRDGLTMKEIRDWLNENGIKNPVGGEFTYNSVEHMLKNRRYIGELKFRDVVVPDAIPPIVPLELFDDVQEKIAKNKKAPARRKAEDDYLLTTKLHCGCCGALMFGESGTSRTGEVHRYYKCATAKKKKGCKKKTVRKQWLEDLVVNQTMQLVRDDAAMESIIAKVMELQDRENTNLPLYEKQLRDAESGIQNMLNAIQAGILTSSTKERLEQLEETKRELEARIAEEKLAKPKIKEEFIRFWLMRFRKLDMSLKDQRQALVDTFINSIYLYDDKVLITFNYKEGTQTITFEEAAQAASKENGSDLDCFTAPRTAAQVMCSSPFYYFIESILQKQRSAL

SEQ ID NO: 18994 - protein, 642 aa, synthetic construct
MAKSNQGKITALYERLSRDDELQGESNSILNQKKYLEDYARKNGFNNIQHFTDDGYSGTNFNRPGFQSMIAEIETGHIATVIVKDMSRFGRNYLEVGFYTEIQFPSKGVRFIAINNNVDSANPTDNDFTPFLNIMNEWYAKDTSNKIRAVFKSRMQDGKRCSGSIPYGYKRVPGDKQTLHVDEEAASVVRRIFDMAASGASLAQIGQTLSEEKVLIPSAYEEQHHPEAARNHSYHDPYRWNTTTLTYILDRQEYLGHTVLCKSIRENFKLKKRRAATPEERIVFKNTHEAIIDQETWDKAQRLRKRNPKKLPSGTYSHRLAGMVFCADCGSRMSFSSPESKHRDSDVVYDSDSSWQCSKYRNMYVSCTSHFIKTSTIEAAILNAIKAMTKEIIENEDEFAEQLQAAWESQNTQVSSESKKELHSVQKRINELDALIRSLYENSVLGKIPERQYQRLMAQYDEEQTVCEARIAELKKELDVVETTKVDLKRFIKLIRKYKDCETLTDEMLYELVEKVVIHSASGGRTIYRQQQIDIYFNFIGDTFPSQIEISRGDKKNLTEQRLAKRKKYQKTAGENRKKKRAALREAAKTDPQAAAEYEALLQKGREQCRKYAQNKKLAQQVPADTVPIQFEPSEEMKGESA

SEQ ID NO: 18995 - protein, 536 aa, synthetic construct
MTAVIYARYSTDSQREESIEGQIRECTAYAEKNGFTVVKHYIDRAVSAKTDNRPQFQQMIKDSERGIFDVIIVWKLDRFARNRYDSARYKTQLKRNGVKLVSATEVISAGPEGIILESVLEGYAEYYSADLSEKVVRGMTENALKGIYNGGTIPFGYMIDETRHYQPDPLLAPYVEQTFQKYADGATMTDLRDWLKAHNIKNSMGGEMSYNTIQRMLSNRRYIGELRLRDVVQPNAIPALVSEELFNKVQKKLAKNKKAPARHKAEEIYLLTTKLYCGKCGALMFGESGVSHTGKMYTYYKCAAAKKKKTCDKKAVRKQWLEDLVVNETMKLVEDDASMNAIIAKVMELQNQESTDLPIYEKQLKETEVGITNMLNAIQMGILTSSTKERLEALEEQRKELQARIAEERLAKPKMKEEFVRFWLLRFRKLDMTQPEQRQALVDTFINAIYLYDDKVLITFNYKEGTETVAFGEAVKAEKSSDMSARGAPDIERQIERFGVLSLCRKAAAHFLHTVCTFARIGGFSAQGLHSLLSFA

SEQ ID NO: 18996 - protein, 463 aa, synthetic construct
MNNVAIYCRESTEKQNIDTLVSLCEKEAKKLGYSNYKIYKDVKSGYSKDREEYTKLKEDIKDEKINVVILYESSRITRDEIEHHMFYALLKLYNVKVYTLNHGWIDLTNEDDCFLAGLLNLLDAREGRKTAKRVKDRMEEMAKNGFWTGGPAPFGYKLVDKKLIIEPEEAEKVKEIFRLFLEGKTRFYLSALFGFECKRVMRMLVNPVYNGKLKFRQIEFKNKKRIEHKQFDILPGIHEPIIDDYTFKLVQDKVKNIKRETNKESYIFKDLLICTCGEKMYLHKKKYFYKRDTPTITNVYICNSKDRKIRNCSLSIIHENELFVNVIESLEELILSFNVDDIDTNKNDFEKQLKYYKKELSSLSVKEEVLARQLMNGKLSENLYEKFIVELSENKEFIENKINSLTKVINSQEAKKNNKTILKKYFNKIKKEKDPEKLNAFFKLIIDSIEFINDYRFYIHLKF

SEQ ID NO: 18997 - protein, 480 aa, synthetic construct
MQTINKVAIYVRVSTTNQAEEGYSIDEQKDKLKSYCSIKDWNVYKVYTDGGFSGSNTERPALEKLIKDAKNKKFDTVLVYKLDRLSRSQKDTLYLIEEIFIKNGIEFLSLQENFDTSTPFGKAMIGLLAVFAQLEREQIKERMQLGKLGRAKSGKSMMWARTSYGYDYHRDTGAMTINELEAIAIRDIFESYLNGMSVTKIRDMLNDKYPKTPNWHYRIVRGILANPVYCGYNQYKGHVFLGNHEPIITEEAFNKTQEELKIRQQTALEKFNPRPFRAKYMLSGIAQCGYCGAPLSITLGTVRKDGTRNIRYQCKNRFPRTTKGVTVYNDNKKCDSGFYEKSDIEQYVIEQICKLQHDKKYVEELFADHGPSVDRVACQKQIDLLTNKISRLNDLYIDDRITLEELQTKSSEFSSQRSILEEELENDPALKRKKREAEMKKILKTDDILGMDYERQKTIVRSLINKVRVTVDKIVIKWKI

SEQ ID NO: 18998 - protein, 462 aa, synthetic construct
MEKNITVIPAKKPQQTVKSQTQKKIRVAAYCRVSTDQDEQLSSYENQVNYYREYILKHEDYELVDIYADEGISATNTKKRDAFNRLIQDCRGGKVDRILVKSISRFARNTLDCIKYVRELKELGIGVTFEKENIDSLDSKGEVLLTILSSLAQDESRSISENSTWGIRKKFERGVVQVNTTNFMGYDKDEKGNLIINHEQAKVVRYIFDRFLEGYSPEFISKELRELEIPGCTGKAKWCPSAIWKMLQNEKYKGDALLQKTYTVDFLTKKRIDNDGQVNQYYIENNHEPILDREKWEIVQLEIARRKKFREQHNLQFYIMQKENNPFTTKVFCAECGSAFGRKNWTTSRGKRKVWQCNNRYRIKGQIGCLNNHIDEEMLEKAVMMAVSILKENRELLQSKWNKLMETDSSLKQYYSDRLREIVSRNKWDFNGVEMCRILHSITISEKGEISVKFLEGTEVNL

SEQ ID NO: 18999 - protein, 421 aa, synthetic construct
MKSGRSTTRTGYQSMLDIIRKGECQHIIVFRVNRLNRNFKDFMELQTLCEEHHVLITSLSDGRFDLSDKTQAFKIRCLAILGETESNIISENVRSANAIKAKNNELLGTNAPFGYIYVNKSFHIDESKVKTIRFIFNMYVNQGWGYKKISQALTNHSKLYNRTPKQVMRIITNEKYAGLIRNHFGEYEGNFEPIIEKSLFRKAETIRGSKKTLTHYHPIVLLRKKIRCICGATMTPIRMNRKHMTCPITYYICPLNDKLGYKKCSMGYFVASKIDKQVIKIIEDNIINQQMIQRLENTIHSKLSLKIKRSRPKYNQDQLITKLSKQQISIEEYKKQLNKIKEWHNKMNRYNQVNSANQLKCITQNILSNYTLYIDQLSEMITQITVNKDKEITGVFLKNTPLNLLKEKDDKHDERSTFIST

SEQ ID NO: 19000 - protein, 558 aa, synthetic construct
MKGKIALYSRVSTSEQSEHGYSIHEQEQVLIKEVVKNFPGYDYETYTDSGISGKNIEGRPAMKRLLQDVKDNKIEMVLSWKLNRISRSMRDVFNIIHEFKEHDVGYKSISENIDTSNASGEVLVTMFGLIGSIERQTLISNVKLSMNAKARSGEAITGRVLGYKLSLNPLTQKNDLVIDENEAHIVREIFDLYLNHNKGLKAITTILNQKGYRTINQKPFSVFGVKYILNNPVYKGYVRFNNHQNWAVQRRSGKSDKNDVILVKGKHEAIISEDVFDQVHEKLASKSFKPGRPIGGDFYLRGLIKCPECGNNMVCRRTYYKTKKSKERTIKRYYICSLFNRSGSSACHSNAINAEVVERVINVHLNRILSQPNVIKQIASSVIEELKQKHSKQTEIKYDIDSLEKQKAKVKTQQERLLELFLDDEMDSEMLKAKQSEMNQQLEVLDQQIKEAKQANQSQDDIPNFDKLKARLILMITRFSVYLRKATPEAKNQLMKMLIDSIEITTDKQVKLVRYKIDESLIPQSLKKDWGSFFMPKFQFEIYGQNDYFIDQITTFTT

SEQ ID NO: 19001 - protein, 545 aa, synthetic construct
MQKLKQKRVGIYVRVSTEMQSTEGYSIDGQINQIKEYCNFHHFEVKDIYDDRGISGKSINRPELQRLLKDANEGHIDCVMVYKTNRLARNTSDLLKIVEDLHRQNVEFFSLSERMEVNTSSGKLMLQILASFSEFERNNIVENVFMGQTRRAQEGYYQGNLPLGYDKIPDSKHELMINQHEANIFKYIFESYAKGHGYRKMANALNHKGYVTKKGNPFSTSAIAYILTNPFYIGKIQFAKYKDWNEKRRKGLNDNPIIADGKHSPIISQELWDKVHSRMKQVSQKPQVHGKGTNLLTGIIHCPQCGAPMAASNTTNTLKDGTKKRIRYYSCSNFRNKGSKVCSANSVRADVIEKYVMDQILEIVKSDKVINQVLERVNQENKVDIGALNHDIAYKQQQYDEIHAKLDNLIKTIEDNPDLTTILKETIHKYETQLNDITNQINQINQLKQQQNQEKTSYNTKQLSAVLRRIFQNVESMDKSQLKALYLTVIDRIDIRKDEHRKKQFYVTLKLNHEITKQLFHNTPIDEVRLSTSSLFLSQTLYIHI

SEQ ID NO: 19002 - protein, 511 aa, synthetic construct
MTAKIEMSEMQVNMPVKYIRAYAYVRISTNKQLDNTSIEQQIEAIEKYCKENNIILVKIFIEEPASGESFSNRPEFKEMFYNVFQKENNIDSIIVFKQDRISRNSLDSQYIFSRLKKANKNLISIADNIDTNDPNSKLIYQILGIIAEVEKDLIAFRTSLGMEKTFENGDFNGGMVFGYNLINKKLVIDEDEARVVKYIFDCYSNKMWGYRKIASSLNMQGIKTKKDNHWSITAVRTILNNKIYNGYVKWKGKYKKGNHYPIISNELWERTQKLLSLRSYTQDKIHNGSFPLSGLLKCPTCGGAMVQGNANKKYKYYVCGRFKNGGSKACNSNLVRKEYAEQLVLSQVMKHLNNLNLSVPLQTVVNNNLKSELEPIEEELKLLEKSLRGLKREKQELLQLYTKKIIDIDTLSDEMKRIQNQESEQKEFITKLTRQIELKNNNDLLPVINSIANDFNSLFNLLDDYDKKELLRFLIKEIQVNSGEKPKDRTIKNIVYEFDQELFEEISRELV

SEQ ID NO: 19003 - protein, 583 aa, synthetic construct
MEISKVAIYARVSTEEQAKEGFSIAAQLQTLRQYAQIYNWEVIDEYVDEGISGKSVKGRPEMKRLIKDVENERFDAVIVWKISRLSRNMLDTLTILDKFEKYDVKFISYSENFDTSSPIGRLVLQIMASIAEMERNTLAENVKLGMKQRALEGRWNGGIVFGYDTVKKELVINEKEAEVVQLIYHMYADGKGLRAISNHLNKSGYKTKRNRYFSINGVAQILDNVVYNGKISWLKVENWDTKRRKGKNPNPILVEGKHEGIISDELWNIVQARRKSKSFKQRQSNEPFLLSKLLRCPDCGQGMVPSITTYTLKDGTKRKHRYYVCSDFHNKGSAACKANSIKAYDAEDTVIKKIEQFSSNKKRLYKTLTDISSSSAHSISQLNKELEEIETQLKEIEQLQAKYMEAFEKNTLPVDILQERLQKVSNDKRGLEQKKNEVIIQLGSVDSKVIQPELIEKLLKKFLSVYKETSRDNQKQLLQLLIDNITIKQNDKSRCINNVELEFDFSELHISKTFTLIHLLYRETDNELTFSIPASDKELPPYLQQFLPLFMVRFSPINPKCPIHLLQQNKPHHLMWKSHFRKG

SEQ ID NO: 19004 - protein, 507 aa, synthetic construct
MFKQSDVEITKYNDYKYLIYTRVSSDKDSQKESVPNQIDICRYWLEQNHYEFNENAVLVDEDKSGTLFLERTAMQLILQKARNREIKMVLFKSIHRLARDLKDALEIKEVLLGHGVRVVTIEEGYDSYVEGKNDMKFEMFSMFAAQYPKSLSVSISSALAAKVRRGEHIGKIPYGYDRIDQKLVIKEDEANVIRQIYKWYNEEGFGFKKITHLLNKGVQQGEILPPRSGKAWQITSIQRIIKNPTFCGTFILNQYTTIKVDGRKKQIRNPEEKWIVFEDHHPAIVSKEDWKLANNKKKVNIKTKITPWNEFRGLLKCGKCGSNIVIIQSWNQKLDGTKTHWRYLKCSAYRRSGKSGCDNHVPIRYEEFRRFIVERLLETGQKVSLDFNNTLNNHSKQQVKQLENSIAKYQEKSEGLVDLYLDRLIDKVEFQVRRKEFEQQIKEAQDKLFLYKNEEVQEVSVKNIQQAFKTIEKKDQDLYHVLKVIIDYITVNIDGSVDIKYNFDLNK

SEQ ID NO: 19005 - protein, 539 aa, synthetic construct
MNRTKKYIAALYCRLSKDDGSTNESMSIYSQKAMLKQYAEQNNIAVYDYYVDDGYSGTNFERPAFKKMITDIENGKINCVITKDLSRLGRNYLESGAYIEMYFPQKNVRYIAITDGIDTINSYEFDIMPFKNILNEMYAKDTSKKVKSALKSRMKEGTYIGSKAPFGFKKDPDDKHRLVIDERVKPIIELVYELCLEGKGTQLISQEMMKRKIPRPSSFLENADKLYGLTEENKYKWTHRMVLSILRDPVYCGNMERNKRPTLSFKNRKRLYVSKEDRIVVKDTHEGIVSEEVWTQVQQMLDKRKNTNKSGITYDNIFKGLVKCPTCGYALTPKADYRLNKKETIDFVHFSCSGYKKYGVNACTSHRINARDLYNVVLEDIQYHGQMALSSREDFVMKIAEKIDKDKVDERKDKTEKLNSSKIKLKDLDKAFEKLYEDRLSESISERNFNLMNEKLSRQQEKLIEEIDLLEEEIKEIADTEENCEQFVENISKFAKIKELNRYILNQVIDKIYVYDKEEVDGEIKQKVEIHYKFIGKLD

SEQ ID NO: 19006 - protein, 413 aa, synthetic construct
MSVKKIRVNKQKNKQRICAYIRVSTTNGSQLESLENQKQYFINLYSNRDDIDFVGVYHDRGISGSKDNRPNFQAMIENCRKGMIDVIHTKSIARFARNTVTVLEISRELKAIGVDIFFEEQNIHTLSSEGEVMLSVLASIAEDELRSMSGNQRWAFQKKFQRGELVINTKRFLGYDLDENGELIINPEEALIVRQIFALYLEGYGTHRIAKLLNEKGVATVTGAKWHDTTIRQMLSNEKYNGSVLLQKYFHDGVNGPKKLNQGELEQYLIEDNHEAIISKEDWQAVQDKLNSRRWQQGRNKTYKFTGLLKCQHCGSTLKRQVSYKKKIVWCCSKYIKEGKVACRGMRVPEVDISNWEITSPITVLERDRSGEKYYSYSGQESADQRTSSGQEENQSSRILSSVHRPRRTAIKL

SEQ ID NO: 19007 - protein, 559 aa, synthetic construct
MKGKIALYSRVSTSEQSEHGYSIHEQEQVLIKEVVKNYPGYDYETYIDSGISGKNIEGRPAMKRLLQDVKDNKIEMVLSWKLNRVSRSMRDVFNIIHEFKEHGVGYKSISENIDTSNASGEVLVTMFGLIGSIERQTLISNVKFSMNAKARSGEAITGRVLGYTLSLNPLTQKNDLVIDENEAHIVREIFDLYLNHNKGLKAITTILNQKGYRTINQKPFSVFGVKYILNNPVYKGFVRFNNHQNWAVQRRGGKSDENDVILVKGKHEAIISEDVFDQVHEKLASKSFKPGRPIGGDFYLRSLIKCPECGNNMVCRRTYYKTKKSKERTIKRYYICSLFNRSGSSACHSNSINAEVVERVINVHLNRILSQPDIIKQIASNVIEELKQKHSNQTEIKYDIDSLEKQKAKLKTQQERLLDLYLDEEIDSEILKDKQSQMNQQLEVLDQQIKEAQQANQSQDEIPNFDKLKGRLILMITRFSVYLRKATPEAKNQLMKMLIDSIEITTDKQVKLVRYKIDESLIPQSIKKDCGNFFMPKFNFVINVTNGNKIENLSLSPLF

SEQ ID NO: 19008 - protein, 557 aa, synthetic construct
MKRKKAYIYTRVSTNMQVEGFSLDAQETRIHQYANAFDIEIVKTYQDAGKSGKTMLGRTEFMAMISDIEAEKDKVDYVLVFKLSRFGRNAADTLKSLAIMESHGVNLICVDDGLDSSKDSGKLVITILSAVAEMERENIISQAMEGRRQKARAGQWNGGFAPVGYSLVNGQLQVNQEEAESVKMIFDLFANSDMGTIAIAKHLANLDIKKPIRHNSTLPNFSSSGIARILDNPVYNGKIAFGRRESTRDKISGETKVTQSENYILTDGIHEAIIDDETWNKVRKKREANAHKYKRENPSKNDSIYVLSGLIKCPLCHAGLYGNKSIKRNKNKKDEYYKNYYYYACKHRKHVDGHKCTFNKQLKTGNLDHEVLSIISKLVSRPDFARKLQEKINIQVDTSRIDSEIEQYKSLFRQLNATKLNLIQQIDSLNFEDPHFQQKSIDLDMRLNTIYDKLADVETQIETSESKREVILKDKMTADNIYKILVNFASFMDVMEDIDKKRLCQMLIEKVEIYDDKNKAGRWVKAIHFKLPIIEEDLEISLDNSTPVEAVVKLSKK

SEQ ID NO: 19009 - protein, 481 aa, synthetic construct
MITTNKVAIYVRVSTTNQVEEGYSIDEQKDKLSSYCDIKDWNVYKVYTDGGFSGSNTDRPALESLIKDAKKRKFDTVLVYKLDRLSRSQKDTLHLIEDVFIKNGIEFLSLQENFDTSTPFGKAMIGLLSVFAQLEREQIKERMQLGKLGRAKSGKSMMWAKTSYGYDYHKETGTVTINPAQALTIKFIFENYLRGRSITKLRDDLNEKYPKHVPWSYRAVRTILDNPVYCGFNQYKGEIYPGNHEPIISKEEYDKTQSELKIRQRTAAENVNPRPFQAKYILSGIAQCGYCGAPLKIMLGVKRKDGSRLKKYECHQRHPRTLRGVTTYNDNKKCDSGFYYKDKLEASVLKEISKLQDDADYLDKIFSGDNAETIDRESYKKQIEELSKKLSRLNDLYIDDRITLEELQSKSAEFISMRGTLETELENDPALRKNKRKADMRKLLNAEKVFSMDYENQKVLVRRLINKVKVTAENIVINWKI

SEQ ID NO: 19010 - protein, 650 aa, synthetic construct
MSKEKIKVYLYTRVSTSIQIEGYSLEAQKSRMKAFAIYNDYEIVGEYEDAGKSGKSIEGRIQFNRMMEDIKSGKDGVSFVLVFKLSRFARNAADVLSTLQIMQDYGVNLICVEDGIDSSKDAGKLMISVLSAVAEIERENIRIQTMEGRIQKAREGKWNGGFAPYGYKLEDGKLFINEEEAVAIRTIFDQYVNTTIGANGISKYLENHGIRKIPRQNGKNPLFDAGLIRKILKNPVYNGKIAFGRRTLEKVHGTRNEYKQVEQDEYLISEGIHEAIVSDEVWQAAQVKLKSQAKKYEHVNKGKDTRTHLLSGIVKCPICGVGMFGNKCIKKKKDGTKYKDFYYYGCNHRQMIRGHKCTFSKQIREELLDDAVAEVIVKIVSNPKFASMMQEKINMKVDTSEIEKEIDNYQKELRKSHSTKFKLIEEIDNLDVEDKHYKRRKQDLDDRLYRMYDKVDELESSLIDAKAKKQTIEAEKLTGDNIYKVLIYFDKLYKVMNDVERRQLISALISEIQVYEEKQSNGQWLKSITFKLPIIEENLNIGLDNDEQVETVALLSKLDVDKHIDVEIKLDELDLTSAESKATYAQIKEYILEKFDLKVSTLYIAQIKKKCGIELRKHYNKSKKEKQVIPQCTPEKEEAIMDALRHFKMI

SEQ ID NO: 19011 - protein, 481 aa, synthetic construct
MITTNKVAIYVRVSTTNQVEEGYSIDEQKDKLSSYCDIKDWNVYKVYTDGGFSGSNTDRPALESLIKDAKKRKFDTVLVYKLDRLSRSQKDTLHLIEDVFIKNGIEFLSLQENFDTSTPFGKAMIGLLSVFAQLEREQIKERMQLGKIGRAKAGKSMMWAKTSYGYDYHRETGTITINPAQALTIKFIFESYLRGRSITKLRDDLNEKYPKHVPWSYRAVRTILDNPVYCGFNQYKGEIYPGNHESIISKEEYDKTQSELKIRQRTAAENVNPRPFQAKYILSGIAQCGYCGAPLKIMLGVKRKDGSRLKKYECHQRHPRTLRGVTTYNDNKKCDSGFYYKDKLEAYVLTEISKLQDNAGYLDKIFSGDNAETIDRESYKKQIEELSKKLSRLNDLYIDDRITLEELQSKSAEFISMRGTLETELENDPALRKNKRKADMRKLLNAEKIFSMDYEGQKVLVRGLINKVQVTAEDIVINWKI

SEQ ID NO: 19012 - protein, 559 aa, synthetic construct
MSKEKIKVYLYTRVSTSIQIEGYSLEAQKSRMKAFAIYNDYEIVGEYEDAGKSGKSIEGRIQFNRMMEDIKSGKDGVSFVLVFKLSRFARNAADVLSTLHIMQDYGVNLICVEDGIDSSKDAGKLMISVLSAVAEIERENISIQTMEGRIQKAREGKWNGGFAPYGYKLEDGKLFINEEEAVAIRTIFDQYVNTTIGANGISKYLENHGIRKIPRQNGKNPLFDAGLIRKILKNPVYNGKIAFGRRTLEKVHGTRNEYKQVEQDEYLISEGIHEAIVSDEVWQAAQVKLKSQAKKYEHVNKGKDTRTHLLSGIVKCPICGVGMFGNKCIKKKKDGTKYKDFYYYGCNHRQMIRGHKCTFSKQIREELLDDAVAEVIVKIVSNPKFASMMQEKINMKVDTSEIEKEIDNYQKELRKSHSTKFKLIEEIDNLDVEDKHYKRRKQDLDDRLYRMYDKIDELESSLIDAKAKKQTIEAEKLTGDNIYKVLIYFDKLYKVMNDVERRQLISALISEIQVYEEKQSNGQWLKSITFKLPIIEENLNIDLDNDEQVECVSLLEKRS

SEQ ID NO: 19013 - protein, 481 aa, synthetic construct
MITTNKVAIYVRVSTTNQVEEGYSIDEQKDKLSSYCDIKDWNVYKVYTDGGFSGSNTDRPALESLIKDAKKRKFDTVLVYKLDRLSRSQKDTLHLIEDVFIKNGIEFLSLQENFDTSTPFGKAMIGLLSVFAQLEREQIKERMQLGKLGRAKSGKSMMWAKTSYGYDYHKETGTVTINPAQALTIKFIFESYLRGRSITKLRDDLNEKYPKHVPWSYRAVRTILDNPVYCGFNQYKGEIYPGNHEPIISKEEYDKTQSELKIRQRTAAENVNPRPFQAKYILSGIAQCGYCGAPLKIMLGVKRKDGSRLKKYECHQRHPRTLRGVTTYNDNKKCDSGFYYKDKLEASVLKEISKLQDDADYLDKIFSGDNAETIDRESYKKQIEELSKKLSRLNDLYIDDRITLEELQSKSAEFISMRGTLETELENDPALRKNKRKADMRKLLNAEKVFSMNYENQKVLVRRLINKVKVTAEDIVINWKI

SEQ ID NO: 19014 - protein, 574 aa, synthetic construct
MKAAIYSRVSTEDQDFSKQTNELKDYAKKENIEVVYIFEEKESGFNNDRPEFEKVRQLTKDDVDIILVWELSRLSRRSIYIQTQVEEFADKGISIFSKKEGLQTLNEDGSKNRNAMFTIGVISMMAEQEVATFKERVISSKRNKILKQGNSYTYKPAYGYNYDTETKSLSINEEEASVVRRIFQLSADGYSAYRIPVVLNADGLKTRTGKNWTYATVSDMLTNPVYKGEAKYRLKSEKPKQGKKYKKILESATVEAPAIISAELYDLSIKGMKERTSRSKSSGVKHFQLLRGLIKCPYCKVSYTYGASRDSYCCHEKYSKATNRTEVCLSKSIRGKNIEYIVWEIVKRLFAKELAANKTELQVEPLKDEIEALKQQIKGLKKAQQELTAKANTIVNAAIEIKIQFPNMVDLYNNKLKEVESINKEAGKYLQEQDIIFKQIESKENQIKAIQSITDLSEVVNSINDDTEKYDLLHKVVESIIIYGTGANPLIVIHLTTGIDVYVAYYPLKKYYCEVYSTDNIYFDEYTKEGTVKAMGNTPTLNKGYYYEPAQTKLNLDQFIEYINSIDKREYLPK

SEQ ID NO: 19015 - protein, 612 aa, synthetic construct
MRNFEKITALYERLSRDDELQGESNSIINQKKILEEYASKNNLSNIIHFTDDGISGTQFDRPGFMAMMNGVNQGNIGCIIVKDMSRLGRDYLKVGQCMEILRQKGVRLIAINDNVDSFYREDDFTPFRNIMNEWYARDTSRKIQSTFRSKGESGKHTASTPPYGYIKDEKDKNKWIVDEKAAEIVRRIFNLTMQGNGPYRIAKILESEKVDIPAYHQQKLGYGLYQSKNFEHPYRWCSSTIASILKKQEYLGHTVNFKTRKHFKDKKSKYVSEDNWLIFENTHEPIIDQETFDNVQRIRGNVKRYPDGWGEYHPLTGLMYCADCGSKMYVHRTSNYKNIPYYTCSAYTKTPCGMLCPSAHRIKAEVVLNLIQDTLKDIKKYLDEDNEAFICSIQNEMEEKEKIEIEKKKVRLTESQNRLRELERLMCRIYEDMILNKIPNSRYEILNNQYETEQITLSKEIKDLEQQVSRYEKETDRARKFISLISRYENFDELTTTMINEFVEKIIVHERDRKGSQTSKQKIEIYFNFIGNYELPQAELSEEKKQKLEKEERKIEERKDKLHQNYLKRKASGKQKEYEDKYKARREQKKQEKIKVLKRLGIPVSEYIKTNI

SEQ ID NO: 19016 - protein, 481 aa, synthetic construct
MITTNKVAIYVRVSTTNQVEEGYSIDEQKAKLSSYCDIKDWSVYKIYTDGGFSGSNTDRPALESLIKDAKKRKFDTVLVYKLDRLSRSQKDTLHLIEDVFIKNGIEFLSLQENFDTSTPFGKAMIGLLSVFAQLEREQIKERMQLGKIGRAKAGKSMMWAKTSYGYDYHRETGTITINPAQALAIKFIFESYLRGRSITKLRDDLNEKYPKHVPWSYRAVRTILDNPVYCGFNQYKGEIYPGNHEPIISKEEYDKTQSELKIRQRTAAENVNPRPFQAKYILSGIAQCGYCGAPLKIMLGVKRKDGSRLKKYECHQRHPRTLRGVTTYNDNKKCDSGFYYKDKLEASVLKEISKLQDDADYLDKIFSGDNAETIDRESYKKQIEELSKKLSRLNDLYIDDRITLEELQSKSAEFISMRGTLETELENDPALRKNKRKADMRKLLNAEKVFSMDYENQKVLVRRLINKVKVTAEDIVINWKI

SEQ ID NO: 19017 - protein, 612 aa, synthetic construct
MIEYATKITALYSRLSVGDEDRDGGESNSIVNQKAFLERYARDKKLINIRHYIDDDESGRFFDRSAYTQMISDVEQGKIGIVIMKDMTRWGRDYLQVGNAMEIFRRNNVRFIAINNGIDSIDQNTLEFAPFINIMSEWYARDISKKVKTGIKTKGADGKPVATEAPYGYIKDPENKDYWIADKEAAEVVKLIFRLFMEGKNRNQIAVYLKEKEILTPTFYMKQQDRGTAKSKPLNEENRYNWNKATITRILKRQEYCGDVVNFKTEKHYRDKRNHYVDKSKWQITENVHEPIIDRTTFENVERMLKNAPVKRPNGDGEIHALSGLMYCKDCGTKMHIRTIHKNKKVQHVTYCSEYAKGKAKHPKCNSPHRIDVDEVMENIAEVLRKIAQYSLENKAEFEKLVKESLYKEQTEEVKKNQKRMPQITDRMEQIERVMNKLYEDNALGNMDTERYEQLSRKYAEEYYTLKAEKEEIKERLSECENANQRAKKFIRLAESYSNFEELTPTIINEFISKIVVHERDVKRAKYVVQRIEVYFNYIGKFKNELTKQIEPTEQEMLQMREEIEEAKKEKARAYRRAYYKEYRAKNLEKCREYEKLKAREYRAKKKLQRAT

SEQ ID NO: 19018 - protein, 553 aa, synthetic construct
MPTAAIYARKSKATDKGESLENQINRGKALCELREWDHVVYEDYDVSGKTLERPGFERMMKDIHNGKINYVVCYKLDRISRSVNDFSNLIEELNSIDIGFICIKDNFDTSTPMGRAMMYITSVFAQLERETIAERVKDNMIDRAKMGKWNGGPVPYGFDLLKETIENNGRNKKISKLVINNDEAAKIKEFYKWYLESDGSIRSNTTRANEKGYKTKNRTDWSHNQMSRILKNPLYCIADPEVYTYFKNNTDVQIINDKEDFNGTTNGLMYYNRRKSHKKTTRKRNKDEWILAIGEHHGIISGEIFKSVQEKLNFNKSRAPREGKSYISPLSGLVKCDRCDASMSVFGSNKSKKRYRYFRCITKEQKAKVLCDNSNVRADILEDLIVNHIIGLCDNKKLIQELIENGNNEIENNKLPLVAKRNKFYNKLDSIENEINNLASALGKGTLPELIIKKRYKELEKNKQDIKTRLNNIEYELNSSYEYSYDLESIIQYIKDFKNSYRYLHFNEKKKLLKSIVKEIRINRNIVKLELYFLPSQKYDSSSFCLRKDMDSY

SEQ ID NO: 19019 - protein, 617 aa, synthetic construct
MKEVHVIEARSDRINRRNSKKIERIRVAAYCRVSTDSEEQLLSYNSQVLHYRQLVQSNSEWELVEIYADEAISGTQINNRISFQKMINDALDDKIDLIITKSISRFARNTLDTLKYVRLLKKHNVAIFFEKENINTLTMNGEMLLVILSSLAQQESESISANVKMGLKMKMKRGEMTGFNGCLGYDYDPKQKILTVNEKEAEIIKYIFNRYISGMGCYVIAKELTKLKYKTKRGSTNWGESTVRGIIKNEKYKGDLLMGKTFTVDPITHRRLDNFGEEDKYYVKDHHEPIISKEVFEEAQRILAKRSPRKSMEKGLKREKYSRKYAFSSMMKCGFCGSTIGRRSWHGNNVTYRKIVWACITGTKKGKKYCNHFKSISEQALEAAFVDSFNLMCTNNKDVVVEFLKTVEESIGKSNLTKKLRKISEDIYKLENKLSKLVELNIDGIINKETYEAKYHDTTSEIEKLKDEQDQLGNAYEEQKELEKKMKSFRKVFDNNELLEKFDREIFENIIDKVVIGKVDESGIRNPYSVTFIFKTGLQLEEDCTVKKPNGIHGIKDETVYSYNGIDTCGDSCTTMSSQPLILLVFQQFCDFYSFSKNSENHPEKDLKRSIEIRIAI

SEQ ID NO: 19020 - protein, 452 aa, synthetic construct
MKAAIYIRVSTQEQIENYSIQAQTEKLTALCRSKDWDVYDIFIDGGYSGSNMNRPALNEMLSKLHEIDAVVVYRLDRLSRSQRDTITLIEEYFLKNNVEFVSLSETLDTSSPFGRAMIGILSVFAQLERETIRDRMVMGKIKRIEAGLPLTTAKGRTFGYDVIDTKLYINEEEAKQLQMIYDIFEEEKSITTLQKRLKKLGFKVKSYSSYNNWLTNDLYCGYVSYADKVHTKGVHEPIISEEQFYRVQEIFSRMGKNPNMNRDSASLLNNLVVCGKCGLGFVHRRKDTVSRGKKYHYRYYSCKTYKHTHELEKCGNKIWRADKLEKLIIDRVNNYSFASRNVDKEDELDNLNEKLKTEHTKKKRLFDLYISGSYEVSELDAMMADIDAQINYYEAQIEANEELKKNKKIQENLADLATVDFDSLEFREKQLYLKSLINKIYIDGEQVTIEWL

SEQ ID NO: 19021 - protein, 516 aa, synthetic construct
MAGKKVTVIPMKPRQWAAENTEEKPKLKVAAYCRVSTEMEEQASSYEAQVQHYTDYIQRNPDWELAGIFADEGISGTGTKKRDGFNRMIEECKKGDVEYIITKSISRFARNTVDCLQYIRQLKDLHIAVFFEKENINTMDAKGEVLLTIMASLAQQESQSLSQNTKMGVQYRFQQGQLRINHNHFLGYTKDEDGNLVIEPKEAEVIKRIFREYLEGSSLQEIANGLMSDGILTGGKRKLWRGEGVRLILRNEKYMGDALLQKTYTTDFLTKKRVKNDGSYAQQYYVENSHPAIIPRDIFMQVQQELDRRKSMKNKHSQCFSGKYALSGITVCGDCGNAYRRVHWKNRGTVWRCKSRVDKREHNCSGRTIYEKDLHEAIIKAINETLVDREYFLQQLSENINSVLTDGLTGRLEELDSKLKELESEIISMAIGGQGYDELATKILALRNERDMVEREIAADANMQQRIDEMGDFVKNHDTISEYSQVLVRRLIEKVTIFEKDIVVDFKSGVNIAIEI

SEQ ID NO: 19022 - protein, 452 aa, synthetic construct
MKAAIYIRVSTQEQVENYSIQAQTEKLTALCRSKDWDVYDIFIDGGYSGSNMNRPALNEMLSKLHEIDAVVVYRLDRLSRSQRDTITLIEEYFLKNNVEFVSLSETLDTSSPFGRAMIGILSVFAQLERETIRDRMVMGKIKRIEAGLPLTTAKGRTFGYDVIDTKLYINEEEAKQLQLIYDIFEEEQSITFLQKRLKKLGFKVRTYNRYNNWLTNDLYCGYVSYKDKVHVKGIHEPIISEEQFYRVQEIFTRMGKNPNMNRDSASLLNNLVVCSKCGLGFVHRRKDTMSRGKKYHYRYYSCKTYKHTHELEKCGNKIWRADKLEELIIDRVNNYSFASRNVDKEDELDSLSEKLKIEHVKKKRLFDLYISGSYEVSELDAMMADIDAQINYYEAQIEANEELKKNKQIQENLADLATVDFDSLEFREKQLYLKSLINKIYIDGEQVTIEWL

SEQ ID NO: 19023 - protein, 517 aa, synthetic construct
MKTIHKLARPQLPEPPKLKVAAYARVSTSSNEQLASLQTQITHYENHIQNNDQWEYVGVYYDEGISGTKVEKRDGLHRLIKDAELGKIDLILTKSISRFSRNTVDCLNLVRKLTDIGVTIFFEKENINTGDMESELLLSILSSLAESESYSHSENMKWANRKRMAKGIFKTVPPYGYQRKGADFYLIPDEAKVIEQIFKWALEGVSAYQVAKRLNEKNIFTRKGSKWQASGINNILHNIVYTGTMLHQRYFNDDQFRKKKNNGELPMYRIDNNHPPIISWEDYERVQELITLRANAKGTSKGSQKYSQRYAFTKRIICDKCGCNYKRVHTAGKGNTKVVKWSCTGHLKNKDGCDALPITDESLKTAYLTMLNKLILGHTIVLEPLINTPVEGKASKQELEKLSIEITKIDEKLEVLASLNASGVVSTKTSLEEQGRLQMELNKLQEKQHKIMESVNGTSTQRIQLEQLHQFTKRSEMLTEWDEDLFLRFAERIVVYSRQEVSFELKCGLLLKERLEA

SEQ ID NO: 19024 - protein, 516 aa, synthetic construct
MAGKKVTVIPMKPRQWAAENTEEKPKLKVAAYCRVSTEMEEQASSYEAQVQHYTDYIQRNPDWELAGIFADEGISGTGTKKRDGFNRMIEECKKGDVEYIITKSISRFARNTVDCLQYIRQLKDLHIAVFFEKENINTMDAKGEVLLTIMASLAQQESQSLSQNTKMGVQYRFQQGQLRINHNHFLGYTKDEDGNLVIEPKEAEVIKRIFREYLEGSSLQEIANGLMSDGILTGGKRKLWRGEGVRLILRNEKYMGDALLQKTYTTDFLTKKRVKNDGSYAQQYYVENSHPAIIPRDIFMQVQQELDRRKSMKNKHSQCFSGKYALSGITVCGDCGNAYRRVHWKNRGTVWRCKSRVDKREHNCSGRTIYEKDLHEAIIKAINETLVDREDFLQQLSENINSVLTDGLTGRLEELDSKLKELESEIISMAFGGQGYDELATKILALRNERDMVGREIAADANMQQRIDEMGDFVKNHDTISEYSEVLVRRLIEKVTIFEKDIVVDFKSGVNIAIEI

SEQ ID NO: 19025 - protein, 452 aa, synthetic construct
MKAAIYIRVSTQEQIENYSIQAQTEKLTALCRSKDWDVYDIFIDGGYSGSNMKRPALNEMLSKLHEIDAVVVYRLDRLSRSQRDTITLIEEYFLKNNVEFVSLSETLDTSSPFGRAMIGILSVFAQLERETIRDRMVMGKIKRIESGLPLTTAKGRTFGYDVVDTKLYINEEEAKQLQMIYDIFEEEKSITFLQKRLKKLGFKVKSYSSYNNWLTNDLYCGYVSYKDKVHTKGIHEPIISEEQFYRVQEIFSRMGKNPNMNKESASLLNNLVVCSKCGLSFVHRRKDTVSRGKKYHYRYYSCKTYKHTHELEKCGNKIWRADKLEELIIDRVNNYSFASRNVDKEDELDSLNEKLKTEHAKKKRLFDLYISGSYEVSELDGMMADIDAQINYYEAQIEANEELKKNKKIQENLADLATVDFDSLEFREKQLYLKSLINKIYIDGEQVTIEWL

SEQ ID NO: 19026 - protein, 655 aa, synthetic construct
MPSSLTSTPDPFTAMAAQLTPKRAVSYIRVSTREQAQRGGSEEGFSLPAQREANKRKAQSMGALVVKEFADRGESARSANRPELQKMLAYLKEDGGIDYVIVHKLDRLARNRADDVEINRAFEEAGVRLVSTSENIDQTPGGMLLHGIMSSIAEFYSRNLANEVMKGMGEKARNGGTLGKAPLGYLNVRARDENGREIRTIALDEERAPLIRLAFTEYATGQWTTKKLAAHLHSHGLTTVPTAHKPAKAVSGAQLHRMLRHPYYKGTISFQGVEYPGAHEPLVDEETWRHVQAMLDSHRFGERERQHNHHLKTTVYCGLCGARLLVQNTRNSKGDLYPYFICARRQRTHDCAFRAVLIDVVEERMSDLYRTIQLSSQDRQLVEQYVREELQHLERDKDRTIRSLTTRRTNIEDRRRRLLHAHYEGAIPLDLLKEEQTQLTAELDHIERQLTAYQVDITEVRQRLARALDLLEDCHRLYTAAPDHLKKLLNQVFFQRVLVNPAVDEDGRVILPEDGTNDDGGRNAADAAARDCPVGESDDGPLQHTTALRLLADASSDASLAADLRLPFDWLTSRRMHNVARRRSATLLQDNTQENRDNQVDCPITNTVCNNEALTSDGERFASSSTNPDRVTHDLGLGKAIVVPPVGLEPTTLRF

SEQ ID NO: 19027 - protein, 560 aa, synthetic construct
MTKLYSYIRFSSSRQADSSSYERQKRTAKEIADRYGLELVTSYQDLGVSAFKGANSKTGALSRFLDEIGKSVPVGSWLVVENLDRISRQSIIEAQELFLSIIRRGITIVTGMDGKVYSKESVNANPLDLLLSVMMFARANEESQTKRNRTNSSALLKIKAHQQNPQSPAVAIEEIGKNMWWTDTTSGYVLPHPVYFPILQKIVKMKQEGHSTGSVLDYLNEHHTPPAPTSNKQHRKWSIAMVSRLFKTKALIGVKEVNVDGVQYELKDYYPRVLSDSEYYFLKNNLIKKAWSFGHAQEKTIPLLSGIGLLKCAHCGSPMVKRKAANGKVEQYRYTCDGEGSGRTDCLYPNWGFRASSLEGAVLQLLADKVWIAEDKANPIPEIQVQIDEISRKIDNLINLSAMTGATKELANQITDLNTQREALHEEIRLFEREMYSVDSQGWEKLAQFDLSDVQNEERLQIRLKIKGALRSIECARVDRNKNLFVLVYLDGLRQRIVIENNRGIRKGQIFVDLKTINDRQILESAGMVLHDHIDILIDEKAFYDGLPKEEDGPLSKFGI

SEQ ID NO: 19028 - protein, 560 aa, synthetic construct
MTKLYSYIRFSSSRQADSSSYERQKRTAKEIADRYGLELVTSYQDLGVSAFKGANSKTGALSRFLDEIGKSVPVGSWLVVENLDRISRQSIIEAQELFLSIIRRGITIVTGMDGKVYSKESVNANPLDLLLSVMMFARANEESQTKRNRTNSSALIKIKAHQQNPQSPAVAIEEIGKNMWWTDTTSGYVLPHPVYFPILQKIVKMKQEGHSTGSVLDYLNEHHEPPAPTSNKQHRKWSIAMVSRLFKTKALIGVKEVTVDGVQYELKDYYPRVLNDSEYYFLKNNLIKKAWSFGHAQEKTIPLLSGIGLLKCVHCGSPMVKRKAANGKVEQYRYTCDGEGSGRTDCLYPNWGFRASSLEGAVLQLLADKVWIAEDKANPIPEIQVQIDEISRKIDNLINLSAMTGATKELANQITDLNTQREALHEEIRLFEREMYSVDSQGWEKLAQFDLSDVQNEERLQIRLKIKGALRSIECARIDRNKNLFVLVYLDGLRQRIVIENNRGIRKGQIFVDLKTINDRQILESAGMVLHDHIDILIDEKAFYDGLPKEEDGPLSKFGI

SEQ ID NO: 19029 - protein, 558 aa, synthetic construct
MTKLYSYIRFSSTRQADSSSFERQKRTAKEIAEKYGLELVTSYQDLGVSAFKGANSKTGALSRFMEEIGRSVPIGSWLVVENLDRLSRQSIIEAQELFLSIIRRGITIVTGMDGKVYSKESVNANPLDLLLSVMMFARANEESQTKRNRTNSSALLKIKAHQQNPQSPAVAIEEIGKNMWWTDTTSGRVLPHPVYFPVLQKIVQLRQEGHSAGVILDYLNEHHEPPAPTSNKKHGKWSRAMVSRLFNTKALIGVKTVNVDGVEYELRDYYPRVLSDSEFYFLRKNIVKKAWDYSHDKEKVIPLLSGIGVLRCVHCGATMVKQTAANGKREQYRYCCDGRKSGRTDCPYPNWGFRAVTLEGAVLQLLADKIWIAEDKTNPIPEIQVKIDEISRKIDNLINLSAMTGATKELANQITDLNSQREALHEEIRLFEREMYSVDSQGWDKLAQFDLSDVQNEERLKVRLKIKGALHEIECSRIDSKKNLFVLVYLDGLRQRLVIENNRGLKKGQIFVDLKTINDRQILESAGMVLHPCIEMIIDADWKAPEEIPGLLSEEFGI

SEQ ID NO: 19030 - protein, 589 aa, synthetic construct
MSAHVTILRNTVLPVKFNTMNRPRLYSYIRYSSERQGKGSSIERQKSYIAEMAKQIATEYDLEIFEEYQDLGVSAYKGKNVQEGALSDFIDQVESGLIPKGSFLLIESLDRFSRQNAMQAVNLFTSLLLNGITVITGIDKQVYRQTEVNTETLQQLMFSVMLFSRANEESSTKSHRTIASALSKIRRHQERKPGDPVVAIKELGSDKWWTDSSTGYVNPHPVLFPIAKKIIQLKQDGWSNRMILQHLKNNYDGPVIGNKKSKGIWNMQHCSRILEPAIYGRKVITVNNAEYVLDDYYPAIISKDEYEALKLQVGNKGFAPNRESNPEIPLLSGIGILHCAHCSCYMVKAKSTLKNHPHAYRYQCASRDLHQDCNKWGFRASTLERTILQLIADRIFLQTKYQPSGLEGKIADIQSQIENYVLAIGSAKSPEIINSLTSQIDQLEQEKQSLIVEKRLYDESIVQMNTEGWDKFRKFDIDDALNPLRTKIRANIKTVIMRVDCSRIDKKHNLFTITYRDQHKQRIVIENNSGWNKGKIYVEAQTINDIQILESEGLILHDHIDILINRDKFMTEAKKRLDHPRTLIDELTE

SEQ ID NO: 19031 - protein, 510 aa, synthetic construct
MALHENSRIAVYSRKSREDRDSEDTLAKHRNELEYLIKRENFKNVQWFEEVVSGETIDERPMFSLLLPRIENGEFDAVCAVAMDRLSRGSQIDSGRILEAFKQSGTLFITPKKTYDLSIEGDEMLSEFESIIARSEYRAIKRRTINGKKNATREGRLHSGSVPYGYKWDKNIKAAVVVEEKKKIYRMMIKWFLEEEHSCTVIAEMLNELKVPSPSGRSIWYGEVVSEILSNDFHRGYVWFGKYKKSKSSNSIVQNKNLDEVLIAKGHHETMKTDEEHALILNRIEKLRTYKVAGRRLNMNTHRLSGIVRCPYCHKAQAIEQPKGRKKHVRKCLRKSAERTKECEQTKGIHEEVLFQSIMKEIKKYNEALFSPTEQDVNDDSYTAQLIGLREKAVKKAKGRIERIKEMYLDGDISKTEYKEKLKISQETLQKAENDLAELIASTEFQNALSAETKKEKWSHHKVQEMIESTDGMSNSEINLILKMLISHVTYTVEDLGDGTKNVNIKVYYN

SEQ ID NO: 19032 - protein, 576 aa, synthetic construct
MKPKAYSYVRMSTDVQLKGDSLRRQTEESKRYCEENGLELVEDFKLQDIGVSAYRGKNVTQGELGRFLSLAENGMIPEGSFLIVESLDRISREKPQTAVALFLQILESGVDIVTLTDRRVYKSGSADVADILLSVVIMARAYEESRTKGLRVGAAWENKRNNIRETKLTQVAPAWLSLSEDRRTFNAIPERVAVLQAIFNNADNGKGSYQIARKLNLDKIPTFAPSKGWHESYVSKLLTNRAVLGEFQPHRYIEGKRTPAGEPITDYFPAVVSLDQFERIQAGRAVRKNRGSGRKGRNNVNLFSGVATCGYCNGRMMILDKGSGPKGGIYIRCENARRGNECLAAAWPLKHLETAFLTFVKELDLPSLIVDSSAKADRLIAEGRLAAISNELTKKKKMRESAFDLLSDESVGTDFVREKLADLASEIQRIEKEQVELKFQTMQEFARQDHSDLNIQKLVEAISAGPKENLDSRIGIADWIRRNVPKMMVYPDGHAGPQREIDRMASSLDPHVADLLNTSISFARRNEALVDGSHRRFVVGFGGHRFRAVEVDRNDPTKQIVMAFSNDENWGIERGG

SEQ ID NO: 19033 - protein, 434 aa, synthetic construct
MMHEKIGPHHLERKAILYVRQSSAHQVLHNRESSALQYAMRDRLAALGWSQIETVDDDLGRSAAGGVTRAGFDRMVAEVCLGKVGAVAAREVSRFARNSRDWQQLIEMCRVVDTVLIYQEAVYAPRQSNDRLLLGLKGSLNEYELDLLRQRSLSARYEKARRGELVVTVPVGFVKAGDRIEKDPDRRIQEAIALVFNKVAELGSARQALLWFLEQGLDLPVRYANGEVIWRRPNYATIHRMIANPIYGGAYAYGKSRSVPGYDGRSGMRRKARDEWLALIPDAHEGYISWERAEEIRKMVSDNAPASRHHGAPKHGDALLAGLFRCKRCGRKLTVRYTGNNHNIPRYSCWRGLLDNGEPRCIAFGGLRVDDAIEEALLGVVEPGAIAAAIEAERNMASQRDQVQDALLRDLEAARYATERAFRQYARLIRRIGW

SEQ ID NO: 19034 - protein, 566 aa, synthetic construct
MRAAALYRVSTKKQVKAEEDSIPVQQHLLREYAAERGWELVAEYIEPGVSAYKLSSIDRDILQDALRDAEAGKYDVLLVFKADRLSRNSFEYPMVLWRLYRAGVEVIAVADAPGGRKLNVDDQMEKLLRFIEGWQAETESKNTSIRVSQAMLDLARQGKWTGGRPPYGFRLSSSKNGLPLEIDPGEAEVLKEMVRLYLEEGVGSKKIAEILNSRGIRTREGKLWRDVRVRDVLQNPIIAGLPAYNRTRPGNTPTSRCKVRDRYDLNNPEIIIPRDEHGNPKPVEEYVIIPLETWLKVMQKMKASAQNQEPDARALDSPALLTGFLKCGYCGRGFISSRSTRAKVTRPNGKTYIYERASYRCVTHARIGKEFCPGQGSYSQRKIDAIFLNELKMFLSNLDLGNLEKYIDSRQQFTVMRLQKQIKQLEAELEKANRRLKNWVERLNQYFADPARSLYSEELMAAEIKRAQEEIALLERQIAGAKAELSACTYEREKLQQFARMAPRWFEIFVEAPVAVQKRMLAQIIDKVTLWKDRLEISYRVDLTQFARTTGEEGHGTVELRVAVSL

SEQ ID NO: 19035 - protein, 591 aa, synthetic construct
MSKRVLAIYARKSGSNKNDTSIEHQINGGLAYANKNGFDSIEYVDENISGTKGLDTFDVLDSNFSRVEFLDRPEFAQMIFDIKKEKINAIWVYNQDRIERSTNIWLMFATLVLDNKIDFIVNNQKINLNDPMTKMMSTIFSVFNEYYAMTTSLRVRPAHKTNAERGKTHGIVAYGYKRHPETGKYAINKTQEKIVKEIFNMYLQDSLGAYKIAKELNKRSIKTTYGAKNGIFKQKKNIHQVERKKEDTKWSGSSINGIIKNTIYKGYKYHGEVKVETPVIIEPEIWEKVNKILISNRSVGKRATYHYLLEDIIFCSHCGNILIGKKRLNSKESAYKCSTKQRDISICKKSRGLSIPKLETFIIKHLFENSALKEMLMEQPQDNNLIEETKDKINRANIKLSELKRKKANTLLLLDSGKLENPEEFVDLLNKVNRNISSTLNNIQLHTNRLDTLIQKKRRIEVKETIEGIASDYSFETLRRSVRKLVESIKLQYVDIDDKRYHNIYINYVGTKTTTMFRTNRSALNFDCIGIQKQQETIVEVSSELREMLSQSQTGSDMLEKYADTETDTFISVGHKLFNIQIEKDNLVLFD

SEQ ID NO: 19036 - protein, 498 aa, synthetic construct
MKAVIYARYSSDSQREESIEGQLRECTAFAEKNGITVLRHYIDRAYSAKTDNRPEFQNMIKDSGKRLFDIVIVWKLDRFARNRYDSARYKATLKKNGVKVVSATEIISEGTEGIILESVLEGYAEYYSADLSEKVVRGMTDNALKCKFNGGTMPIGYVIDAEQHFQIDPLTAPFVLEAFKRYDGGETISSIMNWLNEQGLTNTRGQKMTFNSVGHILHNRRYIGEFRYRDVVVPDGIPAIVPQDLFDRVQEKLVKNKKAPARHKAEDDYLLTTKLFCGYCGAYLCGESGTSRTGKVHHYYKCVSVKKKRTECHKKPVRKEWIEDLVVGETMKMVMDDKAIEAIVSMLMDLQDRDNVNVPLYEQQLREADTAISNLLNAIQQGILTRSTKERLEELENRRDELENRLACEKLAKPKVSAEFMTFWLHRFRKLDVRQQSHRKMLIDAFINAIFLYDDKMVITFNYKEGTKTITFAELQEAISNKNGSDLDCLAAPFHNPL

SEQ ID NO: 19037 - protein, 478 aa, synthetic construct
MESTLKMIRAAGYGRVSTEEQANEGHSLDAQREFNLKYIESEKWILAGYFEDPGCSGKNLNRPDVKRLIQEIKNKNLDALVVHKLDRLTRDIKDLYEMLQMFDEYNIKFVSISEKIDTDTAMGRMFVFMLGIFAQWYRENLSEEVTKGMRARAKKGIPNVFVNMFGYTRTPEGELIINEEEAKWITWIFEQYLNGNGSPTIAKELNNMNIRRTRGGRWSQTKVMDVLENQHYVGNITWKGKKDEEKDRVIKKGKHKGIIDQETFDRVQRWIQRRRDGLRSRNSYEYAFGGILRCGKCGGRYKGKYSISGGSITYNYVCSNKERYNTCDQSSISETKLVKMLFKSLDMDNQDLFWKDDVKESINSEEEQIRKAIKASEERRERWQMAYGDGFMPYQDFSKRMKEEMQRVVELEEKLDSLPGTVVSTLDPAEVINIMQDIKDNWWYLERSTQKQLIQELFQEITILKNGKEWGIKGIAFA

SEQ ID NO: 19038 - protein, 479 aa, synthetic construct
MAKAKTPGQRVGVGSAAIYARISADVEGTGLGVARQVQDCRKLAADRGWQVGDEYVDNDVSAYSGKPRREYARMLDDLKSGARDAVIVYNLDRLHRRPVELEEFVALCESVGVRDVATVTADIDLGNDDGLFMARIFAAFAAKESGRKSARIRRKMLQNAEQGLPHGSARPFGYEPDKITVCSKEAKVIREMVARYLAGASIRSLTIWLNDAGLAPAVAKSWQTTAVRQILASGRIAGLREHHGEVIGPAAWPAIITHAERDRILARMTARSVTKTRAPRTYLLSGLLRCGRCGNRLFSQARHNNPQNRVRRYVCLKGPDHGGCGRLTVVALPVEELLTDAVLTRLDSPHLANVLAGKASVDADVAALSAQLEADTTRLDELAALYAQGAVTAREWIAARDPITDRITATRRDIAAATDTTNVTELAGTGHLLRGQWDDLDIDRQQTIIKAVLDHAVIAAGTPGARSLDINRVRPHWGV

SEQ ID NO: 19039 - protein, 589 aa, synthetic construct
MSAHVTILRNTVLPVKFNTMNRPRLYSYIRYSSERQGKGSSIERQKSYIAEMAKQIATEYDLEIFEEYQDLGVSAYKGKNVQEGALSDFIDQVESGLIPKGSFLLIESLDRFSRQNAMQAVNLFTSLLLNGITVITGIDKQVYRQTEVNTETLQQLMFSVMLFSRANEESSTKSHRTIASALSKIRRHQERKPGDPVVAIKELGSDKWWTDSSTGYVNPHPVLFPIAKKIIQLKQDGWSNRMILQHLKNNYDGPVIGNKKSKGIWNMQHCSRILEPAIYGRKVITVNNAEYVLDDYYPAIISKDEYEALKLQVGNKGFAPNRESNPEIPLLSGIGILHCAHCSCYMVKAKSTLKNHPHAYRYQCASRDLHQDCNKWGFRASTLERTILQLIADRIFLQTKYQPSGLEGKIADIQSQIENYVLAIGSAKSPEIINSLTSQIDQLEQEKQSLIVEKRLYDESIVQMNTEGWDKFRKFDIDDALNHLRTKIRANIKTVIMRVDCSRIDKKHNLFTITYRDQHKQRIVIENNSGWKKGKIYVEAQTINDIQILESEGLILHDHIDILINRDKFMTEAKKRLDHPRTLIDELTE

SEQ ID NO: 19040 - protein, 514 aa, synthetic construct
MTMSKTRRPKAYSYIRFSTPEQMKGDSLRRQTAATALYAKTHGLDLDDKSFEDFGISAYRGANEETGRLGDFLEAIKHGDISKGSYLLVESLDRISRKTPRKAVRILEAICEAGITVVTLADQRVYTEETLDEDPMAIMYALMVAQRANEESAMKSRRLKQAWIGKRLNAATAPLTAICPAWLKLNDQRTAYDVIPERADVVRSIFAMCLEGLGQHSIATRLTETGIPTFKHSDMWHRSYVKKLLENPSVVGRFIPHTSSVVAGRKVRTPLEPVEGYFPAIVDVEVFEKVAAMSSRRGLNLSAGNTGTAAPANVLAGLAKCPTCGATMTRVNKGGRKGGKPYLVCTKAKAGAGCRYKQVKLEAIEEAVVSLGTYLHHLTPSPNAENEANYRDKLILAEVVEEQIQNLVEAVARGDTSKAVTKAITDHEAQLDHIRGELEELSQLAADAITNRIENTVADFCRLTEGGDIAKINATMRQLFDKAVVDYDAGYLRLYWRHTEQNPVEVLYTFVETA

SEQ ID NO: 19041 - protein, 520 aa, synthetic construct
MKKITKIEGNLANSFIKPKTRVVAYCRVSTDSNEQLVSLQAQKAHYETYIKANPEWEYAGLYYDEGISGTKKENRSDLLRMLSDCETGRIDLIITKSISRFARNTADCLEMVRKLIGLGVHIYFEKENINTGSMESELMLSILSGLAESESISISENTKWAIQRRFQNGIFKISYPPYGYQNNDGQMIVNPKQAEVVKYIFAEVLSGKGTQKVANDLNQKGIPSKRGGRWTATTIRGILTNEKYTGDVILQKTYTDSHFNRHTNYGEKDMYLVENHHEAIISHEDFKAVDAVLNQRAKEKSIEKRNSKYLNRYAFSSKIICSECGSTFKRRIHSSGRKYIAWCCSKHISQITECSMQFIRDDDIKTAFVTMMNKLIYGQKFILRPLLNGLRNQNNVASFRRIEELETKIENNMEQSQMLTGLMAKGYLEPALFNKEKNSLEAERERLLVEKDQLTRSVNGNFTKVEEVDRLLKFATKSQMLTAYEDELFENYVEKIMVFSREEVGFELKCGIELKERLVN

SEQ ID NO: 19042 - protein, 548 aa, synthetic construct
MENIIRVAIYARVSTEEQAEHGYSIDAQLDTLRNYCKMYEKIVVKEYVDRGVSGKSINGRYELQKLLRDAKNGEFDEVVVWKISRLARKTIDLLQIVDELSKHKVAFRSFSENFETETPMGKFALQMMGAVGELERNTIVDNVKMGMKQRARTGRWNGGIVLGYKSISRDSGGKGRESTRLVIVEEEAVIVRKIFNMYSQGKGLKAIANKVNHEGYKTKKGNAFSTATIKEIILNPVYIGKIRFNRYENWSERRRKGKNENIIIVDGKHEPIITNELWKKVQSLRQMKAKKSIKNYEGNFLLTGLMKCPKCGAAMVSSRTTNTLKDGTKKVLRYYSCGAFRSKGSAVCSANSIRADYAEQYVLQRIQEVVKHPKVLKELLHNINKQKKESIKPLKDELQVINKSIQSIENRKQKYFSLYEDSLLNQNMFTDRIQELKEEMERLSVRKSEIEFELGDGDEKILSYEYVKKLLVQLNVLLDAIPCDEKKVLYHLLIENIVVNDEKKIENIQLNINKEIQQELLKKPLSKEEMDRGFCISKNGRYSLRISI

SEQ ID NO: 19043 - protein, 514 aa, synthetic construct
MRAALYIRVSTQEQAEKGYSIQAQKHTLIEYCKSQGFNDYQVYVDEGISGTSTNKRIALQRLLEDAEQQHFQGVFVWKINRLVRNLVDLLSIVEHLEKYNVPLKSVSEQFETTTPQGRFILTMMGAVGQLERETIVDNTKLGRQQRNKEGWYCGAKILGYDVIAKKVCIQEELETNLKVNKREAAVVKEIFELFASGKGYKAIVNQLNKKGIRTKTGKLFTTGVVCKILKNQVYIGNIVCKIDEKVCVINGRHPVIISNELWEKVQQKRGDKKKGGIGPRRSYPLNSFLKCPICQKSMKGTRVVAKRKSGDKKAYDYYQCLGYLNGGIESCYPNLIPALEIELEVYKVLQNFLNQPTIVKDVFSRINEPSSKQKENMVLLNTVKLQLERLIKKKKKLLFHFEEGLVSSEDFLQEIERISEDITVVQDRIRSIEHELKRCKDATLSKVQVRNMLRNFVSLLNESNKKDMDKLFSSFLYQIEVSKEHKLKLVYLKINEYVIQVVEKKEGKQRWKIS

SEQ ID NO: 19044 - protein, 527 aa, synthetic construct
MSMNIFEDYALYLRKSRADMDAEARGEGETLKKHETALLAIAKKMNINISKIYREIVSGERVADRPEMQQLLQDVEDGKWAGVLVMEIERLARGDTMDQGFVAQAFKYSGTKIITPVKVYDPDNEFDEEYFEFGLFMSRREYKTINRRQQAGRIQSVKEGNYIGNTPPYGYNKIRLEDKSYSLTPNPEQAPIVKMIYDMYTTQNMGMGNIAKKLNLLGVPTARGSLWVVATISGILQNPVYNGEIVWNRRPEKKTRKDGQIQKKRPEVSEDLWIRVPGKHEAIITKETWDMAQRILKGRYHVPAPSGVITSSLAGLVRCSLCGRLMVRRPYSNQSEPSLICVTPLCKQISSQFILVEERILEGLRIWINQYKAKWDNNMPVETENTDELLNTKSLIVKDLEKTLGELRQQSSALHDLLERGVYSIEVFMERSQNLSERIADAENGLSAANEELNLERHRREAKAGIIPQVEHVLDVYDKIDDPSERNSLLKSVLQGTVYSKEKRGHWRKPETMREFDMRLYPKLPEQ

SEQ ID NO: 19045 - protein, 547 aa, synthetic construct
MKLLATYIRWSTREQDSGDSLRRQTNLIDAFYSKHKNDYYLLPAHRYVDKGKSGFHQQHKAQGSDFRRMFENVMSGAIPEGSLIVVENFDRFSRADIDTAIDDVRQILRKGVSILTLGDGELYDKSALTDPVKLIKHIIIAERAHQESLVKQKRIAQVWNHKTQLARELKKPMGKQAPGWLELSEDGSHYIVDEDKASLVNIIYDKRLSGMSMFAICKWLNEQGYPTINQRKVRISKTKKPDGNWSALSVKHILTSRSVLGYLPAKISSEDRKTVLREEIESFYPRIVTDSKFYAVQQLLEETGKGKTSSGDHWLYVNILKGIIRCKCGLVMTPTGIRKPAYQGTYRCNGNKESRCSYGTVSRKLLDTQLCSRLFSKLSQLHDEATDTAKLDELQRRLNTVDSELEKLTETLIQLPNITQIQEALRVKQEEKDELIVQLSREKARVKSVSSLDLSGLDMESVEGRTEAQIIIKRLVKEIVVSGNEKLVDIYLHNGNMIRGFPLDGKDDHTLTLEEATDEMQSLDDMLIFGEPVTRIYPAGDMEEVDA

SEQ ID NO: 19046 - protein, 491 aa, synthetic construct
MKQRAKRALVVVRLSRVTDETTSPLRQREACFELCEQRGYEVIGTAEDLDISAGKTSPFDRPQLGDWLTNRRGEFDVLVTFRMDRIVRRLLDLADLIRWCQSNSVSLVSATETFLDLDSAFGDIIALLVAKVAEMELAAISERNRSAAQHNMRQGKYRGGPPPWGYMPEKVDGDWRFVHDDEQVKVINEVVRRVLDGEPLRQVAADLTDRAVLTPRDRVNQLKGREIRGYSWHSAKIREMLTSKSLLGHAVTANGSIRNDDGSPIIRATPILERDVFEQVQVELAGRENRKEPTKRSSSLLLRVLYCGVCGKPAYKLKGGKGRQDRYRCASAQYKSTCGNGMVLVADANEVLTDAVMFELGDKYRRDRVWDAGSDYAAELAEIDDTLADLTDQLGTGAFRKGTRQRERLDARIADLAERQAQLAAQATRPAGWTWVPTTELFKDWWKSQTVEQLNLWLRSMDIQMWWNHQGIQTDMLHLEKMAEQWSPALS

SEQ ID NO: 19047 - protein, 507 aa, synthetic construct
MKRAISYIRFSSEKQSRGDSLRRQSKMVNDWLKAHPDYYLDQDLSFRDLGVSGFTGKHLKGGLGDFLTAIEKGLVKAGDTLLIESLDRLSRQNVDRASELLRNILRSGVDVVTLSDGEHYTRESLKDPLALIKSILIMQRAHEESLRKAERIQAAWNRKKELISEGIKISKRCPAWLRLNDDRKSFSVIPDKVETVKRCFQLRLEGKSIWEIVRTLNDEGHQSMSQYKPGSFGQTSVQDLLKNRSVIGYFTPKGCEEISGYYPAIIDETTFYKVQQLSHYRYGRKPVSDKPLSVNLFKGVIRCSECGHALIITGFSDTRNGIYRCPLRNENRCSAKGLSRKQTDGTLLTLLSRLDRFDSDMTNVIDTLKLHREHISNNIEKLVQLSLEIEDLSAITIKLKQLKGELSQVDADIEKETQRLKSIDVGCLSDCDLTTKAGRIEAQLIIKSAVKEVVLNTAKRRCKVTFHNGRAITLPITENPSEDVTEAIQSLSEVTERGLIDVDVVAI

SEQ ID NO: 19048 - protein, 547 aa, synthetic construct
MKLLVTYIRWSTREQDSGDSLRRQTNLIDAFYAKHKDDYYLLPAHRYVDKGKSGFHQQHKNQGSDFRRMFENVMSGAIPEGSLIVVENFDRFSRADIDTAIDDVRQILRKGVSILTLGDGELYDKSALTDPVKLIKHIIIAERAHQESLVKQKRIAQVWNHKTQLARELKKPMGKQAPGWLELSEDGSHYIVDEDKASLVNIIYDKRLSGMSMFAICKWLNEQGYPTINQRKVRISKTKKPDGNWSALSVKHILTSRSVLGYLPAKISTEDRKTVLREEIEGFYPQIVTDSKFYAVQQLLEETGKGKTSSGEHWLYVNILKGLIRCKCGLVMTPTGIRKPVYQGTYRCNGNKESRCSYGTVSRKLLDTQLCSRLFSKLSQLHDEATDTAKLDELQRRLNTVDGELEKLTETLIQLPNITQIQEALRVKQEEKDELIVQLSREKARVKSVSSLDLSGLDMESVEGRTEAQIIIKRLVKEIVVSGNEKLVDIYLHNGNMIRGFPLDGKDDHTLTLEEATDEMQPLDDMLIFGEPVTRIYPAGDMEEVDA

SEQ ID NO: 19049 - protein, 529 aa, synthetic construct
MKAVRVWCYARISTLKQVDGFGIQRQINTINQFLQCVELDHRLPFTLDVDNVTQMVAEGKSAFREKNWNEKTKLGQYRKMVMDGVIGDSVLIVENIDRLTRLDPYKAIEIISGMINRGTTILEVETGMTYSRYIPESITVLVMQINRANSESKRKSIMMQKSHANRYGKVSKVRPRWFDVVEIDGIKQYRPNETAKAIQRMYNDYINGIGAAHIVRTYGNTDNGKAWTLVTVLRALSDKRVADDARYPPIIDKKLYDSVQALKAATNKKGNTHQKNMLNIFSGMSRCPVCNQSIIVKRNSHGNLFTVCLGKRTNKTCEARSIAYFALERPLLTAIRGLDFSEVYKHEDKNVLTLRDQWIQNERDIAEFRERLNKASRYEKFAILDELEIMNREQEELTIRLKSVDVPKDIQLTFDDDKLDLDTNYRIELNNRIKKLIQHINIVREDVSKSSYIIYCTIKYWTDVISHLVIIDVDIKRTGSGGTNTLTTTLKSVSSLNMDGTISGNPDSYAWEYWKSFLDSAIGLVDSND

SEQ ID NO: 19050 - protein, 507 aa, synthetic construct
MKRVISYIRFSSERQAKGDSLRRQSKMVNDWLKAHPEYYLDQDLSFRDLGVSGFTGKHLKGGLGDFLTAIEKGLVKAGDTLLIESLDRLSRQAIDIASELLRRILRAGVDIVTLSDGEHYTRESLKDPLSLIKSILIMQRSHEESLRKSERIQAAWNRKKELISEGIKISKRCPAWLKLNDDRKSFSVIPEKVETVKRCFQLRLEGKSIWEIVRTLNAEGRQTLNQHKAGSFGQTSVQDLLKNRSVIGYFTPKGCEEISGYYPAIIDETTFYKVQQLSYARYGRKPASDKPMAVNLFKGVIRCSECGHALIITGFSDTRNGIYRCPLRNENRCSAKGLSRKQTDGTLLALLSRLDRFDSDMTNVIDTLKLHREHISSNIEKLVQLSLEIEDLNAITNKLKQLKNELSQVDADIEKETQRLKSIDTGSLSDCDLSTKAGRIEAQLIIRSAVKEVVLNTAKRRCKVTFHNGKAITLPITENPSEDVTEAIQSLSEVTERGLIDVDEVII

SEQ ID NO: 19051 - protein, 547 aa, synthetic construct
MKLLVTYIRWSTKEQDSGDSLRRQTNLIDAFYSKHKNDYYLLPAHRYVDKGKSGFHQQHKAQGSDFRRMFENVMSGAIPEGSLIVVENFDRFSRADIDTAIDDVRQILRKGVSILTLGDGELYDKSALTDPVKLIKHIIIAERAHQESLVKQKRIAQVWNHKTQLARELKKPMGKQAPGWLELSEDGSHYIVDEDKASLVNIIYDKRLSGMSMFAICKWLNEQGYPTINQRKVRISKTKKPDGNWSALSVKHILTSRSVLGYLPAKISTEDRKTVLREEIEGFYPQIVTDSKFYAVQQLLEETGKGKTSSGEHWLYVNILKGLIRCKCGLVMTPTGIRKPVYQGTYRCNGNKESRCSYGTVSRKLLDTQLCSRLFSKLSQLHDEATDTAKLDELQRRLNTVDSELEKLTETLIQLPNITQIQEALRVKQEEKDELIVQLSREKARVKSVSSLDLSGLDMESVEGRTEAQIIIKRLVKEIVVSGNEKLVDIYLHNGNMIRGFPLDGKDDHTLTLEEATDEMQSLDDMLIFGEPVTRIYPAGDMEEVDA

SEQ ID NO: 19052 - protein, 375 aa, synthetic construct
MKKAIAYMRFSSPGQMSGDSLNRQRRLIAEWLKVNSDYYLDTITYEDLGLSAFKGKHAQSGAFSEFLDAIEHGYILPGTTLLVESLDRLSREKVGEAIERLKLILNHGIDVITLCDNTVYNIDSLNEPYSLIKAILIAQRANEESEIKSSRVKLSWKKKRQDALESGTIMTASCPRWLSLDDKRTAFVPDPDRVKTIELIFKLRMERRSLNAIAKYLNDHAVKNFSGKESAWGPSVIEKLLANKALIGICVPSYRARGKGISEIAGYYPRVISDDLFYAVQEIRLAPFGISNSSKNPMLINLLRTVMKCEACGNTMIVHAVSGSLHGYYVCPMRRLHRCDRPSIKRDLVDYNIINEFLIVAKFNQLKTRKMLMKL

SEQ ID NO: 19053 - protein, 491 aa, synthetic construct
MKQQAKRALVVVRLSRVTDETTSPLRQREACFELCEQRGYEVIGTAEDLDISAGKTSPFDRPQLGDWLTNRRGEFDVLVTFRMDRIVRRLLDLADLIRWCQSNSVSLVSATETFLDLDSAFGDIIALLVAKVAEMELAAISERNRSAAQHNMRQGKYRGGPPPWGYMPEKVDGDWRFVHDDEQVKVINEVVRRVLDGEPLRQVAADLTDRAVLTPRDRVNQLKGREIRGYSWHSAKIREMLTSKSLLGHAVTANGSIRNDDGSPIIRATPILERDVFEQVQVELAGRENRKEPTKRSSSLLLRVLYCGVCGKPAYKLKGGKGRQDRYRCASAQYKSTCGNGMVLVADANEVLTDAVMFELGDKYRRDRVWDAGSDYAAELAEIDDTLADLTDQLGTGAFRKGTRQRERLDARIADLAERQAQLAAQATRPAGWTWVPTTELFKDWWKSQTVEQLNLWLRSMDIQMWWNHQGIQTDMLHLEKMAEQWSPALS

SEQ ID NO: 19054 - protein, 560 aa, synthetic construct
MTKLYSYIRFSSMRQGEGSSYERQIKMAKEIADRYGLELVNDYQDLGVSAFKGANSKTGALSRFLDEIGRSIPVGSWLFIENLDRLSRQDIISAQELFLSIIRRGITIVTGMDNKIYSIETVTANPMDLMFSILLFIRGNEESQTKRNRTNSSALLKIKAHQQNPQSPAVAIEEIGKNMWWTDTTSGYVLPHPVYFPILQKIVKMKQEGHSTGSVLDYLNEHHEPPAPTSNKQHRKWSIAMVSRLFKTKALIGVKEVTVDGVQYELKDYYPRVLNDSEYYFLKNNLIKKAWSFGHAQEKTIPLLSGIGLLKCAHCGSPMVKRKAANGKVEQYRYTCDGEGSGRTDCLYPNWGFRASSLEGAVLQLLADKVWIAEDKANPIPEIQVQIDEISRKIDNLINLSAMTGATKELANQITDLNTQREALHEEIRLFEREMYSVDSQGWEKLAQFDLSDVQNEERLQIRLKIKGALRSIECARIDRNKNLFVLVYLDGLRQRIVIENNRGIRKGQIFVDLKTINDRQILESAGMVLHDHIDILIDEKAFYDGLPKEEDGPLSKFGI

SEQ ID NO: 19055 - protein, 517 aa, synthetic construct
MTQQAVIYCRVSSPKQVTEGHGLASQETRCREYAKHKGYEVVEVFHDEGITGKLLDRPNMKAMLTYLKKNRAANPIVIIDDISRLARDIETHLRLRASIAAAGGKLESPSIAFGDDSDSRLIEHLLASVAAHQREKNAEQVLNRMKARMMSGHFVFNAPVGYRYDKVGKHGKLLVPDQPCASVITEGLEGFASGRFESQVELMRFFHSSPHFPKDRFGTVHMQRIKEILNRVLYAGYLDKPDWNIHLVKGHHEALISFETYQKIQARLKGEAKAPVRKDIREDFPLRGFVACACCGTPLTACWSRGRNGLHAYYLCHGKPNGIKCIQYGKSIRKVKLEGEFEALLSEMKPSKDMFFLAAELFADLWNVRRNDAKQETETIRRNLIQIERKTEQFLDRIAEADNSILITAYEKKIRKLEEEKIELDEKIAKCGRPLQSFDETFRTAFSFLSNPHKLWVSDRLEHRRAVLKLAFSERLRYCRNEGFRTPEKSLPFSLLEQNSVGKDGMVLLRGVEPPTY

SEQ ID NO: 19056 - protein, 503 aa, synthetic construct
MNNRIDAIYARQSVDKKDSISIESQIEFCKYELKGGNCKEYTDKGYSGKNTDRPKFQELVRDIKRGLIAKVVVYKLDRISRSILDFANMMELFQQYNVEFVSSTEKFDTSTPMGRAMLNICIVFAQLERETIQKRVTDAYYSRSQRGFKMGGKAPYGFHTEPIKMEGINTKKLVVTPEEAANIRLMFEMYADPATSYGDITRYFAEQGILFYGKELIRPTLAQMLRNPVYVQADLDVYEFFKSQGTVLVNDATDFTGMNGCYLYQGRDVKPDKLHNLKDQMLVLAPHEGIVPSETWLACRKKLMNNMKIQSARKATHTWLAGKIKCGNCGYALMSIVNRVGRQYLRCTKRLDNKSCVGCGKIYTAELETVVYQLMVKKLESHKTLTGRKKAAKANPKIAALQVELAHVDGEIEKLVDSLTGANNVLLSYVNVKIAELDGRKQELVKRIADLTVEAISPEQVSQISGYLDTWDSVSFDDKRRVVDLMITTIAATSDSLNITWKI

SEQ ID NO: 19057 - protein, 415 aa, synthetic construct
MEQTVQRRVRIIPAKRDTDTPQPGKKKHQRVAAYCRVSTDSEEQITSYEAQKAYYTQKIEENPDWELAGIFADKGLSGTSMKKRENFNKMIAACKRGKIDTILTKSLSRFARNTVDCLETVRMLKAHGIGVIFEKENINTLTESSEFLITLFSGFAQAESESLSKNIIWGKEESKKAGKVPFQYKKLLGYRKGLDGKPEIEPQEAETVRRIYRRYLDGCSLSQIQQELEADRVPTAQAVQRWSYQVIRNILTNERYIGDAMLGKTFITDCISKRVKKNNGERGQSYVENNHPAIIPRELFYRVQEEMTRRASKRKVMQKTGKTELGKYSAKYALSELLVCGECGTPYKRVTWARNGKKRIVWRCISRLEFGTKYCHNSPTLDEEKLHQAIQEAINEFAQAGTEVKSANKKSIGKC

SEQ ID NO: 19058 - protein, 566 aa, synthetic construct
MINQQILEKTKNDVFQNTVISSAVQIKRVAIYARVSTTEQAEEGYSIDEQERLLSDWCTNNGYIIHQVYADRGISGKSIKKRPALKQMLSDARNQLFDIVLVWKTNRLARNILDLLKIVEVFNQNYISFRSFTENHETETSSGKFQFHMMAAIAEFERNTISENVKMGMLARAREGKWNGGQVLGYDLEEMSSHGNKRKHTKLVINEKEAQTVRRIFELYISGNGYKAIANCINKEGHRGKKGRPFSINTIKTILENPVYIGVIRYNVRRNWTDKRRGDINPSPIFQKGEHDAIISQVNWEKAQQILKQRSHKPNRVHGGTFPFTGILRCPKCGAGMVVSRTVNTLKNGTKKTIEYYACGAWKNKGTSVCNSNTIRADKAEAYIFERLQQLATNEQLIQDIVETVNGKRSNNDEPIKREFATLAKELEQLQRKKERAMEMFEDDLITKVELQQRLNKTNELIDQVELRLQPIKLQIQSLKTHTIDETLIKEVMGNFHKVFKQSITQEQQKHLVTLLIKEITINEEREIDSIQIQFNNAVLNYFTEKGADKSLGDDLSAPFLITFTI

SEQ ID NO: 19059 - protein, 575 aa, synthetic construct
MTTLAYRYHRFSTKSQDRGSSIERQDEVTLAMVKANGWTLAPGGPIEDRGRSAWKGDHLRSGGLGEFKARIDAGEIVPGSILVIENLDRLSRENVRKARRWIEEVTEAGIRVAVANLNKIFDENSLSGENIVDLIQYLLEAQRSNAESQRKSDMRAKVNANQIEKAQRGEIYSPRGPAWLIDINGKWAPNPERAAVVEQIYEWSASGLGYASICQRLNQMVPAWTRGWKSEKSEWKIGYVRDILTTHMVEGEYHRKAVGEDRDEIILGYYPRIVSADLVERARAAKIARRGTGGRSAAEARNLFAGRTVCAECNGAMEKVVNGNGRGRKYYYFLCRGARSGTCVNRLQYRYDIFEAAALEQMLHLSLDDTHFSKVEETAPLLARVADLRKEREQAQAKVNNLLDLIEAGSGSANLGGRLDAREAELAGLDQALAAAETELELARGKVSDEDHLKRVKEVREAMDSDDEDERQQARRLVRTAVQGLVERIVFARKKVSGGKYERRIIMTLVGLHTVLWFDGAGNVVRVRDHIDDYRNDPTNPLSRMMLLASGKDADTVGRSLNSQAERAAKTTVDS

SEQ ID NO: 19060 - protein, 514 aa, synthetic construct
MNVTAKAKVAAVYARFSSELQLDRSIEDQISLCRSFADRQGYEIGEIFSDRARSGASLFGRDGLLLLLERAKSRTFDVVVVEALDRLSRDQEDLAAIFKRLQFIGIDIIAVHDGKADAVQIGIRGLVGSLYLTDLANKVRRGLSGRVKEGLSAGGKAYGYKPVLGKPGELSIDPDEAAIVKRIFAEFAAGNNPRAIAYGLNREEVPPPRGAVWNASTIYGSPTRLNGILRNPIYSGRMVWNRLRMVRDPDTGKRISRMNPESEWHVVDVPNLRIVDPETAEEVNARLRGMKPRGGSQSRNKRILSGLLRCGECGSGMTIDGKTNGHQRLRCSRSRESGTCGHKRRYQLSAIETAVVRGLAERLDNPATVALYVETYLEERRRLTPENATGRNRIKRELAKRKRELERLLDAYLQELVSIEQFATRRPPLDAAVADLTRLLSVEVAGAADFRAAAAVAHETAVRHLADRLTVADPRGECMGEFRRLIDAVVIFPSAPFKPVQVGLVGILAAILGL

SEQ ID NO: 19061 - protein, 519 aa, synthetic construct
MKKVTKIDKVQNAPSQKEKIRVAAYCRVSTSNEAQLESLETQKSHYENYINSRSDWELAGIYFDEGITGTKKDKRPELLHLIKDCEANRIDFIITKSISRFSRSTTDCLELVRKLLNLNIPIYFEKENINTGSMESELFLTILSSMAEDESASISENKKWSNRKQFRDGTFKTMCPPYGYCYNDGTMCIFPEQAKVVKRIFSDVLSGKGTTAIAKELNNDGIPSKQGKKWNQTAVKKILSNEAYIGDAIFQKTYTDEYFNRHINNGEKEMYYIQNHHEAIISKEDFKSASAIISQHATEKNISSNDNKYRNRYAFSGKIICSECGNTFKRRLHTNTYSKYCAWCCNTHLVDKSKCSMLYLRDDDLKIAFATVLNKLIYGHNLILKPYVEALKNISGNKDFARIQHLEQLIKQNKEQQEVLTKLLCQGYIDQVLFTNETNSLLAQSGKYKKDIDAINSTINGDNSRHYEAEKLLYFTEHNTMIKEYSENLFERFVDHIIVYSRHLVGFVMKCGLTFKEVI

SEQ ID NO: 19062 - protein, 552 aa, synthetic construct
MLRATEKITALYCRLSVEDLKDDKNGGKGDVSNSIQNQKDILLRYAKEHRFPNPTFFIDDGYSGTNYDRPGFQQMLSEIEAGKVAVVLSKDLSRLGRNSSLTGLYINFTFPKYGVRYIAINDHFDTIDPNSTDNDVAGIKNWFNEFFAKDTSRKIRAVQKAKGEQGIPLTTNVPFGYRKDPEDRTKWVVDEAAAFVVKRIFKLCMEGRGPMQIAKLLQAEQVLNPTAYKRREGINTPSPETADPYHWNPNTVVHILERREYTGCTVNFKTYTNSIWDKKQRETPIEKQAVFYNTHPAIIEQEVFDKVQEIRKQRHRRTKTGKSSLFSGMVYCADCGAKMRYCTTNYFEKRQDHFVCASYRSNTGTCSAHFIRAVVLEELVWMHMKTVISYVTRHEAHFRAVMEHRLRLSSEEAVRGHKKRLAQAERRLGELDRLFIRIYEDNVAGKLSDERFALMSKTYEDEQAQLKVEIQTLQQEIEVQERQIENLEQFIQRVHKYEDLQEMTPYALRELVKGIYIEAPDKSSGKRRQGIRISYDLVGFIPVEELMKQETA

SEQ ID NO: 19063 - protein, 513 aa, synthetic construct
MPQVKLISPITRQEIRKIRVAAYCRVSSNSADQQNSYANQIRVYTSLIQRKKEWELVEIFADEGLSGMNAQNRTEFQRMIKMCEQHQIDLIVTKSVSRFARNAKESLEYVRKLKLLGVGVQFEKEGIYTLALGDEMLLNTFSAIAQEESKAISQNQRLSIVKRMQSGEYVDSNAPYGFRLVDKALVVYEPEAAIVRMMFENYLSGQSTSEIARDLNSRGIKTKTGKSTWRSTKVAYILGNERYCGDCKYQKTYRDTTVPFKQFRNRGQEDMFYASMTHAPLIDRDTFDKVQLLLKKRQDVFGKSTTQNIYPLTSRIQCSECGSYFRRRQVSGTVKWGCSKHIQDRTQCGSNYYSEERIYDAFIAMVNKLRFSEYDILGQTLLRLESAELKRKQKNTAAREISRNIADLNAKLVMVEQLHAKGYLKDEVHKAQVREINDQLRRLKRERQCEFSSGITHMIEELTRLKKLLEELEEPLDRFDEKLFTEIVQAISISRRDEMTVTLIGGLRFTEML

SEQ ID NO: 19064 - protein, 547 aa, synthetic construct
MNVTKIPKKTISVIEPKRSLIVNREQYHQRRVAAYCRVSTDSEEQLTSYTNQKKVYTEMIAAKPEWEFAGLYADEGISGTRADKRPQFQKMINDCLSGKIDYIITKSVSRFARNTVDCLDHVRMLRARGIGIYFEEQNIDTLQIDSELYLVIYAGFAQSESESISKNVTWTFRKRFQEGKPIFNYKCLLGYRKGADGEPEIVPEEASIVERIFNMYLSGETINRISTKLREENLQIPGKRFSFSASMIKGILRNERYCGDSILQKTVTIDCIGKVRRKNTGEAPMYYVQNSHVGIISRELFLKTQEELARRMSREPNSTKTATTATGKYSRYALSNVMICAECGSRYKRVTWTSRGKKRVVWRCISRLDYGKRYCKTSLTVDETALHAAIVRAINRFNEEDESTYMALMRATIGEAIGLTGGTDEIDLLRRKIDGLNRKMVSLINESVESGEGIESHEAEFKELSDTIELLQGRIQKLEEALASDQVNDSRILQLQQIIADRASKKMEYDDTIVHQMIECVKVYPDGRLDIIFGGGYLIEERPEKES

SEQ ID NO: 19065 - protein, 597 aa, synthetic construct
MPKKRGSNEEFLNPGARRFRPPEVMPRKLKAAIYVRVSTRYQVDKDSLPFQKEELINYIKYALNIEDYEIFEDAGYSAKNTSRPKFQEMMSRIRNNEFTHLVVYKIDRISRNLLDFAQMYEELQKHNCSFVSKVEQFDTSTAMGEAMTRIVLVFAELERKMTGERVTAIMFSRAEKGLWNGAPIPIGYKWSEEKKYPVVDPEEAKIVRYIFDRYISLESALKVSYDLAANSVKTKRGGEWTSKTVRDVIRNPFYKGTYRYNHKTQAGTEKPLSEQIIIECNHEPIISEEVWSRANAIMDTNAERSVAHLRNNIRYTHIFSKMLKCWYCGMTMGAGLDRPRSDGYRPSKYYCTSHNRKQGCPNRYISDIIIGPFVLNYLANMVQAAQNVSKRTRVDTLEKMLLRGKFFSNVDHIEREGLLTTFNNMVYGVARADFDPKKGQQDEPNNAELDLLASEREKYIRALDRLQSLYLFSDDGISEKDYIVQKGELEDKLESVNRRIAEIQGEAPEDDADLLQKATRFYIQNELVKKRSLDFKKAVSVFDKESLKDFFSSVIDTMTVKDGRVKAIRFKNGLTNVFVYKDETGPEEHESTVEASE

SEQ ID NO: 19066 - protein, 548 aa, synthetic construct
MAIIKGAASKAVIYTRVSTEQQGEGTSLDSQFIACRAKAEQLGASVVASFQDMESGASYRSRHGLQSALTAIENGEADTLIIYDMSRYSRDSEHQQQILKRVQITGGRLAFCTLEVGDLSTPEQRLNFGMTGMFAEYERLKIRERTMTGREAKAKKGEQVGRSSSAFGYHVVTKTDVLRGEYPADQIGKYIILEAESKLAIEIFKRASEGNSLRGIAAWLMDQGVLAPQGGIEWSPSSVRAILKNPVYKGVGGYSKTITTRVENAKGGKSRVTRPNPNPITFEAPALVSVEMWDLCQRRMVDNKTLSSGPRARKWLLSGLIFCPLCGGSMTARLYGIGSRKMRLKPSSEWTHEERLNNATYKCSRSFMPLDKERRCPGTKIKAATVETEVLIRVAEYITNPRVMEDYWRERHAQESKPSSSGNITDWKRELKELQALEEATVDAQIQAVGLGVPTAIYTRKLEGIAHRRQELERQINQHHQGQRKTKSLKEMPKQNFGGDVEKILLGPPEQIPVLKKREILLQFVEKVIPNFNETKAIEIVFRPYSDT

SEQ ID NO: 19067 - protein, 536 aa, synthetic construct
MLRQTNQQPITALYPRLSHEDELQGESNSISNQKRILETYAKQNGFSNLRWYTDDGYSGANFQRPGFQAMLADIEAGKVGTVIVKDMSRLGRNYLQVGMYTEMVFPQKGVRFIAINDGVDSAQGDNDFAPLRNIFNEWLVRDTSKKIKAVKRSKGMSGKPITSKPVYGYLMDEDENFIIDEEAAPVVKQIYNLCLAGNGPTKIARMLTEQQIPTPGTLEYRRTGSTRRYHPGYECKWATNTVVHILENREYTGCLVNFKTEKLSYKVKHSVENPPEKQVIFENHHEPIIDTQTWERVQELRKQRKRPNRYDEVGLFSGILFCADCGSVMYQQRYQTDKRKQDCYICGNYKKRTHDCTAHFIRTDLLTAGVLSNLRKVTSYAAKHEARFMKLLIEQNEDGGKRRNAAKKKELEAAEKRIAELSAIFKRLYEDSVTGRISDERFTELSADYEAEQQELKERAAAIQAELSKAQEATVNAEKFMNVVRRHTSFEELTPTLLREFVEKIVVHECSYDENKTRRQDIEIYYSFVGKVDLPE

SEQ ID NO: 19068 - protein, 663 aa, synthetic construct
MPDALAPDPFTAMAAQLTPKRAVSYIRVSTREQAQRGGSEEGFSLPAQREANKRKAQSMGALVVKEFADRGESARSANRPELQKMLAYLKEDGGIDYVIVHKLDRLARNRADDVEINRAFEEAGVRLVSTSENIDQTPGGMLLHGIMSSIAEFYSRNLANEVIKGMGEKARNGGTLGKAPLGYLNVRARDENDREVRTIALDEERAPLIRLAFTEYATGQWTTKRLAAHLHDRGLTTVPTARKPAKAVTGAQLHRMLRHPYYKGTISFQGVEYPGAHEPLVDEETWRHVQAMLDSHRFGERERRHNHHLKTTVYCGLCGARLLVQNTRNSKGDLYPYFICAKRQRTHDCAFRAVLIDVVEERMSDLYRTIQLSSQDRQLVEQYVREELRRLERDKDRTIRSLTTRRTNIEDKRRRLMHAHYEGAVPLELLKEEQTQLTAELNQIERQLTAYQADITKVRQRLAQALDLLEDCHRLYQAAPPHLKKLLNQVFFERVLVNPAVDEDGRVVLPEDGTNDDRHRTMTDAAAGDCPIGESDEPLQHATAPLLLADASSDASLVADLRQPFDWLTSRLMHNVAHHHRATLLQANRQENWDNQLDCPVTNTVSNDEALTSGGERFVSSSTNPDRVTHDLGLGKAIVVPPLGFEPRTLCLSGTTRGISSLL

SEQ ID NO: 19069 - protein, 498 aa, synthetic construct
MRYGEYLRKSRMDDPHEPLEETLRRHREILKKFAVEHNIPIAEKDIYEEVVSGDSLYARPQMLRLLEDVAAGKFDGILCMDIQRLGRGSMSDQGIILEAFKSSGTKIITPVKTYDLNDESDETYTEFEAFMGRQELKMIKRRLRRGLKKTIEDGGYVANAPYGYDKTKIGKRPTLKINEEEAKFVRLMFDLYANKSMGCQQIADVMNGMGAKPHRAAQFGRTAIRQILTSPVYLGKIVWDRVTYIHPGMQGSTKHGKIYNPKESWTVVDGLHPAIIDEDTFCRVQEIFANRYHSPSFKGYVENPLAGLVICSNCGAAMQRQMCKGGPILLCQKRGCIVSSRLALVEQEVLRRLREEIGNLSAMQAVPVDEDDHAEEVLKSIEREIRTAKQQDSRLHDLLEQGVYDADTFLARHQILLERIEKLKDSKLPFLQPKKQLNIPAMQMRIQDVLDHYPNASGAAKNEMLKSVIEHIDYRKRKGAKPAEFELDIYFLPLYVAT

SEQ ID NO: 19070 - protein, 509 aa, synthetic construct
MIAALYIRVSTADQAEKGYSLETQLSENRQKASELGATRFVEFIDDGYSGEYIDRPALSQLRDGLERKEFDMVVIYDPDRLARNLAHQLIITDEIEKSGAKLLFVSVTFEESPEGKLFYSMRGAISAYEKEKIKERTTRGKKGKARQGKLVNNGRCFGYDYDKVNSMYIINEAQAAIVRQIFDLCIKDKLGTALISKKLNNEFIPAPRGNQWIVSSIHRILTNTAYRGVIYSMKQKSTKTGFSTRRIELRPESDWIPIKVPAIVDEITWRTAQKQLQSNKNFAKRNLKYDHLLTGLVYCARCGKKMSIKHSGNSSDPISYYTCLTQVSTSYIYLENDKCTARRIPTLILDELVWSKLCELAENTKLITQYTQDASNPTATATIKNTLTKLKETEKKINTQKETILRWFRQHIINGGDAEKQLDEISKQLIDIEITKKSLENELTFLAPQTSLADIAINIKKHFKDTQYYKDDERRVAIRAVLDKVVVERIDTTFARNSKPEFTVNLKFL

SEQ ID NO: 19071 - protein, 526 aa, synthetic construct
MLNIAVYCRVSSEDQQERGTIENQIEFATKYCDLHQLNIVKWYKDDGISGTLPFESRPEASIMLQDAQEKKFDTLLFYRLDRFGRSARTILNGVHTLEQYGIKIKSMTEPFDTGDPSGRFLLTILAGVADLERSNILDRLWHGTNRAARNGKWLGGICPYGYRVDDEGFLTVSDTPLPGFDMSEADVVQMIYRLTTEQHMSTIKIADYLNALGIPPKYAIEGRKIAKGKRKENTSGHWLPGRVRNMIVQETYKGIHFFGKRSKKVREVIKREVPAIVDEDSWDKAQLVLKDNQLEAVRFTKYSYLLKSLVKCSLCGLNFSGTGYSGVNGQRTAYYVCNGKTSYRGKYMGKCVAKNVAANWLDEKVWNDCVNFINNPGQLLTDLSPDEQELLLITSSLSQKDTEKQSILDLYRKQLITSKDVEDQLSKIAIERSALEYRQKELKNALLTTNDEDYRKKDALMLLGDLKEKLTGQITYETKRNIIKQLVREVVVCTTHSDNRDAPEVKVHIKFVFPQIVPCTDKDSLP

SEQ ID NO: 19072 - protein, 470 aa, synthetic construct
MRGVFIINVIYARVSTEEQKTGYSIDAQLKSAKDRYASMGITDVVNFVDDGYSGEFIERPALDRLRQSIRDKTVSRIMFYDPDRMSRNLTVQLILADEIEKAGIELLFVTGDYDASPEGRLFFSMKGAISAYEKAKIRERTMSGKRAKARKGKLTFNDRALGYDYDYTICNYIINEEEAKTVKLIYDIYLSENLGTISLAIKLKAMGIKSKKGKDFSGGTVYRILKNEMYAGTKQAFKIYEKKISQYKTQKIARDPSEWIPIEVPAIVTRDQWERVQERLIENKLLAARKVKHDYLLRGKIICGHCGYAMIGITSNKKNNTYHYYSCSSKNVYKRPCDSRLLRSDEYDELVWDELVYIAENNIEITDKKTEIVDNEKIKKHIDTLRQRQSALTKWVTDGTIEIEAADQQLQTIKKEIDISQSMLKEKQPKKTTFNPAAILEAITFEQKRKAILDSGLKFILKKGDIVIDY

SEQ ID NO: 19073 - protein, 517 aa, synthetic construct
MTIAPSPLSSGLPMTGPAAGRRRLRASIYVRLSNAADDANTSKENMIAECRALLARENFEEVALHVDDGLSGGIRNRPEFAAWLDDARYQRCEVLVAHHVDRMTREGLNVAAMILDVQEGKDPTTGQVVRPPVRLMDTKGVDSNGGVAFRMMFLIKAEAAREERERIRERMAGRATRLRLAGRWPGGTPPFGYEVVPAPDGKGRTLALVPEEAAALRECADRLLAGDAIARTVRWLNHNGPKPRRAPEWSRVTLKDALTGDHLLGRVTVGGVVQRDDQGHALTPFPAVLDLVTLVELRKLLAPGRERKTPLGRKPARLASRLIECGSCGSYLQVVRREGYRTAAEDAQGRAGRGALIAYRCHARSEGRTCERAVIVSALPFEAHLEERFLIDFGHAPMIERRVILPDDGALVAVEESLAAVLADLARAATPETFTRLQALQAERARLADLPREPVVTYVATGRTMAEEWHARDLEGKRELLAEAYELLRVGPGKRGRKGFDPARLTAIPAEGVHDPD

SEQ ID NO: 19074 - protein, 565 aa, synthetic construct
MQRVALYARYSSDNQRETSIEDQFRICRTRAKQEHWSIVQTYHDAAISGSSIAQRPGIQALMKDAQTGHFNLVMAEALDRISRDQADVATLYKQLQFLGIKIFTLAEGEISELHVGLKGTMNALMLKDLAQKTHRGLRGRVEQGKSGGGLCYGYKAVQIINQQGTLSRGDREIIEDEAIIIRRIFQAFANGASPLNIARQLNEENVLGPGGQQWNDTTIRGHVKRGTGILNNELYIGRLVWNRQQYIKDPVSGKRISRPNPETEWVITHVPDLRIIDDELWRSVRVKQAEIAAKYCNVTTAIQNYHSQNKLNPTRRPRSLLSGKVYCGLCKGPYSLRGADRFVCSNHISKATCLNSRTVSRNSLELRALNGLQLKLMAPENVEAALQAYERDIQHQKADYQTKNLVWAEELTDVVRQIAQLVHAITEGMYHQSMKEKLTELESQKATLSAHLSDQNASLTKIRPDAITLYHEYISRSIAMLQRDDQNQLAKEQLRTLIEGIELMPATERGKVHATLTSELGTILNWIERQVIGNTAKTKNPAASATGVLVSVVAGAGFEPAAFRL

SEQ ID NO: 19075 - protein, 553 aa, synthetic construct
MTNFTNQLHKCAGEHMRYIAIYSRYSSTLQNKSSTEDQIRMIKHHVKQQPDWRITNEYQDAAISGADMISRPGIKKLISDAKQKKFDTIVVESLDRLSRDQADITIFYKIMQYYDIKIVTLTEGDITELHIAFNGTMNALYLKDLKAKTKRGLQSCIEQGRSAGSLSYGYRIVYKRNNDGTPKRGLREINHTEAVIIRRIFKEFASGHSPRSIANRLNRAQIRGPRGRLWTETTIRGHKTRGTGIINNELYKGRLIWNRLRYQKHIDTGKRISRLNPNDSWVIKEVPELRIINDETWNDAKKRQENILQANMHVTAAIQSYHKENLLNGRRRPVSLLSGKLNCAECGGLYSIRSAGRFGCSNHYTSKDSCSNKRTILRPNLEKLFLDGLKSLLENNEMIETAQEAFARSVEQLQTDVVTSQTALKTEFARICNEIKALVTAIKGGLFQPSVSTELDHLEIEKNLLSQHLDNQIIEKNISLDEFEKLYFSKLGQLVQCFNHPDTIHVAGEILRSLIDKIVVHPQKARGHVEIQIFGPICSLLNVAEYKTKLPSK

SEQ ID NO: 19076 - protein, 567 aa, synthetic construct
MLILKGDQKLNTEQIMSLIGKVNALIYARVSTTDQAKKGFSIESQLDRCKERAMSKFGYKDSELIALVEPGGMGDDPNRPALNHALYLLQKGLGKKFLVLHPDRLTRDNTLQGVISRRIWGMGVDIEFIEFEVNPNDPESMLMYNIQGSIAQYNKAKIHANSKRGRLAKAKKGEFPSFKRLYGYKFNTVTDLPEYNEEEKEILLEMKDMLLNKKLSSNEIAKELSRRGVAAPNGKTWFQSTVSRMLQNEDYTGDFYYGKSKVVQVNGKKKQIATPKDEWILIKIPPMWDHESRDQIIKQLKANFKGRSRSTRDYLLKGKAVCGRCGGSCGSGITSKTKSGIYKYYSCCNKSTKAYQNGKELFKCKGKNWRVDIVDEVFWKWFKKLIKNPKKFLDQFLEEASNEKSIEDIKIKINRLQKQHEEIDSEIANYVILFGKGKIKESMFDELTRPLELNKEHVENELEILQSQLNANKKVEDRNEQTIKYMNSFAEMVDKDLSMSEKRNFLDFFIEKVTLYDDDHMEVVWKNKTLNEDRSQTVDFTEGETEEASDNQHKRLNRIQAYGRQTA

SEQ ID NO: 19077 - protein, 508 aa, synthetic construct
MFFEEKNTEELIRYEDYPYAVYARVSSEKDSQTTSIQNQIDICHHWIEKNNYEWKDEAIQLDDGISGTILLDRKAMQLILNKAKNHKLKMVVFKSISRLARDLKDALDIKEVLLAHGVRVVTLEEGYDSLYEGKNSMKFEMFSMFAAQYPQTISVSASSALAAKARRGEHSGRVPYGYKKNGKFLEIYEEQAKVIRMIFDLYNNHGYGQKRVVHKLNEELLLGNIPKPQQNERWQLSTVQRILQNPIYCGVFIANRYTQVKIGGRKKFIRNPEEKWTIYKDWAPKIITLEDYEKANNKKHVLKKRRFNPKNELRGLMKCGVCGANMVILFSYRRRKKDGVKVEHNYVKCSAYRRGGKNMCISHPPIQYKDLREIVIEKLKEKGRKLKLNVKSDYEEKKKRRIRETKVQIEAAEKKHKRLLELFLEDQMISKAEFQSKRKEIEEQLEQLNDKLFLLEREEEESIDITNIKIAFSLLKKKDQDLYEAFHALIEKLVIHEDGTVDFHYKFQ

SEQ ID NO: 19078 - protein, 542 aa, synthetic construct
MNRTAIYARFSTDLQNERSIDDQLALCRAYAEREGLNVVATFEDRARSGGSVLGRDGLLHLMDKAREHEFDVLVVEALDRLSRDMEDLAGIHKRLSFLGIEIRAVHEGVVNTVLVGLRGLVGQLYREDIAHKVRRGQAGRVNKGLHAGGLTYGYSYVLGDPGTRLIAEGEAEIVRRIFREYVDGQTPRDIAHKLNSDRIPPPRGRAWNASTINGNVQRGTGLLHNELYAGRLIWNRVRMIKDPDTGKRVSRPNPKGEWRVVAVPDLAIVPSDLFDAAQARKKARATTHPSHQRRPRHMLTGLLRCGACGAGMSSKGVDKSKRIRIRCSAATESGTCADPKTFYLDTVEAAVLNGLSAELRHPEVIAQYVQTYHEERKRLVADTDARRTRLERRLGELTREIDRLVNAIAKGHGDPAVLGPQSTTLNEERKGILAELDRVPAATGVIALHPAVLARYEEQLNQLQTGLAKGIATGDSESAEAMRDLIETVTVFRDPSKIGGIEVEIAGRLTALLGEGAFPHGVKGAGGMVVAGEGLEPPTPGL

SEQ ID NO: 19079 - protein, 535 aa, synthetic construct
MQRAAIYARFSTDLQSERSVDDQIELCREFAIRQGFVVARSYFDKARSGASIFGRDGLLSLMDDAREGKFDIVIVEALDRLSRDQEDLAGLHKRLTFAGVQIIAVHDGAADAIQVGIRGLVSTLFLADLKHKIRRGMTGVIREGRHAGGRAYGYRSTLGQAGVLQIFEPEAEIVRRIYAEVIEGSLPREIATGLNREKVAPPRGVAWNASTILGSAQRGNGIIRNPLYCGRIVWNRIRMVRDPETGKRISRPNDASEHREAEAPHLAIVDQQTYETALAILEGRAKKARGGQDVRRPKRLLSGLLRCAQCGGGMSMHDRTGNAIRIRCSRSKESGTCSNQRRYSLNRIEAAVVSGLRGQLMHPELLAEYVRAYREERRDEAAKAARERAANERRLADLNGQLERLMQALARGVLPIQAVEAQYKPLEIERDRVAAELAQMPASTAIELHPHAANQYRNAVDNLAERLDDLDARADSEAIAAFRSLVDSVIVHDRVDGGVEVEVIGHLSALIGAKAEMLGGRLVAEEGFEPPTQGL

SEQ ID NO: 19080 - protein, 691 aa, synthetic construct
MNAFSPLPPALLKRKAVVYVRQSSQSQVMQNLESQRRQYDLVDAARQHGFRRVEVIDDDLGLSASGAVARPGFERLVAWLCAGDVGAVLCFDASRLARNGRDWHHLLELCGLVDARVIDQDGVYNPCSPNDRLLLGMKGTISEFELGIIRARMLDAARAKARRGELRISVPIGYIWYRDAGLGFDPDLRVQEAVRLIFSRFRELRSGRQVLLSLTEDKLCFPRPTDGRNTTTFDWTPIRYRNVISVLKNPFYAGVYAYGKSEKRTEIIDGRARKTYGHGKPKEEWEVFLKDHHDGYIEWDEYERNQALLAANAYGQKGGAKSGRGGRALLSGLLSCGRCGRRLCVAYTGKTPRPVYRCERPNLMLGLNRCLGFGGPRIDKAVAAELLRVVQPMAIEAAMQAEHMQSEARAERRRAAELDLQKAQYEAALAERRYAACDPDNRLIAATLEKNWEVALKRLEACKTRLDAEQLPDTPAKLPDLDGLAEDLQAAWNAPGVSTRARQRLARALIKDIIADVDEEARDVVLTIHWQGGQHSQLRVRKPKTGEHGCNTSEDALEVMRSMAGRWSDSDIAATLNRMGIRTGFGHTWTAHRVSSIRRVNDIHAYFSAEKSGKWLTMTEAATKLGVTNHVIRNLIKAKILPAEQVVPRAPYQIKAVDIEREDIIEAINNRRRKRPYRDPRQIALPINSIT

SEQ ID NO: 19081 - protein, 508 aa, synthetic construct
MKKAIAYMRFSSPGQMSGDSLNRQRRLIAEWLKVNSDYYLDTITYEDLGLSAFKGKHAQSGAFSEFLDAIEHGYILPGTTLLVESLDRLSREKVGEAIERLKLILNHGIDVITLCDNTVYNIDSLNEPYSLIKVILIAQRANEESEIKSSRVKLSWKKKRQDALESGTIMTASCPRWLSLDDKRTAFVPDPDRVKTIELIFKLRMERRSLNAIAKYLNDHAVKNFSGKESAWGPSVIEKLLANKALIGICVPSYRARGKGISEIAGYYPRVISDDLFYAVQEIRLAPFGISNSSKNPMLINLLRTVMKCEACGNTMIVHAVSGSLHGYYVCPMRRLHRCDRPSIKRDLVDYNIINELLFNCSKIQPVENKKDANETLELKIIELQMKINNLIVALSVAPEVTAIAEKIRLLDKELRRASVSLKTLKSKGVNSFSDFYAIDLTSKNGRELCRTLAYKTFEKIIINTDNKTCDIYFMNGIVFKHYPLMKVISAQQAISALKYMVDGEIYF

SEQ ID NO: 19082 - protein, 533 aa, synthetic construct
MTKKCFPYVRFSSTRQEDGSTRTRQNGLIEAFVAKHGLEVDRHLEDAGTSAFHSKHAGSEGVLGQFLKEVRKGEIEKGSYLLIENFDRLSRDKIVRSNKIFTDLLFSGIKIVILDKNKIYDADNLDFGDWITALVEFERANAESQRKSDFSSKAWKLNRDKMHNGEIVTKKVPTWLKVENNTFIIDEVKIDRIRTLFRLSLSKGLQEATKEYNSLYGEKLAIHQAQYLLSNRKLIGEHQPQKIHYNENGRLIRKDEGNPIPNYYPQVIDEDLFLKVQSVITSRKPFSGRYSAQRYNVFRDLIFCRFCSGTIRYMNKGERDYFICTNSMTGKCGLKGQQSIRGKKVFSRFFKFTNGINIGTLLEENTNADEIKNELMKLENQKTKISNRLDGFKSQIKKMILEGETIPETYNEIIVDLENSIIKLDDEIEIKNKELNSIISSFKSFYDLKEIDIETIIYDKSQEAIEKRVQYNNELKNIIKKIQIDYLNDILHVEFSNGVNRHILNDELANEYNKDEIENAWASVVKSMAKKTN

SEQ ID NO: 19083 - protein, 531 aa, synthetic construct
MTSAHPLPRAFAEVFQGNDRINVYSYIRFSSKAQKLGFSEMRQIDQLNRFFEHYPQARQVERYEDLGVSAFKGKNLKSGQLALFVERIKAKEILPNALLLVESFDRISRMGGYDALELIISIIQADCAIYTLFDNRLYSRRKTDSSADISLIQNILERANDESRSKSERVSDAKARNLLKGENGGIITKRCPFWISFTDGKFVLNEHAQAISRAVELCFDMGFQAIAKTLNDEIHPKKYTESIVGKFLRQPAIYGSFIAMEWDESGKPVQLKKEIKGYYPAVITEAEFHRISVKLQERQDPKLAGRKAAEFKNILRGLVYCACGSGFRYHAQKSGYVDLVCSASLTGRCTSAKPGKGVRYRYARLEEIFLAYQAKIPFHRIIAKTEDIQALEKAHGEISGLLIQKEKALANNFSILEKASESAQKYVLTRIEEVSQELDQLKAKEQEISHRISTLHLASKSTINVMEIYKLLLTEHGRMRVNNFLQGQGVRLNVTPIKKKHYIIDLYLGDIHIDRIQVTPDGYFADKTVNL

SEQ ID NO: 19084 - protein, 559 aa, synthetic construct
MRKVYCYVRFSSKKQQLGDSIERQQKLIEQYLTEHNAEIAEQFSDLGVSAFRGKNVKVGALSRFLERVKSGEISHGDTLIVESLDRISRQKELNTLEILISILNAGVVIYTLSDGRIYNAKTEDQANLVFQINFIISRAYDESLNKQKRSVSAWNRKHEEARKAKTVMTRKLPYWLKVVENDGEARIEIIEDRAREVRKAFELAKYKLGAQAIASRLNKDGAQKRWTLIAVRHLLTSKSVYGSFEAFKTKSLNGTLEKNQAYEEIENYFPAVIEKSEYYNIQSILQSNKEVYATRGRTPKGFRNVFKGLIKCMDCNSYLHQNFLKRKGKEYMYLVCQKSLVHACPAGKKVIIPYRHILEPFLLFFKNYGIEELFSEPSDTQSLNQRLTAIREEKSDKKGALQRMSDDIEKNNGEIPKTILALIGKIEGQLSSLDEEENRTMAQIESLRVSKSVKEEITKSDIDELLETEEGRLKFNSLLSERKIELLVSREFEEEYSNLFILFKEKGFSENIKFNRKEAIFPFMGVYNFNRKTYSDGFGGEPKPNEQVDYEKFRIDWSL

SEQ ID NO: 19085 - protein, 558 aa, synthetic construct
MAHGVQLQSSSLLRAVGYCRVSTDKQLERDLSVPDQQRQINQHCEKNGWRLVNHYIEGGLTATDDNRPEFQRMIERATDDDHPFDVIVVHSFSRFFRDLIGLELYIRRLAKSKVQVVSITQPLGSGPEHDMLRQMIGLFDEYTSKEISKHVRRGLKENARQGFWNGSRPPLGYRLEEAERRGERIKKRLAVDEIEAETVRLIFRLYRVGDGKSGPIGIKSIAKYLNAAGHRTRQGGYFGSSLIQVMLRNTTYKGEFLYNKRNYKTEEENPVEETVLVAVPVIIDPTEFGVVQALLSARNRLVTPPRIVTGPILLTGLTFCSKCGGAMTMSSGTSHTKKVYNFYSCLAFRKKGKLACDGCNVSMPALDKLVVGRLTERLFTKERIAEIIREIAQRRATKSTQADKRAAELRRRALDGEVRLNRLYRSIEEGIVELDDLLREKVAALQSDRRKAQDALDRLTEATIPAPEVSEGMIDEFVKVMRESISEGSVPFRKAYIRSVVERIEVSDDTITIVGAKLKIDQAVKAKELPLSSVRGFEPKWYALGESNPSLQNENLSS

SEQ ID NO: 19086 - protein, 547 aa, synthetic construct
MKLLVTYIRWSTKEQDSGDSLRRQTNLIDAFYAKHKEEYYLLPAHRYVDKGKSGFHQQHKAQGSDFRRMFENVMSGVIPEGSLIVVENFDRFSRADIDTAIDDVRQILRKGVSILTLGDGELYDKSALTDPVKLIKHIIIAERAHQESLVKQKRIAQVWNHKTQLARELKKPMGKQAPGWLELSEDGSHYIVDEDKASLVNIIYDKRLSGMSMFAICKWLNEQGYPTINQRKVRISKTKKPDGNWSALSVKHILTSRSVLGYLPAKISTEDRKTVLREEIESFYPQIVTDSKFYAVQQLLEETGKGKTSSGEHWLYVNILKGLIRCKCGLVMTPTGIRKPVYQGTYRCNGNKESRCSYGTVSRKLLDTQLCSRLFSKLSQLHDEATDTAKLDELQRRLNTVDGELEKLTETLIQLPNITQIQEALRVKQEEKDELIVQLSREKARVKSVSSLDLSGLDMESVEGRTEAQIIIKRLVKEIVVSGNEKLVDIYLHNGNMIRGFPLDGKDDHTLTLEEATDEMQSLDDMLIFGEPVTRIYPAGDMEEVDA

SEQ ID NO: 19087 - protein, 547 aa, synthetic construct
MKLLVTYIRWSTKEQDSGDSLRRQTNLIDAFYSKHKNDYYLLPAHRYVDKGKSGFHQQHKNQGSDFRRMFENVMSGAIPEGSLIVVENFDRFSRADIDTAIDDVRQILRKGVSILTLGDGELYDKSALTDPVKLIKHIIIAERAHQESLVKQKRIAQVWNHKTQLARELKKPMGKQAPGWLELSEDGSHYIVDEDKASLVNIIYNKRLSGMSMFAICKWLNEQGYPTINQRKVRISKTKKPDGNWSALSVKHILTSRSVLGYLPAKISTEDRKTVLREEIEGFYPQIVTDSKFYAVQQLLEETGKGKTSSGDHWLYVNILKGLIRCKCGLVMTPTGIRKPVYQGTYRCNGNKESRCSYGTVSRKLLDTQLCSRLFSKLSQLHDEATDTAKLDELQRRLNTVDSELEKLTETLIQLPNITQIQEALRVKQEEKDELIVQLSREKARVKSVSSLDLSGLDMESVEGRTEAQIIIKRLVKEIVVSGNEKLVDIYLHNGNMIRGFPLDGKDDHTLTLEEATDEMQSLDDMLIFGEPVTRIYPAGDMEEVDA

SEQ ID NO: 19088 - protein, 547 aa, synthetic construct
MKVALYARYSSDNQRDASIEDQLRACRGYADTQGWTIIDSYSDRAISGASLIRPGIQELITDANAGRFQILLTEAMDRLSRDQEDIAGLFKRMSFAGVKIVTLSEGEINHLHIGLTGTMNALYLRELANKTRRGLRGRVELGKSGGGLCYGYDVVRQRDSHGEAICGERTINDDQAQIIRRIFRDYADGKSPKFIALSLNAEGHRGPLSGAWSPSTINGNRERGTGILNNELYIGRLVWNRLRYIKDPSTGKRVSRLNPESEWVLQDVPDLRIIEQGLWDAVKARQSKTTWSQKSRGTGVHPLNALQRPTHLLTGLIKCGCCGGGFSMISQHHLGCSTARNKGTCENRLTIRRDVLEKSVLNGLRTQMMDPTLFREFCEEFTREVNRLRMEKGADLVALKSELPKIERELDKAVQAILDGFASPALKTRMEELEARKAEIETRLVDAPSPPPLLHPNMAELYRQKIASLHDSLQNEVSRTQRVEAIRSLITRIRLIPEGAELAIFLEGDLAAMLGFATNRKNAMRHRDAGVLEKFLVQGSDGCGGRI

SEQ ID NO: 19089 - protein, 562 aa, synthetic construct
MPKVFSYVRFSSAKQSAGDSFERQIKAAKAFATSKGLELADPKDYLFFDAGRSAYKGRHIDDTSELARFLGYVEDGTVPVGSYLVIESLDRLSREKVRDALPRFLDLLAKGINVFTSLDQRTYTKDFDVTDLLVSIISMSRAHEESATKGSRVSSAWAKKHKEARDTGKPLGKLRPLWLDLTPDGYVLNPAHAQVVQRIFDLSAKGYGSRVIAATLNQDGIPTFSADRKNSSGLWGFSTIRHILESRTTLGEYQPHIFIGGERTPDGEPIKGYFPPVITEEQFYLAAAARASRRLHKVTKVTKNFNVLAGIFFCQKCGGTMHLQGFKDRKYFKCANKQKGMCDSGLIGAERSESVFREVLAKIDSLSLVRSSSGSLTKKLHVIDGRVEELRVKQANAESSHEEFPSRITAKLLQQIETDLETLNAEREALAQSLATDQVVSKSDFFESLDLTSYEGRAAANNLVKRLGVRISVMKLERMNECYAVSVEGTVSFLVYNREAALTIRSVDTDILDKQVMHGEITQDQRVRLEQIREMGNVQGTTSLVRALFNWEHVVASRADNG

SEQ ID NO: 19090 - protein, 481 aa, synthetic construct
MKITNKVAIYVRVSTTSQVEEGYSIDEQKAKLSSYCDIKDWNVYKIYTDGGFSGANTDRPALEGLIKDAKRKKFDTVLVYKLDRLSRSQKDTLYLIEDIFIKNNIAFLSLQENFDTSTPFGKAMIGLLSVFAQLEREQIKERMQLGKIGRAKAGKSMMWARTSYGYDYHRGTGTITVNPAQALAVKFIFESYLRGRSITKLRDDLNENYPKHVPWSYRAVRAILDNPVYCGFNQFKGEVYPGNHEPIITEEVYNKTKAELKIRQRTAAENVNPRPFQAKYILSGIGQCGYCGAPLKIILGVKRKDGSRFKKYECHQRHPRTLRGITTYNDNKKCDSGFYYKDDLETYVLTEISKLQDDAGYLDKIFSEDSAETIDRESYKRQIEELSKKLSRLNDLYIDDRITLEELQNKSAEFINMRATLETELENDPALRKGKRKADMRELLNAEKVFSMDYESQKVLVRGLINKVRVTAEDIVIKWKI

SEQ ID NO: 19091 - protein, 514 aa, synthetic construct
MKKVYSYIRFSSTKQAFGDSHRRQSKAIQDWLANHPDHILDESLSFEDLGRSAFHGDHLKEGGALRAFLEAVKQGLIPSDSVLLVESLDRVSRQSISHAQETIRGILEQGITVVTLSDGETYNRQSLDDSLALIRMIILQERSHNESVIKSDRIKKAWSHKRQQFEQNGTKITGNCPGWLKLNSDKKSFSLIPHHIETIHRIFDEKLSGKSLHAIARDLNLENIPTITNKRVDTGWTPTRVRDLLLKESLIGVAYGVSDYFPPAISKEKFHAVQMIRGQGKGKKPTSRQPSSIDILKGICKCAECGSTLRQRNTKKTPEGRYPRGYLECRNRQLGRCNSKAFNRSLIEDILIQKVFPTLQYLGLKSNGDNISVTTLKADITSLEKGINNLISLAEKGLGDLDTLAQRITNNRVELESKKKDLRQAEAILSLRSDNDIQDSDRKTVEGRIKLQLAIKSFVKEIIFDYDKQEITIRLLNGKSFSGISVAREDKDFDHSSMFEVLQKSLLDVDGVCL

SEQ ID NO: 19092 - protein, 499 aa, synthetic construct
MLGQWLEQHPSFTLSDLRFEDLGRSGFSGEHLDHGLGQLLAAIDSGAIKSGDVILVEAVDRIGRLEPLEMLPLFSRIVKAGVSVITLEDGHVYDRSSVNETSLFLLVAKIQQAHEYSNRLSRRINASYTARREKAKAGLGIKRETPVWLTTDGQLVPHVAPHIAQAFQDYADGLGERRICRKLRESGLEEFSKTNATTVRRWLKNRTAIGYWNDIPDVYPHVVDPALFYQVQQRLDAPKVDRAKPSAHYLTGLVKCAVCGRNYNYKQRKHTDPAMLCTSRARLAGEGCSNSKTYPVIVLDQVRKLTSLPFLQHAMESASSQADPSSQRLAVIDGEIGELSRKISEATKALLVLGFTPEIQESLEQLKTAREALEEERATLLLPQAEKLTTAQLEAFSNGLLDDEPMKLNHVLQTAGYSMVVHPDGSIDVDGKRFVYEGASRKEKVYKLRLIGEDKQWSLPILTPQMATYKSLFMAAVRLPGDPSEEELRRFEEAKHSER

SEQ ID NO: 19093 - protein, 411 aa, synthetic construct
MRTVRRIQPIKSPCKPRFKVAAYARVSDSRLHHSLSTQISYYNRLIQAHPDWELVGIYYDEGISGKEQSNRQGFLNLIKDCEDGKIDRIITKSIARFGRNTVELLTTVRQLRLKNIGVTFEKENIDSLSSEGELMLTLLASVAQEESQNLSENIRWRIQKKFEKGIPHTPQDMYGYRWDGEQYQIEPNEAKVIRKVFKWYLDGDSVQQIVDKLNQEQVLTRLGNPFTVASIREFFKQEAYFGRLVLQKTYREAFSRNPKRNKGQRNKYIIENAHEPIVTKEYFDLVLHEKERRNQLMHQESHLNKGIFRDKISCSECGCLMIVKVDSKQVNKTVRYYCRTRNRFGASSCSCRTLGEKRLLASFKSKLGIVPDKEWVENNIKHIEYDFGYRILRVTPVKGRKYLIEIREGRY

SEQ ID NO: 19094 - protein, 597 aa, synthetic construct
MKKNNVEIIKADSLVRRRGDNFERESKRVAAYCRVSSDSEDQKNSYESQVRHYKDYISQRSDWELAGIYADEGISGTQVGKRQDFQRLINDCVNGEIDYIVTKAIARFARNTLDTLKYVRMLKDMQIGVYFEEENIDTLTMDGELLLTILSSVAQQEVENTSAHVKKGLKMKMQRGELIGFQGCLGYDYDVETKQLSINKKEAKIVRYIFERYLEGIGGKVIARELDELGYKSPRGLDHWNDTTVLGIIKNEKYKGDILMGKTFTVDPISKRRLSNFGEEDKYYIKDNHEPIISKEDFEKAQEIRLRRAGNKKTAANVNGKRERYSKMYAFSSMLECGFCGSILSRRSWHCRSDYRKVVWHCVTSIKKGKKFCKHSKGLEELAIEGAFMEAYRKLYHSNENLMTDLLETIESELNDNSLNKELKRITNKLRTLLKKEENLVNLRLEGKISDTIYNEKYNEISSEKEFLAEEKVNIETTLKSEIDVKKRLTEFKHLLSSQKMLTEFDRAVFESIVEKIIVGGVNSDGEIDPAMLTIIFKTGETQNKDGKQFKSKRKNAKLETDKLCPQNSDEDKKMYSQGPDNTCGVCGSARKSLETF

SEQ ID NO: 19095 - protein, 542 aa, synthetic construct
MQQLKTKRVGIYVRVSTEMQSTEGYSIDGQINQIKEYCDFHHFEVKDIYADRGISGKFMNRPELQRMLKDAKEGNIDCVMIYKTNRLARNTSDLLKIVEDLHKQNVEFFSLSERMEVNTSSGKLMLQILASFSEFERNNIVENVFMGQTRRAQEGYYQGNLPLGYDKIPDSKHELMINQHEANIVKYIFESYAKGHGYRKIANALNHKGYVTKKGKPFSISSITYILANPFYIGKIQFAKYKDWSEKRRKGLNDKPVIAEGKHSPIINQDLWNKVQIRKKQVSQKPQVHGKGTNLLTGIIHCPQCGAPMAASNTTNTLKDGTKKRIRYYSCSNFRNKGSKVCSANSVRADVIEDYVMKQILEIVKSDKVIQRVVARVNQENQVDCASLHHDIAYKQQQYDEVRIKLNNLIKTIEDNPDLTSVIRPSIQKYDKQLNDIMSQINQLKKQQNEDKPSYNAKKIGKILRYVFHNIEKMKKSQLKALYLAVIDRIDIRKDSNHKKQFYVTLKLDNEVIKQVFNDIPLDEVLLSTSSLFLPQPFYLTI

SEQ ID NO: 19096 - protein, 449 aa, synthetic construct
MKQVIGYLRQSTMKQQSLAAQKQAIEAIAEKHHIQHINFYSDKQSGRKDNRSGYRQVTQLIQQGQCDILCCYRLNRLHRNLKNALKLIKLCQTYHVHILSVHDGYFDMDQAFDRLKLNIFISLAELESDNIGEQVRNGLQEKAKQGRLITTHAPFGYDYHNGTFIINQNESPTVKAVFNYYIKGHGYKKIAQLLEEDNTYINRQPYQVRNIIINPNYCGRVNNQYGQFDNMFPSIVSTSIYEQAQRLRSQKQTKQTSSDNQLKQKIKCPCCNATLTNMTIRKKNHTLRYYVCPKNMNASRFVCDFKGINAQTLEDKVLEVCRDFYQNQRIYTKIKGAIDKRIKRQRNIEKHHILTQEQLIEKLAQGIIDAETFREQTQSLRQQPQRTTSINGHQIQHTIQNIIQKRFTLNILYPYIETIHITKDKNLIGIYFKNEPLNIVNQAMQSSIA

SEQ ID NO: 19097 - protein, 559 aa, synthetic construct
MKPQYPKVYLYSRVSTMMQVDGYSLEAQVNRMRAYANFNNYVIINEYQDAGKSGKSIQGREAFNRMLEDIKSCKDSISYVLVFKLSRFARNAADVLSTLQIMQDYGVNLICVEDGIDSSKDAGKLMISVLSAVAEIERENIRVQTREGKLQKAKEGKWTGGFPPYGYYIENDILKIDKIEAEAIKVIFEKYVKTEMGSYGVAKYLEAHGIKKRPRKNGTAEYFSANLIRKILRNPVYCGKIAFGRRKLEKVKGTRNDFHVKEQKDYLLVNGLHEEIVSEEVWNQAQMKLQVNSKKFEYIRIPSKDRVHLLSGIIKCPICGAGMLGNKSRKKKANGENYKDYFYYGCKHRTVIRGHKCNFNKQIKESLIDNAVIELINKSLLNPTIIDLLTKKINSQIDIEKVQSEILGIKNNIRSLTSSKDNLLKELEKLQVSDKHYDKKYYDISKRIDKIYDTIEDAETKLASYLKKEEILKENRISSKNIVTILSNFDKIFEKMDQREKRNLVECLISEIHIYEQRKANGQWLKSIKFKLPVIKESFEQVLDKQEHVEVVGLLEKRN

SEQ ID NO: 19098 - protein, 430 aa, synthetic construct
MSTDQEEQLSSYENQVNYYREYISKHEDYELVDIYADEGISATNTKKRDAFNRLIQDCRAGKVDRILVKSISRFARNTLDCIKYVRELKELGVGVTFEKENIDSLDSKGEVLLTILSSLAQDESRSISENATWGIRKKFERGEVRVNTTKFMGYDKDENGRLIINPQQAETVKFIYEKFLDGYSPESIAKYLNDNEISGWTGKANWYSSAIQKMLQNEKYKGDALLQKTFTVDFLTKKRVQNDGQVDQYYVENSHEAIIDKDIWELVQLELARRKAYREEHQLKSYIMQNDDNPFTTKVFCKECGSAFGRKNWTTSRGKRKVWQCNNRYRVKGQIGCQNNHIDEETLEKAVVMAVELLSENVDLLHGKWNKIIEENRLLEKHYSTKLAEMINKPSWEFDSYEMCQALDSITIVEDGQITVRFLEGTEVDL

SEQ ID NO: 19099 - protein, 547 aa, synthetic construct
MQTARKKNISVIPSQPEYDRSIKVQFKMLRVAAYCRVSTTLEQQETSYEAQVSYYTEKIQSNPNWKLAGIYADDGKSATNTKKRDDFNTMVDDCMAGKIDLVITKSVSRFARNTVDSLQNIRKLKEKNIGVIFEKEGVNTLDGTGELLITILSSQAQEESRNLSENTRWGLVRRFENGVISVNHTKFLGYTKDENGELVIVPEEAELVRRIFRLYLEGNSSIKIAKILKADGIKTVTGIDTWQPSVIDQMLRNEKYMGDALLQKTYTVDFLSKKRVKNQGIVPQYYIEDNHEAIIPRELFYRAQEEKARRAARYKPSAEKKSKTEKSKYSSKYSLSDIMVCGECGQPYRRQTWSKYGQKSVVWRCDNRLKNGTKNCKHSPTLKEQPLYEAIMTAINSVVENRGEFVGAFRENVIRVIGSYSTRHIPSEYDEQIEKLQGEMLTLIEENAKQGSVNENFDDQYHNIAERIRDLKLKKLKLTQENRLTETFSKRIDDVDSCLKETSCTVGGYDDELVRRLLQSVKVIGEDKIEIQFKSGIVMEQRVAYDE

SEQ ID NO: 19100 - protein, 481 aa, synthetic construct
MITTNKVAIYVRVSTTNQVEEGYSIDEQKDKLSSYCDIKDWNVYKVYTDGGFSGSNTDRPALESLIKDAKKRKFDTVLVYKLDRLSRSQKDTLHLIEDVFIKNGIEFLSLQENFDTSTPFGKAMIGLLSVFAQLEREQIKERMQLGKIGRAKAGKSMMWAKTSYGYNYHKETGTVTINPAQALTIKFIFESYLRGRSITKLRDDLNEKYPKHVPWSYRAVRTILDNPVYCGFNQYKGEIYPGNHEPIISKEEYDKTQSELKIRQRTAAENVNPRPFQAKYILSGIAQCGYCGAPLKIMLGVKRKDGSRLKKYECHQRHPRTLRGVTTYNDNKKCDSGFYYKDKLEASVLKEISKLQDDADYLDKIFSGDNAETIDRESYKKQIEELSKKLSRLNDLYIDDRITLEELQSKSAEFISMRGTLETELENDPALRKNKRKADMRKLLNAEKVFSMDYESQKVLVRRLINKVKVTAEDIVINWKI

SEQ ID NO: 19101 - protein, 479 aa, synthetic construct
MNKVAIYVRVSTKGQAEEGYSIDEQIALLTSYCSIHKWKIHDTYVDAGISGATIERPELSRLSRDAQKKKFNTMIVYDLKRLGRSQRNNISFIEDVLEKNGIGFISLTENFDTSTPLGKAMVGILSAFGQLDRDTIRERMMMGKIGRAKSGKPMMTSTIAFGYTYDKVTSSLNINPAEAIIVKTIYKEYLSGRSLTKLRDYLNENDLLRNGKPWNYQGVSRILRNPVYMGMVRFRGEVYQGNHDPIIDSETFEAVQKELKKRQLETYEFNKNTRPFRAKYMLSGIIKCGYCGSPMGVTLGTKRKDGTRNIRYQCVNRFPRTTKGITVYNNGQKCNSGFYEKDDIEIYVLGQVRLLQLNKAKLNKMFETPEIINVEEIENQINSLNNKMKRLNDLYLNDMISLDELKTQTYTFLKQKDLLENELNNNPAIHPEENRKQFQKLLGTKDITQLSYEEQSFAIKNLIDKVFVKPGIIDINWRI

SEQ ID NO: 19102 - protein, 341 aa, synthetic construct
MFIDEGITGTSTVRREGFQTMMAAARSGDIDMILTKSISRLTRNTVDLLDAVRELKILGVSVRFEREQIDTATADGELLLTLLASFAQEESRSMSKNVKWGIRKKYADGLMHSRQPYGYQYVGSDLAIIETEAKIISQLNAEGVKPRRGAKFRGKTIRKWLENEIYTGRVILQKYYRPNVAELNCHTNTGELPRYLVDESHPPIIDQTTFGAVQAELARRRHLGRGATPSARTTGLTSRIECSVCSRFYHRRTKTRRHTSYKFWWCETATKGKGNPCQAPQIRETHLTQICTRVLGLDDWDDEYALTRLVKIVVNPDRTLTIHTISGEVPVAVSLDEESAI

SEQ ID NO: 19103 - protein, 452 aa, synthetic construct
MKAAIYIRVSTQEQIENYSIQAQTEKLTALCRSKDWDVYDIFIDGGYSGSNMNRPALNEMLSKLHEIDAVVVYRLDRLSRSQRDTITLIEEYFLKNNVEFVSLSETLDTSSPFGRAMIGILSVFAQLERETIRDRMVMGKIKRIEAGLPLTTAKGRTFGYDVIDTKLYINEEEAKQLQMIYDIFEQEKSITSLQKRLKNLGFKVKSYSSYNNWLTNDLYCGYVSYADKVHTKGVHEPIISEEQFYRVQEIFSRMGKNPNMNRDSASLLNNLVVCSKCGLGFVHRRKDTVARGKKYHYRYYSCKTYKHTHELEKCGNKIWRADKLEELIIDRVNNYSFASRNVDKEDELDSLNEKLKIEHTKKKRLFDLYISGSYEVSELDTMMTDIDAQINYYEAQIEANEELKKNKKIQENLADLATVDFDSLEFREKQLYLKSLINKIYIDGEQVTIEWL

SEQ ID NO: 19104 - protein, 457 aa, synthetic construct
MRVACYDRTSVYEEAKISNDAQYDAVKEYVLEKYEQFPQRFSDKGESGGKADRPAFRQLRAWVCASEEEGVIYVWRYDRLARQAKIALEFIELCQQHQVQVYSISEPLPASFSHASTNKLFVQLLFTFAEQQRNVIIENVCAGLAYKKQQRQYLSSAVPYGYRLVNGKIQQEAHEAKVVRHIFQLYLTKKYGYKKLCQRLTQQKFFFRERPFQPYHIYSILKNPLYYGEVKGGSFGKYLGTFEPILSKTIFLQAQEIRQSRRTTKKDTYPYLLRQKIKCPFCGRHLSSKYQWNTKKTKKLHYYHCTDRSCQGIFLRAERVESEVLEKIQAFFQHEGVYQALIAQLTQQLAEKRKDEKHKVIQQKKQEAQWLKAFEEGNCSLEELKQQLQALQKPRSTSSFLSLQQCEAKVKEWLQLKDLTSRQLLCDHVCRIEVTKEKTVCGIYFRQLTQNILERNE

SEQ ID NO: 19105 - protein, 452 aa, synthetic construct
MKAAIYIRVSTQEQIENYSIQAQTEKLTALCRSKDWDVYDIFIDGGYSGSNMNRPALNEMLSKLHEIDAVVVYRLDRLSRSQRDTITLIEEYFLKNNVEFVSLSETLDTSSPFGRAMIGILSVFAQLERETIRDRMVMGKIKRIEAGLPLTTAKGRTFGYDVIDTKLYINEEEAKQLQLIYDIFEEEKSITTLQKRLKKLGFKVKSYSSYNNWLTNDLYCGYVSYADKVHTKGVHEPIISEEQFYRVQEIFSRMGKNPNMNRDSASLLNNLVVCGKCGLGFVHRRKDTVSRGKKYHYRYYSCKTYKHTHELEKCGNKIWRADKLEELIVDRVNNYSFASRNVDKEDELDSLNEKLKTEHVKKKRLFDLYISGSYEVSELDAMMADIDAQINYYEAQIEANEELKKNKKIQENLADLATVDFDSLEFREKQLYLKSLINKIYIDGEQVTIEWL

SEQ ID NO: 19106 - protein, 547 aa, synthetic construct
MKLLVTYIRWSTKEQDSGDSLRRQTNLIDAFYSKHKNDYYLLPAHRYVDKGKSGFHQQHKAQGSDFRRMFENVMSGAIPEGSLIVVENFDRFSRADIDTAIDDVRQILRKGVSILTLGDGELYDKSALTDPVKLIKHIIIAERAHQESLVKQKRIAQVWNHKTQLARELKKPMGKQAPGWLELSEDGSHYIVDEDKASLVNIIYDKRLSGMSMFAICKWLNEQGYPTINQRKVRISKTKKPDGNWSALSVKHILTSRSVLGYLPAKISTEDRKTVLREEIEGFYPQIVTDSKFYAVQQLLEETGKGKTSSGEHWLYVNILKGLIRCKCGLVMTPTGIRKPVYQGTYRCNGNKESRCSYGTVSRKLLDTQLCSRLFSKLSQLHDEATDTAKLDELQRRLNTVDGELEKLTETLIQLPNITQIQEALRVKQEEKDELIVQLSREKARVKSVSSLDLSGLDMESVEGRTEAQIIIKRLVKEIVVSGNEKLVDIYLHNGNMIRGFPLDGKDDHTLTLEEATDEMQSLDDMLIFGEPVTRIYPAGDMEEVDA

SEQ ID NO: 19107 - protein, 542 aa, synthetic construct
MQQLKQKRVGIYVRVSTEIQNTEGYSINGQINQIRDYCQFHHFEVTDIYADRGISGKSMNRPELQRMLKDANEGHIDCVMVYKTNRLARNTSDLLKIVEDLHKQNVEFFSLSERMEVNTSSGKLMLQILASFSEFERNNIVENVFMGQTRRAQEGYYQGNLPLGYDKIPDSKHELMINQHEANIVKYIFESYAKGHGYRKIANTLNHKGYVTKKGKPFSISSITYILSNPFYMGKIQFAKYKDWNEKRRKGLNDKPIIAEGKHAPIISQALWDKVQARKKQVSQKPQVHGKGTNLLTGIVHCPQCGAPMAASNTTNTLKDGTKKRIRYYSCSNFRNKGSKVCSANSVRADVIEKYVMDQILEIVKSDKVIKQVVERVNQENQVDVAALNHDIAYKQQQFDEINTKLKNLVQTIEDNPDLTSALKPTIHQYETQLNDITNQMNQLKHQQNQEKPSYDTKQIAALLQRIFQNIEFMDKSQLKALYLTVIDRIDIRKDENHKKQFYVTLKLNNEIIKQLFNNNNLDEVLLSTSSLFLPQTLYFQI

SEQ ID NO: 19108 - protein, 449 aa, synthetic construct
MKQAIGYLRQSTTKQQSLAAQKQTIKVLAEKHNIQHITFYSDKQSGRTNKRNGYQQITELIQQGQCDVLCCYRLNRLHRNLKNALKLMKLCQTYHVHILSVHDGYFDMDKAFDRLKLNIFISLAELESDNIGEQVKNGIKEKARQGKLITTHAPFGYHYHNGTFTIDTVKSPTVKAVFNYYLQGYGYKKIAQYLEADDKFINRKPYQVRNIILNPNYCGRVINQYGQYENMFPAIVSTTIYEEAQVTRTQKQVKRKPSENQLKQKIKCPYCHSTLTNMTVRKPNHSLRYYVCPKNMNNARFVCEFKGINAQELETSVLATCQDFFQNQQLYSKINHTIQQRLKRQRDIETKTTLNHEQLIEKLAQGKIDADTFREQSQSFRQQSNPITSINAHQIRKVFQNIIQQRFTLNMLYPYIDEIHITKNKTLTGIYFKNEPLNIVNQTAQSSIA

SEQ ID NO: 19109 - protein, 696 aa, synthetic construct
MNTKITPDHLGRAAVVYVRQSTMTQVTGNLESQRRQYDLAGAAATTGFASVTVIDDDLGRSGSGSMERPGFERLVAQVCSGDVGAVYCIEASRLARNGRDWHHLIDLCALAGTLVIDPDGAYDPRLVNDRLLLGLKGTMSEYELSLMRQRGIAARDSKAGRGELRFMLPPGLCWSEVGKIEIDPDEHVAETIRLVFAKFRELGSGRQVFLWLRSADIKMPVVLRNVDVCKLVWKAPAYHSVMQILHNPLYAGAYAFGRRAQRTRIIDGRARKATGVRKPRDEWSVLLRDNHQGYISWREYEENHKLLAENAHMKKNYDRKSARGGRALLTGLMRCGRCGRMMRVFYGSAKGNAHRYQCRGDDAHVGVGLCIGIGGVRVDRAVAVQILEAVSDRAVEAAIFASDQVERSRRDVIAALDRDLEGSRYEALLASRRYELVDPAKRHVARELEARWNDALERVGVLERKIKDLSALSAARPAIDRGRLLQLAQDLPTVWNAPSTETRTKQRLIHILVQEIICDLDDATNEAVLLIHWTGGRHTEVRVARVKTGRYPAELAPSAVEALRKLGGHWPDRELAVSLNRMLCKTGDGESWTAVRVRDMRERLGIPEYDATKVEIPMISLMKAAEKLGICVGSAKSLVQRGILPATQILPGSPWMVPVDALTSEAVRIGVQGVVDRRPKFYEDYQYDKVVRLPGI

SEQ ID NO: 19110 - protein, 687 aa, synthetic construct
MMHEKIGPHHLARKAILYVRQSSAHQVLHNRESSALQYAMRDRLAALGWSQIETVDDDLGRSAAGGVTRAGFDRMVAEVCLGKVGAVAAREVSRFARNSRDWQQLIEMCRVVDTVLVDQEAVYAPRQGNDRLLLGLKGSLNEYELDLLRQRSLSARYEKARRGELVVTVPAGFVKAGDRIEKDPDRRIQEAIALVFNKVTELGSARQALLWFLEQGLDLPVRCANGDVIWRRPNYATIHRMIANPIYGGAYAYGKSRSVPGYDGRSGIRRKARDEWLALIPDAHEGYISWERAEEIRKMVSDNVPASRHHGAPKHGDALLAGLFRCKRCGRKLTVRYTGANHNIPRYSCWRGLLDNGEPRCIAFGGLRVDDAIEEALLGVVEPGAIAAAVEAERNMASQRDQVQDALLRDLEAARYVADRAFRQYDAADPENRLVTSELEARWNRTLARVGEIETRIAKHRTVTPQPFPMSASQVTALAGNLRTVWTAPTTDARLKKRIVRTLINEVVADLDDGTSEIVLVIHWVGGVHSELRLPKRRRGHRVATPDDIVDAVRQLVLIANDDVIAGVLNRNGLTTGNGNRWTRERVTALRSYRKIPVFRPQIDGVEPWLNLGGAAKLLGITPKTLRLAAEAGDIEGAHPLPDGPWIFSRSKLATSQARQILDRARQNPRHPAGSPPDQENLFPSMA

SEQ ID NO: 19111 - protein, 526 aa, synthetic construct
MGKVRVIPSTINPLTHQSIVANVKRKVAAYARVSTDSDEQYTSYEAQVNYYTGYIQSRVDWEYINVYADEGISGTNTKKRVQFNKMIEDALEGKINLIITKSISRFARNTLDTISYIRKLKTAGVEVFFEKENLWTFDSKSEMVLSMLAAIAQEESRSISENVKIGKRWGFKEGKVSMPYKNFLGYDKVDGKIVINKEQAEIVRLIYRLYLREGYSRSGIAEYLNEKEIPTPGGLIGKWKVNNITSILTNEKYKGDALLQKGYVENYLEHVVKKNEGALPQYYVENNHEEIISKEEWNEVQSELKKREKFRYAYSKKNPFCSKLICGCCGSFYGVKLWHSNSTYRKEILQCTKKYSKGKDKCSTPNLTEEIVKSKFVEAYNKLMVDKPLLIENTKSIIELLTDTSKIDATIQKLNEELNDARILVENLIKDNASRAQNQTEYTNRYNSLNEKYNLTKGKIEEALIKRNEMQQSADSLKSFLKELADKPSFIETYDSILWNSMLDEAIVNEDGTIQFKFKGGKEITL

SEQ ID NO: 19112 - protein, 446 aa, synthetic construct
MKIVTEIGAIAPIKKLKKVCAYARVSKDKDAMLQSLSSQVSHYNKLISSNPEWQFAGVYADEGISGTKEDRPEFIRMVEDAKAGKIDMIITKSISRFGRNTETVIKTVRMLKAINVDVYFESQKMHTLSEEGEFMLTVLASYYQEEARSVSENMKWRIKKDFEQGIAWGGNDNFGYKLNGRTLEIVPEQAQIVKRIFDMYINGLGVLAIAKALNEEGIKPTMGGKWIKSNVLRVITNINYIGDRVLQTTFRPDFLSKKKKINKGELKQYYVEDDHEPIIDKETFMKAQLIKEERAKRFKLDVSKRNITYPFTQKIRCSCCGSTYQHKTTKYNQYWICSTFNMKGKKFCNDSKQIPEEKLYEAINSYLGIDEFDEDLFNKKIDYIIAKPNNVLEIHLFDGKIDEIKWTDPTRKNSWTPEMKEKARIKSKEIEKNLKRGADGKWVKSE

SEQ ID NO: 19113 - protein, 576 aa, synthetic construct
MSFANGAPTRPLRAVIYARYSSDNQSESSIDDQVRECRAYAERLGWSVVQVYADPEISGRSAFRPEYQRMLADAERHRFDVVICEGVDRLSRRLADLAGIYDILAAEGIRIHALHSGEITDMHVSMLGLVAQQFSKDLGQKTRRGQAGRIAKGKVAGGLAYGYQALPPTKNGKTTEAGEREIVEEEAEVVRRIFTMYASGITPEEIAARLNREGVPGPGGRPWRNTTLRGQGKRGTGILRNELYVGRLVWGRASFIRMPKTGKRVARLNDPSQFQITEVPHLRIVSDELWNTVQARLEEVGRRATAGRSSNDDHGVDLNANHRPKYLLTGLLRCSCCGGSYIIIGKDRYGCNNRKRGTGMCTNSITITRQKIEERILACLRHSLMAPERVQTFMAEIQQQIKTARRDASAKQSTLRKRLGETTKAIDHMLDMVEAGTAPKSILDRLRDREAEKAQIEAELAQQHDDSVIALMPNLAEVYATKVAELAESLNDPEIKTEATELIRQLIGRVVMSPDPDAPDGMRMEVHGILGEIVALAAGQELKSKLPDLGGPGSQLSVVAGARIGLYRTRLQSRRQ

SEQ ID NO: 19114 - protein, 328 aa, synthetic construct
MDKAVAYLRVSTEDQSLNRQYEDIRKFAEVKNLNLIKIFDDKISGSKTNSFNRKGFINMEKFLDKNDDIKHILVLEISRLGRKNYDIQTVIEKYVNKEINIHIKDLGQSTLDENGKRSFTSDLIISMLGVMAANESRLLSDRIKSGKMSRARNNKAFNSKIIGYKKGEDDTPIIDEEQAPTIRRIFELASQGVGMRNISTIIESEFDKKFAIGTLGGIIKNTFHKGERKYNDLILEVPAIVPEEIWQKANDEIASRNKFTSGTKVHVNILSGKIYCSCGNIMHQKVLPTSRLDIFICKDEKCKNSINRTWLFSMVRLAVEKHAQKKQR

SEQ ID NO: 19115 - protein, 543 aa, synthetic construct
MNLTKAKETKTRVCCLYRVSTKGQVDKAENDIPMQKKACHEFAESKGWTIIKEHAELGVSGFKVAAADRDELQEIKREAEKQEFDILLVFMFDRLGRKDNETPFVLKWFVEQGISVWSTVEGEQRFDSNVDDLLNYIRFWQASSESQKTSVRIKTRMKQIVEDGHYMGGTVPFGYRAVYKGRMNKKGRPVKDLEIDPREGEIVREIFFKVAREGYSAHGIARMLNERNIVTHGGARFQTNHVLRMLRHRGYTGYMIAKENTSGFIPELQIVEESIYEDAMAIVEQRKKENEQRRSVAQSSYNKTLLAGNLYCAHCGTRLSGFWHKDRYRLADGTVKEVMAPKYNCYAKGLKVRPCDGQQLYKAEIVDEIVEGIAKDIFAMISRMPKDPTIEAQLKKNIQNKENLLRELDAKLQSAKKELELYEAQIIKCIEGKSKLSEATLARMISRAEDSVAVYEKEIEKARMDKQNQKDTAAQIEDFYKEFKGWADEYESAALERRRVILSQLFSRIEIGRGYEVKVEIAMSYKQFLNLSENTQTGNRTVA

SEQ ID NO: 19116 - protein, 445 aa, synthetic construct
MNVIRGVGYIRVSTAEQATRGLSLDAQEAEIRAYAKAHGIELFNIYVDAGITARKRLDRREAFGQMMKDVDSGLIDEIIVMRLDRWFRNIYDYHKMMNEHLIPHGVNWSAVKEDYDTKTTNGRLMINLRLAIAEQECDTDGDRIRDIHDNQIANGIWIGGCAPPGYRIENKRLSIDPDMQPAVSYFFERLLSCGSVRRAMLDMNERHNLHFEYGQAIRMARSTTYCGVRRENYNYCPTYISQDEHAQIMAALEHNVRVRSADNARIHIFSGLLVCSCCGRRLAANTVRKKSVTWTAYRCHRAFGDHVCDNRHLVDERKVEAWLLDYLENGLSDYIVSASVADAQPVVVDNTAAIRERQERVKELFINGFIDLQEYKRRAAELEAKIQVPEKQQPRSMEKLKSLLERGVRAIYNDLSRGERQEFWRSIIREIPVNNGAVSGDPIFL

SEQ ID NO: 19117 - protein, 541 aa, synthetic construct
MNLTKAKETKTRVCCLYRVSTKGQVDKAENDIPMQKKACHEFAESKGWTIIKEHAELGVSGFKVAAADRDELQEIKREAEKQEFDILLVFMFDRLGRKDNETPFVLKWFVEQGISVWSTVEGEQRFDSNVDDLLNYIRFWQASSESQKTSVRIKTRMKQIVEDGHYMGGTVPFGYRAVYKGRMNKKGRPVKDLEIDPREGEIVREIFFKVAREGYSAHGIARMLNERNIVTHGGARFQTNHVLRMLRHRGYTGYMIAKENTSGFIPELQIVEESIYEDAMAIVEQRKKENEQRRSVAQSSYNKTLLAGNLYCAHCGTRLSGFWHKDRYRLADGTVKEVMAPKYNCYAKGLKVRPCDGQQLYKAEIVDEIVEGIAKDIFAVISRMPKDPTIEAQLKKNIQNKENLLRELDAKLQSAKKELELYEAQIIKCIEGKSKLSEATLARMISRAEDSVAVYEKEIEKARMDKQNQKDTAAQIEDFYKEFKGWADEYESAALERRRVILSQLFSRIEIGRGYEVKVEIAMSYKQFLNLSVCPSRFRGQ

SEQ ID NO: 19118 - protein, 503 aa, synthetic construct
MNNRIDAIYARQSVDKKDSISIESQIEFCKYELKGGNCKEYTDKGYSGKNTDRPKFQELVRDIKRGLIAKVVVYKLDRISRSILDFANMMELFQQYNVEFVSSTEKFDTSTPMGRAMLNICIVFAQLERETIQKRVTDAYYSRSQRGFKMGGKAPYGFHTEPIKMDGINTKKLVVNPDEAANIRLMFEMYAQPTTSYGDITRYFAEQEILFHGKELIRPTLAQMLRNPVYVQADLDVYEFFKSQGTVIVNDAADFTGMNGCYLYQGRDVKPSKKNDLKDQMLVLAPHEGIVPSDIWLTCRKKLMNNMKIQSARKATHTWLAGKIKCGNCGYALMSIYNPSGKQYLRCTKRLDNKSCSGCGKIITSELETVVYQQMVKKLASYKTLTGRKKAAKANPKIAALQVELAHVDSEIEKLVDSLTGANNVLLSYVNVKIAELDGRKQELLARIAELTVEAISPEQVSQISGYLDTWENVSFDDKRRVVDLMITTIAATSDSLNITWKI

SEQ ID NO: 19119 - protein, 639 aa, synthetic construct
MANRQTEEKITALYERLSRDDDLTGDSNSILNQKRYLESYAAQRGYTNIVHYTDDGWSGGNFDRPAWKRLVADIEAGKVAHLLCKDLSRIGRNYLQTGFYTEVMFRQNGVHFVAVANNIDSEEQDSGEFAPFLNIMNEWYLRDQSKKVSAAYRVKGKAGKPTTNNAIYGYKKDPEDKDHWLVDEEAAAVVRRIFRLAVEGHGPYEISKILTQEKVECPAYYLARNGRGSRKNTVDTSRPYDWYGFTVSSMLTKPEYMGHTVNFRSSKKSYRDKRVKNDPSDWLIFENNHEAIVDPETWQLAQQVKRTVRRTDTTGVANPLTGLVFCADCGAKMYNHRGKRKKDGREYGTDFYNCSTYTLTFERETQMCFSHTVSTKALNALILETIRTTASYAIQNKEEFIQKVRSISQVRQQEAAKELKRKVAKERKRSAELDVLIKKLYETYAMGKLEEKRFELLCAEYEKEQAELEQLLASEQAQLDQFHEDTDRASHFLALAQKYTDFTELTAPMIHEFVEKILVHAPDRSTGERVQEIEIYLNFIGKFEVPMPEPTEEELAAEEKRRQKRIRDHEKYLRQKERKQKIAEGLIVPGEPYQLVCQCCGEPFQSVRPNAKFCKPACREKFYRQEKRKAKETETSQTA

SEQ ID NO: 19120 - protein, 556 aa, synthetic construct
MDEFAARPVADILARYSTDNQNPVTIDVQVEKCREWCERNGYQVGKIFSDEAVSGMKETRVGYEACMMHLGMGGAQLVVVYDQSRMFREFTEWFQFRKDVDMLGARVASVTQPMVGGDLKDPAVFINEAATAMLNHAQVLITRQKTIDALKHNAREGKSSGGKPPLGYDLDKDKKYVVNEHEAGAVRLVFQLFARGFSYGEIVDELNSRGYLTKRGQPFGKNSIFDLLKNEKYIGRLVYGATKAQADGRWNSHAKSKEDAIVVENGVPAIIEQELWEQVQSRIRTRKGAGGRYSAKREYLLTGRVFCGDCGASMVVMGSKASGYQYYECNNKRRTHTCKMKNVRTEWLEQTVAASIKQMLNEPANIEMLVDVARDQERQITTEYDTRRAELASRYTRVCRQLENGVNALLEGVVSAELKEKVRRLEEEKAKIEAETAELNQYKGYVGLDDATIRRCVENVAKVDIDTPEGLKLILAVVSRVNIRTDTIEIKTLISTDGTDPDPTKSRPQHLELFPSESASGEKYHTTPENGSGHHYQQTRTCSCMRAGSGLFFVWT

SEQ ID NO: 19121 - protein, 558 aa, synthetic construct
MKGKIALYSRVSTSEQSEHGYSIHEQEQVLIKEVVNNYPGYDYETYIDSGISGKNIEGRPAMKRLLQDVKDNKIEMVLSWKLNRISRSMRDVFNIIHEFKEHGVGYKSISENIDTSNASGEVLVTMFGLIGSIERSTLVSNVKMSMNAKARSGEAITGRVLGYKLSLNPLTQKNDLVIDENEANIVREIFGLYLNHNKGLKAITTILNQKGYRTINQKPFSVFGVKYILNNPVYKGFVRFNNHQNWAVQRRSGKSDENDVILVKGKHEAIISEDVFDQVHEKLASKSFKPGRPIGGDFYLRSLIKCPECGNNMVCRRTYYKTKKSKERTIKRYYICSLFNRSGSSACHSNAINAEVVERVINVHLNRILSQPDVIKQIASNVIEELKQKHSNQTEIKYDIDSLEKQKAKLKTQQERLLELFLDDQMDSEMLKAKQSQMNEQLEMLDKQIKETQQARESQAEVPDFDKLKSRLTMMISRFSIYLRKATPEAKNQLMKMLIDSIEITTDKQVKLVRYKIDESLIPQSLKKDWGSFFMPKFQFEIDGRKNYFIDQITTFTT

SEQ ID NO: 19122 - protein, 491 aa, synthetic construct
MGLAAIYLRLSRNEEQLNIDEILLNHRNALTKLAKQQKLTYDIYQEISSGVNTERPELNLLLSRLDDYDALLVMDIDRISRDNAHAEEIKKMLIIHDIKILTPQGAIDLSQESNEMLFSFQAMMANFEYKQIRKRLGRGRLAAAEQGKWTMSNRVPLGYRKNEEKRLEVVEEEAKIIRFIFQKTLERVSANEIAKQLDILGWRSRQGKVLTSAHISNMRRNVVYYGVVKAGRKVNGRVVDEVFVEDAHEPIVSKQMFLEVQKILEENTTGNFFNKLKATRKLQNLIYCNCCKRKRYIQCDGNGIDYIKSCIYKVDNNKCRDRGYKYEPIEQFVLQKVKEKKPDFEQELQMLKSLDTTEVEKKLSIQRESLEKQINRFNKRQRNLKEMRMDGEISKAEFYEMRDENEEQIKQVKQQMELIDIKLENLSNTDEEQARLQDAIKTLDKLEELKAESCNTFLKKFIKKIWFSSNTEANHDTTKPREDATIEIEWL

SEQ ID NO: 19123 - protein, 523 aa, synthetic construct
MRQVITYLRFSSKPQERGDSIRRQKGLFERWLKDNPDAKVVDEFSDEGASAYHGHHLKGDFGRMLQNIQDGKYLSGQTVLLVESETRLNRQKARNTESLVDLITGKGVDVICLESGKIYTSTNIDDLDTSIQLKIAAHIAHQQSKEKSIKVSAAWEHRAQLALEGKQQLTKNVPGWIDPDTRKLNEHSSTVVTIFDLLLSGESLHNIARYLQANNIKSFSRREKANGFSVHSVRTILRSESTVGTLAASKRNDRPAIPNYYEPAIDIATFNKAQEILSKNRVGRAPASDNPITINLFKGIIRCQCGASVHPTGVKATYQGVYRCNNVPDGRCNVPTIKRKPFDKWMLDNIVGFLERDDGNNTDKRKAEIEYQISLVTSKLKKATTLLLELDDVTELKEQVKELNIQRSNLQSELDELNQRETLSDKPLHHLSEIDLTTKAGRVEAQLILSKFVQSIELQREMIIITLRNGTVIGKSRDLSPVLSQDLMKQVVSSPSPTDIDMFSVITSDEEFRKSGKQVTKRS

SEQ ID NO: 19124 - protein, 589 aa, synthetic construct
MKIAIYSRKSKFTGKGDSIENQIEMCKDYISKYVDKNVEFIIYEDEGFSGGTIDRPKFKKLMHDVQANTIDKLVCYRLDRISRNVADFSSTLEILQNYHVDFISISEQFDTSTPMGRAMIYIASVFAQLERETIAERVKDNMMELAKNGRWTGGKIPLGFISNKKVYIDEEGLKRQFPVLEIEQKEMSFVELLYNKYLELGSLHKLEVYVTENQLKSRNDVMLEKSSLKLILQNPIYVKANDDVLNYLQEHDYNVYGKPDGIHSLLTYNKTEQSMKNGKHVKIKKAKEDRLAAISNIEGALPPALWLDVQRKFDENRDKFPRLGKTNNALLTGKIKCGKCNEYMLIQHGKVSKTTGQKSFYYVCSLKRKSHKKLCDCANANASKLEDLVLLSLKKLSKAKLSFISDLKKKYNSEWKNNGLDEKLMLTKALSDKKKQISNLLNELSKEEDEYMKGLIRDKIKPFKKQCMQLEHKLVSLETETKKSKTNEINLKIIEDILNDCEIIDKLPRERQKQIIDTIIETIYWFGESNNSNNGRIKIKFIGTDNDYEEMNFTDKELEESKLQFSSTSTCKINDNFLSIREIKKNTRT

SEQ ID NO: 19125 - protein, 562 aa, synthetic construct
MKAAIYSRKSKFTGKGESIENQIELCKNYALNLGITEFIVYEDEGFSGKNIDRPNFQKLLSDARERKFDTIICYRLDRISRNIADFSSLINELQDLGLGFISIREQFDTTTPMGRAMMYIASVFAQLERETIAERVRDNMLELAKTGRWLGGQTPLGFKSEAISYFDSEMNEKKMFKLSPENEELKIVNLIYDKYLEFKSLSQVTKYLTQNMIKSKTGNTIWNKRTVQDVLTNPAYVKADDKVLSFFKDQGITVAGNADKKHGILTYNKKKGTKSFRDTDEWIAAISKHLGVIESYTWLKVQNTLAVNKEKAPRMGKTNNVLLTGILKCHKCGSSMKVIHGRTDKDGKKIFYYKCSLKEASGNKRCDNSNVRADELEKVLIKKIEEISSDKGLILKELKAFKENLDISDTASFALENTQKNIKNKKSQIENLVDQLSLNPSISEYIIPQINTLDKEIKALKLSENEIKDTKNDFIQSDMNIDLMLELLKKVSIIDSLDVEEKKLVLNSILDEVTWDGDTGNIDITLWGMRKKKVKFNPIDINKLLHFSKSSRSYCYRISCWP

SEQ ID NO: 19126 - protein, 700 aa, synthetic construct
MNDTSLNSTVAAYASGVKRRKRAVLYLRVSTPGQVNTDFNPEGISIPAQREAAKRKAESLDADIVREFVEPGRTATSIEKRPTFQEMIAWVKSQKDIDYVIVYHFNRVFRDAVDAGITKRDLKKVGTRIVSTILDMGESPESAMVETILHAVDQYQSQASGADIKYKMGQKARNGGTIGQARLGYLNVRIPKPEGGEIRTVMVDKERAPLVRLAFELYATGEYTLADLSGELYDRGLRTRATARHPSKQVSINKLSMMLRDRYYIGYVTYQDEEFKGRHEPLISEELFEAVQAIIETRATAQERRRVHHHYLKGSLYCGRCHRAGVTSRMIIQHTVNSRGTEYTYFFCRNKQNGTCPSPHINVIHVEDAVEAHYATVRFAPGFVADVRSHVAKALEDEEAATRLLHRQLTTEIHALDVKESNLIDLVADGDETIPQAKVKEKLRDIERQRQRLQVRLEDTNEELAVTARLIELSLELLENPQELYRRCDDEQRRLLNQAIFEKLYVDQDQVTEHELHEPFGLLHDMQRDRDEPPDKPDTGTPYGRIPHARRAVSLVGDGPSGISSVEALLGGMDLVHCSSKPSRVELRGIEPLTFSMRTRRATNCATAPWCSSSLSGPLEPFSLPHRSPVSEAVEVIELVECRVFVVDVDHYRVGVGDARLGCLGDWWCCWFPVFGWLFPAFFSVAVRVAIVLFVLRFCF

SEQ ID NO: 19127 - protein, 508 aa, synthetic construct
MNDKTNLKVALYMRYSSDKQSEQSIEGQERVCTEFCKRNGYAIIRKYIDRATSAFKDAEKRLQFQKMIKDSSKGDFAGVVVYKLDRFARNRYDSAIYETKLERNGVKLISATENISDSPEGIILKSVLVGMAQFYSEELSQKINRGLRETALKGGVTGATPLGYKVKNKQYVLDEAAAPIVKEAFELYDKSVSIKEICEIFNNKGYKTARGGKFNRSSFHHMFKNVIYIGTYKYKDIVLEDKVPAIVDKALFERVQKRLKKEKRQPTRGKAKQTYLLLHKLYCANCGAMMMGESAKGKSGKVHYYYYCDSAKRKKGCDAKRIRKNYIEDVVFEQALKLLNPETINELASMAVKECRRAIEEDTQVPALCDEIKAIDKKINNLLKFFEDGSESVSVRDRIAELEKEKEDLEIRIEHAKNEFVYLEKDHIAWWLSKFTKGDKEDENFKRNILNLLVNSVTVKETKKGYRLVIAYNLNSSNQQTFECSTSALIGGPSGTRTPDLPVMSRTL

SEQ ID NO: 19128 - protein, 494 aa, synthetic construct
MNDKTNLKVALYMRYSSSAQSEQSIEGQERVCTEFCERENYTIVKKYIDRATSAFKDADKRVQFQKMIKDSEKGLWDAVIVYKLDRFARNRYDSATYKTRLKRNGVKLISATEAISDDPEGIILESILEGMAEYYSKELSQKVKRGMKETALKCHSCGGTIPLGYKIENKKYVIDQAGAKIVQEAFDLYNKNYPIIDICKIFEDKGYRTAQNKKFTKSSFNIMLRNKKYMGVYKYGDIEIDGGIPAIISKETFKRAQDKLEKQKLKQRRGRAKLTYLLSQKLFCGECGAQLIGESATGRHGKTYYYYTCGSVRGADSCKKKRMKKEYVEDIVFEKAMKLLTPETIDELAEMAENQCIKDIEQDTVVPALQAEIDDVDRAINNLLKALQDGVATKTITMRIKELESQREDLEKRIVEAKSEFVVLEKEHIVWWLNRFTKGDKNDESFKRNILDMLINSVTIYDMEKGYRFVIAYNLNSNKSETFEVSSQSFNGAS

SEQ ID NO: 19129 - protein, 511 aa, synthetic construct
MSEQIVRIKDVLQKEARVAFYARYSTSKQDYAMQLSEVQRFLQSYPCKLTYSYIDDATSAVKLSMERREKLQSLIEGARRKQFDVIVVYKGDRIARSTVEHQQFRKLMNELEIPVIISSTREIYTSGGIVQLAVSDGLTKMEYEYIKERTSDTLKSKQKRGEWAGGKAPYGYRYIVEDKTFQRIEMEWNTVQCIFKWFKRGYSITKIVNELKSQKNEENESLERWNKEKVKGILTNPFYAGYIATYRFEEGKLTDRSKWILAPNTSIEPVLTKEEWEYIMQLYEEKKQRPHNPKRYNTPFLLRDILYCQHCHQLMKTKNKSRKKNGKIHGGRWYYCDSAGCDYKLSMEKIHEELEQSIFPSLLERADEKTRNAVGKQLQDEISWLEEQMKVIDRQNNKLLSALSKVESKISREYDRYESIEDNMPLLEPLVHYQFKKKKELTAIKQKSSEYQHQLAQKKQALLHVDKLECELTKEDMEDVYKARMLLLQLLPALYIDKCGVLDAEVHKDMN

SEQ ID NO: 19130 - protein, 515 aa, synthetic construct
MKTAIYLRKSRADLEAEARGEGETLAKHRSTLLKIAKEMNLNVLAVREEIVSGESLVKRPEMLALLEEIEDNKYDVVLCMDMDRLGRGGMKEQGIILETFKRSNTKIMTPRKTYDLNDEWDEEYSEFEAFMARKELKIITRRMQRGRIASVEAGNYLGTHAPFGYDIHRLNKRERTLTINSEEASVVRMIFDWYANEDMGASAIRNKLNDLGYKSKLENDWNPYSILDILKNNVYIGKVTWQKRKEVKRPDAVKRSCARQDKSDWIIADGKHEPIIPESLFEQVQEKLNSRYHVPYNTNGIKNPLAGIIKCSKCGYSMVQRYPKNRKETMDCKHRGCENKSSYTELIEKRLLEALKEWYINYKADFEKHKQDDKLKETQVIQMNEAALRKLEKELVDVQKQKGNLHDLLERGVYTVDMFLERSNVVSDRITEITSTMENLKKEIKTEIKKEKVKKDTIPQVEHVLDLYFKTDDPKKKNSLLKSVLEKAVYKKEKWQRLDDFELVLYPKLPQDGDI

SEQ ID NO: 19131 - protein, 587 aa, synthetic construct
MPQLYSYIRWSSERQQKGTTRQRQVIGAKEFAIANGLELVEIEDPGVSAFRGKNTTHGKLGDFIDAVRQGAIPPDSWLYVENLDRLTRQEVTTAQKLFIELLDLGLTLVTGMDKRVYTLESVNKNPTDLMISLLLFSRANEESKTKQARTIGNVESLIERHRQGLPVNIKSCGKHPFWIDDSGSQYESVKRHAIYWEIAREAIELFLSGYGIYKVKRFLDEKYPNGLNGKEWGYQVLKKMRESRALIGERQINIGSHTYTLRDYYPCLCKNEVEFLHLQELKGQNSYKSKKNPLNEQIKLLSGLAILRCSKCGGTMSSFMNKGKPRYICLNGRHLQKGCVGWSLTAPLVDHCVIIALLMGYMDANRKERQDTSDISALIEAKNTSVGELNVSITNLVAVIEAGVNVSELASRLKVLSTERETFLKEIERLKERKALIDSKGSFEVSMMDFINLIHWNVLSDYAHESRDKIRSTINKIIEHVIIDKTDGCITIKIKCRGSDEQLIFCGIGRKPHWKFDIALYVEQDTDGDTTFEEKSILPMANQLMEEATKQFALIREGYISYFDKICKILAAIGYPDIDGSAFWPNR

SEQ ID NO: 19132 - protein, 413 aa, synthetic construct
MAVRLIKTKSNRKKQRVCAYTRVSTTNSSQLDSLENQKAYFENLYTNRVDVDFLGVYYDKGISGSKAERPSFQAMLEACRQGQIDLIHTKSISRFARNTMTVLEVSRELKVLGVGIYFEEQNINTLSNEGEVMLLVLASLAEEELQSMSDNQRWAFQRKFQRGEMVINTKRFMGYDVDDKGELVINEAEAQIVRRIFQLYLDGMGMHRIAKLLNQENVPTVTDAKWHDTTVRNILKNEKYKGTVLLQKYFHVGINGPKRLNQGQVEQYLIEDNHEPIVSKEVWQAVQDKLASKTWKQGVNKHYRFTSMLKCEYCGSTLKRQVTYKKQIVWCCSKYIKEGKASCRGMRVPEKAIEEWKLKTPVTVIERNEYGQKHYSYSSQESAADGHPSASNQNKSGSLLSGVHRPRRTAIKL

SEQ ID NO: 19133 - protein, 451 aa, synthetic construct
MTKAAIYIRVSTQDQVENYSIEVQRERIRAFCKAKSWDIYDEYIDGGYSGSNLERPGIKKLITDLKNIDAVVVLKLDRLSRSQRDTLELIEEHFLKNNVDFVSITETLDTSTPFGKAMIGILSVFAQLERETIAERMRMGHIKRAENGLRGNGGDYDPAGYTRKDGHLIIKKDEATHIKRAFDLYEQYYSITKVQEVLKEEGYPIWRFRRYRDILSNTLYIGRVTFSGKEYEGQHEPIISSDQFKRVQALLKRHKGHNAHKAKQSLLSGLITCSCCGENYVSYSTGKSKAAESKRYYYYICRAKRFPAEYEERCMNKTWSRKKLEEVIISELKNLTEEKKQTNKKEKKINYEKLIKDIDKKMERLLDLFMNTTNISKGLLEQQMEKLNLEKEKLLLKQQRSEEESLSREVTLTTIDDAFEKLDFKEKQIIINNFIEQIYINQNNVKIIWRF

SEQ ID NO: 19134 - protein, 517 aa, synthetic construct
MKTAIYLRKSRADLEAEQRGEGETLAKHRTALLKVAKEKNLNIIAVYEEIVSGESLVHRPEMLKLLQNVEDKKYDAVLCMDMDRLGRGGMKEQGIILETFKRSNTKIVTPRKIYDLNDEWDEEYSEFEAFMARKELKIITRRMQRGRIASVESGNYLGTTPPYGYLIKELKDGRTLEPHPEQSKIVKLIFEWYTHDDPEIRIGASMIANKINALGHKTATGKTWGNWTVLGIIKNPVYSGKVTWKKKEIKKSITPGKVKDTRTRDESEWIIVDGKHDAIISEELFEKAQSILKGRYHVPYQLTNGVRSALAGIIKCAKCGASMVYRPYTTQKPALKCYNQTRCHNKSSNYELVEQRILEGLAEWLEIYKANFEANTPLEETNEMKQINVYRQMLKNLEKELGETERQKEKLFDLLERGIYTDEIFLDRSKSLAEKTEKLQQDIDTIKEGIDSELQREEAQGSIIPQVERVLDLYTKTDDPKKKNSLLKSVLEKAVYNKEKHQYKDDFSLTLYPKLPK

SEQ ID NO: 19135 - protein, 487 aa, synthetic construct
MNSYAVYVRVSTDRDEQVSSVENQIDICRNWLERNGFKWDEKNVFKDEGISGTLFVDRPAIQLLLRKAKAKEIDMVVFKSISRLARDLKDSLEIREVFLAHNVRIISVEEGYDSVKAGKNDMAFELWSLFSAQYSRTLSSSITAALAVKVRRGEHIGKIPFGYNRENQKLAIHDEESEVVRKIYSWYTTGWGYKKITNELNRLGIKSKTKKKWQMTSVQRILRNSIYKGTFILNQYTSVKVGGKKKQIRNPKEKWFVFPNHHPAIVDEETWEQANQKNITLRKTKITPWNEFRELARCAVCGSNMVIVQSHLKKKNGERTEWKYLKCSQYRRSGKHGCVNHVPIQYRDFRQFIIDLLVKKGESITLKLQSNVEGGREKKIKKLQQLMNTNEQKKKSLLDLYLEKLIDKEEFEKKRNDLEIEIIKSSHELFILQQNDVIQTDIKTIKEAFEQLQQQEHDLYHVFRTLIQKIIIHQDGTVDITYTFEGP

SEQ ID NO: 19136 - protein, 524 aa, synthetic construct
MKTIREVLGKGKKGAFYARVSSDKQTIDMQRHHVYKFIENYECEIVQEYIDPGESAFKKKITQRPQMMKLIEGVEQGKYDFVIVYADDRLARSELEHMQIRLIMKQKNTDVILTSTSEIYTERDSITQLIRDGATRYEVERISHRTRDAYKQRTADGKRMGGPIPYGYKEDEKTKELSIVEDEKDVVLKIYEMYHKGDGFSAIANMLNEQKEKTNCQHWKKEAVKRILTNPYYAGYVTNKRIKPGAGNSVEDFSKWEMERCEEIPPIMSKAEWLTTIRLFEQKRNGEIPPKKLKTEYILRDLIHCKSCDLPLMPKNQETKGKNGKKYGHKKYICPNKSCKMSHIMGELHDSIFNSIVAEIKDKVISKSYTGLIVEIEKNVDDQMRNTQKETKRLTKQIEKCLVLVKESEREIDALYNQKKRLSEDNPDIDPLLDVMLDYRIHLLHEIKESEEIIKQKQLEIEHIQEVSFNRKVLQQNVLKELALEFSSLKLDIKRIRHFLVHIVDKITIDKDMNTAYILKISLG

SEQ ID NO: 19137 - protein, 449 aa, synthetic construct
MKQAIGYLRQSTTKQQSLAAQKQTIKALAEKHNIQHITFYSDKQSGRTDKRNGYQQITELIQQGQCDVLCCYRLNRLHRNLKNALKLMKLCQTYHVHILSVHDGYFDMDKAFDRLKLNIFISLAELESDNIGEQVKNGIKEKARQGKLITTHAPFGYHYHNGTFTIDTVKSPTVKAVFNYYLQGYGYKKIAQYLEADDNFINRKPYQVRNIILNPNYCGRVINQYGQYENMFPAIVSTTIYEEAQVTRTQKQVKCKPSENQLKQKIKCPYCHSTLTNMTVRKPDHSLRYYVCPQNMNNARFVCEFKGINAQELETSVLATCQDFFQNQQLYSKINHTIQQRLKRQRDIEIKTTLNHEQLIEKLAQGKIDAETFKEQTHSLHQQSKPISSISAYQIRKAFQNIIQQRFTLNMLYPYIDEINISKNKSLAGIYFKNEPLNIVKQTMKLSIV

SEQ ID NO: 19138 - protein, 515 aa, synthetic construct
MKTAIYLRKSRADLEAEARGEGETLAKHRTTLLKIAKEMNLNVLAVREEIVSGESLVKRPEMLALLEEIEDNKYDIVLCMDMDRLGRGGMKEQGIILETFKRSNTKIMTPRKTYDLNDEWDEEYSEFEAFMARKELKIITRRMQRGRVASVEAGNYLGTHAPFGYDIHRLNKRERTLTINPEEASVVRMIFNWYANEDMGANAIRSKLNDLGYKSKLGNEWNPYSILDILKNNVYIGKVTWQKRKEVKRPDAVKRSCARQDKSDWIIADGKHEPIIPESLFEQVQEKLNSRYHIPYNTNGIKNPLAGIIKCAKCGYSMVQRYPKNRKETMDCKHRGCENKSSYTELIEKRLLEALKEWYINYKADFEKHKQDDKLKETQVIQMNEAALRKLEKELVDVQKQKNNLHDLLERGVYTVDMFLERSNVVSDRITEITSTMENLKKAIKTEIKKEKVKKDTIPQVEHVLDLYFKTDDPKKKNSLLKSVLEKAVYKKEKWQRLDDFELVLYPKLPQDGDI

SEQ ID NO: 19139 - protein, 432 aa, synthetic construct
MEQQKKRCIVYTRKSHEEGLDQAFNSLDAQRQACESYIQSQQFNGWELMPKRYDDGGFSGGTLERPALKELLADIEAGNVDVVVIYKIDRLSRSLVDFAELQSRFEKHGVSFVSVTQQIDTSGSTGRMMLNILMTFAQYEREIIADRIRDKMAATRKQGKFAGGTLPYGYKSENKKMVVRQDEAEVLKRIFQRYLEIQSPKQIAMELNSNGLRIRTGREWNTSHIYRQLNSYACIGKVEYKGQIYDGEHEAIIPLETWNEVQRLLKINAATPKGGKTRESVNAPLKGILRCGHCGCAMMPHYARKSDGRKYYYYICQKDSKRGKADCPVHRIPGSDIENLVMDELGKIFRSETFRQLIRQQGITAGMLDEQFSDMGNFWDGLYPAERQKLLHLMIDKVTVYGESLDIEVKTAGIQSIYEEIENEQVQPDEER

SEQ ID NO: 19140 - protein, 377 aa, synthetic construct
MAGIRTENKIYEVGIYCRLSKDDGTDNESASIATQKSILTDYVKRQGWHLAKTYVDDGYSGTNFQRPSFQNMIKDIENGLINCVITKDLSRLGRNYLDCGLYLEVFFPEHNVRYIAVNDGVDTLNKSAMDITPFRNILNEMYSADVSVKIKSAYRARFQQGKFMGTTAPYGYVKDPADHNHLLIDDKVAHVVREIFDLALAGNGIAKIRKHINKQHILRPAAYAVEQGATGYERYFEDNEENRYIWSENSVRGILRSPIYAGNLAGYKRIAANMKSKKRPSKLPEEWEVIPDTHEGIVTQEEFDTVQQLMTSRRREQNAGGFENIFSGVIKCADCGYAMRAASANRRKRPDIIDCVQYTCNNYGRYGNHLSQITSDL

SEQ ID NO: 19141 - protein, 430 aa, synthetic construct
MSTDQEEQLSSYENQVNYYREFISKHEDYELVDIYADEGISATNTKKRDAFNRLIQDCRAGKVDRILVKSISRFARNTLDCIKYVRELKELGVGVTFEKENIDSLDSKGEVLLTILSSLAQDESRSISENATWGIRKKFERGEVRVNTTKFMGYDKDENGRLIINPQQAETVKYIYEKFLEGYSPESIAKYLNDNEIPGWTGKANWYPSAIQKMLQNEKYKGDALLQKTFTVDFLTKKRIANDGQVNQYYVENSHEAIIDKDTWELVQLELARRKAYREEHQLKSYIMQNDDNPFTTKVFCKECGSAFGRKNWTTSRGKRKVWQCNNRYRVKGQIGCQNNHIDEETLEKAVVMAVELLSENVDLLHGKWNKILEENRPLEKHYSTKLAEVINKPSWEFDSYEMCQVLDSITISEDGQITVRFHEGTEVDL

SEQ ID NO: 19142 - protein, 413 aa, synthetic construct
MSVKKIRVNKQKHKQRICAYIRVSTTNGSQLESLENQKHYFENLYSNRDDIDFVGVYHDRGISGSKDNRPNFQAMIENCRKGMIDIIHTKSIARFARNTVTVLEISRELKAIGVDIFFEEQNIHTLSSEGEVMLSVLASIAEDELRSMSGNQRWAFQKKFQRGELVINTKRFLGYDIDENGELIINPEEALIVRKIFALYLEGYGTHRIAKLLNEKGVATVTGAKWHDTTIRQMLSNEKYNGSVLLQKYFHDGVNGPKKLNQGELEQYLIEDNHEAIISMEDWQAVQVKLNSRRWQQGRNKTYKFTGLLKCQHCGSTLKRQVSYKKKIVWCCSKYIKEGKAACQGMRVPEVDISNWEITSPITVLERDRNGEKYYSYSGQESADQRSSSGQEENQGSRILSSVHRPRRTAIKL

SEQ ID NO: 19143 - protein, 494 aa, synthetic construct
MKAAIYIRVSTDEQALEGFSIEAQKRRLLAYADSQDWEVAEVYIDDGWSAKDLKRPEMKRMISDIQDHIFDVVLVYKLDRMTRSASDCDHLLKIMETYNVKFQSCTESFETRTATGRLFIRLVADIAQWERENTAERVRFGMEQMVMEGRRPGGPINFGYDKDEKLVEDEVMQIRMLRKFYLEGDGIKGVAQKLNGMGFLRRGYKWTSFSVWYILDNPYYAGKLRYGGKKANGKYASRKKEGVVDLIIQEGSQETVFTWEEYEEHKAEMKRRSFDGYSKVREYWFSGVLICGKCGSKMSGRYHQNKRKDGSYNKITSYICVGRQTGRGCDMPMFRQELVEKLFLEWIEDRIAIDEGTMREIKVSKKEKANLSLRDDLNNELKRIKERRKKWQRMFADDLITQDELREHNKDEQENEKVVLSELEKLPEEETKLSEDMNEVLFGIPEVWPLMSDGDKKELILEIFKEIKLYTPVGKTHGRKGKFIPASIEQVIYN

SEQ ID NO: 19144 - protein, 586 aa, synthetic construct
MKKNNVEIIKADSLVRRRGDNFERESKRVAAYCRVSSDSEDQKNSYESQVRHYKDYISQRSDWELAGIYADEGISGTQVGKRQDFQRLINDCVNGEIDYIVTKAIARFARNTLDTLKYVRMLKDMQIGVYFEEENIDTLTMDGELLLTILSSVAQQEVENTSAHVKKGLKMKMQRGELIGFQGCLGYDYDVETKQLSINKKEAKIVRYIFERYLEGIGGKVIARELDELGYKSPRGLDHWNDTTVLGIIKNEKYKGDILMGKTFTVDPISKRRLSNFGEEDKYYIKDNHEPIISKEDFEKAQEIRLRRAGNKKTAANVNGKRERYSKMYAFSSMLECGFCGSILSRRSWHCRSDYRKVVWHCVTSIKKGKKFCKHSKGLEELAIEGAFMEAYRKLYHSNENLMTDLLETIESELNDNSLNKELKRITNKLRTLLKKEENLVNLRLEGKISDTIYNEKYNEISSEKEFLAEEKVNIETTLKSEIDVKKRLTEFKHLLSSQKMLTEFDRAVFESIVEKIIVGGVNSDGEIDPAMLTIIFKTGETQNKDGKQFKSKRKNAKLETDKLCPQNSDEDKKLYSQGPDNTCAS

SEQ ID NO: 19145 - protein, 629 aa, synthetic construct
MPQLYSYIRWSSDRQDKGTTRNRQVAAAKAYAEEAGLEMVEILEPGVSAFRGKNRAGKLGDFIDAVKNNAIPSDSWLYCENLDRLSRDQVDEALRLFLELIGLGLTIVTGMDRKVYNSKSIKQNPIDLMISILMFIRGNEESETKSNRTVGNVVALVERHKEGLPVNIKSVGRHPFWIDDSGSQYEAVKKHPVYWSIAREAIEMFLAGDGIYTVKRHLDDKYPNGLKGKEWDYQVLKKMRDNHALIGERTINVAGATYKLDNYYPWLCKDEAEFLTLAERKQQNNYKAKKDKTEEIKLLSGLQVLRCSKCGGTMHSFMNHGSARYICTNGVHLQKNCSGWSISAQLVEHCTMISLLIGYMDKSRKDGIDTTAIEEEISRKATLITDLESRISNMAKAIAIAPEVSELAVQLNAFDLERKKAVLEVDKLKERLHSLKGKGSLEVDITDFLMLIQWSVFTNMEDADRNKIRKIISSIIESIIIDKTDGCITIKIKCHNKDEWLVFGGVNRKPFWAFTIEYSTNDSKDIEGEDSSNFVSNPLFQKAVEQLDSIKQSYLNLFETANTMLGVVGYSDIRGASFWPNTGQYERANVEYEGITYSIAMNGRVSKAITTALEATGLSRKAFIERYKV

SEQ ID NO: 19146 - protein, 610 aa, synthetic construct
MKKNNVEIIKADSLVRRRGDNFERESKRVAAYCRVSSDSEDQKNSYESQVRHYKDYISQRSDWELAGIYADEGISGTQVGKRQDFQRLINDCVNGEIDYIVTKAIARFARNTLDTLKYVRMLKDMQIGVYFEEENIDTLTMDGELLLTILSSVAQQEVENTSAHVKKGLKMKMQRGELIGFQGCLGYDYDVETKQLSINKKEAKIVRYIFERYLEGIGGKVIARELDELGYKSPRGLDHWNDTTVLGIIKNEKYKGDILMGKTFTVDPISKRRLSNFGEEDKYYIKDNHEPIISKEDFEKAQEIRLRRAGNKKTAANVNGKRERYSKMYAFSSMLECGFCGSILSRRSWHCRSDYRKVVWHCVTSIKKGKKFCKHSKGLEELAIEGAFMEAYRQLYHSNENLMTDLLETIESELNDNSLNKELKRITNKLRTLLKKEENLVNLRLEGKISDTIYNEKYNEISSEKEFLAEEKVNIETTLKSEIDVKKRLTEFKHLLSSQKMLTEFDRAVFESIVEKIIVGGVNSDGEIDPAMLTIIFKTGETQNKDGKQFKSKRKNAKLETDKLCPQNSDEDKKMYSQGPDNTCGVCQLVRKTQLILLGENKLTMKQLYQ

SEQ ID NO: 19147 - protein, 411 aa, synthetic construct
MRTVRRIQPIKSPCKPRFKVAAYARVSDSRLHHSLSTQISYYNRLIQAHSDWELVGIYYDEGISGKEQSNRQGFLNLIKDCEDGKIDRIITKSIARFGRNTVELLTTVRQLRLKNIGVTFEKENIDSLSSEGELMLTLLASVAQEESQNMSENIKWRVQKKFEKGIPHTPQDMYGYRWDGEQYRIEPNEAKVIRKVFKWYLEGDSVQQIVDKLNQEQVLTRLGNPFNVASIREFFKQEAYFGRLVLQKTYRESFSRNPKRNKGQRNKYIIENTHEPIVTKEYFDLVLHEKERRYQLMSQESHLNKGIFRDKISCSECGCLMIVKVDSKQVNKTIRYYCRTRNRFGASSCSCRTLGEKRLLASFKSKLGIVPDKEWVENNIKHIDYDFGQRIIWVIPVKGRKYPIEIREGRY

SEQ ID NO: 19148 - protein, 520 aa, synthetic construct
MKKVITIQATPSIIRSSSDDFSLKKRRVAGYARVSTDHEDQATSYESQMRYYSEYISGRDDWEFVKMYSDEGISGTNTKLRTGFKAMVEDALNGKIDLIITKSVSRFARNTVDSLTTVRQLKEVGVEIYFEKENIWTLDSKGELLITIMSSLAQEESRSISENVTWGLRKQFAEGKVHFPYTNVLGFKAGEDGAIVVDQDEAKTVRYIFQQALIGKSPYHIAKDLTEQGIPSPSGKSHWNATTIKRMLRNEKYKGDALLQKTYTIDFLTKKKNINRGELPQYYVENNHEAIVDRETFDAVQQVLDNKGRKSSTTIFSSKLVCGDCGHFFGSKVWHSTSKYRRVIYRCNEKYNGVNRCSTPHVTEEEVKQWFVLALNEVIENKDEIIDNIKVLCSIDNLEGIEYQIMELENEADILRQMVSRLVMENASTLQNQDEYQSKYHQISSKYESLVREIEELEVQKLAKSKRNNELQDFISALDKQDSILTDFDEFLWETTVERITIYKDKEIFFTFKNGAVTII

SEQ ID NO: 19149 - protein, 475 aa, synthetic construct
MKTTNKVAIYVRVSTTSQVEEGYSIDEQKDKLEAYCKIKDWKIYDVYVDGGFSGANTQRPELERLISDVKRKKVDIVLVYKLDRLSRSQKDTLFLIEDVFAKNDVAFISLQENFDTSTPFGKASIGMLSVFAQLEREQIKERMMLGKEGRAKNGKSMSWTTIPFGYDYSKETGVLSVNPTQALIVNRIFTEYLNGKPVVKIIRDLNAEGHVGRKRPWGETITKYLLKNETYLGKVKYKDKVYEGQHEPIITQELFDLVQLEVERRQISAYEKYNNPRPFRAKYMLSGLMKCGYCGASLGLRYTRKDKNGISHHKYQCRNRHSKDLEKRCESGWYSKEELERVVIKELERIKFDPKYKNETLAKKEETIKVEEIKKQLERINNQVSKLTELYLDEIITRKELDEKNDKIKTERQFLEEQLENQKSNVLSIRKRKLTRLLKDFDVEKLSYEDASKIVKNIIKEIIVTKDGMSITLDL

SEQ ID NO: 19150 - protein, 584 aa, synthetic construct
MKTNNVEIIKADSLVRRRGVNVERHLKRVAAYCRVSSDSDDQKNSYESQVRHYKDYISQRSDWELADIYADEGISGTQVGKRQDFQRLINDCVNGEIDYIVTKAIARFARNTLDTLKYVRMLKDMQIGVYFEEENIDTLTMDGELLLTILSSVAQQEVENTSAHVKKGLKMKMQRGELIGFQGCLGYDYDVETKQLSINTKEAKIVRYIFERYLEGIGGKVIARELDELGYKSPRGLDHWNDTTVLGIIKNEKYKGDILMGKTFTVDPISKRRLSNFGEEDKYYIKDNHEPIISKEDFEKAQEIRLRRAGNKKTVANINGKRERYSKMYAFSSMLECGFCGSLLSRRSWHCRSDYRKVVWHCVTSIKKGKKYCKHSKGLEELAIEGAFMEAYRQLYHSNENIVSDLLETIESELNDNSLNKELKKITNKLRTLLKKEENLVNLKLEGKISDSIYNEKYNELSLEKEYLTEEKVNVETTLKSEIDVKKRLTEFKQLLSSQKMLTEFDRTVFDSIVEKIIVGGVNSDGEIDPAMLTIIFKTGETQNKDGKQFKSKRKNAKLEPDKFCPQNCDEYKKLYSQGIDNTR

SEQ ID NO: 19151 - protein, 475 aa, synthetic construct
MKTTNKVAIYVRVSTTSQVEEGYSIDEQKDKLEAYCKIKDWKIYDIYVDGGFSGANTQRPELERLISDVKRKKVDIVLVYKLDRLSRSQKDTLFLIEDVFAKNDVAFISLQENFDTSTPFGKASIGMLSVFAQLEREQIKERMMLGKEGRAKNGKSMSWTTIPFGYDYSKETGVLSVNPTQALIVNRIFTEYLNGKPVVKIIRDLNAEGHVGRKRPWGETITKYLLKNETYLGKVKYKDKVYEGQHEPIITQELFDLVQLEVERRQISAYEKYNNPRPFRAKYMLSGLMKCGYCGASLGLRYTRKDKNGISHHKYQCRNRHSKDLEKRCESGWYSKEELERVVIKELERIKFDPKYKNETLAKKEETIKVEEIKKQLERINNQVSKLTELYLDEIITRKELDEKNDKIKTERQFLEEQLENQKSNVLSIRKRKLTRLLKDFDVEKLSYEDASKIVKNIIKEIIVTKDGMSITLDF

SEQ ID NO: 19152 - protein, 481 aa, synthetic construct
MITTNKVAIYVRVSTTNQVEEGYSIDEQKDKLSSYCDIKDWNVYKVYTDGGFSGSNTDRPALESLIKDAKKRKFDTVLVYKLDRLSRSQKDTLHLIEDVFIKNGIEFLSLQENFDTSTPFGKAMIGLLSVFAQLEREQIKERMQLGKLGRAKSGKSMMWAKTSYGYDYHKETGTVTINPAQALAIKFIFESYLRGRSITKLRDDLNEKYPKHVPWSYRAVRTILDNPVYCGFNQYKGEIYPGNHEPIISKEEYDKTQSELKIRQRTAAENVNPRPFQAKYILSGIAQCGYCGAPLKIMLGVKRKDGSRLKKYECHQRHPRTLRGVTTYNDNKKCDSGFYYKDKLEAYVLKEISKLQDDADYLDKIFSGDNAETIDRESYKKQIEELSKKLSRLNDLYIDDRITLEELQSKSAEFISMRGTLETELENDPALRKNKRKADMRKLLNAEKVFSMDYENQKVLVRRLINKVKVTAEDIVINWKI

SEQ ID NO: 19153 - protein, 481 aa, synthetic construct
MKTTNKVAIYVRVSTTSQVEEGYSIEEQKDKLESYCKIKDWSVYKVYTDGGFSGSNTNRPAIEQLIKDAQKKKFDTVLVYKLDRLSRSQKDTLHLIEDVFIKNGIEFLSLQENFDTSTPFGKAMIGLLSVFAQLEREQIKERMQLGKIGRAKAGKSMMWAKTSYGYDYHRETGTITINPAQALTIKFIFESYLRGRSITKLRDDLNEKYPKHVPWSYRAVRTILDNPVYCGFNQYKGEIYPGNHESIISKEEYDKTQSELKIRQRTAAENVNPRPFQAKYILSGIAQCGYCGAPLKIMLGVKRKDGSRLKKYECHQRHPRTLRGVTTYNDNKKCDSGFYYKDKLEAYVLTEISKLQDNAGYLDKIFSGDNAETIDRESYKKQIEELSKKLSRLNDLYIDDRITLEELQSKSAEFISMRGTLETELENDPALRKNKRKADMRKLLNAEKIFSMDYEGQKVLVRGLINKVQVTAEDIVINWKI

SEQ ID NO: 19154 - protein, 515 aa, synthetic construct
MKTAIYLRKSRADLEAEARGEGETLAKHRTTLMKIAKEMNLNVLAVREEIVSGESLVKRPEMLALLEEIEDNKYDVVLCMDMDRLGRGGMKEQGIILETFKRSNTKIMTPRKTYDLNDEWDEEYSEFEAFMARKELKIITRRMQRGRVASVEAGNYLGTHAPFGYDIHRLNKRERTLTINPEEASVVRMIFDWYAHEDMGANAIRSKLNDLGYKSKLGNEWNPYSILDILKNNVYIGKVTWQKRKEVKRPDAVKRSCARQDKSDWIIADGKHEPIIPESLFEQVQEKLNSRYHIPYNTNGIKNPLAGIIKCSKCGYSMVQRYPKNRKETMDCKHRGCENKSSYTELIEKRLLEALKKWYINYKADFEKHKQDDKLKETQIIQMNEAALRKLEKELVDVQKQKNNLHDLLERGVYTVDMFLERSNVVSDRITEITSTMENLKKEIKTEIKKEKVKKDTIPQVEHVLDLYFKTDDPKKKNSLLKSVLEKAVYKKEKWQRLDDFELVLYPKLPQDGDI

SEQ ID NO: 19155 - protein, 546 aa, synthetic construct
MIENTETKTVAIYARVSTIEQAEEGYSIDEQLRVLNEFCKSEGYLVYDEYVDRGISGKNISGRPAVQRMLNDAEQKKFEVVLVWKMNRLARKSLDLMNIVEKLNSKNIAFRSYTEKYETETPPGKLQFQLMAAIAEYERNNIAENVKMGMIARAKEGRWNGGQVLGYDVVEISSDNRKRKDTHLVINEREANTVQLIFQMYGSGHGYKSIANCINKKGYRTKKGKTFSLNAIKIIVTNPVYAGYIRYNVRKDWNEKRRNNINPNPIIQKGEHEPIISEEVWQVAQNVYQSRSCKPNRIHDGEFPLTGIMRCPACGAGMVISPTTNTLKDGTKRVLEYYVCGSWKNKGTLVCRSNGVRTEYADAFTLDKLQRLMHSDKLIKELVKSVNSRNGKKFAPLQKEFEMYAKQMNEAEQKLSKTFDAYTDELISKAMYVEKAKRLEGQIQELKELMEPLRKQIQGNTVKVVSYEMIKEVLLNFSKAFQNALTREQRKRLLHLLIHKITINEDRKIESIQLKFNNEVLKELKIEVDDLSNDKSSTSFSVLIAI

SEQ ID NO: 19156 - protein, 1231 aa, synthetic construct
MSKEKIKVYLYTRVSTSIQIDGYSLEAQKSRMKAFALYNDYEIVGEYEDAGKSGKSIEGRVQFTRMMEDIKSGKDGVSFVLVFKLSRFARNAADVLSTLQIMQDFGVNLICVEDGIDSSKDAGKLMISVLSAVAEIERENIRVQTMEGRIQKAKEGKWNGGFAPYGYQLIDGKLIINEEEAIAIRTIFDQYVNTSIGANGLSKYLENHGIRKIPRQNGKNPLFDAGLIRKILKNPVYNGKIAFGRRTLEKVHGTRNEYRQVEQDDYLVAEGIHEAIIPDELWQAAQVKLKAQAKKYEHVNKGKNMRTHLLSGIVKCPICGAGMFGNKSIKYKKDGTKYKDFYYYGCKHRLMNRGHKCTYNKQIREELLDDAVAEVIIKLVSNPKFASMIQEKINMKVDTSAIENEIDNYQNELRKSHSTKYKLIEEIDNLDVEDKHYKRRKNDLDDRLYRMYDKIEELESQLIEAKAKKETIEVEKLTGDNIYKVLIYFDKLYKVMNDVERRQLIEALISEIQIYEEKQPNGQWLKSITFKLPIIDEDLNISLENDEQVDGVSVPGVDPNTGFPLPDIGGGIGVEVTFDVVVESIPNPNPTNNIATIDYSYTPVEGGIPNDFSVDSNPVPVEVISADVEVTKLSEPTIVNPGEELIYTIKVVNNGPFPSENVVLTDDVPASIINPEYSLDGGVTFQPWTGSLNIGTLEVGETRVIIIRGIVNPSTVGIITNTAVVSSTTADPNLNNNTSTIETEVNLLADILVMKTAEPNSAVPGTLLRYTIQVENLGPANAENVILNDDIPASIINPEYSLDGGASFQPWNGSLNIGTLNSGISLTVLIQGTVSLNSSEYIVNTATVSSTTPDPDLSNNISTIITPVNPQAGISIIKVADEDVAVPGEEFVYTIEIFNEGPSNATNVVLTDDIPDVILNPEYSLDGGATFQPWNGSLNIGTVAPGQLIRIIIKGLVSSTATGDITNTAEVSADVPEPVTDSSTVTTPIVPSADIEVIKTSNMDTAVPGETFSYTITVINLGPSAAQSIVLTDDIPDVILNPEYSLDGGVTFQPWNGNLSIGTLDAGEIRSIIIRGTVSQTAVGTIINTATISSPTPDPNPDNNTSTDETDISPLADISVIKGNEPVAIPGGRFIYGIEIANAGPSFAENVTLTDNIPASILNPEYSIDNGVTFQPWNGSLNIGTLDAGEIRNIIIRGTVSQTAIGTIINTATVSSTTPDPNLNNNTSTSE

SEQ ID NO: 19157 - protein, 519 aa, synthetic construct
MKKITKIDNVAQVKPAKLKVAAYARVSTSSEEQLLSLENQKLHYEQRILANSNWEFVEMYFDEGISGTKIDKRNGLKRLLQDCETGKVDFILTKSISRFSRNALDCLEIVRRLIDLNIFIEFEKENINTQTMDGELMLSILSSLAESESRSLSQNTKWSIEKRFQNGTYKIGYPPFGYDWVDGVMVINKEQAVVVRDIFADVLKGTSTGDIAEKLNQQGVTTKRRKTWHGTTIRGIIKNEKYIGDALFGKTFTDDSFKRKVNRGDKNQYFMEGHHSAIIDKETFEQAQQMLVQNAKSKNIVQDDDKYQNRYSFSGVLKCGECGGIFKRRIQSKNKNEKYVAWACTTHLKDKHSCSMKFIKDEQIKLAFITMMNKLVFFHQILLKPLLADVRSTTYTVDNTQIVVLDDELEKLKQQQDNLVQFVANGYIDRLTFVKEQNQLTKQMDDLENKRKMLTGSISKGFDNLESLEELVKLTKQGQMLTAFEDSQFDSFVDEVVILSRTELVFKLKCGLKLKERLV

SEQ ID NO: 19158 - protein, 454 aa, synthetic construct
MRCAIYRRVSTDEQAEKGHSLDNQKFRLESFAMSQGWEITGDYVDDGYSGKNMERPALKRMFADIDNFDVILVYKLDRFTRSVRDLNDMLETIKGHEIAFKSVTEAIDTTTATGRMILNMMGSTAQWEREMISERIKDVLGKLAEQGIFPKGKPTYGYKIKNGVISIDEEEAKIVKLIFEKSKTLGQHAVSKYLRDNGIYTPSGSTWMSGGIGRIIRNPFYYGEMKVNGKLIAIKNEGYTPLISKEEFDLVNRISKSRNMKKTKRKSNIIYPFSGIALCPRCNKPLRGDRSKIGEKYYTYYRCMNAREGRCTIKRIKTQVIDIAFSEYVSGAFNESNIQIDNKDESIALERKIEALKSKVDRLKELYIDGDITKVRYKEQTDAINIEINSMQDKMLSLDDGKITEKAIEQAKELEKVWLLLDDKTKDESLRSVFDTITLKETEHGIIITSHSFL

SEQ ID NO: 19159 - protein, 515 aa, synthetic construct
MKTAIYLRKSRADLESEARGEGETLAKHRTTLLKIAKEMNLNVLAVREEIVSGESLVKRPEMLALLEEIEDNKYDVVLCMDMDRLGRGGMKEQGIILETFKRSNTKIMTPRKTYDLNDEWDEEYSEFEAFMARKELKIITRRMQRGRVASVEAGNYLGTHAPFGYDIHRLNKRERTLTINPEEASVVRMIFDWYANEDMGANAIRSKLNDLGYKSKLGNEWNPYSILDILKNNVYIGKVTWQKRKEVKRPDAVKRSCARQDISDWIIANGKHEPIIPQSLFEQVQEKLNSRYHVPYNTNGIKNPLAGIIKCSKCGYSMVQRYPKNRKETMDCKHRGCENKSSYTELIEKRLLEALKEWYINYKADFEKHKQDDKLKEIQVIQMSEAALRKLEKELVDVQKQKNNLHDLLERGVYTVDMFLERSNVVSDRITEITSTMEKLKTEIKTEIKKEKVKKDTIPQVEHVLDLYFKTDDPKKKNSLLKSVLEKAVYKKEKWQRLDDFELVLYPKLPQDGDI

SEQ ID NO: 19160 - protein, 452 aa, synthetic construct
MKAAIYIRVSTQEQIENYSIQAQTEKLTALCRSKDWDVYDIFIDGGYSGSNMNRPALNEMLSKLHEIDAVVVYRLDRLSRSQRDTITLIEEYFLKNNVEFVSLSETLDTSSPFGRAMIGILSVFAQLERETIRDRLVMGKIKRIEAGLPLTTAKGRTFGYDVIDTKLYINEEEAKQLQMIYDIFEKEKSITTLQKRLKKLGFKVKSYSSYNNWLTNDLYCGYVSYADKVHTKGVHEPIISEEQFYRVQEIFSRMGKNPNMNRDSASLLNNLVVCSKCGLGFVHRRKDTVSRGKKYHYRYYSCKTYKHTHELEKCGNKIWRADKLEELIIDRVNNYSFASRNVDKEDELDILNEKLKTEHTKKKRLFDLYISGSYEVSELDGMMADIDARINYYEAQIEANEELKKNKKIQENLADLATVDFDSLEFREKQLYLKSLINKIYIDGEQVTIEWL

SEQ ID NO: 19161 - protein, 515 aa, synthetic construct
MKTAIYLRKSRADLEAEARGEGETLAKHRSTLLKIAKEMNLNVLAVREEIVSGESLVKRPEMLALLEEIEDNKYDVVLCMDMDRLGRGGMKEQGIILETFKRSNTKIMTPRKTYDLNDEWDEEYSEFEAFMARKELKIITRRMQRGRIASVEAGNYLGTHAPFGYDIHRLNKRERTLTINSEEASVVRMIFDWYANEDMGASAIRNKLNDLGYKSKLGNEWNPYSILDILKNNVYIGKVTWQKRKEVKRPDAVKRSCARQDKSDWIIADGKHEPIIPESLFEQVQEKLNSRYHIPYNTNGIKNPLAGIIKCAKCGYSMVQRYPKNRKETMDCKHRGCENKSSYTELIEKRLLEALKEWYINYKSDFEKYKQDDKLKETQVIQMNEVALRKLEKELVDVQKQKNNLHDLLERGVYTVDMFLERSNVVSDRINEITLTMEKLQKEIKTEIKKEKVKKDTIPQVEHVLDLYFKTDDPKKKNSLLKSVLEKAVYKKEKWQRLDDFELVLYPKLPQDGDI

SEQ ID NO: 19162 - protein, 548 aa, synthetic construct
MRKSELTNQKIVAIYARVSTTEQAEEGYSIDEQIRVLNELCEREGYFVYEEYIDRGISGKNISGRPAVQRLLMDAEQKKFDVVLVWKMNRLARKSLDLMNIVEKLNSKNIAFRSYTEKYETETSTGKLQFQLMAAIAEYERNNIAENVKMGMIARAKEGRWNGGQVLGYDVIECEGSNKKRKNTQLVVNEKEAYTIRTIFKMYTSGHGYKSIANTINKLGHRTKKGKTFSLNAIKIIVTNPIYAGYIRYNVRRDWSEKGRNNINPAPIIQKGEHEPIILEGVWNVAQNVFKSRSCKPNRVHDGEFPLTGIMRCPVCGAGMVISRTTNKLKDGTKRVLEYYVCGAWKNKGTLVCRSNGVRTEYADAFVLDKLQRLMRSDKLIKELVKSVNSRNEKMFAPLQKEYNMYAKQMKELEQKMSKTFDAYTDELISKVMYAEKAKKLEEQIQQLKELMEPLRKQIQGNTAKHVSYKLIKEVLLNFSKAFQSALTREQRKRLLHLIIHKITIREDRKIESIQLKLNNGILKELKMGADDLSNDESSAPFSILIAI

SEQ ID NO: 19163 - protein, 532 aa, synthetic construct
MIKAVIYARVSTAEQAEEGYSIDAQLDVVKKRCEQEGRTVIGQYVDRGISGKAMGNRLELQRLLKDAKVNKFQEIWVWKTNRLARNHLDLLKIVDELDKNNVGFKSCSEAFDTATPTGKLLMNVLASIGEFERESIVENVKMGMKQRAREGKWNGGIVLGYNTVKINGTENKTKLEIDEKEALLVKKIFELYAGGRGLKAITNLVNKLGYRTKRGNFFTPIAIRTILLNPIYIGKIRYNVRENWGEKRYRGINKNPIYTTGNHDPIISLDLWDRVQELYKKKSQKPKRLFDGTFPLTGLIKCPMCGASMVAGRVKKKLKDGNMKIIRYYQCGAWRNKGTAVCRSNGVRADKIEKQVFKRINQIVLSDKILKDTISKLNANTHNKIKPLEDELNITNNNIQNFEKNKSRIFDLYEEGMIAKEVLTSRLEHISNEIEMNFVQKVRIEKELQQNTSNPFSVDAIKRLLIRFHDLIGTVEPTKQKLILQLIITKININSNRELDSIVIHINEQIEKYILGVEEDGAPSSFGFTMVI

SEQ ID NO: 19164 - protein, 538 aa, synthetic construct
MTNQSTNNLKITALYVRLSNDDEREGESNSIMNQKKMLSKYASDHNLRKTTFYIDDGVSGTTFNRKGFQAMITDIEAGIVGTVVVKDMSRFGRDYLQVGMYTDIMFPEHNIHFIAINDGVDSEQGDNEFTPFRNIINEWYAKDTSKKIRAVFKAKGMTGAPLTTNPPYGYIKAPDNPTQWLVDDYSATIVRRMFQLTMEGYGPTQIAKKFQAEKILVPTHYAVSQGRKTNTVPSQSPYYWSDRTIAKLLEKPEYLGHTVNFRTTRKSYKDKRKIERDKKDWVIFENTHEAIIEQSVFDTVQELRKHKRRLTKQNELPLFSGLLFCADCGGKLYFCRGKSIARNQENYICSSYRRRTTECTSHYIRSVVLEEVVTNNLRKTMAYIQANGKSFFGDVLKGDQQAKKKEAQNQQKQLHDAQKRITELDAIFPQLYEDMVSGRINSERFDKLSSSYEEEQVLLKQQVVDTSKEIQTELDVNVYIRELRKFVHKHVNFDSLTPELLHEMIDKIIVHTGKKIEVHYKFGLGELGNLVDEHIIKK

SEQ ID NO: 19165 - protein, 516 aa, synthetic construct
MTGKQVTVIPMKPKKWVADNTEEKPKLKVAAYCRVSTEMEEQASSYEAQVQHYTDYIQKNPDWELAGIFADEGISGTDTKKRAEFNRMIDACKNGEIEYIITKSISRFARNTVDCLQYIRKLKELKIAVFFEKENINTMDAKGEVLLTIMASLAQQESQSLSQNTKMGVQYRFQQGQLRINHNHFLGYTKDEDGNLVVEPKEAEIIKRIFREYLEGSSLQDIAKGLMDDGILTGGKRKLWRAEGVRLILRNEKYMGDALLQKTFTVDFLTKKRVKNDGSYAQQYYVENSHPAIIPKDIFTQAQQELDRRKSMKNKNSQCFSGKYALTGITICGDCGNVYRRVHWKNRGTVWRCKSRVDKREHNCNGRTIYEKDLHQGILQAINETLIDRDIFLQQLTDNINSVLTDGLTEQLAGLDEQLKDLESEIISVAIGGQGYDELASQIFSLRDERDAVAKQIAANTNLQQRVDEMVVFVKEHDVINEYSEVLVRRLIEKVTIFEKNIVVDFKSGVRVTVEI

SEQ ID NO: 19166 - protein, 452 aa, synthetic construct
MKAAIYIRVSTQEQVENYSIQAQTEKLTALCRSKDWDVYDIFVDGGYSGSNMNRPALNEMLSKLHEIDAVVVYRLDRLSRSQKDTITLIEEYFLKNNVEFVSLSETLDTSSPFGRAMIGILSVFAQLERETIRDRMVMGKIKRVESGLPLTTAKGRTFGYDVVDTKLYVNKEEAQHLQLIYDIFEEEKSITFLQKRLKELGFKVKSYSSYNKWLMNDLYIGYVSYSDKVHVKGVHEAIISEEQFYRVQEIFSRMGKNPNMNRDSSSLLNNLIACEKCGLSFVHRVKDTASRGKKYRYRYYSCKTYKHTHELEKCGNKIWRADKLEEIIIDRVKNYSFATRNLDKEDELDSINAKLQVEHSKKKRLFDLYMNGSYEVAELDKLMADIDAQINYYNSQIEANEELKRNKKVQESLAELATVDFDSLEFREKQIYLKSIINKIYINDEQVTIEWI

SEQ ID NO: 19167 - protein, 452 aa, synthetic construct
MKAAIYIRVSTQEQIENYSIQAQTEKLTALCRSKDWDVYDIFIDGGYSGSNMNRPALNEMLSKLHEIDAVVVYRLDRLSRSQRDTITLIEEYFLKNNVEFVSLSETLDTSSPFGRAMIGILSVFAQLERETIRDRMVMGKIKRIEAGLPLTTAKGRTFGYDVIDTKLYINEEEAKQLQMIYDIFEEEKSITSLQKRLKKLGFKVKSYSSYNNWLTNDLYCGYVSYADKVHTKGVHEPIISEEQFYRVQEIFSRMGKNPNMNRDSASLLNNLVVCGKCGLGFVHRRKDTVSRGKKYHYRYYSCKTYKHTHELEKCGNKIWRADKLEELIIDRVNNYSFASRNVDKEDELDNLNEKLKTEHTKKKRLFDLYISGSYEVSELDAMMADIDAQINYYEAQIEANEELKKNKKIQENLADLATVDFDSLEFREKQLYLKSLINKIYIDGEQVTIEWL

SEQ ID NO: 19168 - protein, 537 aa, synthetic construct
MRALIVVRLSRVTDATTSPERQLAACQELCQARGYDVVGVAEDLDVSAGKTSPFDRPQLGRWLRDPAQYDVIVFFRVDRIVRRLFDLADLIRWARQHGVTLVSATEAHFDLSTDFGDIIALLVAKVAEMELNAISERNASASRHNIRAGKYRGGIPPWGYLPEKTDDGEWRLVQDPEQVDVIHEVVERVLKGEPLRAIAHDLTKRGIPTPRDRFAQLRGRPTSDYEWHSAPLKRSLTSPTLLGRIVARDPVLDAEGRIQRDDKGHRVLGPETVVVGDDGSPVVRAEPILSRDMFERVGVELEGRENRKEPTKRSSGLLLRVIYCGVCGRPAYRLKGGKGRKPRYRCASAQYKDQCDNRTVSLEWADDEVERRILEHMGPLERRQRVWFAGNDHTSELDEVNELLADLTDQLGTGAFKRGTPQRARLDQRIVSLTERQTELSATPSEPAGWVWEPTGELFADWWERQDTEARNVWLRQMDFKVTWTSHTEGSRTILDSFKLDGELTLNLDADQMFGPIFEMIEAYNEGARLDAIARRD

SEQ ID NO: 19169 - protein, 537 aa, synthetic construct
MAYIADLYIRVSTDEQADKGYSQRNQEEMLRKYCNNQSIQIRNVIYEDHSAKSFNRPAWKNIVLTLKKKKNNVNLILFTKWDRFSRNAGDAYQMINVLRALGVEPQAIEQPLDLSIPENKMMLAFYLAAPEVENDRRALNVFYGMRRAKKEGRYMGLAPVAYENKSEENGKKYIAPKEPDATTLKWAFQEISKGTYNTEQVWKMSKEKGLRCSKNAFWQVIRNPLYCGKIFVPQFKDEESKFVEGQHKAIISESLYYEVQEILDGRGRNYRPKITTHDEFPMRGFLICPECEKLLTGSKSKGRNKYYAYYHCVGGCTHRVNAEKVNDLILKELKNSIPKIADPAFYQEIISKNYFEQTNEVHSEKKQILLEIKDYEERLSHTRDLLATRQIDADDYRVMKSQYTSKISVLEAQLTRINYDTDDIQNTIKQGIIKINEINEALNNDCLGEVRKEIGSIFPENIVFSDGQVRTARPNEFIQYINLINRKLSAKKNGTKAEISVLSREVGAAGFEPATSWSQTRRDDRTTLRPENNKCGE

SEQ ID NO: 19170 - protein, 490 aa, synthetic construct
MNGSRDPLADLYVRVSTDEQADKGYSQRNQEEMLRKYCDNHSIEIRNVIYEDHSAKSFNRPEWKKLLQNLKKSKNQIDLILFTKWDRFSRNAGDAYQMINQLRDLNAEPQAIEQPLDLSIPENKMMLAFYLAAPEVENDRRALNVFYGMRRAKKEGRYMGLAPVGYLNRVDESGNKYIVPKEPDATIIAWAFEQLAKGVFNTEQIWKKSRERGLKCSKNAFWQVIRNPIYCGKIFIPAFKDEESCFVEGQHDAIITDNIFEQVQEVLDGRGRKYRPKIESRNDFPLRGFVICPQCGKLLTGSKSKGRHKYYTYYHCFQGCSYRINTEKLMHFFELELRKYIPKKEIITIYHSILVETYYELTKDIQISKKQTLVQIKEFENRMSHIRDLLATDKIDASDYHDIKAQYKGSIEQLNEKLVMLGEKVPDINKLLHQSIEAFLQLDKVLKDGNSEDFRAIVNMLFPEKIKPFENGIEYSKLNNILKLSYYYND

SEQ ID NO: 19171 - protein, 542 aa, synthetic construct
MKQPNNTKTKIYSTALYMRLSRDDENFGDSVSIETQRTILQKFAAENGLRVYGEYVDDGWSGTNFDRPSFQRMMNDVEAGKVNCIVTKDLSRFGREHVMMDYYLEFVFPEKQIRYIAIAENEDTEKGLSEFVPFKNLFNEWFAKDTSRKVKSALHAKFEKGERIFAYAPLGYKRHPEIKNTLTPDEETRWIVEKIFDLAVHGAGAAKITRILIAEKVPTAGWLNYKRYGTFAYIYAGAPEEKSYAWTIAQVKSILKDETYIGNSIHNKQTNISYKNKKKVRKPKEEWVRVENTHEALVSKDVFDRVQELIETRRRKQKDGTTQIFSGLVKCADCGWSLAFGMNKQNKKPYGHYHCSNYGQGTGHCTMHYIRYDVLYTYVLARVRYWSYQAQMDEGRLLQKLLKAGDRERMASQKKQSAELNKAEKRKTELDRLFAKMYEDWAAGRITEYNFNMLSQRYQAEQQELVEKIERLNTDLAAEQQSAVNAEKWVNLIKQYVNPSELTAELLNALIEKIVVHEAVKDESNTRTQEIEIYYRFIGKVE

SEQ ID NO: 19172 - protein, 515 aa, synthetic construct
MYRPQELDVFIYLRKSRKDLEEEKKAMEHGQHYDTLERHRTQLLELAHKEHHNIIDILEEVVSGEYISERPMMQKLLREVETGIADAVLVMDLDRLGRGDMVDQGTIYRVFRYSETFIITPTEIIDPNDENQELTFSIKSLIAREELKTIVKRMQRGRRVSAKEGKSISRVPAYGYLRDNNLKLYPDPEKSWVIPRIFELMANGMGRQAIAQELDRLCISPPEGEYWNPSTISSITKNEVYLGHIIWGKIRYTKQNGKYIRKKVPKERWQRHDHAHPSLVSEELFQKANTAHSKRWRPPTIKTKKLSNPLAGILLCGLCGHSMLYQPRKDRPNPQVRCVQPSCKGVQKGAALALVEQRILDGLKQIIESFEIQENMVQKKKTMNNVNMQKKALEKKEQQMNDLQKQKNKLHDLLENGVYDIETFLDRQKSIVIRLKTTQEEIEQLKYEINYVLEREKHIHAFVPKIKNVLEAYHATVDIEKKNLLLKSVLEKVTYLRKKTWTKKDAFIINLYTKI

SEQ ID NO: 19173 - protein, 515 aa, synthetic construct
MYRPQELDVFIYLRKSRKDLEEEKKAMEHGQHHDTLERHRTQLLELAHKEHHNTIDIFEEVVSGEYISERPIMQELLRKVETGIADAVLVMDLDRLGRGDMVDQGTIYRVFRYSETFIITPTEVINPNDENQELTFSIKSLIAREELKTIVKRMQRGRRASAKEGKSISRVPPYGYLRDNNLKLYPDPEKSWVIPKIFELMANGIGRQAIAQELDRLGVAPPEGEYWNPSTISSIIKNEVYLGHIIWGKISYTKQNGKYIRKKVPKERWQRHDHAHPSLVSEELFQKANMAHSKRWRPPTVKTKKLSNPLAGILLCEICGHSMLYQPRKDRPNPQVRCVQPSCKGIQKGASLLLVEQRILNGLKQIIENFEIQENMVQKKKSKNNILLQQKALEKKEQQINDLQKQKNKLHDLLEKGVYDIETFLERQNSIVIRLKATREDIKQLEYEIKHVLEREKHIHEFVPKIKNVLEAYYATKDIEKKNRLLKSVLKKVTYLRKKSWQRKDEFVIELYTKI

SEQ ID NO: 19174 - protein, 522 aa, synthetic construct
MKLSHILQPNMKAAFYGRHSTDKQDMDMQLNSVMEVIRKYDCIHTHSFLDKAVSARKNKMTSRKELENMFEVAKRKEFDFVIVYKSDRLARDPLEHQTIRIVMKTLDIPIIISSTESVYNTDTDLIVQLMEDGFTKYEVDTIIARTRSGLENKAKQGKWLGGKPPFGYTYDKNSEQFIEHTEELCYVKEIFNLYVNGHGFQYIANTLPNGSRRGKDWGKENVKAIVLNPFYCGLLSWRRQTDGKQNARDIWIEAPNHYVKPIISRTTWESCWRIYSEKRNGNMVPKHYKTSFLLQGLLSCEQCQELMKTKNQQTVSSTNKQYGGKIYFCTNCKLRIDADLLHDKVVNQTLTDVKISGFHNVYHAIEQKIQYEIQELNNNIQKHQRLFENYTIKLHNITEELKQRMKNNDDKRFLKSLAIYRLDVQRKLDGVTQQINDFKQQISLKEKVEKSKETWLHTLNEVFQDDVKLQEISDMDKRRFLLPLIQSVSIKENEKRNEYDISLQLRTDFSKRDVKNQISLIL

SEQ ID NO: 19175 - protein, 523 aa, synthetic construct
MRQVITYLRFSSKPQERGDSIRRQKGLFERWLKDNPDAKVVDEFSDEGASAYHGHHLKGDFGRMLQNIQDGKYLSGQTVLLVESETRLNRQKARNTENLVDLITGKGVDVICLESGKIYTSTNIDDLDTSIQLKIAAHIAHQQSKEKSIKVSAAWEHRAQLALEGKQQLTKNVPGWIDPDTRKLNEHSSTVVTIFDLLLSGESLHNIARYLQANNIKSFSRREKANGFSVHSVRTILRSESTVGTLAASKRNDRPAIPNYYEPAIDVATFNKAQEILSKNRVGRAPASDNPITINLFKGIIRCQCGASVHPTGVKATYQGVYRCNNVPDGRCNVPTIKRKPFDKWMLDNIVGFLERDDGNNTDKRKAEIEYQISLVTSKLKKATTLLLELDDVTELKEQVKELNIQRSNLQSELDELTQRETLSDKPLHHLSEIDLATKAGRVEAQLILSKFVQSIELQREMIIITLRNGTVIGKSRDLSPVLSQDLMKQVVSSPSPTDIDMFSVITSDEEFRKSGKQVTKRS

SEQ ID NO: 19176 - protein, 541 aa, synthetic construct
MQVDGYSLDAQRDKLRKYAAYEDMVVAGEYSDEGFSGKNIQGRQEFQRMLNDIQDCKDGVSYVLVFKLSRFGRNAADVLNSLQLMQDFGVNLICVEDGIDSSKDAGKLMISVLSAVAEIERENIRTQTMAGREQKAREGKWNGGFAPYGYKLENGNLVIAEDEVEVIRVIYDRYIHTNEGVAGVAKYLNRNGYVKKLRQNNTIPGFSRDFVKNVLYNPVYMGKIAYGRRRTEKKQGTRNEIHVVEQSEFPVYEGQHEAIISEEDWYLAQEKRKINSFKREKVNNPDHAHILSGILKCPCCGKSMYGNIAKAHSKDKKTRYYYYCKNTVTPTGHECSFRLNIEQTEINKFVAKIISAMVNNPRFVEAIQAKIGTAVDTEDMEKQIAVLQGQLKQAFGTKSRLERQMDTLDINDAHYDRKILDLQRRYDEQYDTIEEIEVQIGELQSQIRSIQQEKISGDNIYRLLLAFDEVYHSATEAEQKEFMKAFIERIEMFPEKRKDGSWIRKIVFNFPVPVDGEEVKELPLETETTVESVVLMQYCGK

SEQ ID NO: 19177 - protein, 552 aa, synthetic construct
MPTSKNTARKYAAGGSSDNSCGVEPLRAVIYARYSSSGQREESIEGQLRDCYEFAKKHGIIVIGEYIDKAMTGRVDRRPDFQRMMKDSEKGRFNCVLLWKMDRFARNRYDSAMYKYKLKKNGIRIFYAKETIPDGPEGIILESVMEGYAEYYSENLAQNVKRGNYDSALELKTLGKTCLGLKTGPDGRYMIDQAEAAIVRRIFEEYAEGERAKDIYERLNSEGYRTSRGGKFNKNSLRRILSNKKYIGVYEYEDIYVENGIPAIITDRDLFERVQKMLKINHDAPARGKAQNFLLTTKLFCGLCGSPMIGDGGTSHTGKAYAYYSCTKRKRGRSCKKESVPKDWIEDLVVGELVKIVHNDELIEQIADRVMEYQKREKDQSGLHALEIRQKENEKAISNMLAAIEAGIITPSTKTRLMELEADRADIEKGIAHELLAEPEFERDQIIYFLERFRSGDINDEAYRIMLVDTFLNSVYLYDDDHLVLVMNYSGENCKVDLKLVEGAVSGDGCKGSAFAPSSALKKDSVFTGSFFLFMIIECSRSAHSIICSWMR

SEQ ID NO: 19178 - protein, 558 aa, synthetic construct
MNREGKKCVLYPRVSTEMQVDGYSLEGQKNSLKRFADREEMEIVGIYEDAGKSGKSIEGRPAFKKMLSDIKNGLEIDYILVYKLSRFGRNAADILNSLEFVQSYGINLICIEEGIDSSQTSGKLLISVLSAVAEIERENIIEQTMNGRREKARQGGWNGGFAPYGYYLKDNQLLIDETEAEAIRIIFDKFANSDIGLGGVAKYLNLQGIKKIPRQNGTLETWSSHFIRLILDNPVYCGKIAYGRRTREKVKGTKNEYKQIHTDDYILEDGQHEGIVSEELWQKVHAKRMATGIKQPSKIGKDRAHLLTGILKCPLCGSSMYTNKHAWTNKDGTYKEVYYYICGRNKQERGHHCDYKASLRKTDIEPLVIEAVKELVSDKYFAKEIEKRVGVQTDTTAIDKELANYESKLKEVDLNKARLEREIDNLPIDARFRERKIHDMTLRLDGLYDTIVELEERIEDAKLRKSSIEMEAITLDNIYKLMLNFGKLYDIISDEEKKSLITYLIKEIQIYPNGESEMPLKSIEFNFPIYRDGQEVRRLLWEKGNTVESVVLMQYCGK

SEQ ID NO: 19179 - protein, 544 aa, synthetic construct
MAETAKKISMIPAKVQYDRNVKLSEKKMKVAAYCRVSTELEEQDSSYEAQVEYYTSKISENENWKNAGIYADDGKSGTNTKKRADFNAMIQDALAGKIDMILTKSVSRFARNTVDSLVTIRKLKEKNVAVVFEKEGINTLEGTGEILITILSSLAQEESRNISENIRWGVVRKFEKGKVIVNCTKFMGYTKNEDGDLVIVPEEAEIVKLIFRLYLEGYSTGKIAKHLEEQGIKTATGQDKWHSTVIDKMLRNEKYMGDALLQKTYTVDFMTKKKVKNTGIVPQYYVEDDHEAIIPKELFYRVQEEMMRRASLCKAAVTRKKNQKSRYSSTYALTGMLICGKCGQEYRRVTWARNGKKKVVWRCSNRLTNGVKKCGESETLEENALNRAVMEAIHRITSDDMEFMENFRQNIIHVIGNYSTAKESEEYEEKIKEKQEEMVALIAENAKTGSYTPEFDERYRTIAEEINALKEAQKTARNEKWMADSYEQRIQDIDHYLSTSTCQIPEFDNDLVRRLISTIKVESSEKLLIQFQSGIVMEQEIRYE

SEQ ID NO: 19180 - protein, 562 aa, synthetic construct
MGKVFSYIRFSSAKQSAGDSYARQVRAAKAFCDENDLELADPREYLFFDAGRSAFKGKHLDDTGELARFLSYVEDGTIPPGSYLVVESLDRLSRERVRDALPRFLDLLAKGINVYTSVDKRLYTKDYNELDLIISIISMSRAHEESATKGGRVSSAWRAKQKDARTTGKPLGKLRPLWLDVTPDRYVLNPDKAAIVRRIFVLSTKGHGSRIIAATLNQEGIPAFSSGRKNFSGLWGFSTVRHILDSRTTLGEYQPHIFIDGKRTPDGEPIKGYFPAVVTEDEFYLAHAARSSRKTHTVTKTTTNFNVLTGILNCYKCGAAMHLQGQRGRKYYKCSKATRGLCDAGIISAPRAEEVFKEMLPKVDSLSLVQDSSGRLQKSLQVVEGRIASLKARQNDAEASHAEFPSRITAKLLHELEAEIGALESERAAISEQLASDKVMNKDDFFKKLDLVSFEGRVAANNLIKRLGLYIFVNKNGRTDETYWVSKNNAIPLPFSAETPNLLFYLMHRGKEIRFEAMYDEYVDLQVAQDELSEVEAIFAKTESWDELPPELLALWKARHGV

SEQ ID NO: 19181 - protein, 570 aa, synthetic construct
MPPSPKLLAVSYVRVSTREQTERDGDPDGYSIPAQRDANRRKAESLGAHIIEEFIDRGESARSSDRPELQRMLAYVTDHPIAYCIVHKVDRLARNRADDVAINLALNTADVRLISATENIDETPSGMLLHGIMSSIAEFYSRNLANEVMKGMQQKAKTGGTPGKAPIGYRNAGIISAEGREVRTVIVDDQRADLIRWAFTAYATGEWTLRQLTKELAERGLMSRPTPSRPGKLITVTQLQKILSNPYYKGEVRFSGASFPGRHVPLVDPVIWQQVQDIMDSHVVGEKVRQNHHYLKSSLYCSCGSRMLVQYSVNRLGTQYEYFICSGRHEKRNTCIQSAVNIGLIENKVVDLYKTIQIDKDLRAEVERQLRAALDASSRDTRKKQHDLLLEQGRLQARSQKLLEGHLDGAVPAALYKEEQERISRQLSHIAENLESATVTFATIEQHLVEALDLIENCFEAYRRAPDDIRRRFNQAFFEQIIVHQDSEVTVELAEPFNSLSKSATRILGAEIQENRSGTSLERQIMGVDSTLCSRDEHLVPLEGLEPPTCSLGRNCSSIELQRLAFRSLA

SEQ ID NO: 19182 - protein, 525 aa, synthetic construct
MSMNTTTTNTNTTTTNRLLELPLLTPELRAAVERLREMAEDDWTASILYGRASQDRHKLMRSIDDQLTDMVGWCLPIEWYPEAIVRDADRSASQWRRREREGFDEAMALIESGRYGGFASWEPSRAGRDMEVYVQLRKACQRAGVLYLTHGRVYDFSRSDDTFMMGFEFLRAEADANTMRERQLRTVKLNADKGRPHGRLPYGYRRVYDQHTGVLLRQEPDPHTGQIVRDAARDVLAGKSMYSIAMRLQDAGEPTPKKPWAESPRGWDTYTVRQVLQNPTIAGKRVYRGEVIGQAQWEALIEWEDFQKIQRLFADPGRLVKGGGGMAAKTLMVHIARCHYCGRPLKRATMRKKERTPAVKYQCQFRGCYKTMISQPGLDAYVEQVVLEWFQNPTNLAWLTGDDDGDWLKVAEAAEQKRAALQARLDEVIAQYAAGSLNLDTLTKLEAALRPQIAEAEQALIPPVTDERVRALVTAEDVPAAWAGLPLLERRKIIKATFNVRIQQTQNRGQNAFEPERVLIEPRAL

SEQ ID NO: 19183 - protein, 521 aa, synthetic construct
MAKITKIEKRQQNNRVKKMRVAAYARVSTESAEQLLSLEVQKEHYENCIKANPYWEYAGLYFDEGISGTKIEKRESLLKLLDDCEKGKIDRVITKSISRFARNTVDCLEMVRKLTGLGVAIYFEKENIDTEHMNSELMLSILSSIAESESRSISENSKWSLKRRFENGTYVISYPPYGYENVDGKMVVVPSEAEIVKEIFRMAISGLGSYLIANELNKRGIATKKNSKWHSSTVQAILKNEKYTGDVIFQKTYTDENFNRHQNRGEKVRYMMKNHHEPIISHEDFELVKTVVGQRKKEKNIDGSDNKYQKRYALSGKVYCGECGSKVKRCMRYAQSGDYAAWTCVRHIEDKKSCNMKYIREEHIKAAYVQMMNKLIAGKNTMLKPFVDTLRGGNNKNRLRHILELDEKIEKLNEQAQVLTKLLSSGYIELDVFYAENNNISLELDELEKEKTSLSSIVSGDLNHLNEAQKLLRFINKSDCIKDFIDDTFSEFVEKITIEDRLKFTFHLKCGLNLTEEVIVK

SEQ ID NO: 19184 - protein, 469 aa, synthetic construct
MSRGRGTRQRAILYLRQSTFREESISLELQESAGREHAARHGYEVVGVESDPGLSGRTFNRPGVAAVMDAVQRGAADVIVLWKWSRLSRNRLDWYLAADRTQEAGGRIESATEPIDTSTSIGRLSRGMMIEIAAYESERAGDQWREAQARRVKLGLTPHGKATFGYFYDRENGIHVPDPVTGPILVDLYRRFAAGETMYGLCIWLNSQGITTLHGKRWTAGNLIQILDKEFAVGRIFYHGQWLPGAHEPLITEAEFAAYRQARKRRSAAPRTEASEYLLSGLTKCGVCGRALTGAAARGRWWYYRCYSARFSGAHQGVQIPTHLVDDTVRAWVEQEAKFRRSVPVETAPKPTADVAALKRTVTQHETSLSRLTVQLAENIISPDAYRLAAAPLEEKLGAARNALEAGTAEEAAPPLRDALVSLADDWDILPVTHRRTLLHRALDAVTIDFNADKHIEIYPAGTYTPSTG

SEQ ID NO: 19185 - protein, 545 aa, synthetic construct
MTRSLTIEYTEMNEGMRDITVLYARLSKDDGRKTGDSDSILNQRLLLENFAKSEGLRNCVFFSDDGISGTTFNRPAFQAAIQLVEAGRVKHFIVKDLSRFGRDYLKVGAFTEVVFPEKNVRFVAINDNVDSLQEEDNSLAPFRNLFNEWYARDTSKKIKAVKHAKGNAGEPISGTLPYGYLKGENYRQTKIWLVDEEAAKIVQRIFHECIEGKSLSMIAGGLERDKILIPARHKEAIGEHSAKVGKLPYRWSFDVIGSILKNQAYLGYVVNFKTYKKSYKSKKCLPNPREKWKIFPGHHEAIIDKETFDLVQKMRNSRRTRQTHNKRIGLFSGMTFCADCGHKHHYDNHENYKNYFCSGRASRLRYCESYHRIREEDLAEAVANDFAKIQAKVNEESGDFVAELHRKFASDDLKKVAEMERKFHENETRILELDSIISRLYEDNVSGKISDERFAKMSEDFEKEQRNLEIQNIAFREKITKIKADCQNVDNFVKLAKSTALLENLTPEKVRELLERIEISEKTLSEDGEKTQKVRFFYRFVGALE

SEQ ID NO: 19186 - protein, 413 aa, synthetic construct
MNIKKIEAKNNKRKKRICAYVRVSTTNGSQLDSLENQKVYFEKLYAERDDVEFLGVFCDKGISGSKYDRPDFQTMLDACRKGQIDVIHTKSISRFARDLINVLEISRELKTLGIDIFFEEQNIHTLSNEGEVVLTVLASLAEEELQSMSGNQRWSFRRKFQKGELLINAKRFLGYDLNEKGELVINKAEAQIVRTIFYSYLEGMGTHRIAKKLNEGKVPTVTGKKWYDSTIRNILKNEKYKGSLLLQKYFHDGVNGPKKLNQGQVEQYYIEDNHEGIVSKEIWEKVQVKMKRRSRIQGTNKTYKFSRMLKCQYCGSTLKRQVSYKKKIVWCCSKYIKEGKNSCKGMRVPERDIEDWKLSSPVIVLERIEDGEKHYGYTGQKATANGHISNSEKNQSSRLLSSVYRPRRTAIKL

SEQ ID NO: 19187 - protein, 430 aa, synthetic construct
MSTDQDEQLSSYENQVNYYREYILKHEDYELVDIYADEGISATNTKKRDAFNRLIQDCRGGKVDRILVKSISRFARNTLDCIKYVRELKELGIGVTFEKENIDSLDSKGEVLLTILSSLAQDESRSISENSTWGIRKKFERGVVQVNTTNFMGYDKDEKGNLIINHEQANVVRYIFDRFIEGYSPEFISKELRKQEIPGCTGKAKWCPSAIWKMLQNEKYKGDALLQKTYTVDFLTKKRIDNDGQVNQYYIENNHEPILDREKWEIVQLEIARRKKFREQHKLQFYIMQKENNPFTTKVFCAECGSAFGRKNWTTSRGKRKVWQCNNRYRIKGQIGCLNNHIDEEMLEKAVMMAVSILKENRELLQSKWNKLMETDSSLKQYYSDRLREIVSRHKWDFNGVEMCRILHSITISEKGEISVKFLEGTEVNL

SEQ ID NO: 19188 - protein, 446 aa, synthetic construct
MIPPKPIRKVRCAIYTRKSSEEGLEMEFNSLDAQRESCEAYITSQKAEGWVPVPDRYDDGGFSGGTLERPALKRLLADIESGMVDVVVVYKIDRLSRSLMDFSKLVEVFDRNAVTFVSVTQSFNTTTSMGRLTLNILLSFAQFEREVIGERIRDKFAASRRKGMWMGGVPPLGYDVVSRKLVVNQPEADLVRHIFDRFLKVGSATLLVKELNAAGHHTKSWTTQDGKVRDGMPITKNFLYKLLDNRVYLGEAVHKGEAHAGEHPAIIDRATWDKVVAVKSDNAPRKRANAVRSSTPAPLKGLIVCAHCGRAMTPSSTRKKGRLYRYYTCMKAIHSGHESCPVRSIAAGEIEAAVIGQVRALLRAPEIRARAERMAPTMSPADLHAALDRFEALWDELFPAEQARILQLLVEKVAIAPDGAEVRLRAEGLASVIADITAQTGDRSAA

SEQ ID NO: 19189 - protein, 604 aa, synthetic construct
MKKVFVYHRVSSDQQLDGSGIARQAELLEGYLERTGICAEMDDPAPVVLSDQGVSAFKGLNISEGELGAWMEQVRNGMWDSSILVVESIDRFSRQNPFDVMGYINALMAHNVAIHDVMANIVISRSNSKDLPFVMMNAQQAYDESKYKSDRIRKGWAKKREQAFNKGTIVTNKRPQWIEVENDKYVLNHKAAVVKEIFALYQTGMGCPTIAKQLQTKEGEQYKFNRPWTGELVHKILTNRRVTGKIFISEIIRNHDDIENPVTQKKYDMDVYPVVINEEEFELVQELLKSRRPNAGRVTVKKDGQEEVLIKSNLFSGIARCTECGGPMYHNVVRAKRTPKKGDPKIEEYRYIRCLNERDGLCENKAMTYETVERFVVEHLLGMDLNTVIKEQEFNPEIEVIRIQIDQVKDHITNYENGIERRKSAGKAVSFEMREELDDAKLELEQLLARQASLATVQVDLPVLQDVNVTELYNVNNVDIRTRYENELNKIVSNIRLKRNGNFYTIDIIYKQNELKRHVLFIENKKKEQKLISEVIIENVDGAKFYYTPSFVISVKDGEIRFQQTKEDLTIIDYSLLLNYVDAVDRCDAVGVWMRNNMSFLFTK

SEQ ID NO: 19190 - protein, 481 aa, synthetic construct
MRPRIGAYARISLDAAGEALGVARQHKALRRMALKNDWEIVANYTDNNLSAFKRNVVRPEFERLLRDLESGLIDGFITYDLDRLARQQSDLDRVIKLYDAKPSLVFSSVTGISNLNTPTGILIANIMVTVANNSSRVGSDRGKFQELQRAEMGKPKKGPRPFGYAADQMTLDPTEGPIVRRMGMEFLSGSSYGEIADALHSANINMRSGKRWYAEGIQILLTRPRNGGLRDFRGQIYKGTWTPIFTPNEWESIQHAVKRRRERFGIVPVYRKYVLTGYLLCGKCGSYLSGMTKRDSKDRPLRTTYQCASSTASYRHQGCGGVCVGSGSLEHFIREAICYRLDTEGVSSMISAAAQETTGVQALILERDRLLARRVSIREDYADGTLSKSDFVSARDRIDGHITRIDRELDAHHRSSFKLGLHAGESVREAWNTRPLGWRRALIDTLIDSITINGSRKLPIYDLDGEKVRFDPNRVDISWKV

SEQ ID NO: 19191 - protein, 573 aa, synthetic construct
MVLNNIKPAMKIRVAIYIRVSTLHQVDKDSLPMQRKDLIAYSKLILNTDDYVIFEDAGYSGKNTIRPRYQDMMEQIRTGAFTHLLVWKIDRISRNLLDFAQMYQELKELNVTFVSKNEQFNTSTAIGEAMLKIILVFAELERNMTSERVTATMISRANTGKWNGGRVPYGYKYDPEEEDFLIVANESNTVKLIHDKYEELQSLVYLARYMNEHGYRTRSGNEWSPPSLVIILKSWWYCGCYEYNKRKAGNRQKLKNESEWIMIEDHHIAIISYDQKERVLAILKGNKRFATEHNLYVKGIHVHVFGGLCWCKNCGKKMTSTSSNKNRSWQYSKYLCSTRRRSLTKCRGRSTSDPVLGEFIFNYILNMLNAQKGFDSIHSPADLQDALLTGDAFSDIKSIDQEELNDLYNILSSSVVGNIYGRSFNVNKAKKNDEVQSSLTILKAEKKKLDRALDRLTNLYLYDDMAISEKDYMTKKTEIETKIAEIDEKIGIVNKNSVDNSITDEEFVDKASTFIITQKLTNRNYISYKRLATSVDPKILYMFTHDVIDYIDIYNGKVQRIVFRNGLSQTFIR

SEQ ID NO: 19192 - protein, 561 aa, synthetic construct
MKNKKIKCDIYTRVSTTMQVDGYSLDAQKEKLKRYAEFQNMEIVNEYSDEGKSGKSVEGRPEFQRMLDNIENGTDEVQFVLVFKLSRFGRNAADVLNSLQRMQDFGVNLICVEDGIDSSKDSGKLMISVLSAVAEIERENILVQTMEGRKQKAREGKWNGGFAPYGYELVNGELQIAEDEAEIIRLIYDKFIHTNMGISAIAAWLNQHGYKKKKRQNNTLDAFASSFIKGVLDNPVYCGKLAYGRRKNEKVSGTRNEYRIVKQENYMLHDGIHEGIISETDWELAHQKREKTGVKYEKTHSLDHEHILSGILRCPLCGSGMYGNVNRKKKKDGTLYKDYFYYACKHRRLVDGHKCGYRKQWSEEKINNAVEEVIRKLVKNPKFEEAILNKIGSRIDTEEIEKEIDGLEKQHRQLTGAKARLGQQMDSLDIMDKFYEKKYQDMETRLYRLYDEIEGVENSIEEVKNRLLNIQQQKISEENVYQFLLYFDKLYDKFTDLEKKEFLNSFVEQVDIYEQEQPDGRFLKHIKFRFPVYFGDRETQELCWDNESTVESMVLIQKDNI

SEQ ID NO: 19193 - protein, 520 aa, synthetic construct
MYLRKSRADTEAEMHGEGETLARHRTILMSTAKMLHINITKQYEEVVSGETIASRPVMQQLLIDIENGDWNGVLVVEVERLARGDTIDQGIMAQAFKFSNTKIITPSKTYDPNNEFDEEYFEFGLFMSRREYKTINRRLQAGRMSSINEGKWVSNKAPYGFERVKLDNEKGFTLSPIQSQADIVKMIFNLYAYGEDGENRIGVSLICRKLNQLNVPTATGNREWLPCVINGILRNPTYIGKIRWNSRKTVKQSVNGVVTKTRPRNQNKDCTIVDGLHPAIIEEDLFNKVQDLLSYNPPRPVNTRNKIANPLAGLVVCGNCNRNMVRRPYNNHTHADTIICPYPECATVASNLSMVEDAIIEHMQQLVKDYELNESVNNYDSSENNISVKINLLNKHKGEFQKLNKQKNSLYDLLEQGIYSNEEFTERSQLIKNRINETIKLIDSLEQKIADEQLREKKVSVFIPKCKNLLDSYYDLNAASKNSLLKELITKVVYTKNVKNKRGEGNIPTFELTIYTNIIT

SEQ ID NO: 19194 - protein, 570 aa, synthetic construct
MRIRKVAIYARVSTEHEAQLSALENQVQYYDNLLNTHPDWILYKYYIDEGITGTSIKKRKHFLEMMEDAKKGRFDLIVTREVSRFARNTVDTLQQTRLLKRMGVEVYFTEDGIWTLNDEDGELRLTIMATLAQNESKKTSTRVKAGQMVSFQNGVIYGNGNVMGYDKIGKEYVIDEVQAKVVRKIYNMYLAGEGYQKIKKQLEYDHDLTAMGKSIWSFSAISSILKNRLYCGQLEYRKEYVPDYLEQKRAPNNGEVEKVIVEGRHQPIISKEEFERVQKIMEQKSPMIKRYHKNKGVYSNDLWRRKLRCKCGHSFLKTKWHVKKEITTYAYKCYSQNATGTVSARKKRGLSIEGICPIPMVQDWKLFTMAQSVFHAVFDCKEDTIQTAEEKLGNGIVDTEKVDILKDKVDTEERLKRERDRYNVLLEMRMNNEIPKEVFYAKREEVESKIAELERLLIQYGDIKEATAEDVADKLKNLTQVLEQGLELENGEFPENAINKYVYGVKVYEEHFEWILNLQVGAEEEADHVDTPVYFKTITVTPDDQRRWFKAHPAWSKSNKYEDLKVKIYI

SEQ ID NO: 19195 - protein, 526 aa, synthetic construct
MPAHTPQSPETAPTKALIYCRVSSSKQATEFHGLDSQEARCRSHALHMGYEVEAVFPDDVSGAGDFMRRPGMVALLSYLDAQPDRKNYVVIFDDLKRFARDTEFHIKLRKAFRMRGARIECLNFRLEDTPEGKFIETILAAQGELEREQNSRQVVQKMKARVLAGYWCFSPPKGYRYKKVAGHGKLLVRKEPLASIIKETLEAFACGRLESVAEVKRFLESQPAYPRDHRGEVHFERVAELLNRMLYAGYIEVPKWGMSFIPAKHEPLVSLATWQRVQERLKGTPKAPVRKDLNEDFPLRGFVCCASCNQPMTACWSKGRTKHYAYYLCDTRDCPDRRKSVRKEIIEGEFETLLASLKPSAHLFHAIYEMLRDQWNDRLARSEEMARAVAGELQRVEVKVRQLVDRVMGASTSALAEAYEARLRELHEHKAALSEKAASIGKPQASFAETYRTAFAFIANPCNLWHSPRLEDRRAVLRLVFAERLAYQRGSGYRTVQTALIFKLLGDKNMQMEEVVEPRGVEPLTS

SEQ ID NO: 19196 - protein, 522 aa, synthetic construct
MRKVTRIDGNNALQALKPKVRVAAYCRVSTDSDEQMASLEAQKDHYESYIKANPDWQFAGIYYDEGISGTKKENRTGLLRLLEDCENKKIDFIITKSVSRFARNTTDCIEMVRKLTDLGVFIYFEKENINTQRMEGELVLTILSSLAENESLSIAENSKWSIRRRFQNGTYKIAYPPYGYDYVDGKLFINKEQAEIVKRIFSEALDGKGTQKIADGLNSDKIPTKRGSHWTATTIRGILSNEKYTGDVLLQKTYTDENFKRHYNRGEKDQYMIKDHHEAIISHEEFEAAQEILRQRGKEKGIIKGSSKYKKRYPFSGKIKCAECGSNFKRRIHGSGDRKYIAWCCTKHIKDASACSMKFVREDEIHQAFVVMINKLIFGHKFILRPLLQSLKKTNYSDNITKIQEMETKIKENTERVQVIMGLMAKGYLEPALFNTQKNELLKEAALLKEQKEAIKRTIDGSQTILVEVEKLLKFATKAEKQIDAFDSEIFEDFTHEIIVFSQEEIGFKMKCGLKLRERLMK

SEQ ID NO: 19197 - protein, 533 aa, synthetic construct
MAEALFGSFGQSAGGLSLMDPPAEQPKKLRVAAYVRVSSLLDEQEGSFDNQKTHYTQLIRSTPGWKMVDIYTDQGRSGTSMAKRPGFNRMIRHAYEKKIDIILCKSVSRFARNVLDAINTIRELTELGVRIIFDKENIDTGDMASEFILTMLSATAQEESRSISENINWALEKRYERGEPVFVRKLGYQKNEKKEWIIIEEEAHIVREAFEEALDGKTPAQIAKQFIKKKYKKINGRTDWSSATVRLILLNRDYTGDVICQKYYTENYLSHKRVANNGERNQYFIENHHEPIVNRETFEAVQRELERRKKPNKNKKVNRYPLSSRIQCGKCGGNLHRFICKGVVRWRCENNVRSKELCTMGSIKEEVIREAMQDAFLERYRMARLIYDMDRMKKDLTRAVAARDFSYNRLRLDLEQILLEENIALINANGSEADSTDEKLEELASKRASVEKELKIREDWWELLDQDFAFREEANTKLKELDAVRDPSKQLQKELQNISFLRAWVVRVKAITPMSFCMHWIDDKETIVDLRKE

SEQ ID NO: 19198 - protein, 522 aa, synthetic construct
MDDRKIMIIPARRDIKKEKENEKPKVKVAAYCRVSTDSEEQMGSFETQVQHYTNYISKNPDWILADIYADDGISGTNTKNRNEFNRMIKACNDGNIDMIITKSISRFARNTLDCLKYIRELKDLGIPVYFEKENINTMDSKGEVLLTIMASLAQQESQSLSQNIKLGYQYRFQQGQVIVNATKFLGYTKDDKKQLIIVPEEAEIVKRIFLEFLEGKGPTAIARGLENDKCKTATGITRWSNGDIYRILRNEKYMGDALLQKSYTVDFLTRKRVNNKGIMPQYYVEDNHEGIVSKEVFRRAQEELARRSNLYSGKRKQNKRVHLGKYALSGIVFCSNCEDIFRRIKWNSRGFKSIVWRCVTRVENGPEKCKARTVKEDLLHEVVVEAINVLIENKNDYVKIIEENVMKVLDEKFDVTVDDIDEKLHELQNELIQKSNSKTEYERIAEEIYELRDKKQEVMIANATRSEKRRRVQDIKAYLKTSYAKIENYDESLVRRIIDKIIVYDDYMEVEFKTGNKIEIKK

SEQ ID NO: 19199 - protein, 519 aa, synthetic construct
MKKVRKLDVNKEKREKLKTKVAAYARVSTSSNDQLESLENQKKHYYSYITKNPDWKFIDVYYDEGITGTSVEKREGLLRLLEHARAGRIDLILTKSISRFSRNLIDSLEIVRELMNLGVFIYFEKENLNTGSMESELILTILSSLAENESMSISENNKWSFRRRIENGTYKHGYAPFGYDVEDGNLMVNREKKKIVEDIFIHYLSGKGAYSIAEILNKENVPSPKGEKWVEGTINNILKNEKYVGDAILQKTFTDHNYKRKRNKGQKDMYFIENNHEGIIKREDFERVQDLMEYNALKKGNDSSKKYQNRYAFSGKIICGDCGGKFKRRTHYSTNNTSYIAWTCETRLSNPDSCSIKFIRDEDIKVAFLNMVNKLIFSRKLVIEKPLTELTKDNGSMVEKDIKVIGAEIKGLHGRHERLNDLLKAKLIDDNSYSEEIQRIDNKLEVLNQKKQEKIQEKIDISFKIKELNKLNKLLMNQRYLTIFNEDYFREIVDHIFVETRSKIEFHLKCGLVFQEELE

SEQ ID NO: 19200 - protein, 474 aa, synthetic construct
MNAAAKPRAILYLRQSIAREESISLDLQEDAGRRYAEQQGYTVVAVKADEGISGRTWNRKAVKEVMAMVENGEADIIVLWKWSRLSRARLDWAIALDKVEAAGGRIESATEQVDVSTSTGRFARGMLAEFAVFESERIGDTWKESQARRVSQGRPHSGIYRFGYIYDKTTGYTPDPLAGPVLVECYRRYNRGESLSQLLAYVLSTGIPSSTRTDANNWTTSRISQMLKSPFAAGFFTYNGKTYQGNHEPLITAEEWEAHLVNRAARQGARKPRDPRNPYTGLLVCTRCGHKMYQHDKHDRATRYMCSGAQSKKLHKGGSIHQSKIDRALLRWFKERIADEADEAARQAAQKTPDLPAMNTTATIRRALVKEQSRLDSLTAKYVDDVIPRASYEKLRDESLEKIEVFETRLREVRVHQRQSRPKVDPKLLEAWPHMHAVEKQQILGLLIDRIEVTPGHDAGHVFIVPKWAVSAAG

SEQ ID NO: 19201 - protein, 484 aa, synthetic construct
MKATARARRAGLYIRISDDREGAGLGVKRQSDDCHELAERLGWKIVETYDDNDLSATNRRKKREGYARLLADIESGHVDAILAWHPDRIYRQPRELEDLIELIEEHGTEIKTVTAGDLDLSTPAGRVMARVFGSLGKYETEHKAERIRRKVQELVEAGKIHNSGHRPFGYERIYEGEGPRRKIIEDRIDEAEAAYIRDWARRALEGESLYSLVTDANTKGVTTSTGGSWTYQGMRYMLASGRIAGLKEHKRQVVGKAVWPAIIDEEDHKALRALLSDRAEQAKANGAQRTSTARKYALSGLVRCTCTDDHIRMRTAPSSNRKGPVYRCPPKGDGGCGARTIKIEDLERLMEKLLFAKLDEVEPLDEADPHDPRPALEAKVVKWERRVAELKEELLDGDRPAREIQEAIDTLNSRISQAQREMAEYGVRDRVLDVSAEELRAAWEDYLPARKQSVFRSLIKEIRVHPATPPKNIWNPDRVEVLWR

SEQ ID NO: 19202 - protein, 601 aa, synthetic construct
MKTNNVEIIKADSLVRRRGVKVERHLKRVAAYCRVSSDSEDQKNSYESQVRHYKDYISQRSDWELAGIYADEGISGTQVGKRQDFQRLINDCVNGEIDYIVTKAIARFARNTLDTLKYVRMLKDMQIGVYFEEENIDTLTMDGELLLTILSSVAQQEVENTSAHVKKGLKMKMQRGELIGFQGCLGYDYDVETKQLSINKKEAKIVRYIFERYLEGIGGKVIARELDELGYKSPRGLDHWNDTTVLGIIKNEKYKGDILMGKTFTVDPISKRRLSNFGEEDKYYIKDNHEPIISKEDFEKAQEIRLRRAGNKKTVANVNGKRERYSKMYAFSSMLECGFCGSILSRRSWHCRSDYRKVVWHCVTSIKKGKKFCKHSKGLEELAIEGAFMEAYRQLYHSNENLMTDLLETIESELNDNSLNKELKRITNKLRTLLKKEENLVNLRLEGKISDTIYNEKYNEISSEKEFLAEEKVNIETTLKSEIDVKKRLTEFKHLLSSQKMLTEFDRAVFESIVEKIIVGGVNSDGEIDPAMLTIIFKTGETQNKDGKQFKSKRKNAKLETDKLCPQNSDEDKKLYSQGTDYTRGVCCSACKSLETFERKG

SEQ ID NO: 19203 - protein, 480 aa, synthetic construct
MIATNKVAIYIRVSTTNQAEEGYSIEEQQEKLKAYCAIKDWSIYDVYIDGGFTGSNTDRPELKRLVREAKNKKFDTVLVYKLDRLSRSQKDTLYLIEEVFTKNNIAFLSLLENFDTSSAFGKAMIGILSVFAQLEREQIKERMQLGKVGRAKSGKSMMWAKPSYGYIYHQETGEMTVDEYESIAIKFIFSSYLAGRSITKLRDDLNKKYPKKIAWNYRMVRHILDNPVYCGNIRFKGEIYSGNHKAIISKEDFEKVQEELAIRQRTAAENSNPRPFQAKYMLSGIVQCGYCKAPLKIIMGAIRKDGTRFIRYECYQRHPRTTKGVTVYNDNKKCNSGYYDKKELEQYVLKEVSKLQEDKEYLESLFNVPDKSIEHDKIQGQVNILENKISRLNDLYVDDRISLDELKIKSDNFLKMKAVLKTELENDPVTKQQKKKENMEKILKTKDILSMNYEQQKAVIRALITKVQVTTESIIIKWKI

SEQ ID NO: 19204 - protein, 449 aa, synthetic construct
MKQVIGYLRQSTMKQQSLAAQKQAIEAIAEKHHIQHINFYSDKQSGRKDNRSGYRQMTQLIQQGQCDILCCYRLNRLHRNLKNALKLIKLCQTYHVHILSVHDGYFDMDQAFDRLKLNIFISLAELESDNIGEQVKNGLQEKAKQGQLITTHAPFGYDYHNGTFIINQNESPTVKAVFNYYIKGHGYKKIAQLLEKDDTFINRQPCQVRNIIMNPNYCGRVINQYGQFDNMFPSIVSANVYEQAQRLRLQKQTKRTPSDNQLKQKIKCPYCNATLTNMTIRKKNHTLRYYVCPKNMNASRFVCDFKGINAQTLEDKVLEVCRDFYQNQRIYTKIKSAIDKRIKRQRNIETHHTLTQEQLIEKLAQGIIDAETFREQTQSLRQQPQRTTSINGHQIQHTIQNIIQKRFTLNILYPYIETIHITKDKNLIGIYFKNEPLNIVNQTMQSSIA

SEQ ID NO: 19205 - protein, 558 aa, synthetic construct
MKGKIALYSRVSTSEQSEHGYSIHEQEQVLIKEVVKNYPGYDYETYIDSGISGKNIEGRPAMKRLLQDVKDNKIEMVLSWKLNRISRSMRDVFNIIHEFKEHGVGYKSISENIDTSNASGEVLVTMFGLIGSIERSTLISNVKMAMNAKARSGEAITGRVLGYKLSLNPLTQKNDLVIDEKEANIVREIFDLYLNHNKGLKAITTILNQKGYRTINQKPFSVFGVKYILNNPVYKGYVRFNNHQNWAVQRRSGKSDKNDVILVKGKHEAIISEDVFDQVHEKLASKSFKPGRPIGGDFYLRGLIKCPECGNNMVCRRTYYKTKKSKERTIKRYYICSLFNRSGSSACHSNAINAEVVERVINVHLNRILSQPNVIKQIASSVIEELKQKHSKQTEIKYDIDSLEKQKAKVKTQQERLLELFLDDEMDSEMLKAKQSEMNQQLEVLDQQIKEAKQANQSQDDIPNFDKLKARLILMITRFSVYLRKATPEAKNQLMKMLIDSIEITTDKQVKLVRYKIDESLIPQSLKKDWGSFFMPKFQFEIYGQNDYFIDQITTFTT

SEQ ID NO: 19206 - protein, 430 aa, synthetic construct
MSTDQEEQLSSYENQVKYYREFISKHEDYELVDIYADEGISATNTKKRDAFNRLIQDCRAGKVDRILVKSISRFARNTLDCIKYVRELKELGVGVTFEKENIDSLDSKGEVLLTILSSLAQDESRSISENATWGIRKRFERGEVRVNTTKFMGYDKDKDGNLIINREQAEVVRYIYERFLKGYTPESIARDLNDRDVPGWSGKANWYPSSILKMLQNEKYKGDALLQKTYTVDFLTKKRTENDGQVNQFYVANNHEGIIDHEMWDTVQLEIARRKAFREEHGIPFYHLQNEDNPFMTKVFCAECGDAFGRKNWTTSRGKRKVWQCNNRYRVKGQIGCQNNHIDEETLEKAVVMAVELLSENVDLLHGKWNKILEENCPLEKHYSTKLADIINKPSWEFDSYEMCQVLDSITISEDGQISVKFLEGTEVDL

SEQ ID NO: 19207 - protein, 413 aa, synthetic construct
MSVKKIRVNRQKHRKRVCAYIRVSTTNGSQLDSLENQKQYFENLYSNRDDIDFMGVYHDRGISGSKDNRPNFQAMIEDCRRGKIDVIHTKSIARFARNTVTVLEISRELKAIGVDIFFEEQNIHTLSSEGEVMLSVLASIAEDELRSMSGNQRWAFQKKFQRGELVINTKRFLGYDIDENGELIINPEEALIVRQIFALYLEGYGTHRIAKLLNEKGVATVTGAKWHDTTIRQMLRNEKYNGSVLLQKYFHDGVNGPKKLNKGELEQYLIEDNHEAIISKEDWQRVQDKLTSRRWQQGRNKTYKFTGLLKCQHCGSTLKRQVSYKKKIVWCCSKYIKEGKVACRGMRVPEVDISNWEITSPVTVIERDGNGEKYYSYSGQESADQCSSSGQEENQGSRILSSVHRPRRTAIKL

SEQ ID NO: 19208 - protein, 593 aa, synthetic construct
MKKNNVEIIKADSLVRRRGDNFERESKRVAAYCRVSSDSEDQKNSYESQVRHYKDYISQRSDWELAGIYADEGISGTQVGKRQDFQRLINDCVNGEIDYIVTKAIARFARNTLDTLKYVRMLKDMQIGVYFEEENIDTLTMDGELLLTILSSVAQQEVENTSAHVKKGLKMKMQRGELIGFQGCLGYDYDVETKQLSINKKEAKIVRYIFERYLEGIGGKVIARELDELGYKSPRGLDHWNDTTVLGIIKNEKYKGDILMGKTFTVDPISKRRLSNFGEEDKYYIKDNHEPIISKEDFEKAQEIRLRRAGNKKTAANVNGKRERYSKMYAFSSMLECGFCGSILSRRSWHCRSDYRKVVWHCVTSIKKGKKFCKHSKGLEELAIEGAFMEAYRKLYHSNENLMTDLLETIESELNDNSLNKELKRITNKLRTLLKKEENLVNLRLEGKISDTIYNEKYNEISSEKEFLAEEKVNIETTLKSEIDVKKRLTEFKHLLSSQKMLTEFDRAVFESIVEKIIVGGVNSDGEIDPAMLTIIFKTGETQNKDGKQFKSKRKNAKLETDKLCPQNSDEDKKLYSQGTDYTCGSSRVTTTK

SEQ ID NO: 19209 - protein, 409 aa, synthetic construct
MAAYCRVSTDQDEQLSSYENQVRYYKEYIRQNPLYELVDIYADEGISGTNTKKRTEFNRLIADCRKGKVDRIIVKSISRFSRNTLDCLKYVRELKELGIGITFEKENIDSLDAKGEVLLTILSSLAQDESRSISENATWGIRKKFERGEIRVNTTKFVGYDKGENGNLIINEEQAKIVRRIFRDFLQGETPESIARSLKEEGVPGWNGKANWYPTTIQRMLQNEKYMGDALLQKTYTVDFLTKKRSENQGQVNQYYIEGNHEAIINKEEWDLVQLEVERRNQYRQDNHINFYIIQCEQNPFTCKVFCKECGGLFGRKNWTTSRGKRPVWQCINRYKVKGVQGCTNRHIDEETLQQAFLRALEILRENKEKLRDKWDNFREEQKLERYHVAKLKETLNSNQEEFNGRKMC

SEQ ID NO: 19210 - protein, 520 aa, synthetic construct
MTEKNIMVIPARKRVGSTAAKEKIKKLRVAAYCRVSTETEEQNSSYEVQVAHYTEFIKKNNEWEFAGIFADDGISGTNTKKRDEFNRMIAECMDGNIDMVITKSISRFARNTLDCLQYIRQLKDKNISVYFEKENINTMDAKGEVLLTIMASLAQQESQSLSQNVKLGLQYRYQQGKVQVNHKRFMGYTKDEDGNLIIVPEEAEIIKRIYREYLEGQSLVGIGRGLEKDGILTAAGKPRWRPESIKKILTNEKYIGDALLQKTTTIDFLTKKRVKNEGHVPQYYVENNHEAIIPKEIYLQAQEELHRRNNIYTGADKSKRIYSSKYALSAITFCGECGDIYRRTYWNVHGRKEFVWRCVTRIEQGPEVCKNRTAKEGDLYDAVMTAINRLLAGGDNMIKTLEENIHAVIGDTTEYQISEINILLEEKQKELINLANKGKDYEPLADEIDNLRGKRQTLLVEDASLSGENERINDLIEFIRNNKYRTQRYDGALVRKLIQNVTVYDDHFVICFKSGIEVEV

SEQ ID NO: 19211 - protein, 520 aa, synthetic construct
MKKITKIDELPQGQLPNTKLRVAAYARVSTDSDEQLESLKAQREHYERYIKSNPEWEFAGLYYDEGISGTKMEKRTELLRMIRDCKQGRIDFIITKSISRFARNTVDCLELVRKLIDIGVYIYFEKENLNTGDMESELMLSILSGFAAEESASISQNSTWSIQKRFQNGSYVGTPPYGYTNIDGEMVIVPEEAEIIKRIFAECLSGKGGGTIARGLNKDKIPARRSNHWSAGTVIDMLRNEKYMGDVLLQKTYTDSNYNRHPNTGEKDQYYYKDNHEPIISREDFAKAQDLIDERAKMKCKGVKKNVYLNRYALSGKIVCGECGRNFRRKTNYSAGRSYIAWSCIGHIEDKESCSMLFLRDGEIKATFTTMMNKLAFSHKLILEPLFKSISQIDEESDRERMDAIDKRMEQLMEERNTLITLMAKGFLEPALFNQERNVIDSEIKNLTTEKTNLVTNSTSGVLRANDIKDLIDYVSADNFNGDYTEELFEEFVENIIVNSRDELTFNLKCGLSLKEKVVR

SEQ ID NO: 19212 - protein, 452 aa, synthetic construct
MKAAIYIRVSTQEQIENYSIQAQTEKLTALCRSKDWDVYDIFIDGGYSGSNMKRPALNEMLSKLHEIDAVVVYRLDRLSRSQRDTITLIEEYFLKNNVEFVSLSETLDTSSPFGRAMIGILSVFAQLERETIRDRMVMGKIKRIEAGLPLTTAKGRTFGYDVIDTKLYINEEEAKQLRLIYDIFEEEQSITFLQKRLKKLGFKVRTYNRYNNWLTNDLYCGYVSYKDKVHVKGIHEPIISEEQFYRVQEIFSRMGKNPNMNKESASLLNNLVVCSKCGLGFVHRRKDTVSRGKKYHYRYYSCKTYKHTHELEKCGNKIWRADKLEELIIDRVNNYSFASRNIDKEDELDSLNEKLKIEHAKKKRLFDLYINGSYEVSELDSMMNDIDAQINYYESQIEANEELKKNKKIQENLADLATVDFNSLEFREKQLYLKSLINKIYIDDEQVTIEWL

SEQ ID NO: 19213 - protein, 452 aa, synthetic construct
MKAAIYIRVSTQEQIENYSIQAQTEKLTALCRSKDWDVYDIFIDGGYSGSNMKRPALNEMLSKLHEIDAVVVYRLDRLSRSQRDTITLIEEYFLKNNVEFVSLSETLDTSSPFGRAMIGILSVFAQLERETIRDRMVMGKIKRIEAGLPLTTAKGRTFGYDVIDTKLYINEEEAKQLQMIYDIFEEEKSITFLQKRLKKLGFKVKSYSSYNNWLTNDLYCGYVSYKDKVHTKGIHEPIISEEQFYRVQEIFSRMGKNPNMNKESASLLNNLVVCSKCGLSFVHRRKDTVSRGKKYHYRYYSCKTYKHTHELEKCGNKIWRADKLEELIIDRVNNYSFASRNVDKEDELDNLNEKLKTEHTKKKRLFDLYISGSYEVSELDAMMADIDAQINYYEAQIEANEELKKNKKIQENLADLATVDFDSLEFREKQLYLKSLINKIYIDGEQVTIEWL

SEQ ID NO: 19214 - protein, 376 aa, synthetic construct
MTKKGFTQNDNNLAIAYYRFSSHSQNEASIDQQREQAQAFAKAHGYNIVKEYEDAAMSGTTSDRPQYQLMLSEVGTIRPAAVILWKTDRLGRDRFELADAKRWIRDAGCRICLIAEPTPDDSPESVLMETMMEGMAEFYSRQLSVNIRRGMTYNAGHALYNGHKVWGYGVDDEKHHVVDDSVAPFVLDMFTRYADGEAMQSICDDFNAKGLRTTREALFSVKTMNKLLKNRAYIGEYRHGGITVEGGMPQIVDEDTFDRAQRRLAENKRTGARRKASAQEQDAPRYWLTGKLYCGECGGSMQGVSGTSKTGAKHYYCYCKEQRAKRCTKKPVRKEWLEDAVTGVLKGLLDDSENLASIAVDAAKYYEGHYRVPREP

SEQ ID NO: 19215 - protein, 584 aa, synthetic construct
MKEVEVIKANSSTSKSKRGKQIERIRVSAYCRVSTDSEDQLSSYISQKTYYTDLIQKNSDWIFAGIYADEAITGTQVTKREDFQRMINDCMNGEIDMVITKSISRFARNTLDTLKYVRMLKEKDIAVYFEDEKINTLTMDGELLLVVLSSVAQQEVENISANVKKGLKMKMKRGELVGFQGCLGYDYHPEDKSITINEEEAEIVRYIFKRYVEGAGGSVIGQELENLGYKTKYGNSTWVPTTVLGIIKNEKYKGDLLLGKTFTVDPISKRRLENMGEEDQFYIRNHHEPIISEEIFEKAHEILNRRNKNRGKIGDGNTKREKFSRKYAFSCLLECGFCKGTLTRRKWHSGSQYDKVIWQCVTSTKKGKKHCPESKGIPEQAIEDAFVESYRILCDSNKDVLDEFLRTMNETLSSSSVNKQLSKVEKEIEALEKKKSKLVDMRLEDVIDSETYEYKFSSLTSKQDELLNEREKLQTTAMNEKDIKRRLQEFKRTLEQNEVLHEFDRYVFESIVEKVIVGGYDEDGNIDPAQLVFVYKTGFKNSLDGNRFKPMRKNARGNRKTNELCSQTNNEVQSLSSHSSSDTY

SEQ ID NO: 19216 - protein, 452 aa, synthetic construct
MKAAIYIRVSTQEQVENYSIQAQTEKLTALCRSKDWDVYDTFIDGGYSGSNMNRPALNEMLSKLHEIDAVVVYRLDRLSRSQKDTITLIEEYFLKNNVEFVSLSETLDTSSPFGRAMIGILSVFAQLERETIRDRMVMGKIKRIEAGLPLTTAKGRTFGYDVIDTKLYINEEEAKQLRLIYDIFEEEQSITFLQKRLKKLGFKVRTYNRYNNWLTNDLYCGYVSYKDKVHVKGIHEPIISEEQFYRVQEIFSRMGKNPNMNKESASLLNNLVVCSKCGLGFVHRRKDTVSRGKKYHYRYYSCKTYKHTHELEKCGNKIWRADKLEELIIDRVNNYSFASRNIDKEDELDSLNEKLKIEHAKKKRLFDLYINGSYEVSELDYMMNDIDAQINYYEAQIEANEELKKNKKIQENLADLATVDFNSLEFREKQLYLKSLINKIYIDGEQVTIEWL

SEQ ID NO: 19217 - protein, 452 aa, synthetic construct
MKAAIYIRVSTQEQIENYSIQAQTEKLTALCRSKDWDVYDIFIDGGYSGSNMNRPALNEMLSKLHEIDAVVVYRLDRLSRSQRDTITLIEEYFLKNNVEFVSLSETLDTSSPFGRAMIGILSVFAQLERETIRDRMVMGKIKRIEAGLPLTTAKGRTFGYDVIDTKLYINEEEAKQLQMIYDIFEEEKSITTLQKRLKKLGFKVKSYSSYNNWLTNDLYCGYVSYADKVHTKGVHEPIISEEQFYRVQEIFSRMGKNPNMNRDSASLLNNLVVCGKCGLGFVHRRKDTVSRGKKYHYRYYSCKTYKHTHELEKCGNKIWRADKLEELIIDRVNNYSFASRNVDKEDELDSLNEKLKTEHVKKKRLFDLYISGSYEVSELDAMMADIDAQINYYEAQIEANEELKKNKKIQENLADLATVDFDSLEFREKQLYLKSLINKIYIDGEQVTIEWL

SEQ ID NO: 19218 - protein, 452 aa, synthetic construct
MKAAIYIRVSTQEQIENYSIQAQTEKLTALCRSKDWDVYDIFIDGGYSGSNMNRPALNEMLSKLHEIDAVVVYRLDRLSRSQRDTITLIEEYFLKNNVEFVSLSETLDTSSPFGRAMIGILSVFAQLERETIRDRMVMGKIKRIEAGLPLTTAKGRTFGYDVIDTKLYINEEEAKQLQMIYDIFEEEKSITSLQKRLKKLGFKVKSYSSYNNWLTNDLYCGYVSYADKVHTKGVHEPIISEEQFYRVQEIFSRMGKNPNMNRDSASLLNNLVVCSKCGLGFVHRRKDTVSRGKKYHYRYYSCKTYKHTHELEKCGNKIWRADKLEELIIDSVNNYSFASRNVDKEDELDNLNEKLKTEHTKKKRLFDLYISGSYEVSELDAMMADIDAQINYYEAQIEANEELKKNKKIQENLADLATVDFDSLEFREKQLYLKSLINKIYIDGEQVTIEWL

SEQ ID NO: 19219 - protein, 517 aa, synthetic construct
MKTIHKLARPQLPEPPKLKVAAYARVSTSSNEQLASLQTQITHYENHIQNNDQWEYVGVYYDEGISGTKVEKRDGLHRLIKDAELGKIDLILTKSISRFSRNTVDCLNLVRKLTDIGVTIFFEKENINTGDMESELLLSILSSLAESESYSHSENMKWANRKRMAKGIFKTVPPYGYQRKGADFYLIPDEAKVIEQIFKWALEGVSAYQVAKRLNEKNIFTRKGSKWQASGINNILHNIVYTGTMLHQRYFNDDQFRKKKNNGELPMYRIDNNHPPIISWEDYERVQELITLRANAKGTSKGSQKYSQRYAFTKRIICDKCGCNYKRVHTAGKGNTKVVKWSCTGHLKNKDGCDALPITDESLKTAYLTMLNKLILGHTIVLEPLINTPVEGKASKQELEKLSIEITKIDEKLEVLASLNASGVVSTKTALEEQGRLQMELNKLQEKQHKIMESVNGTSTQRIQLEQLHQFTKRSEMLTEWDEDLFLRFAERIVVYSRQEVSFELKCGLLLKERLEA

SEQ ID NO: 19220 - protein, 516 aa, synthetic construct
MAGKKVTVIPMKPRQWAAENTEEKPKLKVAAYCRVSTEMEEQASSYEAQVQHYTDYIQRNPDWELAGIFADEGISGTGTKKRDGFNRMIEECKKGDVEYIITKSISRFARNTVDCLQYIRQLKDLHIAVFFEKENINTMDAKGEVLLTIMASLAQQESQSLSQNTKMGVQYRFQQGQLRINHNHFLGYTKDEDGNLVIEPKEAEVIKRIFREYLEGSSLQEIANGLMSDGILTGGKRKLWRGEGVRLILRNEKYMGDALLQKTYTTDFLTKKRVKNDGSYAQQYYVENSHPAIIPRDIFMQVQQELDRRKSMKNKHSQCFSGKYALSGITVCGDCGNAYRRVHWKNRGTVWRCKSRVDKREHNCSGRTIYEKDLHEAIIKAINETLVDREYFLQQLSENINSVLTDGLTGRLEELDSKLKELESEIISMAIGGQGYDELATKILALRNERDMVEREIAADANMQQRIDEMGDFVKNHDTISEYSEVLVRRLIEKVTIFEKDIVVDFKSGVNIAIEI

SEQ ID NO: 19221 - protein, 495 aa, synthetic construct
MLGVIYARYSEGPNQTDRSIEGQVSDCMAYAAENDIQIVDTYADRSKTGTNDNRDAFQRMLKDSSKKLFDCVIVWKIDRFGRNREEIAINKVKLKKNSVALYYAKEHIPEGPEGIILESMLEGMAEYYSANLSQNVKRGIRVAAEHCRATNGSLGYGFKKGPNKEYLIDEMQAPVVREIFTRYAGGESIAMIIDDLNARGIRTATDGPFNKNSIRVMLQNEKYIGIYHCGDVRIPGGVPAIIDPDTYQIALTRFLAAKHSRQPRRKLDRSRFFLTGKMYCAECGSSLIGESGKSKTGAMHYYYNCAGKRKKTAVCSGLRIKKDVIEKMVFDLTMSVVLDDKIINMIADKIMEIQEQSNNNARISALKNEKKEAQKKIDNIMTAIEQGILTPTTKDRLVQLEEQKASVEYAIETEKIKSAPITRDMVLFFLHQFRKAKINDELSFMSLIDAFIGRIDLSPKKITITYNYCDKNKKTCADLDKPDQNRVRLSSKWCG

SEQ ID NO: 19222 - protein, 720 aa, synthetic construct
MTSDDADEAAIDSLVAPTPFAGAIAVSYLRVSTKEQAEKGGNAEGFSIPAQREANQRKADQLGATIVEEFVDAGESARKVDRPELMRMIKYVATHKTSYCIVHKVDRLARNRADDVTIHLALKDAGVTLVSATENIDETPSGMLLHGIMSSIAEFYSRNLATEVVKGLSQKAAQGGTVTKAPIGYRNVGIRDDMGREIRTVEVDEERAKLVRWAFQTFASGDWTTSQLHKELVARGLTTLPTPRRPSKPIAKSTVHRMLTNPYYKGVIVYQGVTYRGAHDPIVPVEVWEQVQIVLGAHTSAADATQIHDHYLKGSVFCGQCGSRLIVCNAKSSQGTIYPYFVCSARHAGRGDCTRQAMLIEDVEHLIERFYTRIQIPTETRQALSGMLHAKFDQMMSEGAAELAELATRRTELEGEQTKLLQAHHAGAIPLDLLKREQDRITASLETIDFRVRAHNGEYADARANLDDSLLLLANIADIYANADDANRRLCNQALFKAIYVDEDNDIHVGYRTPYDGLSNPDLQADALTWADQARAHAEATGAESTGTRKKGQTRTSSKAGPLVASSHLTRLGSLREPLLNFPQRARTLATRWNRGVYRDARRSPGPRIADTRGPVARTIETVQTFLTAAEIDQLVGDYLAGGSPDELAERYGIHRATVFAHLRRRDVPRRRLGLDEVESAEAVRLYRAGVSLRAIGRQVGADRKAVRKALVEANVKTTQ

SEQ ID NO: 19223 - protein, 578 aa, synthetic construct
MTTESISHASAVSSIVGPPVAPTATAIIYLRVSTKEQAEKGGTDEGYSIPAQREANRRKAEQLGATVVEEFVDAGESARKADRPELMRMIRWVAQHRVNYCIVHKIDRLARNRADDVTIHLALTDAGVTLVSATENIDETPSGMLLHGIMSTIAEFYSRNLATETVKGLSQKAAGGGTVSRAPIGYRNIGVRDDHGREGRAVEVDPDRAPLVVWASKVYASGEWSLKQLHRELVLRGLTTRPTPRRPARSIAQSSVQRMLTNPYYKGDVRYQGVTYRGAHEAIVPPEVWHQVQTVLQMHAAASDAPQIHDHYLKGTVYCGQCGSRLLAAYAKNRYGRVYPYFVCSGRQRHPEQCTRQAMLIERVEQLIEDYYQRIQVSPTVRQAVAGMLLSEFDRLMADQSEELARLTGERDRLHDEQAKLMQAHYADAVPLSLLKTEQDRIAATLDGIERRIEAHDGEYADARDHLRDSLNLLEHCAETYARCDDANRRLCNQAFFTAIYVEDDGEIRGEFARPFDALCDPELQADALTCAANAKNEVTENSTGAGPLVGSSHKEHLGWMTRLELATTWTTTRGSTS

SEQ ID NO: 19224 - protein, 558 aa, synthetic construct
MTKLYSYIRFSSMRQSDGSSYERQIRMAKEIADRYNLELVNDYQDLGVSAFKGANSKTGALSRFLDEIGRSIPVGSWLFIENLDRLSRQDIISAQELFLSIIRRGITIVTGMDNKIYSIETVTANPMDLMFSILLFIRGNEESQTKRNRTNSSALLKIKAHQQNPQSPAVAIEEIGKNMWWTDTTSGRVLPHPVYFPVLQKIVQLRQEGHSAGVILDYLNEHHEPPAPTSNKKHGKWSRSMVSRLFATKALIGVKTVNVDGVEYELRDYYPRVLSDSEFYFLRKNIVKKAWDYSHDKEKVIPLLSGIGVLRCVHCGATMVKQTAANGKREQYRYCCDGRKSGRTDCPYPNWGFRAVTLEGAVLQLLADKIWIAEDKTNPIPEIQVKIDEISRKIDNLINLSAMMGATKELANQITDLNSQREALHEEIRLFEREMYSVDSQGWDKLAQFDLSDVQNEERLKVRMKIKGALHEIECSRIDSKKNLFVLVYLDGLRQRLVIENNRGLKKGQIFVDLKTINDRQILESAGMVLHPCIEMIIDADWKAPEEIPGLLSEEFGI

SEQ ID NO: 19225 - protein, 399 aa, synthetic construct
MAMMNEMEYRTIGSALAGGYRAAVYCRLSKDDDLQGESASIANQRDMLEKYCEKQGWEVVAVYQDDGFTGLNMERPDLQRMLRAIERRQINLVITKDLSRLGRNYLQTGHLIEDFFPRNGVRYIAMNDGIDTLRDNNDIAPFKNILNEMYSKDISKKVHSSYLLKAQKGQFTGCLAPFGYRKDPEDKNHLLIDEETAPIVRLIFGYALNGHGPNYIRRRLEEEKIPCPTWWNRERGLRNTRTKWEKKDPENGRYMWDFSVIKDLLMNPVYTGAIASQKKDYRFKIGTIGEKKPEDWIVVEGQHEPLIDRMSFDIVQNKLKSRQRPGQTNEISLFAGLIKCGECGKSLTVRYTNAKHPQQIYSCKTYNAFGKNHCTQHRIDYDTLYSHVLRKIRECARAA

SEQ ID NO: 19226 - protein, 626 aa, synthetic construct
MRNEKITPLYERLSRDDELQGESNSISNQKQMLEDFARRNGLPNPTHFTDDGISGTRFDRPGFLAMMEEVEAGRVEAIVIKDMSRLGRDYLKVGQVMEVLRQRGVRLIAINDGVDSLKGDDDFTPFRNIMNEFYARDTSRKIRSVFKSKGMSGKHLTGTVIYGYLWDEKREHWLVDEEAAEVVRRIFSLTLEGYGPYQIACKLSADRIEIPVVHLARFNEGVNRSKPVKDPYGWGSSTIVNILKKREYLGHTINFKTRKHFKDKKSHYVSEDEWTIFENTHEAIIDQQTFDLVQKIRSNVRRYPNGWGEAAPLTGLLYCADCGGKMYVHRTNNGRRISQYTCSNYTKIPCGTLCPTQHRINESAVLTLVSDTLRAIAEYSRNDRTEFIHTVQETQVAQQSADISKKRRRLAAAQKRAGELEKLICKIYEDNALGKLPDARYKALDAQYAKEQDALEIEIAELEKAVTGYEQSQKSAEKFIALIDKYENFDTLTNTMLNEFVEKILVHERTRKGSQDTTQEIEIYFNFLGRYIPPSLQPVPLTPEEQEELRKKEERKDRLHQNYLKRKASGAQKQYEDKIKAKKKAEMDAKKALIRAEDMKKGVFSTIGQLPKEEPRKGSIAASAAV

SEQ ID NO: 19227 - protein, 530 aa, synthetic construct
MNNILNSFYGSQGGLNMEVLRGLRAAAYARFSDTKKKKNEKGKGKDINVATIEVQYKKIADFCLGYGINIVAWFKDEGETGTNLDRGDFARLVEGAKMRQFDIVVIYDLTRGSRDVVDWFSFRKEMRTLGLPVLSATEKLGDITNPSDFLTELITVGIGQHHVLQTRLKTMNAIAALAEQGRFCGGIPPLGYDIDVEKKYVVNEREAEAVRDIFRLYAAGKSYSYIVDQMKKNGVVGKRGRPIGVNSLFEILRNERYIGVYSWNKKQMKFFRKWAGGKPNPNAIIIENKIPRIIDDETWGRVKKRMEENKKNRLNKSRINREYLLSGLLKCASCGGSFVGVTTINKKGYEYKFYTCANKRRTRTCSCKNISADEIETLVVMLLKDKLLNGELIEATADAILNFGASPGRENALESIKKEITSLTIKIGNLTRILADGFDSESVREAALDMEKRKKLLEQQLQNTYPVITKPVSRDFLIKELSTDARRVMDEPGCMKEILNKYILNIKIADDKIEINAISDLNTIGCGGQI

SEQ ID NO: 19228 - protein, 515 aa, synthetic construct
MTRTDDPLSARSASVQRCALYTRVSTEEQVERYSLEAQQEVLTRWAGVLGYEVAATYTDPGYSGAQEDRPALTRLLADAQEGRFVVVLVYRLDRLARKVRLAYDLIERLERCGVGLMSYSEPNINTTTSIGKAVLGIMAVFAEWERDTFAERSRLGMHKAARMGKYLGGIVPYGYTVEDGRLAPLPEEAAVVQQMFAWVAERGWSTERVAQELNRLGIPPKYRREGRGVRGKRTAGVWRGGGVLRILKNRTYIGEYVYGKRTRKPQPELVSVPVPPLVEPVLFEAAQEQLSRNALFALRNARSVYLLKGLIRCGMCGRAYVGSAGYYACVGRTNRQASPIPEMRCTAPHVRRGELEERIWHDIRSFLLNPGEALQAFINEESPESNEVSLLERRLQALLEARARLLDLYLEGGVEKETYYARLEDLDTRVREVQVSVEAARQRSIAERQRKEALHSLESLSARLRDRIDRLTPEEKQAVARELVEGVTVRPGKGEVEVEVRYRFGQIAPHTGRGS

SEQ ID NO: 19229 - protein, 519 aa, synthetic construct
MNTYYSYLRFSSGKQSKGDSFKRQTELAEAYEKANGITISDTRFADLGVSAYHKHNLNSDAGLGRFIAAVECGEIATPCTLLVEDFDRMSRADVDTALSQLINLTNHQVKIVTLFDGRTYQKGMGVTEYITAIVAMQRAYEESDTKSKRLKSKWLARRVNPEEHKKSKNCPFWLEPSEDKQSYVLNDSAEIVARMFDYSVDGFGSLRIAKILNGEGIKSPKGSDWSCSTISKVLSSRAVIGEYQHHTREGRKSTPVGEPVPNYFPAAISEDTFYLSQSRRKGRHRSQQHGTTRTHLNVLRKIGTCLECGSHLTLVSHDGLNYLKCTASTNGTCKQGKFNLFYLRDWLKEQFVSPMFHSVWSKQVKKTRDNSKQIATLEGRQSSMVADLERMLEAFGALSSPLIVDKIAQRTEQIASLETEIEELKEKDAENGSIHLSLRNTNKLVNKAFKSGNEPEQLAARMELRRLLTGFDSFRVIVNADLVVCFEVVAGDKTFVFHSRPSVYRRPSIDLPVWKLTFI

SEQ ID NO: 19230 - protein, 521 aa, synthetic construct
MSNYLIQYTRISSHSQRLGTGLQGQALSQEEMNHLCSTYNVIPYHETFCDSAVSAFKVSAKDRPAFSRILANLESGAFSPSSVLVLANLDRLSRQDIHTACTTLLSVIQQVRVYIVQERRLFSKDDPDLMMGLMMALATLQRGHDESLAKSTRTNKSNLVRIQNHKDGIKGKNGNSLSITSGKYPMWVKLVDGEVTIDPAKADIAREVVRLMIEGKSISQVQHWLVANHPSIKWGEMSLRRLHTRKTLIGEFSITINGEKHVLHNHIEPIISEAEYYRLVAVRSEHTATRMKKWDNVSIFTGYKKSYCRSCGSPMTTVIDKNKESVRCRGGSIYDKCPNLVCIKTDYLVAALRELNFSFKSLVPEPSTSLLPMLEVKLKECGDAVATMEKDYMEHQHSFLLPLMAKKHEEIAALEAQIEEDKVKQSNHMGSIFDTLPETPEELRELLMNLTQSMKFYKVKRGNTLTTIYFKNGFITSIYLAYGKVVQAGLLTGSNEGDIELLDDVKFKQWIEEGRLDDWIR

SEQ ID NO: 19231 - protein, 454 aa, synthetic construct
MECVAYLRVSTEKQAEEGNGLDSQKRDIENYCRKNQLIISDWYEDDGFTGSNMNRPALQRLINDCSKKKLKCVVAFKLDRLSRSMVDGIYLIERVFIPNGVDFRCVHDSVSYDSPMEQAYTQMMAVFAQLDKNTMLLRMRGGMLERVKQGYWMGGGNTPYCYRYSKEDGILVPIPERKEMALRAMNLYISGYSDVRIQKLIGFKSEFVTRQVLTSPVNIGMIPYKGKLYRGRHEPIFDIKVFELAQELRKTRKQSKSFCVNHENQLLTGLCYCGVCGCKMRYQKWTHGKHKIYCYSRDNGMSYLPNYNPNCSNSLEWAEDIEKQVEDEILKISLNLSSHKPKERESCLDILSKQLQKEKTKLKRLYTLYAEGNDTVLEMIKETESGIDELKLKIQNEMKSPDNSQKKEFVYDNIKKLADVWEHIDKQNKNRILKTIISKIIIVNGNIEIQLKKF

SEQ ID NO: 19232 - protein, 523 aa, synthetic construct
MRFFSYGRKSVFSDKSDSIDNQFRMNREYCDTKFSGQVDSWQQFSDEDFTGANTQRPDLQRMLSFIKNGFCDVLVVYQLDRLSRDVRDFANIYSLLEEHGVMFVSIKENIDTTTPIGRAMMYVTVVFAQMERETIAARVTDNMLGLAKKGYWTGGNPPRGYVRKHIVVDGKKHCSIEPDPDGVRYVTRIFDTFLAMNCSLQGMETRFKNQGIRTESGKFFSTTQLHKILTMPYCVEATPEVYDFYASKGCIMDPGSPREKWDGSVGVIIYGRSTEKNKKHQAQPPEKWTVCLGMHKPFMPAEKWLAVQARFGQNKCIKDAKWPVPLLKGVLRCKCGNLMQVSRKKKVDGTCSSWYYCRKRMRQGVDACDMGQIKCDLLDNEVLELFRGIAADPAMIQKFVKAEAPDEVPDLKAAQARVSACENKIGRLAASLALAEESSASKYIIAEMERLDVELGALKREAALAEMESHRAAASAKDAKATAVEIAKLIHGLEGFDDKEKNAIARAVIQECTWDGERLFITL

SEQ ID NO: 19233 - protein, 554 aa, synthetic construct
MSKVFSYIRFSSAKQSAGDSEARQMRAAKEFAVERGLQLADPTEYLFFDRGRSAYTGKHLDDTGELARFLAFVDDGTIPPGSFLVVESLDRLSREKVRDALPRFLDLLAKGINVYTSTDKRLYTRDYNEIDLIISIISMSRAHEESATKGSRVSSAWRKKQADARASGKPLGKLRPLWLDVTPEGYTLNTERAQVVRRIFDLSTQGHGSRNIAATLNQEGVPAFSAGRKNLSGLWGFSTVRHVLGSRATLGEYLPHVFVNGVRTPDGEPIKDFFPAVVSEETFYRAQAARGSRRLHKITRQTKDFNVMAGIFFCFDCGAAMHLQTQRGRRYFKCSHSTRGMCNAGVITATRTETVFREILAKLDSLSLVQDSAGSIRKKLDVVEGRTVELRSKLAAAEDAHNEYPSRTTAKLLHELEGELSSLDAEKDTLRQQTAVDRVMSKEHFFEKLDLVSFGGRAAANNLTKRLGTKIFVRKNGRCDETYLIGVTAADGAEPSVIGAITHTNKKIRIDSASDAFTELQALHGDLPKWQRDAKSWRKEIKVPVLPELKSQRR

SEQ ID NO: 19234 - protein, 519 aa, synthetic construct
MYELGEYLIYLRKSRSDSELEKMGVDVLERHEQILLNLAKQMKLSIGGIYREVVSGDSISARPEMQKLLSEVESGRWKGVLVMEIERLARGDTVDQGIVQRAFQYSGTLIVTPAKVYNPDNEFDEEYFEFGLFMSRREYKTIKRRMQTGRYAAVREGKWPYNTAPYGFNRKKLSKEKGWTLELNKDEAPVVRLIFSLYTGPNRVGITKIKHELNQRGIKPRKSDKWTESTIRDILRNVVYDQQVKIGERKVVMVIQDGSPAKTRPRADDYIIVPGRQPRLIAHEIFLEAQSYLGRGKPKAPSSYGVKNPLAGLMVCSECKKKMMRRPASPDGKYVPYDLLMCTTEHCPTIGSPLDLVEEMVVQALSDWVKDYKLSGKATYVSNIPEKEAILRTAKETHEQLLQQKEKLYDFLEQGIYSTETFLERSSSLQQRISESSQSIQLLEKDLEEEKERELNVEMFLPACEGLLDYYWNLSAQERNQALRQVIDSIEYKKLVKNKKGDVRNANFELTIKPKIPRK

SEQ ID NO: 19235 - protein, 514 aa, synthetic construct
MNEKAVIYCRVSDTKQKLEGHGLESQEVRCIDYAERCGYEVAKVFKDDASGGIADRPRFVEMLAFLEARKAESHIVIVDDINRISRSLEVHLMFREKLKAIGARFESPTQKFGEGADDRMVEMMLVNVAEYQRLKNAEQTKNRMWGRLKNGYWVFQAPRGYKFEKVGAHGKLLVKNEPVASILTEALEGFASGRFQTMAEVKRFLETFPEYPRDTKKGEVRIQRIRPLLTQSLFAGYVEHEGWGIKMTKGHHDPLISMETFQKIQDRLNGKPAKVPATLNLNEMMPLRGFVRCRSCGGPLTGGRSKGRNKYYFYYECQARGCSERRKSIPKNRIEGDFEALLASMQPRKELFHLLHAMLRDLWDAQAERGAAMVSAVKKELAEIERDIERLVDRTLDTTSSTLAKRYEQRLSDLEARKLVLIEQQSQIGRPQSTFERTSRTAMRFLANPLNLWNSKRIEDKRAVLKLTFSDQISYDRKQGYRTANLSLPFKVLGRINGEKREMVPAEGLEPPTP

SEQ ID NO: 19236 - protein, 546 aa, synthetic construct
MSRKKQVYEKITALYCRISLDDGGDNESMSISNQKIMLRDFAEKHGMFQYEYYVDDGYTGRNFNRPAFQRMIADIEAGKIGCVITKDLSRLGRNYIEAGSYIEIFFPKHNVRYIAITDGVDSLTRQEMDITPFKNILNDMYSRDISKKVLAGITTRSRQGKFCGGTPPFGLMRDPEDKGHLIIDPETAPIIRKIYDYALDGLGCMRISKRLMEEKIPITHVKANTEFDANYYFWGGARISHILRNPFYKGAHLVFRTHQKGIRSNTYDIIPRDQWEVIEGCHEAIVTPEEWEQVQELIDRRPTIQGNSCPFYNLFHGLVYCATCGKSMQVRYEKVGRTGKNRFTGEMREPIDKAYYICQTYNRMGCKVCSSHKIEARDLYNLVLKDIQELAAQAMKDADAFYQRLSRRMEHRYLVDASQTEKERLRLEARNQEIDGMFLSLYTDKAKGILTEQRFVKLTAALEQEQESNQKRLHDLAMMQGRADAQESEVRTFIKEIRRYAAIEELDEAVLNRLISRILIGEIKKIDGQRTQEVKIIYNFVGEMSR

SEQ ID NO: 19237 - protein, 627 aa, synthetic construct
MTEKQGFMTALYERLSRDDELNGESNSISNQKKLLEQYAKEHGFTNLVHFTDDGISGTRFDRPGFLAMMKEVESGKVGTILIKDMSRMGRDYLKVGQYMELLRQKNVRLIAVNENVDSFREDDDFTPFRNIMNEWYARDTSKKIKSTFKAKGKSGKHVASTTPYGYLKDKDDPNVWIVDEEAAVVVRRIFHMTMDGYGPYQIARALKEDKVEIPAVHMAKKDAGLWKGRVEEIKDPYGWGSSTVAGILKKREYLGHTVNFKTRKHFKDKKSHYVSEDNWTVFENTQEAIIDQETFDNVQRIRSNVRRYPDGWGEAHPLTGLMYCADCGSKMYVHRVNNGKRVPQYTCSAYSKVPVGTLCQTQHRINADVVMELIKELLKAVAEYSQLNREEFLETVKKAQTSQQSSEIIRLKSRLAEAKKRVQELEKLICRIYEDNILGKLPDERYAILDGQYSKEQKDLSAEIADMEAELSGYEEGRRSAEKFIALVDKYQNFDELTTYMLNEFVEKIVVHERDRKGSIETTQEVEIYFNFIGKYLPPHFGEVEMTSEEIEEMKKREARKDRLHQNYLKRKASGKQQEYYERTKAKKKAEMDAKKEKIRQEDIAKGVFVPVSLLPPAEPKKGVASA

SEQ ID NO: 19238 - protein, 600 aa, synthetic construct
METKKTKYTALYERLSRDDEMQGESNSITNQKKYLEEYAKAQGFKNIRHFTDDGYSGVDFNRPGFQSLIAAVEAGEVDIVCVKDMSRFGRNYLKVGFYTEIMFPEKGVRFIAINNGVDSANPSENDFTPFLNIMNEWYAKDTSNKIRAIFRSRMQDGKRCSGAIPYGYKRDPEDKNHLLIDEEAAKVVRRIFQMIIDGMGTKAIANKLSEEKVLIPSAYLEQSEHGESRNHSYHDPYRWNCTAVAYILEKQEYMGHTVLGKTICENFKTKKRRKARPDELIIFENTHEAIVDEETWHLAQKLRRKTKRTLANGTYSHRLSGLLYCSDCGKRLSYASPHSQHRADGKTYDADSNFRCPTYKSMYGECTMHFIKASTLDSLVDEAIRKVAAYVLKDEQAFLQQVKELTSASQAVVQTDSKKELVTAKKRIAELDNFIKKLYEGNASGKIPDRQFEKLMAQYDTEQQELEARVAEIEAKISELRQEEESGEMFVRLVKRYRDFTEITQTMLNEFIDKIVVYEATGGRTANRTQRIDLYFNFIGQFVVEDTEDEVLSRQEEEKRLAELKEQERKDRRNETVRRYRQRKKEKEAAEAEAEKSRCA

SEQ ID NO: 19239 - protein, 548 aa, synthetic construct
MLDQQKITILYCRLSNEDAQEGESNSIANQREYLTRYARDHGYTNLKILVDDGYTGTNFNRPGVQEGFELVKQGLVGCWLVKDLSRFGRDYLTVGQYTDIIFPSYDVRFIAINDGVDSNRGDSEGFAAIRNLFNEWYPRDTSKKVRVSLRQRGTSGKHMGKPPYGYRCDPEDKDHWILDEEAAPVVKLIFDLCIDGKGPEQIARILEEKQILTAKALYAKRKKKPMPERPYHWGNQSIVGILERQEYTGCTCNFKTYSKSYKLKKRIPNEPENMFYLPDTQEAIVSQAQFDRVQELRKNKRRPAKAERQGLFSGLLFCADCGGKLHFATSKNFEGKQDHYVCNNYKSNRGTCTAHYIREDVLREIVLERIRAVNEYIRSDVDGFQEEWLQCRRTDQERSIRDDKKKLEQAKKRLADLDVIIARLYEDYVLGNLNQDRYRKMSADYEAEQERLKLEIEVIEEWVEQREEMNDGLDAFIALTQKYVDVEELTQTIVNEYIKKIIVYAPDKSSGKRKQKVKIFFNFVDDVDIPVISEPIITQTTYEHRKTA

SEQ ID NO: 19240 - protein, 542 aa, synthetic construct
MTKKRAAIYTRVSSALQRDNFSIAGQKKLLEEVCQRNGWEIYEVYTDNGLTGKNMNRPALLKMNEDAKNGKFDIILIYRLNRLARNTKHMIDMIDFYNKYNVEVYSDTERFDTSTASGRLMLQILASMAEYDRNQILENMFAGLVSRANSGYYNGGQVLGYQQVPGNKRMLAIVEKEALIVKRIFEEYASGKGYRAIANALNKDGYRTKKNNPFDISAVKYILTNIVYIGKIRYLRYTSWNEKRRRGFNPNPIIADGKHTPIIDQDLWDKVQIRMEKASKNPMINGKGENLLTGIVRCCECGAAHAANNTTNTLKSGEKKRIRYYSCSQFRNKGASVCSANSIRADVAEAYVFNRIKEVIFNDKVLQQVLENVNSSLEAKPTEMKQRLLNKKQQLEETQVKLNNLNIALSTSPDLIHTLKGTIDEYASTIEALKATIAEMEAHKEDDIKQLTIEEIKPPLQAIFKDMDRLDKKQLKALYLSVVDSIHFKKCKEPGKKHDFFITLKINEDVLKEVYNGIEPEEALLSASSSLFTEHETYYLRI

SEQ ID NO: 19241 - protein, 456 aa, synthetic construct
MIVAYVRQSTKKQQSIPTQKELIRKCAAKYNIDVDKINFYSDIGSGRNTNRTNYQRLIQEIKNNQVTTLLIYRISRIGRNLKNALDFVELLQNYQVKLVSVSDGYFDLSKAFDRMKLQLFLSFAENELENIRDNVSKAAREKARQGLLITTNAPFGYRYEDGNLFVHHEEGKTVKKIFQLYCDGYGYKAISKLISEDTRYISLTNVRVRNILLNKIYTGIVPSKYGEYQGPHQAIITKETFEEAERIRLSKGIKRKPINTLLKRKIHCPYCNARLHSHKVKKNNRTYTMYVCRNHTVDYSGLNERCPFTSINADHIEDQVLYALKTFLKDTECAKRIEQAVNKVIRIHKKDQRKISQANAKLINELAEGKISAQEFQSNYVSEESSVQASKNFSRQKLNNIVSTHVSFLKLKDINHIIEKVIIDEENNLTGLFITDYPLNIVPMKTETNQLHQAIG

SEQ ID NO: 19242 - protein, 466 aa, synthetic construct
MVEKGRRERAALYLRQSTFREESISLELQETAGREYAARHGYEVVDVQSDPGLSGRTFNRPGVAAVMDAVESGAADVVILWKWSRLSRNRLDWYLAADRAQQAGGRIESATEPIDTSTSIGRLARGMMIEIAAFESERAGDQWKETQARRVRNGLPHDGKPRFGYVYDPEQKMFFPDPVTGPVFAGLYRRFIAGETMYSLCVWLNAQGIPTATGSNVWTAGNLRQIMDRQFAVGRVYHQGVWHPGAHEPLITEAEYAAYRQARKTRAAAPRREASDYLLAGLVRCGVCGRALTGASARGRWFYYRCFASRFTGGHSHAQVPTRVVEDAVYDKLVETAEDIETTAIPETRPVAVDTAALKRTIQQHKTSLGRLAVQLAEDVISADAYAAAAPAIEQKFATARDALQAATAEHAIPPMHDAVVSLVKDWHILPTTHRRALLARAVESVSVDFNDERRVDVVMRGRPTP

SEQ ID NO: 19243 - protein, 527 aa, synthetic construct
MPERRRAAIYARYSTDLQSDRSVEDQIALCSTYAAREGLSVTRTYHDRAKSSASMLGRDGLLTLMEDARAGAFDVLVVEAIDRISRDQEDLAGLHKRLEFAGVEIRTVHGGRASMIEIGVQGLMGQIFLAQNKEKIRRGLAGVVRDGRNPGGRAYGYTPVPGQPGELTIVEAEAEVIRRICQDYVSGKGPKAIAAELNAEGIAPPRGARWNSSTLHGNPARGYGILCNPLYDGRVVWNRVHMVLDPDTGKRVSRTNPMSEWHEAEAEHLRIVPAELWADVERVRESRKGMRGRRHTFAPARPFSGLLRCGCCGAGMSIQKRRGTSIWLRCSRRAESGDCKQRKRPRLDKIETAIFERLTEELRDPAYAKAYLDEYSAERQRLARTAGKARARLEREAARARAAYDRAYRLYVDGVTDGDKAKADILAKRIAAEQAEARLVDRDAEVPVLEIHPVAADRYRQALVQLQQETDPEALRTIRELVSEVVITPTKNGHDVEVKGYISALVGPECRQMLVAEEGLEPPTRGL

SEQ ID NO: 19244 - protein, 480 aa, synthetic construct
MISTNKVAIYVRVSTTNQAEEGYSIDEQKDKLTSYCDIKDWSIYKIYTDGGFSGSNTERPALEQLIRDAESKLFDTVLVYKLDRLSRSQKDTLFLIEDIFVKNGIEFLSLQENFDTSTPFGKAMIGLLSVFAQLEREQIKERMQLGKLGRAKSGKSMMWGRTSYGYDYKKETGSLIINPAQSLVVKYIFERYLAGRSITKLRDDLNEKYPKEISWNYRAVRGILSNPVYCGYNQYKGQLFLGDHESIISEDVYKRTQEELKIRQRIAAEKTNPRPFQAKYMLSGLAQCGYCHAPLKLIMGGIRKDGTRFIRYECYQRHPRKTAGVTVYNNNQKCHSGAYDKDELEKYIITEISKLQHDQSYIEQLFSTQSSTIDRVSYQKQIEDLTRKISRLNDLYIDDRITLDELQKRSSEFMTMRMALEEELKNDPEIKGQERRNDIKQILDCEDIASIDYDNQKTIARALIDKVQVTSEKIVINWRI

SEQ ID NO: 19245 - protein, 632 aa, synthetic construct
MNEILNFRSPKIQSKSIKYAVALCRVSTEDQFTKGLSVPEQRQRIQKWADEHNVTILKWVELHHSAYRGLDEDPEVLELLEYAKNNDKVSLFLVDEKSRFARRKYLRVVWQEELRRHGVTVIGVSEPQYDRNSIHGIWLEGISETKDEARSIETAYHTVKGMTRNAGTRDPETGYCYKNGGIAPDGYINKRVIRGKDSRGKDITKLLWEIDEKRSWLIRYMILELWYRKKMSYRDVRDHLNTKGTEYQNREGRPWSVTTIREICMRALEGVYSGLYYWNRTGRDLRGTGQKWKDADDWVIIENAHPAIITQAEWQELKEVMGPLVEKRKRNIIPTRTEDSPYLFSGENAVGEPMFVCLNCGGPMNSQQMGKHRYMYYVCANFKNKGKAGCNKAVALRKEEVEGKVLAAIKSRFTPQKIKVIVREMNEILKENNNDLYKAENHLQKSIIETENAINNILAAIQEGKDSKVIPLLLSQLEKLQEEKQTLETELEEIQKESPKVDKIEEATILAQVQNLESILMDSTTSNHTKRMAVRSFIRQLRFNPDTGEIYVYFWHDPTGQDIKRLMLMNGNNQNKKEDESSSSIRNELSDNVMKKGGAGNRNRTGMGIATRRILSPVRLPVALKSAFLLGF

SEQ ID NO: 19246 - protein, 466 aa, synthetic construct
MKKAGLYIRVSTPQQEKEGYSIEAQTEKLNAYALAKDYKVFKTYTDAAFSGAKLERPALNEMIEDIESNKIDVVIVYKLDRLSRSQKNTMYLIEDVFLKNNVDFISMQESFDTTTSFGRAMIGILSVFAQLERDNITERMSMGKLERVKRGYYMGGGNVPFGYEYNQITGELEIQETQALAVKRMFELFLSGQAINKVVSVLKKEFPVFEDSFMDSTVRRRLQSHYYCGKQKYQNKVYDAKHEPIVSTKDFNKVQRLISNRPHSNAFNHSYLFSGLIVCHKCGKPYNGYESVRTANGKKYKHKYYRCSCRTYKHKQKYGWTCSGKSYRCDFLDAAIMSEIKKRAENSKFALKEDNNEVDNKPIIREIARLNAQQSKLLDLYLSDKISTNILDNKTDELKEKIEKLESQLNQTVSKKDKEEFEKSLEELVDKFEEMDFSTRRSLIENIIEKIEVVDDEITIYFYVTI

SEQ ID NO: 19247 - protein, 585 aa, synthetic construct
MPKLYSYIRWSSERQAKGTTLKRQMEGAKECALANELELAEIIDPGVSAFRGQNAKTGKLGGFIEAVKHGVIPADSWLYVENLDRLTRQGVITAQKLFIELLELGLTLVTGMDKRVYTLDSVNKNPNELVASILMFSRANEESKTKQSRTISNVKVLVERHKEGYPVNIKSCGKHPFWIDDSGSQEEAVRKHLHYWDIAREAIDLFLDGHGIYKVKRYLDERYPNGLNGKEWDYQVLKRMRESRALIGERTINIDSQTYKLRDYYPALCKSETEFLKLQELKTQNGNKSKKDPTKDNIKLLSGLSILRCRKCGGTMAGFMNRGKPRYICLNGRHLQKGCIGWSITAPLVDHCVIVALLIGYMDANRQKGQDTSKFVKVITAKQDEVTGIDKKIENISLSIEEGVSIKMFSIRLKELSANREVLLRDIERIKERKVLAESKGNFEVTMIDFMNMIHWKVFTNSSDETRNEIRSVINSIIEFVMVDKTDGCISIKIKCRGIDEIFLFRGENRKPHWNFDVEAFTENIIYENNDEMEKLLTSNEFVNRSLSIRNEIRHAYLGFYKTVKEMLSIAGYPEINGALFWPNR

SEQ ID NO: 19248 - protein, 505 aa, synthetic construct
MVNVLYAERISLDRKERSTDSIERQHAKLELRREEESRSRAVTVVGHAVDRSVSGSVDMFDRPKLGQWLNEEGRDRWDELWVTTQDRLSRNDIHFLAFVFKVLEWGKTLVVLDDPSLDLRTPEGRLIAHAKALGPSKELARIRARITESHETRRYTRAWPGGVPTYGYVTTKIILDGKPRKVLQLDEYMVSVLHEMRRWMVEGGDTIKGVCTKLNARKELTAKDRWRLSIEQPIKNGVGEVWSPSSVSYLLSSPALLGQKLHKTKPMFNPDGSPLIIADPVFDREEWATLQAAINERRRSPYRKYGASPLLGVTFCGRCEASATHVATFRGEDEAPRYRYYRCTNQRQEKPCPGVSKKAAEVEEIVERVFLQEVGDINVATKSWTPGEDHAEELARVRAAIARLENERDTSLGWDDEDEEGYLSRKARLVARRNELKSKPSRPSGWAYTDTGQKYRDAWEMADEQGKRKLLVDAGVRFVINAPDDFDVQIPDDIAARLQAVSLVA

SEQ ID NO: 19249 - protein, 532 aa, synthetic construct
MRVCLYARYSTDHQSQNSVADQLRAGRERAAREGWAIAMVHADEGISGATPVALRQGGKALLADALADRFDVLICEGLDRITRDLAEQERTVKRLEHRGIRIIGTADGYDTQAAGRKVMRIARGLVNELYLDDLRKKTHRGLQGQFERGMAAGGRTYGYTSVPVEGGSRVEIDEEQAQHVRWIYEQVAAGATLRSIVHTLNARGVPSPRGNGWAASALVGNATMGDGLLNNELYIGRVVWNRRQWMKDPDTGKRLPVARPREEWMVREQPELRIIEQALWEQTRPARRQQHRHAGYRTHGTLFGGLLRCDACGGPIIAINGTRYGCSAHKDKGPTACPNAVTWRRTDVDQRLLAELREDLLSPSALAELQTVVRTLLAELDGDHDRAQAAARRRSAELDREIQRIVDAIVTIGASEALATRLRAAELERKALHETMEVKPPVGTTVADVTARYRQSIMNLKETLTGDAIEVREARKVIADLLGSITLLRDADTGQSWARMKNPAEQLLIAAAGGSSMGVVARARFELATFGL

SEQ ID NO: 19250 - protein, 529 aa, synthetic construct
MDTAYSYIRFSSDKQEQGDSIRRQTKAARDYAAAHGLILDTQTYQEFKGISAFTGENKANGKLGLFVEAAEKGLIPKGSRLIVESLDRLSREAVDLAMSQFLRITAAGIIIVTLGDHPKEYSTASIRANWTELILTLAQMERAHDESATKSKRVSEAWENKRNTDKIMTRMVPAWLSTDDYVHWEIDPEKAAVVQRIFAMAHDEGLGTPTIARRLNADGVPTFKKPTKKELEAIARGEELLEPEWSHGTVAHVLNNKAVIGILHTEKVYREDYYPPIIKKEVFESMGMLFKQRHFAPGARGQGGIVNLFSGRSYCGICGKRMKTVSQHEHNVYLHCERAYQGSKDCKATRVAYHAFEEDILKHLIIAQHRLVFKLREEVAHDPREILRRQLEVLEGDIETALDRLLSTKSEALSRRLEKLEADKVVLLDQIKNAVVIPKATNVLNDLVTTYKRFVELQKTDKDSEEYKALRKRLQTGLRGAVKKIEFHHKPGSDGVEHYRVTFLSGTERERTYRRPPKGFQPGNIKGKR

SEQ ID NO: 19251 - protein, 451 aa, synthetic construct
MTKAAIYIRVSTQDQVENYSIEVQRERIRAFCKAKNWDIYNEYIDGGYSGSNLERPGIKKLITDLKNIDAVVVLKLDRLSRSQRDTLELIEEHFLKNNVDFVSITETLDTSTPFGKAMIGILSVFAQLERETIAERMRMGHIKRAENGLRGNGGDYDPSGYTRKDGHLIIKKDEAAHIKRVFDLYEQYYSITKVQEVLKEEGYPIWRFRRYRDILSNTLYIGRVTFSGKEYDGQHEPIISSEQFKRVQALLKRHKGHNAHKAKQSLLSGLITCSCCGENYVAYSTGKSKDVESKRYYYYICRAKRFPAEYEERCMNKTWSRKKLEEVIISELKNLTEEKKQTNKKEKKVNYEKLIKDIDKKMERLLDLFMNTTNISKSLLEQQMEKLNLEKEKLLLKQQRSEEESLSHEVTLTAIDDAFETLDFKEKQVMINNFIEQIYINQNNVKIIWRF

SEQ ID NO: 19252 - protein, 475 aa, synthetic construct
MRGVAIYTRVSTEEQAREGVSLEEQKERLLMYCKALKIEDPMYLFVDEGYSAKSMDRPQLQSLISKVAKNEIKCLLITKLDRLSRNLLDLLTLLKIFREHEVSFISISENFDTSTPSGRLTLQVLGAMAEFERERIRERVIENMEHAARKGKWLTQHPYGYRLKDGTLFIHEEEAEIVREIFDVFVNKGRGYYFIAKELNKRSIPSRYKKQWSNRGVKLVLSNPVYKGTLAWNRTDSSYSTRKLKDEKEWIMLDNELPAIIDKETWNKAQKRINEKPIHSRSQTRPHLLGGLLKCGQCGGGMSISWSGSKNKRYRVYRCSRNKNNGTCTSKGYRADDVEKWFLEGLENLANQLDSEVVVQLSMLERESQKDSEEEVKRLERRYKRKAEAYAEGLIELDDLRKEKRKLNDVKELNTKNKSTKVDLKKYRKEINKAFCKLKYSLESLPVLEAKDLIKLVIEKVIISGEKDIIIQIKV

SEQ ID NO: 19253 - protein, 514 aa, synthetic construct
MVKKLDDLKKIIYNKKGVFYGRHSTDKQEITWQQKRVEEFIALHGGKRAKDFEYIDKAVSARKTKLKDRGQLNRLLVDAERKCFEFVVISDYDRIARDPKDHLILKKHMQELGVPVFVASTGTQYGSEDFLTQLLFDGLSKFEADQTAQRTKDTIKLLVSNGKWKGGNTPYGYIYDKDTQKLLPDPLTKDKVKEIFNQYERSRGFKTISSFLSKLESDQFKADTDYDKTQSWYPRKIKSIITNPIYSGRVTLNRRKHLKGHTLNPRSDWFEWEAIECIDEPIISVDQWERCWKIYNKRNEENLTSLDTPFYLRNIIKCAHCPNKVIGKNYSTKKYEYYYYVCKNCKYKVSVDQIHLSFNKQWQKQITDQGLKKKTEAKIEEMYEREIYELECGLTQIKEGIDRINNEINDLLDKKQTYAKVSKTNYPYLFGLDLILKEKKGLLAELEVKREKQEGMIGVATRCVIPTPLIEEYLVFDSFTAAEKNDLIKLFVKSCTIYKTGRLDLELLDFSPNA

SEQ ID NO: 19254 - protein, 559 aa, synthetic construct
MKTKLYSYIRFSSMRQNDGSSYERQIRMAREVAAKYDLELVNDYQDLGVSAFKGANSKTGALSRFLDAIGRSVPVGSWLFIENLDRLSRADIVSAQELFLSIIRRGITIVTGMDNKIYSLDTVTANPMDLMFSILLFIRGNEESQTKRNRTNSSALIKIKSHQENPQNPAVAIEEVGKNMWWTDTTSGYVCPDPVYFPIVKEIVELRKNGRSTSEILNYLNETYTPPPAVSNKKHSKWPRAMIGRLFHTRALIGIKEVSVDGVKYELKDYYPRVIDDATFYHLKKNIGARAWNFGDTEEIKPIPLLSGIGLLKCEHCSSAMIKVKGTNKRADQYRYSCEGIRSHRFDCEQPNWSFRGDQLEKAVLQLLADKIWIAEDKANPVPALKVQIDEISRKIDNLITLSAMTGATKELADQITTLNSERETLYNQIKMAEEEMYSVDSQGWEKLAEFDLEDVYNEERIKVRFKIKQALKRIGCRRIDRNKNLFVLEYIDGKTQRVVIENSRGTRKGRIFIDLKTINDRQILESNGLVLHPCLDMLTDKNWKPEEEIPGPLQEFGI

SEQ ID NO: 19255 - protein, 557 aa, synthetic construct
MKAKANLALATPGRAALYLRVSTGRQAEHDLSIPDQRRQLRAYCEAKGIEVVAEYVEPGASATDDKRPEFQKMMDAASEKPAPFDCIIVHSFSRFFRDQFQLEFYFRRLAKNGVKLTSITQDLGDDPISGMMRQIMALFDEYQSKENAKHTLRAMRENARQGYWNGSRPPYGYRIIAAETRGQRTKKKIEPDPLLIDNVKLIFRLARVGDGDGPMGSRQIAGYLNDRGIRTQTGGRWGVGGVHQILTRETYIGKHRFNVSSWRKGVKKPADEVVEVEVEPIITVEEFEEVQAIMRSRSPQLRAPRFVSGPTLLGGVAFCADCGGAMTLRTSGKGSEYRYYTCCTAARQGPKGCKGRSIPMDELNDLVVSSVVERLLSPHFLEEALSALLKRRDEAAERETGRIVALKRNALDAENKLTRLYQAIEEGLADLTDSNLKGRIAELKRIRDSAQADVERAEGRRERRIEITPQALRTFAAAAKDRMRGEDGSFRRNYVQQLVQRAEVGTDEIRIVGSRARLLQTLVASGGKPGVETAAHGVRSFDLKWLPGPDSNQRPTG

SEQ ID NO: 19256 - protein, 559 aa, synthetic construct
MKTKLYSYIRFSSMRQNDGSSYERQIRMAREVAAKYDLELVNDYQDLGVSAFKGANSKTGALSRFLDAIGRSVPVGSWLFIENLDRLSRADIVSAQELFLSIIRRGITIVTGMDNKIYSLDTVTANPMDLMFSILLFIRGNEESQTKRNRTNSSALIKIKSHQENPQNPAVAIEEVGKNMWWTDTTSGYVLPHPTYFPVVQEIVELRKNGRSTAEILDHLNETYAPPPAVSNKKHSKWSRAMVERLFHTRALIGIKEVSVDGVNYELNDYYPRVIDDATFYHLKKNIGARAWNFGDKEEAKPIPLLSGIGLLKCDHCGCAMVKVKGTNKRSDQYRYTCDATRSRRLDCEHPNWSFRGDQLEKAVLQLLADKIWIAEDKANPVPALKVQIDEISRKIDNLITLSAMTGATKELADQITTLNSERETLYNQIKMAEEEMYSVDSQGWEKLAEFDLEDVYNEERLKVRFKIKQALKRIGCSRIDRNKNLFVLEYIDGKTQRVVIENSRGTRKGRIFIDLKTINDRQILESNGLVLHPCLDMLTDKNWKPEEEIPGPLQEFGI

SEQ ID NO: 19257 - protein, 635 aa, synthetic construct
MPQLYSYIRWSSDRQEKGTTRNRQVAAAKAYADEAGLEMVEIIEPGVSAFRGKNRAGKLGDFIDAVKNNAIPSDSWLYCENLDRLSRDQVDEALRLFLELIGLGLTIVTGMDRKVYNRESIRQNPTDLMISILMFIRGNEESETKSNRTVGNVVALVERHKKGLPVNIKSVGRHPFWIDDSGSQYEAVKEHPVYWSIAREAIDMFLAGDGIYTVKRYLDQKYPNGLKGKEWDYQVLKKMRDNRALIGERTINVAGATYKLDNYYPWLCKDEAEFLTLAERKQQNNYKGKKDKVEEIKLLSGLQVLRCSKCGGTMHSFMNHGSARYICTNGVHLQKNCSGWSISAQLVEHCTMISLLIAYMDKSHKDGIDTTAIEVDISRKETLISDLESRIANTAQAIAIAPDVSALAVQLNAFDMERKNTILEVDKLKERLHSLKGKGSFGVDVTEFLVLIQWAVFTNMEDTDRNKIRKIISSIIESVVVDKTDGCITIKIKYYHKDEWLVFGGVNRKPYWAFTVEYSTDDEMGIEGKNSSDFISNPLFQKAVEQLDSIEQSYLNLFETANTMLGVVGYSEIRGSSFWPNTGQYERVNVEYEGVTYSIALNGRVPKVIASALEATGLSRKDFIARFKVCKAEKR

SEQ ID NO: 19258 - protein, 506 aa, synthetic construct
MRGVITYLRYSSAIQGAEGADSTRRQNDLFKQWLKKNSDAQVVASFNDEGLSGYKGKHLSGQFGDMLSRIESGEFPEGTILLVEAIDRIGRLEHLETEALMNRIIAHGIEIHTLQDGLIYTRDALSDDLGISIIQRVKSYIAHQESKQKSFRVSQKWEQRAKLALAGEQRLTRNVPGWIDPETFKLNEHAETVRLIFKLLLDGESLHNIARHLQANNISSFSRRKDANGFSVHSVRTILRSETTIGTLPASQRNDRPAILNYYEAAIDASTFNKAQEILSKNRKGRTPASDNPLTINIFKGLFRCQCGASVHPTGTKNKYAGVYRCNNHLDGRCDVPPLKRKPFDKWMIDNFLGMIDVVSDGESERKIAALQHEVETVTARIKKATALLLEMDDITELKAQVKELNQKRTELQTTIDTLKRKTSLTDKELPQLKDIDLTTKVGRVECQLILSKHLKGLTLGKDSVTVTLQNDTEIIVPTDPLPLNDGTSIFEIAEKNLLEVDGFQL

SEQ ID NO: 19259 - protein, 581 aa, synthetic construct
MPLLYSYIRWSSDRQATGTTLDRQMASAKAFALTNDLELVEIIDPGVSAFRGRNTKSGKLGDFIDAVKVGQIPADSWLYVENLDRLTRQDVTTAQKLFIELLDLGLTLVTGMDKRVYTLESVNQNPTDLMISILMFSRANEESKTKQTRTVGNVETLVERHKHGLPVNIKSCGKHPFWIDDTGSQYEAVRQHPEYWKIARETIDQFLQGYGIYKVKRYLDEKYPNGLNGKEWDYQVLKRLRENRALIGERTIKIGNREHKLIGYYPSLCTDEVEFLKLQELKEQNGYKSKKDKPSDSINLLSGLTLMRCSKCGGTMTGFLNRGKPRYICLNGRHLQKGCVGWSVTSPLVDQCVITTLLIGYINTNRKEGQDTTELTKLIERKSNDINEIDSSIANISLAIEKGANIDQLVDRLKVLSSDREIIIKEVDKFKTRKTLIETKGSFELTIMEFMKLIQWSVFVDITNESRNKVRAVINDIIEYVIIDKTDGCITIKVKCLGSDDVFVYGGDKRKPFWKFDVEQHFDESTELLTSDTSIDEKLLEATNLYGKMVDGYKTYYETVKDMMAVVGYPEIDGVAFWPNR

SEQ ID NO: 19260 - protein, 547 aa, synthetic construct
MKLLVPYIRWSTKEQDSGDSLRRQTNLIDAFYAKHKDDYYLLPAHRYVDKGKSGFHQQHKAQGSDFRRMFENVMSGVIPEGSLIVVENFDRFSRADIDTAIDDVRQILRKGVSILTLGDGELYDKSALTDPVKLIKHIIIAERAHQESLVKQKRIAQVWNHKTQLARELKKPMGKQAPGWLELSEDGSHYIVDEDKASLVNIIYDKRLSGMSMFAICKWLNEQGYPTINQRKVRISKTKKPDGNWSALSVKHILTSRSVLGYLPAKISTEDRKTVLREEIEGFYPQIVTDSKFYAVQQLLEETGKGKTSSGDHWLYVNILKGLIRCKCGLVMTPTGIRKPVYQGTYRCNGNKESRCSYGTVSRKLLDTQLCSRLFSKLSQLHDEATDTAKLDELQRRLNTVDGELEKLTETLIQLPNITQIQEALRVKQEEKDELIVQLSREKARVKSVSSLDLSGLDMESVEGRTEAQIIIKRLVKEIVVSGNEKLVDIYLHNGNMIRGFPLDGKDDHTLTLEEATDEMQSLDDMLIFGEPVTRIYPAGDMEEVDA

SEQ ID NO: 19261 - protein, 348 aa, synthetic construct
MRTVITYLRFSSAIQGAEGADSTRRQNDLFKQWLKKNSDAQVVASFSDEGLSGYKGKHLTGQFGDMLARIESGEFPEGTILLVEAIDRIGRLEHLETEALMNRIIAHGIEIHTLQDGLIYTRDALSDDLGISIIQRVKSYVAHQESKQKSFRVSQKWKQRAKLALAGEQRLTRNVPGWIDPDTFKCNEHAETVRLIFKLLLDGESLHNIARHLQSNDIKSFSRRKDANGFSVHSVRTVLRSESVIGTLPASQRNDRPAIPNYYEAAIDAATFNKAQEILDKNRKGRTPASDNPLTINIFKGLFRCQCGASVHPTGTKNKYAGVYRCNNHLDGRCDVPPLKRKPFEVAH

SEQ ID NO: 19262 - protein, 501 aa, synthetic construct
MSYCIYLRKSRADTELERLGEGETLARHKRTLLSLAQSKSYAIGEIYEEIVSGETIAARPQMQRLLSDVEQGRWDGVLVMELERLARGDSIDQGIVAQTFRITGTLIITPNKVYNPLNEFDEEYFEFGLFMSRREYKTINRRLQAGRIASIKEGNYIGSAAPFGYNKVRLDNGKGFTLEENDESPYVKMIFDWYVNSGMTAGKIAEKLTLMGVTPKKGGSHFPTESVRSILRNRLYTGKITWNWRPVKKTVEHGMVKRSRPRNDESDMIIVDGIHPALISEELFEAAQERTGLNPRVAVSRELVNPFAHVMVCKGCGNAIIRKPSKKNPDYLICPNKYCGVSSAPFDIVEKQVLERLAEICGKLKLQSDKANKSQEDTNTLQIDKIEKELAKLKDQQNKLYDLLEQGIYSQEIFLERQQVLNDKRSSMQKELVELRSKIPAPVDYTDIIASIERLLSEYATLSVAEKNSLLCSCVRKITYYRDKSNRYDQKPVSMEIELKV

SEQ ID NO: 19263 - protein, 481 aa, synthetic construct
MIATNKVAIYVRVSTTNQVEEGYSIDEQKDKLSSYCDIKDWNVYKVYTDGGFSGSNTDRPALESLIKDAKKRKFDTVLVYKLDRLSRSQKDTLHLIEDVFIKNGIEFLSLQENFDTSTPFGKAMIGLLSVFAQLEREQIKERMQLGKIGRAKAGKSMMWAKTSYGYDYHRETGTITINPAQALTIKFIFESYLRGRSITKLRDDLNEKYPKHVPWSYRAVRTILDNPVYCGFNQYKGEIYPGNHEPIISKEEYDKTQSELKIRQRTAAENVNPRPFQAKYILSGIAQCGYCGAPLKIMLGVKRKDGSRLKKYECHQRHPRTLRGVTTYNDNKKCDSGFYYKDKLEASVLKEISKLQDDADYLDKIFSGDNAETIDRESYKKQIEELSKKLSRLNDLYIDDRITLEELQSKSAEFISMRATLETELENDSALRKNKRKADMRKLLNAEKVFSMDYEKQKVLVRGLINKVQVTAEDIVIKWKI

SEQ ID NO: 19264 - protein, 507 aa, synthetic construct
MKRVISYIRFSSEKQAKGDSLRRQSKMVTDWLKAHPEYYLDQDLSFRDLGVSGFTGKHLKGGLGDFLTAIEKGLVKAGDTLLIESLDRLSRQDIDIASELLRNILRSGVDVVTLSDGEHYTSESLKDPLALIKSILIMQRAHEESLRKSERIQAAWDAKKEAAKAGIKVSKRCPAWLKLNDDRKSFSVIPEKVETVKRCFQLRLEGKSIWEIVRTLNDEGHQSMSQYKPGKFGQTSVQDLLKNRSVIGYFTPKGCEEIAGYYPAIIDETTFYKVQQLSHSRYGRKPVSAKPLSVNLFKGVIRCSECGHALIITGFSDTRSGIYRCPLRNENRCSAKGLSRKQTDGTLLALLSRLDRFDSDTTNTIDMLRLHREHISSNIEKLVQLSLEIEDLSAITSKLKQLKNELSQVDADIEKETQRLKSIDVGCLSDCDLTTKAGRIEAQLIIKSAVKEVVLNTAKRRCKVTFHNGKVIDLSITENPSEDVTEAIQSLSEVTERGLIDVDEVII

SEQ ID NO: 19265 - protein, 924 aa, synthetic construct
MAGIRTENKIYEVGIYCRLSKDDGTDNESASIATQKSILTDYVKRQGWHLAKTYVDDGYSGTNFQRPSFQNMIKDIENGLINCVITKDLSRLGRNYLDCGLYLEVFFPEHNVRYIAVNDGVDTLNKSAMDITPFRNILNEMYSADVSVKIKSAYRARFQQGKFMGTTAPYGYVKDPADHNHLLIDDKVAHVVREIFDLALAGNGIAKIRKHINKQHILRPAAYAVEQGATGYERYFEDNEENRYIWSENSVRGILRSPIYAGNLAGYKRIAANMKSKKRPSKLPEEWEVIPDTHEGIVTQEEFDTVQQLMTSRRREQNAGGFENIFSGVIKCADCGYAMRAASANRRKRPDIIDCVQYTCNNYGRYGNVMCTAHSIEARDLFNAVLADINRFADMAVNDEKAVRAIERRLTETDQSRAKSLEKEKKKLNKRLAELDRLFSSLYEDKVMERITERNFEMMSGKYQKEQLEIEARLKEVTETLNDSYEKSQGVRDFLSLIRNYQGLKELDATIINALIDKILVSEREKLADGTVRQEIKIYYKFIGFVGELHITPTKRWTALKPKNCTVCGVEYVPSSGISKYCPACAKRIQREKSNESKRRSRERNRRACIELSAKNDRLMLVALVNYLLQILTELIKLAMLVTSLNVSYISAKRVQEIFDLKEEDLLEALPEETAREQEAISAEKVSFTYPTASSPALENISFDLDHGQMLGIIGGTGSGKSTLVQLLSHLYAVSQGKLALFHQGHSPKTLKEWREWIALVPQKAELFRGTIRSNLLLGMEENLSDDDLWWALETAQAADFVREKEGQLDEPVEAFGRNFSGGQRQRLTIARALLKKSPFLILDDSTSALDYLTEARLLKSIKEELSDTSLILVSQRTNSLKSADQILVLNKGHQVGLGNHDFLLSTNEIYQEIHYSQHGREEA

SEQ ID NO: 19266 - protein, 731 aa, synthetic construct
MCHFLVTSFCFNEYMEPKEWLKQKEYGISAYALKQLIHQAKKEEMEMLKALNPNEVYDYMISKLNFCQRKQAYTYKEILPQIQIRKGDICFIDFGQAYLMEIGYQHFGLILAFKHHKALVVPMTGKPIRKMKSHLFALGEIPGLYKESCLFLNDAKRINLIRTEKIIKLGKEVILMSNTKRTGQTALYERLSRDDEMQGESNSITNQKQLLESYAKRNGFANIYHYTDDGVSGTTFDREGFQKMIKAVEENKVSTVIVKDMSRFGRDYLKVGFYTEILFKEKGVRFIAINNGIDSEKQAESDFTPFLNIMNEWYARDTSRKIQSIFRARMEEGKRVSPSVPYGYFRNPKNKQELLVDKESAKVVKRIYRLVIEGYGVTKIADILTKDKVLIPSAYAEIHYPENNHSSKKRGIEDPYFWTPTTVGYILEKREYMGHTVLGKTICLDYKTKKRRKAKEDELIIFKNTHEAIIDEETWNNAQRLRKTVRRSPKYGTTSHPFTGLLICSDCGGKLSYREPAEHKEKKYDCDYCFVCQHYRHRKGTCSMHYIKVKTVNEILLKSIKEITDFAKEEKQEFLKVMNKLSDEKREAKYQGDKEKLEKLSSRNAELTTLITKLYEDHALGKIPVKHFDRLFNIYDTEQQDLEKQIQYFEQEIESYHQRKVDTDKFLKMIEKYTDIEELTVPMINEYIEKVVVHEATGGRKGKDRKQQVDVYFNFIGNCQVPQKEEIEKLA

SEQ ID NO: 19267 - protein, 525 aa, synthetic construct
MVNKKVTTIPATISKFNLTPINEVKKRRVAGYARVSTDSEEQQTSYEAQVDYYTNYIKSKEDWEFVQVYTDEGISATNTKKRDGFKRMVKDALDGKIDLIVTKSVSRFARNTVDSLSTIRKLKEHGTEVFFEKENIWTFDSKGELLITIMSSLAQEESRSISENCTWGQRKRFADGKVTVPFERFLGYDRGEDGNLVVNPEQAKVVKKIYRLFLQGYSPFGIAKELTNEGILTPGGKKKWSARTVAAILSNEKYKGDALLQKSFTVDFLTKEKKKNEGEIPQYYVTGNHEAIILPTTFDRVQRLLEQRKAGKNRISSVSIYSSKIKCGDCGSWYGSKTWHSTSKYRQKIWQCNHKFEEKCTTPHLTEEEIQKLFLQAVNKLVKNKKEIISTHKEMTKIIFDTSAFEKEKIELEEELNIVAEQVNDCINENARKVQNQDEYEIRYTSLVNRFNATKVRLDEIKQIIIEKQSKRDEVEDFIQELEKQELMTEFDKNVWLSMVDYLTVHHDGKVEFTFLDGSQVELNR

SEQ ID NO: 19268 - protein, 591 aa, synthetic construct
MKKVQKIDVKKPLIETRKKVAAYARVSMETDRLKHSLSAQISYYSKLIQNNPEWEFKGVYSDYGISGTSTAKRPGFMEMMEECEKGNIDIILTKSIKRFARNTVDLLEVVRHLKSKGIEVRFENENINSLSGDGELMLSILASFAQEESRSISENVKWGTVKRFKQGIPNGRFNVFGYVWEGDKLVIVEEEAEIVRRIYSEYLSGKSRMQIEKMFAKEGITTRRGYRWVDSNIKVILKNITYTGNLLFQKEYVVDPITKKRKLNRGELPQYYVENTHDAIIPKETYDKVQVEMERRRLAGAIGNPAIPTTEMTGKIRCPHCGKNFQSSVRNLVNGKNKYWVCATRKAGHGNPCHTGDINDRLIKEIICEVLEIEEYDSELFTKEIDHVDVIGKEKFIFHLTDGRLIEKPYRKIDRKKYFTEEVRAKISEQRKNKHKYHRKNPATPFTGLIECDRCGNSFNALKTTLKTGEKITYLSCRTKRSECPHNSIQEGTLKKLLCEVLELDEFDEKVMDEKIQRIYIADNKVRFKFKDSHEETKEYLEKKRGTPWTKERHEKQILQMHEYWKNEEHRKEASERMKKIRSEKKWSIRK

SEQ ID NO: 19269 - protein, 560 aa, synthetic construct
MSKEKIKVYLYTRVSTSIQIEGYSLEAQKSRMKAFAIYNDYEIVGEYEDAGKSGKSIEGRIQFNRMMEDIKSGKDGVSFVLVFKLSRFARNAADVLSTLQIMQDYGVNLICVEDGIDSSKDAGKLMISVLSAVAEIERENIRIQTMEGRIQKAREGKWNGGFAPYGYKLEDGKLFINEEEALAIRTIFDQYVNTTIGANGISKYLENHGIRKIPRQNGKNPLFDAGLIRKILKNPVYNGKIAFGRRTLEKVHGTRNEYKQVEQDEYLISEGIHEAIVSDEVWQAAQVKLKSQAKKYEHVNKGKDTRTHLLSGIVKCPICGVGMFGNKCIKKKKDGTKYKDFYYYGCKHRQMIRGHKCTFSKQIREELLDDAVAEVIVKIVSNPKFASMMQEKINMKVDTSEIEKEIDNYQKELRKSHSTKFKLIEEIDNLDVDDKHYKRRKQDLDDRLYRMYDKIEELESLLIDAKAKKQTIEAEKLTGDNIYKVLIYFDKLYKVMNDVERRQLITALISEIQVYEEKQPNGQWLKSITFKLPIIDDDLNISLDNDEQVECVVLLQRSKG

SEQ ID NO: 19270 - protein, 484 aa, synthetic construct
MNKVAIYVRVSTTMQAEEGYSIDEQIDKLTSYCKIKDWTVYDIYKDGGFSGGNIERPAMERLISDANRKRFDTVLVYKLDRLSRSQKDTLYLIEEIFGKNDISFLSLNESFDTSTPFGKAMIGILSVFAQLEREQIKERMLLGKIGRAKSGKSMMVSKVSFGYTYDKLKGELIVNQAEALVVRKIFDEYLGGRSLIKLRDYLNSNGIYRGDKYWNYRGLLLILSNPVYIGMIRYRGEIYPGNHQPIIDTEVFNKTQEEIKKRQIEALEFSNNPRPFRAKYMLSGLAKCGYCGTPLKIILGYKRKDGSRSMRYQCINRFPRNTKGITIYNDNKKCDSGFYEKADIEEFVIAQIRGLQLNSYKLDNMFDKQPIIDVEGIEKQITLLDNKLKRLNDLYLNDMIELDDLKKQTQSLRKQKTMLEDELINNPAIMQDKNKNHFKEILGTKDITTLDYETQKSIVNNLVNKVFVKAGHIKIEWKIPFKKV

SEQ ID NO: 19271 - protein, 560 aa, synthetic construct
MSKEKIKVYLYTRVSTSIQIDGYSLEAQKSRMKAFALYNDYEIVGEYEDAGKSGKSIEGRIQFNRMMEDIKSGKDGVSFVLVFKLSRFARNAADVLSTLQTMQDFGVNLICVEDGIDSSKDAGKLMISVLSAVAEIERENIRVQTMEGRIQKAREGKWNGGFAPYGYQLVDGKLFINEEEAVAIRTIFDQYVNTTIGANGLSKYLENHGIRKIPRQNGKNPLFDAGLIRKILKNPVYNGKIAFGRRTLEKVHGTRNEYKQVEQDEYLIAEGIHEAIISDELWQAAQVKLKSQAKKYEHVNKGKDIRTHLLSGIVKCPVCGVGMFGNKCIKKRKDGTKYKDFYYYGCKHRQMMRGHKCTFSKQIREELLDDAVAEVIIKIVSNPKFASMMQEKINMKVDTSEIEKEIDNYQKELRKSHSTKYKLIEEIDNLDADDKHYKRRKQDLDDRLYRMYDKIEELESFLIDAKAKKQTIEAEKLTGDNIYKVLIYFDKLYKVMNDVERRQLITALISEIQIYEEKQPNGQWLKSITFKLPIIDEDLNIGLDNDEQVECIALIQRVKS

SEQ ID NO: 19272 - protein, 558 aa, synthetic construct
MSKEKIKVYLYTRVSTSIQIEGYSLEAQKSRMKAFAIYNNYEIVGEYEDAGKSGKSIEGRIQFNRMMEDIKSGKDGVSFVLVFKLSRFARNAADVLSTLQIMQDYGVNLICVEDGIDSSKDAGKLMISVLSAVAEIERENIRIQTMEGRIQKAKEGKWNGGFAPYGYKLEDGKLFINEEEAVAIRTIFDQYVNTTIGANGLSKYLENHGIRKIPRQNGKNPLFDAGLIRKILKNPVYNGKIAFGRRTLEKVHGTRNEYKQVEQDEYLISEGIHEAIVSDEVWQAAQVKLKSQAKKYEHVNKGKDTRTHLLSGIVKCPICGAGMFGNKCTKKKKDGTKYKDFYYYGCKHRQMIRGHKCTFRKQIREELLDDAVAEVIVKIVSNPKFASMMQEKINMKVDTSEIEKEIDNYQKELRKSHSTKFKLIEEIDNLDVEDKHYKRRKQDLDDRLYRMYDKIDELESSLIDAKAKKQTIEAEKLTGDNIYKVLIYFDKLYKVMNDVERRQLITALISEIQIYEEKQPNGQWLKSITFKLPIIDDDLNISLDNDEYVECVVLLIKE

SEQ ID NO: 19273 - protein, 481 aa, synthetic construct
MITTNKVAIYVRVSTTSQVEEGYSIDEQKAKLSSYCDIKDWSVYKIYTDGGFSGSNTDRPALESLIKDAKKRKFDTVLVYKLDRLSRSQKDTLHLIEDVFIKNGIEFLSLQENFDTSTPFGKAMIGLLSVFAQLEREQIKERMQLGKLGRAKSGKSMMWAKTSYGYDYHKETGTVTINPAQALTIKFIFESYLRGRSITKLRDDLNEKYPKHVPWSYRAVRTILDNPVYCGFNQYKGEIYPGNHEPIISKEEYDKTQSELKIRQRTAAENVNPRPFQAKYILSGIAQCGYCGAPLKIMLGVKRKDGSRLKKYECHQRHPRTLRGVTTYNDNKKCDSGFYYKDKLEASVLKEISKLQDDADYLDKIFSGDNAETIDRESYKKQIEELSKKLSRLNDLYIDDRITLEELQSKSAEFISMRGTLETELENDPALRKNKRKADMRKLLNAEKVFSMDYENQKVLVRRLINKVKVTAEDIVINWKI

SEQ ID NO: 19274 - protein, 457 aa, synthetic construct
MRVACYDRTSVYEEAKISNDAQYDAVKEYILEKYEQIPQRFSDKGESGGKADRPAFRQLRAWVCASEEEGVIYVWRYDRLARQAKIALEFIELCQQHQVQVYSISEPLPTSFSHASTNKLFVQLLFTFAEQQRNVIIENVRAGLAYKKQQRQYLSSAVPYGYRLVNGKIQQEAHEAKVVRHIFQLYLTKKYGYKKLCQRLTQQKFFFRERPFQPYHIYSILKNPLYYGEIKGGSLGKYLGTFEPILSKTIFFQAQEIRQSRCTAKKDTYPYLLRQKIRCPFCSRHLSSKYQWNTKKTKTLHYYHCTDRSCQGIFLRAERVESEVLEKIQAFFQYEGVYQALIAQLTQQLAEKRKDEKRKVIQQKKQEAQWIKAFEEGNCSLEELKQQLQALQKPRSTSSFLSLQQCEAKVKEWLQLKDLSSRQLLCDHVCRIEVTKEKTVCGIYFRQLTQNILEGNE

SEQ ID NO: 19275 - protein, 545 aa, synthetic construct
METRPTKRVALYIRVSTQEQALEGHSIQAQEQNGRQFAERMGYEVVEVYADEGISGKSTKNRFAYQRMMNDARNHRFDLLVIWKLTRLGRNMLDVLQTVEELLRYDVGLHSISEQFDVTTSTGKLMLQLLGSFGEFERNQIAENVQMSMQSLVKDKKRYAGGRRLGYVSGIDTNGQKQLVIEPEEAKIVRLIYAKYLGGAGYRAIANFLNRQGYQTVKKNAFSTTAVKDILRNKIYAGYLEYARYINWETKRRKGKNPKPILVKGTHEPIISEEDYQKVQERFALEGKQPKWNHTGENVLTGLLRCPECGAPMAASNVTNTLKDGTKKRIRYYSCSVFRNKGASVCHANSIRAEQAETFVADRLKEIIQLPEVLPRFVAALNEEIARQSQPLEQELVVLLERKEELKTKIEKWEAALEDSPELFPMLKDRLDELTEKRRQLHIRENEILGIFQQQGEPIQVKDVQRILTSLDRFLAQSEKKQVKALYRTFIEKITFDPNYKEILEITMKFTPAVVQQLNEQYQIAVSKTKDTAIFVLKTPFTLTI

SEQ ID NO: 19276 - protein, 452 aa, synthetic construct
MKAAIYIRVSTQEQVENYSIQAQTEKLTALCRSKDWDVYDIFIDGGYSGSNMNRPALNEMLSKLHEIDAVVVYRLDRLSRSQRDTITLIEEYFLKNNVEFVSLSETLDTSSPFGRAMIGILSVFAQLERETIRDRMVMGKIKRIEAGLPLTTAKGRTFGYDVIDTKLYINEEEAKQLQMIYDIFEEEKSITTLQKRLKKIGFKVKSYSSYNNWLTNDLYCGYVSYADKVHTKGVHEPIISEEQFYRVQEIFSRMGKNPNMNRDSASLLNNLVVCGKCGLGFVHRRKDTVSRGKKYHYRYYSCKTYKHTHELEKCGNKIWRADKLEELIIDRVNNYSFASRNVDKEDELDSLNEKLKIEHTKKKRLFDLYISGSYEVSELDAMMSDIDAQINYYEAQIEANEELKKNKKIQENLADLATVDFNSLEFREKQLYLKSLINKIYIDDEQVTIEWL

SEQ ID NO: 19277 - protein, 449 aa, synthetic construct
MLKRAALYIRVSTDQQAKHGDSLDAQIATLKDYVSTQDNLTIIDTYIDDGISGQKLYRDEFQRLLEDIKKNRIDIILFTKLDRWFRNLRHYLNIQEILDNSGVTWLAVSQPFFNTDTAYGRSFVNQSMSFAELEAQMASERIKAVFENKIRKGEVVTGSVPFGYKICDKKLIPNENAPIAKDIFKHYSIHNSIRLTVEYLFNEYDITRSSRTIKHMLRNRKYIGEVSGNKNYCPPIVDKETFEKVQNLLDKNISSIAKRTYIFSGLVVCSCCGKKMTGRYRKRKYIKKDGTVMYYTKKVYRCNGNTYKRNKCPNKINIPEEILEEYLLYNIKADAENFEAKQKKIAVSAPEKNNNSKVLKKIERLKKAYLNEVISLDEYKKDRKELEQMIVQVKPKETIVFKSNWFKKNIESTYRDFDEEEKRFVWRSVLKNLIVDPHGKITINFLTKN

SEQ ID NO: 19278 - protein, 601 aa, synthetic construct
MKKDVKVIKGDTTLKRTASGCVQRSIKRVAAYCRVSTDTEDQINSYNSQVEHYTDFIKQNNEWTLAGIYADEAITGTQVDRRIDFQRLINDCMNGDIDMVITKSISRFARNTLDTLKYVRKLKEYNVAVFFEEENINTLTMDGELLLTILSSVAQQEVENISANVKKGLRMKMERGEMVGFQGCLGYDYDPETKSISINEKEAEIVRYIFRRYLEGVGGMVISRELEEQGYLSPRGYKKWTETTVLGIIKNEKYKGDLLMGKTFTVDPISKRRLDNFGEQDKFYIENHHEPIISEEDFEKAQGIRLRRAKNRNTVANNGGKREKYSRKYAFSSMLECGFCGHMLSRRNWHSSSEYKKVIWQCVNATKNGKKYCPHSKGIEEEAIEKAFMESYRQVCHNNVEITNEFLKTVEEELKDNSLAKDLKEISNQLDKILKKEKDLVELRLNESISMDIYQEKYNEISISKEKLLEEKRALEITLTDEKALKKRLEGFKKLLESNKYLEEFDRTVFESIVDKIIIGGTNDDGEIDPAMITIIYKTGKKDSQDGRLFKSRRKNAKATDENDSNKLYPQSSNEVNKLYTYPTDNTCRVCSSARESLEIF

SEQ ID NO: 19279 - protein, 521 aa, synthetic construct
MKNVITIEANAPRNSELASISLPKKRRVAGYARVSTDHEDQTTSYESQMRYYTEYISSRSDWEFVKMYSDEGISGTNTKLRVGFKSMIEDALAGKIDLIITKSVSRFARNTVDSLTTVRKLKEVGVEIYFEKENIWTLDSKGELLITIMSSLAQEESRSISENVTWGLRKQFAEGKVHFPYTNVMGFEKGENGEIVVNQEEAKTVRYIFQQALLGKTPYSIAKDLTQQGILSPSGKNHWSSVTIKRMLRNEKYKGDALLQKTYTIDFLSKKKNINKGELPQYYVENNHEAIVDKETFDAVQASLDRKEKGKGSTTLFSSKLVCGDCGHYFGSKVWHSTSKYRRVIYQCNEKYKGEKKCTTPHVTEDEIKDWFVTAINKVISNKDEIIQNLEMLLDVGESSDLERRLVELETEVEVVTQMVSNLVKENAIMPQDQDTYQKKYSNLVERHDALVSEIESIEKQLLEAASHQKDLKEFLKTLNQQSELISEFDELLWETMVDEIKIFCDQTVAIKFKNGIEVVE

SEQ ID NO: 19280 - protein, 412 aa, synthetic construct
MRTVRRIQPMMTPQKPKLRVAAYARVSDSRLHHSLSTQVSYYSRLIQSHPDWELVGVYYDEGISGKEQSNRQGLQDLLKACDDGKIDRILTKSIARFGRNTVDLLSTVRVLRQKNIGITFEKEGIDSLSSEGELMLTLLASVAQEESYNISENLRWQIKKKFEQGLPHTPQDIYGYRWNGENYVIEPNEAKVVRQVFEWFMDGDNVPLITKKLNEQGVLTRLGNPFTVSSVREFFKQEVYFGRLVLQKTYREPFSRNPKRNNGQKNKYIVEDAHEAIVSKSYFDVVLQEKERRYKVMHQESHMHKGAFRELIECSHCGKIMITRVDSKKVHRTIRYCCRTRDRFGTSSCPSKTLSEKRILATFEDEIGFKPDKNWVTENIKKVIYDSSVGLITVFPIKGRKYELKVRKEHFL

SEQ ID NO: 19281 - protein, 455 aa, synthetic construct
MANEIKQVALYIRVSTDQQAKHGDSLDEQQHTLNEYVRQQGNMRVFKTYIDDGISGQKLYRDEFQKLLDDVKKGRIDTILFTKLDRWFRNLRHYLNIQEILDKNNVTWLAVTQPFFNTETAMGRSFVNQSMGFAELEAQLTSERIRAVFDNKIRKGEVVSGKVPLGYEIKDKHLVPNEKAEIVKEIFQYYLETGSMRATVRHLENHFNMTRDYQSVRQMLTNRKYIGELRDNKNFCEPIIDRDVFERVQLQLSKNIRMNKKRDYMFTGLLVCSECGCNYSATAVISRYVRKDGTTNPNERHLYRCTKNRNNAKKCSNKKGIYETTLEKFLLENIEKQAEELSVKMQQEPDVKKTKNTNDKIKKKIDRLKKAYLNEVISLEEYKKDREELEALLIPEPNNKIAKIDLNSLHNYSTAEFRDGYKQLTISEKSSLWRQVIKNIVVYPDGNLKINFLGY

SEQ ID NO: 19282 - protein, 485 aa, synthetic construct
MSKKVAIYTRVSTTNQAEEGYSIDEQIDKLKMYCEAMDWKVSEIYTDAGFSGSKLTRPAMEKMITDIGLKKFDTVIVYKLDRLSRSVRDTLYLVKDVFTKNEIDFISLSESIDTSSAMGSLFLTILSAINEFERENIKERMTMGKIGRAKSGKSMMWAKTAFGYSHNQETGILEINPLEASIVEQIFNEYLKGTSITKLRDKLNEAGHIAKELPWSYRTIRQTLDNPVYCGYIKYKNNTFEGLHKPIISHETYLKVQKELEARQQQTYEKNNNPRPFQAKYLLSGIARCGYCGAPLRIVLGHRRKDGSRTMKYQCVNRFPRKTKGVTTYNDNKKCDSGAYDMQWIEDIVLKTLNGFQKSDKKLRKILNIKEESKVDTSGFQKQLKSINNKIQKNSDLYLNDFITMDDLKKRTEMLQGEKKLIQARINEVDKPSTSEIFDLVKSELGETPISKISYEDKKKIVNNLISKVDVTADNIDIIFKFQLA

SEQ ID NO: 19283 - protein, 411 aa, synthetic construct
MRTVRRIQPIKSPCKPRFKVAAYARVSDSRLHHSLSTQISYYNRLIQAHSDWELVGIYYDEGISGKEQSNRQGFLNLIKDCEDGKIDRIITKSIARFGRNTVELLTTVRQLRLKNIGVTFEKENIDSLSSEGELMLTLLASVAQEESQNMSENIKWRVQKKFEKGIPHTPQDMYGYRWDGEQYQIEPNEAKVIRKVFKWYLEGDSVQQIVDKLNQEQVLTRLGNPFTVASIREFFKQEAYFGRLVLQKTYRESFSRNPKRNKGQRNKYIIENAHEPIVTKEYFDLVLHEKERRYQLMSQESHLNKGIFRDKISCSECGCLMIVKVDSKQVNKTIRYYCRTRNRFGASSCSCRTLGEKRLLASFKSKLGIVPDKEWVENNIKHIDYDFGQRIIWVIPVKGRKYPIEIREGRY

SEQ ID NO: 19284 - protein, 520 aa, synthetic construct
MKKVITIQATPSIIRSSSDDFSLKKRRVAGYARVSTDHEDQATSYESQMRYYSEYISGRDDWEFVKMYSDEGISGTNTKLRTGFKAMVEDALNGKIDLIITKSVSRFARNTVDSLTTVRQLKEVGVEIYFEKENIWTLDSKGELLITIMSSLAQEESRSISENVTWGLRKQFAEGKVHFPYTNVLGFKAGEDGAIVVDQDEAKTVRYIFQQALIGKSPYHIAKDLTEQGIPSPSGKSRWNATTIKRMLRNEKYKGDALLQKTYTIDFLTKKKNINRGELPQYYVENNHEAIVDRETFDAVQQVLDAKGKKSSTSIFSSKLVCGDCGHYFGSKVWHSTSKYRRVIYRCNEKYNGENRCATPHVTEKEIKQWFVLAVNQVIENKDEIIDNIKVLCSIGSLEGIDNQIKELETETEILSQMVSRLVMENASTLQDQDEYQSKYRQLSSKYESLVEGIEELEVQKLAKSKRNKDLKDFITGLKQQEGLLTDFDELLWETMIESITITKDSDVEITFKNGAVSTI

SEQ ID NO: 19285 - protein, 412 aa, synthetic construct
MRTVRRIQPLMSPPKTKIKVAAYARVSDSRLHHSLSTQVSYYSRLIQSHPDWELVGVYYDEGISGKEQTNRQGFQDLIRLCGEGKVDRILTKSIARFGRNTVELLTTVRQLRLKNIGVTFEKEGIDSLSSDGELMLSLLASVAQEESQNISQNVKWRIKKNFEQGIPHTPQDMYGYRWNGVNYVIEPTEAEVIRQVFDWYLKGDTVPDITNKLNEKGVLTRLGNPFTVASIREFFKQEAYFGRLVLQKTYRADFSRNPKRNKGQRTKYIVENAHEPIVSKAYFDKVIEEKNRRYRLRNQETHLHKGICRERIRCHHCGQLMMTRVDSKKVNRTVRYCCRTRDRHGPKSCPSKTLGEKRLLATFESMLGFLPDAEWMDENIKELVFDSLDYILFVTLKKGKSYTLKIMEGRIL

SEQ ID NO: 19286 - protein, 520 aa, synthetic construct
MKKVITIEANSSFHPNQVEKSSSKKRRVAGYARVSTYHEDQATSYESQMRYYSEYINGREDWEFVKMYSDEGISGTNTKLRTGFKAMVEDALNGKIDLIITKSVSRFARNTVDSLTTVRQLKEVGVEIYFEKENIWTLDSKDELLITIMSSLAQEESRSISENVTWGLRKQFAEGKVHFPYTNVMGFTAGEDGAIVVDQDEAKTVRYIFQQALLGKSPYHIAKDLTEQGIRSPSGKQHWNTTTIKRMLRNEKYKGDALLQKTYTIDFLTKKKNINRGELPQYYVENNHEAIVDRETFDAVQQVLDTKGKKSSTSIFSSKLVCGNCGHYFGSKVWHSTSKYRRVIYRCNEKYNGTERCSTPHVTEDDVKQWFISAVNQMLENKYEVLENIDILIQMVNTDSIDERISSLETETEVVGQMVSNLIMGNARMSQNQDEYQIKYRQLSDKYDSLIKEIENLEVQKFSITKRHKELLDFHNVLKMQDGLLTAFDEFLWESIVKSVRINSGKEIYIQFKNGTVATL

SEQ ID NO: 19287 - protein, 452 aa, synthetic construct
MKAAIYIRVSTQEQIENYSIQAQTEKLTALCRSKDWDVYDIFIDGGYSGSNMNRPALNEMLSKLHEIDAVVVYRLDRLSRSQRDTITLIEEYFLKNNVEFVSLSETLDTSSPFGRAMIGILSVFAQLERETIRDRMVMGKIKRIEAGLPLTTAKGRTFGYDVIDTKLYINKEEAKQLQMIYDIFEEEKSITTLQKRLKKLGFKVKSYSSYNNWLTNDLYCGYVSYADKVHTKGVHEPIISEEQFYRVQEIFSRMGKNPNMNRDSASLLNNLVVCGKCGLGYVHRRKDTVSRGKKYHYRYYSCKTYKHTHELEKCGNKIWRADKLEELIIDRVNNYSFASRNVDKEDELDSLNKKLKREHTKKKRLFDLYINGSYEVSELDAMMSDIDAQINYYEAQIEANEELKKNKKIQGNLADLATVDFDSLEFREKQLYLKSLINKIYIDGEQVTIEWL

SEQ ID NO: 19288 - protein, 553 aa, synthetic construct
MIEKNVRVAIYARVSTEEQAEHGYSIDAQLETLRNYCKLNNKIVYKEYVDRGVSGKSIEGRFELQRLLKDVEDGHIDEIVVWKINRLARKMIDLLKMVDHFSKHKAVFRSFTENFETETAMGKFALQMLGAVGELERNTIVENVKMGMKQRARTGSHNGGVALGYRSVSKGDKRSRDTSLEIVPEEATLVRRIFDLYASGKGLRAIANQLNHDGYKTKRGNPFSTTAIKEIVTNPLYTGIIRYNRFENWNEHRRKGKSDNTIIAEGNHEAIIPRELWEKVQILHAEKSKVNPRVFDGQYLLTGLIRCPECGAPMVANRTKNKLKNGTVIIRRYYSCSNFRNKGTAVCHANSVGADYAEQHVLDRIRYVILNPQFLQNLVDAINNRKTYSIVPLQKEKCSIEASLAAIEDKRKKYFALYEEYAIDREMFVTRLDQLTTETEMLQRRQSEIEYELGTDSAEPISADYILQILKQFDALVELATLEQKKTLLRLMINEIHINEKREIMSIELAFDEQMHTLFLKVDPSARKVEGSLFLPKQQAAFTSKPKRFTLLL

SEQ ID NO: 19289 - protein, 512 aa, synthetic construct
MEMILPNQPDRVALYVRVSTEEQAEHGYSIEAQLELLREYCKHHRKIIYKEYIDAGVSGKSVQGRKAMQSLLSDVKAGCFTEVIVWKVNRLARNAVDLLGIVEALHSNGGTLHSISESFDSRTPIGSFILHMLGATAELERNTIIENTKLGMLQRAKDGFYCNSQILGYDIIQEGTGQTRFCVQQEEASIVRYLFQLYDEGKGLKAIVNQVNREGYTTKRGKLFSVSTIRSILRNPVYVGKVRYTSLEGQTVTSDGLHEAIIPLELWERVQNKYSGTARKREKAVKRDYPLTGILKCPACGGSMVATHIKKRMRNRIEFYHYYSCNRYTNKGSSVCKPNNIRADVIEQVVLQRIGELLSNPVLIRDIVENTNRKQEQMIAPLRLELEKAEKELQQVKLRRQKYLVLFEEDDLEKSELITRLRELKEQLQVLSDQQHEIVQQIREKESKLLPVNTIHDVLNQLKVHLLASDQTQTTTLLRSLVDKITINIRREMESVTLHIGDALRKQLEQPA

SEQ ID NO: 19290 - protein, 452 aa, synthetic construct
MKAAIYIRVSTQEQIENYSIQAQTEKLTALCRSKDWDVYDIFIDGGYSGSNMKRPALNEMLSKLHEIDAVVVYRLDRLSRSQRDTITLIEEYFLKNNVEFVSLSETLDTSSPFGRAMIGILSVFAQLERETIRDRMVMGKIKRIESGLPLTTAKGRTFGYDVVDTKLYINEEEAKQLQMIYDIFEEEKSITFLQKRLKKLGFKVKSYSSYNNWLTNDLYCGYVSYKDKVHTKGIHEPIISEEQFYRVQEIFSRMGKNPNMNKESASLLNNLVVCSKCGLGFVHRRKDTVSRGKKYHYRYYSCKTYKHTHELEKCGNKIWRADKLEELIIDRVNNYSFASRNVDKEDELDYLNEKLKIEHAKKKRLFDLYINGSYEVSELDAMMADIDAQINYYEAQIEANEELKKNKKIQENLADLATVDFDSLEFREKQLYLKSLINKIYIDDEQVTIEWL

SEQ ID NO: 19291 - protein, 539 aa, synthetic construct
MKIAIYSRKSKFTGKGESIENQVLMCKEYIERNFHGEKHEFKIYEDEGFSGGNTNRPKFQELLKDIRKRSFDILICYRLDRISRNVADFSSTLELLQNNNVSFISIKEQFDTSTPMGKAMVYIASVFAQLERETIAERVRDNMLELSKSGRWLGGQTPLGFKSKQMTYLDSEYKERTMYKLSPIEDELKLVELIYNKYFEVKSLRKVTQWLLEHKYKTKLGSEWNVSAVSDLLQNPTYVKADEKIFEYLESLQITCVGNPDANHGILTYNKKKGQNTYRDTSEWIAAISKHEGVIESSKWLEIQSTLKNNKAKAPRLGKTHNALLTGLIRCDKCGSPMTVIHGSKDKNGNTRFYYACSMKIDSKGTRCNNQNVRSIDVESAVIKELKKVTKDNGLLVKELSKAREEVASQIDNSNELILLNNSLKTKETSIENLIKQLSQNSSSTAAKYIINEIEKNEYEINEIKEKISVISSKAEKNKNVDINIDFLIKQLQSFSTLIDSTDDVEQKKFLLSCVLDRITWNGDTGNIDVKLWGSHKKK

SEQ ID NO: 19292 - protein, 522 aa, synthetic construct
MIAIYCRVSTDDQQERGTIENQIEFSQKYCDLHELSIFKIYKEDGVSGTIALEDRPVGKQLLKDAKNKKFDTLLLYKLDRLGRSARITLNSIHTLEELNVQIKSMTEPFDTSSPSGRFMITMLAGVADLERSTILERMQLGTNRAAKEGKWLGGIVPYGYYVDDDKYLQINNDIIPGLNLSEADIIKLIFNLTVEKHYSTIKVCDYLNAMNIPTSYEKDNRKISKGKRKVNTAGVWRPGNVLRMLRNTTYKGIHSYGKRSTKKRDLITREVPSIVDIETWEKAQQVIEDNKIEANRNHKRDYLLKGLIKCALCARTYVGTTHGERGYYVCNGKISYRGKCKAKNVSTKYIESIVWNDITSFINNPGETIEILKRNLKSKHDGRVDLLKQKELLDNHMRDKQNEKQSILDLFRKGIINHDDLELQMNKINAEYNNIKNNLDTLIIELEALNDIEDYTKVEEMLVEMKIKISNPNISFEDKRKIIKVLVDKILVDTVEENNSKKAVLNITYSFVQVEKHTVKDS

SEQ ID NO: 19293 - protein, 452 aa, synthetic construct
MKAAIYIRVSTQEQIENYSIQAQTEKLTALCRSKDWDVYDIFIDGGYSGSNMNRPALNEMLSKLHEIDAVVVYRLDRLSRSQRDTITLIEEYFLKNNVEFVSLSETLDTSSPFGRAMIGILSVFAQLERETIRDRMVMGKIKRIEAGLPLTTAKGRTFGYDVIDTKLYINEEEAKQLQMIYDIFEEEKSITTLQKRLKKLGFKVKSYSSYNNWLTNDLYCGYVSYADKVHTKGVHEPIISEEQFYRVQEIFSRMGKNPNMNRDSASLLNNLVVCGKCGLGYVHRRKDTVSRGKKYHYRYYSCKTYKHTHELEKCGNKIWRADKLEELIIDRVNNYSFASRNVDKEDELDSLNEKLKTEHAKKKRLFDLYISGSYEVSELDGMMADIDAQINYYEAQIEANEELKKNKKIQKNLADLATVDFDSLEFREKQLYLKSLINKIYIDGEQVTIEWL

SEQ ID NO: 19294 - protein, 558 aa, synthetic construct
MTKLYSYIRFSSMRQSEGSSYERQIRMAKEIADRHGLELVNDYQDLGVSAFKGANSKTGALSRFLDEIGRSIPVGSWLFIENLDRLSRQDIISAQELFLSIIRRGITIVTGMDNKIYSIETVTANPMDLMFSILLFIRGNEESQTKRNRTNSSALLKIKAHQQNPQSPAVAIEEIGKNMWWTDTTSGRVLPHPVYFPVLQKIVKMRQDGHSAGSILDYLNEHHEPPAPTSNKKHGKWSRAMVSRLFNTKALIGVKTVNVDGVEYELRDYYPRVLSDSEFYFLRKNIIKKAWDYGHDKEKVIPLLSGIGVLRCVHCGATMVKQTAANGKREQYRYCCDGRKSGRTDCPYPNWGFRAATLERAVLQLLADKIWIAEDKTNPIPEIQVKIDDISRKIDNLINLSAMMGATKELANQITDLNMQREALHEEIRLFEREMYSVDSQGWEKLAEFDLSDVQNEERLKVRMKIKGALHEIECSRLDSKKNLFVLVYLDGLRQRLVIENNRGLKKGQIIVDLKTINDKQILESAGMVLHPCIDMIVDKNWKAPEEISGLLSEEFGI

SEQ ID NO: 19295 - protein, 564 aa, synthetic construct
MLLSPLGFTLPRSAADSARGASTRSVRRAAGAAEPKPIDSGRQLAVLYARYSSKMQNPMSCEDQLALCRETAANLNFEVAAEFSDAAASGQTLLRNRPGVCEMKARVAKGDVSVLIVEGIERIGRRARDIAELSEWFESQNVGLVAANGGRIPWKLVPFYAAIAEFQSRETADKTRRGQTGNTRRGRVAAGLAYGYRVVPGAADFNRAVDPTQADIVRRIFTEYAAGLSPRKIVSLLNADGIPSPTGAAWNDSALRGNARKRDGILRNEAYVGTLVYGRNRFRRDPETGNRVSRPGEANAIIYTDRPELQIIPEDLWNKVQERLESAYNLRVSQKRKLNETHRARHLLTGILRCGCCGGTITIVNGERYGCYNRKSKGLSVCGNRQTIMRPKLETAVLARIRAGLLTPDLARHFAAEVRRIWDEQSADRVDAPARLKSELARVKRTITNLLDRLEGDDPGPHLLERLREREAEAARLTAELAALEAPTRNRQPPSAEELVAAYRGHVDRMESLLRDPATIVEANDLLRQMLGHVTVRPDPDRPRGFRIEIAGDLLSFLLPSASK

SEQ ID NO: 19296 - protein, 518 aa, synthetic construct
MSSNRPRALVGARVSVLSGPQKVSHEAQIDTATKWATAHDYPVVGSFEDLGVSASVPPDERPELGPWIRERSHEWQVIIWSKLDRGFRSMRHCSDFIKWAESNRKIVVFAEDGLTLNYLNPASVVESTLSELFVSMAAAFAQIELNRFKSRAEDMHRAIRPTTRWAAGLPPLGYQVVDHPSGRGKGLAIDPDAANLVREMADKLVDGWSFVRITEWLNESGKLTSQGRSRKARGLEPKGRWTTTNVIEILTGYRTLGIKTHKGQPVLDDSGEPIRLAPPLFTPERWDEVQRAAQLRKGKPRTPSDTSNPMLGVGYCGAPCSHKRSGSECPGDCQGICGSSLAQQFSKTRPRKSDGHVTFYRYYRCSRTPINCKAVFVVADDLDELLSEQFLLERGDRRVTERVFIPGEDNSYELDFIKDRIERLREDRVSGLYPSGEDELVFRNQMKQLLARRDELASVPVRQPGYENVELEKTYREVWPGATPEEKRKMLIDAEISIRLGESPGKSLRAELVIGTPY

SEQ ID NO: 19297 - protein, 503 aa, synthetic construct
MSKALIVVRLSRVTDATTSPERQLQACRELCAHRGWEVTGIAEDLDVSAGKTSPFDRPQLGDWLTNRLGEFDVIVVYRMDRIVRRLLDLADLIRWCQAHSVKLVSATEAFLDLTAPFGDVVALLVAKVAEMELSAISERNAAAFQHNYRAGKYRGGVPPWGYLPEQVDGSWKLVQDPVQVAVITEVVDRVLAGEPLRAVAYDLTARGIPTARDRFAESQGRQPAGYEWHSRGLKRALTSPTLLGQAVTKGELVRKDDGSPVVRSTPILTPEVFARVGVELTDRGNRKEPTKRSTALLLRVIYCGVCGRPAYRLKGGDDGRSPRYRCASAQYRDSCGNLTIPLAEADQFVTEQLLELLGDSERLTRVWDSGSDHSAELAEVNDTLADLTGVLGTGAYRAGTPQRTALDRRITELARRQEQLSTEAVRPAGWTWQPTGELFADWWELQDVTGRNVWLRSMGVRFTFDHRNGTYWDINLGDLAEVEESLRLGKSARSAINKRRKKP

SEQ ID NO: 19298 - protein, 569 aa, synthetic construct
MKLSSKNNELGTAALYCRLSRDDNMDTESNSISNQKKILQKAAKEKGYTDTLFFVDDGITGTTMKRPGFQKMIQAIENGYISAVFVKDLSRLGRNYIEVGRLTEEFFPAHDVRLVAVSDGVDSDEGENEFTPFKNIMNEYYARDISKKRRIVNKMKGNSGVPLSPPPYGYIKNPEDPRFWVIDPEAAEVVRRIYQMALDGYGLAETAAALEQDGVFNPTYYWRSKGTSRGGSKSTVEPTKWGHTTIKKILTLQEYCGDVINFKSYSKSYKMKKRIENPEENRAIFLNVHEAIIDRPTWEKVQSMKKGTRRRRPTVTQEPSVFSGVLKCPECGGNLNFHFNQGNHAIKFFSCQNHNSGLRKCSKTHYIRLEFLERVVLYEVNRLACFANEYEGDFIKAMMGRSAKVTENERARKQRELDGLLARDKELDGLFERLYEDNVSQKISDARFAKMSQRYEQEQGENAKQIKALWLELKKSEGQRMDVDTFLETVRRYTNATEITQRMVAELIDHIDVYHAEKQDGVTTQHITIYYNCIGTFSVPDRRKIPAAEITMGTRKGVAVSYSPERIAV

SEQ ID NO: 19299 - protein, 529 aa, synthetic construct
MVQTNTTAARRPRITVIDPRKPEAAKLRVAAYARVSSDSADQLNSYMAQVDFYTKFISSREDWELVDVYADEGLSGLEARKREEFNRMIADCRDGKIDRVLVKSTSRFARNTTDYIRYVRELLRLGISICFEKENIDTGKMTTEQIAQIYGAFSQMESTNHSNNMRVSVRMRMEKGIFVPPSTPYGYRLAGRELEIVPEEAEIVRYIYSAYLKGQGTADIAHELNELGAVRGHGREGWHPNTVQYILTNVSYTGDMLWQKSFATDTIPFRQVPNRGQKPRYFVENCHPPIVSKEDFQRVQNLMALRRTQFAGNASKPEASVYSKRIVCGGCGSVCRRKVTNGKTYWVCNRHDDAKSRCPVPQMPEVEITAALLRLYHKLKADGGTILRTVLEQLRELRERELRTNRKISDIDKEIARLSEQNLVLVRLKSKGYVDPALYLSQQGEIEQKLRTLRRLRRRIMDSTGEDSQIQDTEIMLDCLEDGPQWLEETSPELFESLVRRIVIAPADTLKFTLLNGLELTERIGKAVR

SEQ ID NO: 19300 - protein, 501 aa, synthetic construct
MENRIDAIYARQSVDRKDSISIESQIEFCKYELRGGNFKDYKDKGFSGKNTDRPRFQELMADIKRGLIRRVVVYKLDRISRSILDFATMMELFQQYNVEFVSSTEKFDTSTPMGRAMLNICIVFAQLERETIQKRVTDAYYSRCQRGFHMSGAAPYGFKLEPTTIQGIRTKMMIPDPATANIARLMFEMYAEPSTSFGDIARYFAQEGILVYDKELRRGFISQMLRNPIYAQADLELYEFFKGQGAVVVNEAADFAGTNGCYLYQGRDVQERKNKELKNQILVLAPSEGIVPADTWLRCRKKLMANITFQGGRKPKNTWLAGKMKCGHCGRALKRLGNRAGTQYLYCTKRADNMSCEGCGTLRTAEFEQFVYEAMVHKLSEFQTLTAKAETVNPRLTALNVELAQVEDEIEKLLNTLTGASAVLMSYANGKIEELDARRQGLIKEIAALNAESVSPQKIEYLSSHLGNWDNIDFDDRRQVADIILSQVQATTERVSFEWKI

SEQ ID NO: 19301 - protein, 486 aa, synthetic construct
MKGVIYARYSSDNQREESIEGQLRECKEYAERNDIMILGTYIDRALSAKTDNRPEFQHMIKDSAKGLFDVVLVWKLDRFARNRYDSARYKNILKKNGVKVISARENISAGSEGIILEAMLEGYAEYYSAELSEKVIRGLTDNALKCKYNGGTVPMGYYIDEQQYYQIDPKTAPVVLEMFTRYSEGATMQELVNLLNSRGMRSIRGGKITLNIMNHLLKNRRYMGEYSYRDVVKEDGIPAIVPKDLFERVQERLAKNKKAPARHKAEDDYLLTTKLYCGKCGSFMVGESGTSHTMKVHRYYRCVNTKKKKLCDKKAVKKDWIEDLVVSYTMKAIMNDEVMERLIDTLMELQKRENTDLPLLKKQLAETEKGINNMLNAIQAGIFTPSTKQRLDELEETKSQLEISILQEEMHKPMLTREQIAFFIYRFRKFDVTKREQRQRLIDSFVNAVYLYEDKIILTFNYKDGSKTITLAEVEGSDLSVLGAPK

SEQ ID NO: 19302 - protein, 455 aa, synthetic construct
MENLPTKPLRVAPYIRVSGQEQAIKGLSLEAQQEDLLEYCLERGWIVVDVYVDAAKTARKSLGKRTNFLRMLEDVKRDKVDLVLFTRLDRWFRSVADYYKVMEVLEAHNCGWKTTQEQYDTSTAGGRLYINLRLSIAQNEADLCGERIGVVFDSKIRHGTAVSGNCPFGYRVNEEKRLEIVPERAAIVQDAFQHYRATVSQRGTIKYIRETYGLNWTDTNFRRILHDRLYTGYYDRNGRTNESFCPAIIPQELFDAVQKLLSNNAKSNPTGRVYLFTSILVCAECGHKLAGHQTNGKYYYYRCSQHYRRDLCSHDKEIREEVVEAWLFENLGRVFQEWRTEWEVKEAQRKQSAAAVDRAAVRRKLSRLKELYLNEVIDLEEYKRDYEALSTQLEERPALPPAPRPNFEAVEAFLAQDFRQIYDTLEREEKRTLWRSIIKEIRIDNDQQVKGLSFL

SEQ ID NO: 19303 - protein, 492 aa, synthetic construct
MSRRGHLAAIPDRPGRAVLYVRVSSLMGRGGDDFHSPDIQLSAMRRAIAGMQEVAVIDDDIDVSGRSFKRTGIDRIRELAENGQIDTLAVYNISRFGRNTLESLQFLAWLTERGVTILSATEHIDTSTSTGRWMLTNMLAVAEMYSDNIGKDWSDTIRARAESGKWHGNIPLGYVKGKNGKLEPHPVHGPAITQAFTDYADGARPADVLRRLQAATGRNSAYNILKHMLGNVAYIGIVTVRGNSRYPTIVTPNAHPALVDQKTWQRVQERRAASKGRPPRVIAAKYPLTGLGKCGRCAGSVAYGRDHQPNGTVIARLQCTRSLHTANRICPGCGAPQAQAVEDAVLEKVRSHIALLRSDGNAQTAHAAKKRRAGMDAGALNKQLETVRQGKVRLASSWALGEIADATYRAGLVQLDDKENELTASLTALKAESQVLEPNEAVMMAERLVRLWGEMDGAQKNRALRDVLTSYSLAPASYRGQPVIERIEVQWR

SEQ ID NO: 19304 - protein, 545 aa, synthetic construct
MPRPRKSTIAKPLERERCVIYCRVSSEDQAKGYSLDAQLRALRAYVAERDFETEAVFVEDETARKAGRREFREMVKALSGGEIRHLVAEKTDRMYRNFRDRVTIGDLIEDGLQLHLATEREILHKDSPAYQKFVHDIRTVVAKNFSDNLSEEARKGMREKAAQGIWPSSAPLGYRNVSVGAVRTIEPDPMSAKQVTAFFEAYATGDHSIKTAAVVAQAIGLRSRKGARVAVSALHQMLQNPLYKGEIMWKGVTYPGKHVPLVSEATWAKVQQVLGGRAVNCAGFGRREYAYRGIFTCGRCGCAMTPESKKDGRYVYYSCTGFKGCPRLSVSEAAITDQIAAHLERLTIRPTVMDMLREALRLSYRDVKTESEARLADLRTEAKRLAGSLERLYLDSVAGNVPAAAYPKLKAKWEMELATVDEQIAAYGRANRATWEDNVQMLELVSNSAARFKTASIELRRAMLKSLLSKSQILDGKVILTMRPEFNLILQANLELIENPTLETDFEKWQGRQDSNPRPAVLETAALPTELHPCVADTIIYQNRR

SEQ ID NO: 19305 - protein, 488 aa, synthetic construct
MLITIRGGHFFIWVGNLICGLNETVDKSFYIAGLSRGIYFAYFYPISLTACISIIRRLKGLKSPVGVFFEKENIDTLDSKSELFLTILSSMAQEESRSVSENTKWGVQKRFQQGIVHMPTTFFLGYDTTEEGEIVIDEEQAEVVRRIFREFLEGKGCPSIAKDLMRDGIKTGKGNTTWTGDSVYKILRQEKYQGHCLAQKTVTTSYLTHQRVRNRGHQPQYYVKNTHPAIISEDTFEAAQQEMNRRSLMMRDPDKKYRQHYSGHSPFSNQYYCGECGRPVIRRRMTSSRKGEKYYISAWQCRVTAGRDPDYKDCKTSYVHETDLENAFMKIMREMKENLDEVIEEAKQAIEKASLSPPEQQRLEELNSQIEAITDRISDLAAKESATSDAIYDATLRHLIYEQEILQQERDSLEENMQEQLYLEKQLQSLLVLLEETEELEYFDVKLFKDTVERGIIYKERIVEFQFKCGVERTICARERKTPKKEKA

SEQ ID NO: 19306 - protein, 524 aa, synthetic construct
MKTIRLLKSLPKPVHIFFEKENIHTEDADSELMITIFGSIAQEESINIGRSIAWGKRAQAERGIIKVGNANYGYQVGENYQWIIHEEEAKIVRRIYADLQAGKNYTQIITGLTQDRIPTPQGGDIWSLSTIKGILTNVVYKGDYLYQKYITVDTLEEKIAPNEGELPQYYIEGHHEPIIDPEEWEKVQSIIHKRSEAYKQQNYQKYSKDQNKNLSFTEKLYCGECGNVLGYERSIERRNSSGAQEINRWVCRLAEKYYAVNGCSSQRFHQDYLERHFINLLNLLERDERFQQEVEKVIAQTVLSAQELKQEEEAQRRMEQLNQELYEAVDEELHKDGQDHQRVDALSEKIVKLHQRLKDFSDRKKLAEHYRNEFKELKKGIKKLDDEMNLAFPADLFEQFVEQAKVYKDGKIVYHLSLGLDWSTEERYEDYQKMISMKRKAERHARRKEKQAVFLKGPEVTALLEYCEEPRRWEEILAFMNTKMTISESYFRKSIVLPLIEEGMLHKDFIPGSQSKRKYYMVKK

SEQ ID NO: 19307 - protein, 554 aa, synthetic construct
MSSHQSSSRVRIIPAKARTGRTEANPGGQKKRIAVYARVSTDSEMQASSYELQVAHYKDYVSKNPAWILADVYADEGISGTSTKNRTEFNRMIQDCEEGRIDYILTKSISRFARNTLDCISIIRRLKSLRPAVGVFFEKENIDTLDSKSELFLTILSSMAQEESRSVSENTKWGVQKRFQQGIVHMPTTFFLGYDTTEDGEIVIDEEQAEVVRRIFREYLEGKGCPSIAKGLTRDGLKTGKGNKTWTSDAVYKILRQEKYQGHCLAQKTVTIDFLSHRRVRNNDIQPQYFVRNTHPAIISEETYEAVQQEMKRRRLMMKDPDEKYRQHFSSVSPFSNQFYCGECGRPAIRRRMTSSRKGEKYYISAWQCRVTAGRDPDYTDCKTSYVHETDLENAFMKIIREMKENLHEVIEEAQQAIEKASLSPPEQQRLKELNTQIEAITDRISDLAAKESATKDAIYDATLRHLIYEQEILQQERDSLEENMQEQLYLEKQLQSFLDLLEETEELENFDVKLFKSTVERGIIYKERIVEFQFKCGVKRTLCVRERKTPKKN

SEQ ID NO: 19308 - protein, 533 aa, synthetic construct
MAESLFGSFGQGAGGITLMDPLEEKPKQLRVAAYVRVSSLSDEQEGSFDNQKTHYTQLIRSTPGWKMVDIYTDQGRTGTSVAKRPGFNRMIRHAYEKKIDIILCKSVSRFARNVLDAINTIRELTELGVRIIFDKENIDTGDMASEFILTMLSATAQEESRSISENINWALEKRYERGEPVFVRKLGYQKNEKKEWIILEEEAHIVREAFEEALNGKTPAQIAKQFIKKRYKKINGRTDWSSATVRLMLLNRDYTGDVVCQKYYTESYLSHKRVANNGERNQYFIENHHEPIVSRETFEAAQRELERRKKPNKNKKVNRYPLSSRIQCGKCGGNLHRFICKEVVRWRCENNVRSKELCTMGSIKEEVIREAMQDAFLERYRLARFMYDMERMKKDLTRAVAARDISYNRLRLDLEKILLEENIALINANGSEADSTDEKLEELASKRASIEKELKIREDWWELLDQDFAFREEAKTKLKELDAVRDPSKQLQKELQNISFLRAWVVRVKAITPMSFCMNWIDEKETIVDLRKE

SEQ ID NO: 19309 - protein, 450 aa, synthetic construct
MKAALYIRVSTREQIENYSIPSQKEKLEAYCKSKGWEIYDFYIDGGFSGSNTDRPDLQRMISDIKEIDVVMVYKLDRLSRSQKDTLELIEDTFLKNNVEFVSLTETLDTSSPFGRAMIGILSVFAQLERENIAERMRNGHIKRAEDGYRGMGGDYDPAGYARVDGELVTKPDEKKHVQLAFDLYERYHSITKVQKELKLLGYNVWRFRRYRDILANRLYVGYVSFAGEHYKGRHEAFIAEEQYDRVQALLEMHKGANAQKAKESLLAGLITCSCCGEKFVTYTTTDRRKDKVYKYRYYLCKARRFPIEYGHKCTNKNWNSKKLEEIIIKEIQFLSIGKKNGTPKIKKVNYEVQIKKVTEKIERVLGLYAEGTIPKQTLDKQIEIYNTEKDEILKRQKENSAAQNVISDEEIDNLVTNLTKSDFPTKRAAIQKLVKQISINGEDIDISWNF

SEQ ID NO: 19310 - protein, 484 aa, synthetic construct
MKKEKVIPIDSLDLVDLYIRVSTTEQALEGYSVAEQEHRLRQYCAAMGHRIHKVHIDAGFSGASLDRPGIKETIKDVQKHLVRRVIVWKLDRLSRSQKDTLIMLEDVFLENGCDFISMMESFDTSTSFGRAIVGILAAFAQLERENIKERTMMGRQARLAKGHYNGSRPPLGYSFIPGSNDLQVDPYQAAIVREIFKLFLSGISINAIARKMEEKYPTVRTWNNTMIRRTLKNPVYIGKVNDNGILRDGIHEPLISEIDFQMANAILVHNSKIKKQSCRSRSLLTGLLYCGDCGARMHPRRIARGYPLRRYVCYSVSRTSKSMIKSDHCTNRLHPYTQEELEQIIIDEIKKLAADEDYISEVIRNSSAEAPVDDTELFQERIEELNRQTDKLLNLYQIGAIELDQIQERLAALKQERESLTAAMKESQTKTDINMDHLKIMSYASAFQVALESGDPEYTNSIIRLLIDKIVVLNEDIEIHWTFC

SEQ ID NO: 19311 - protein, 549 aa, synthetic construct
MKTADLYIRVSTDEQADKGYSQRDQEERLRRFCSQNNITVGRIVYEDHSAKSFNRPEWTKLLVDLKKKGSKTNLILFTKWDRFSRNAGDAYQMISILTKLGIDPQAVEQPLDLSIPENKMMLAIYLAAPEVENDRRALNVFYGMRRAVKEGRVMGKAPFGYANKTTENGKKYIALSEPEASKMKWAFEEISKGIYASNQIRLKMNESLRKKISRTSFHIAIRNPVYCGKVFIPKFKEEDAYFIIGQHQPLITESLFYRVQDILDGKKRIQRPNTKILSDEYFPLRGFLICPNCGKNITASASKGRNNRYYYYHCNATCGFRQRAEIVNTVFEDGLKALEMTETVKKLVRKVFLNSYERFIKTPRLEKKTLSDEIDKLNSRLSVARNKLLAETIDDDEYIEIKKDCKEQIERLEIQLNILPEQSKVDIPKLIDQAIESLTNIWKTYSEGGIAVKRQIIGSIFPEKLEFDGNHYRTTRINTIVNLIFQINNELPKKENRRNDNHNHFSCYVDPQGFEPRLTVPKTGVLPLHYRSVSMLRNYRIYFKYENQN

SEQ ID NO: 19312 - protein, 602 aa, synthetic construct
MVASALISRNETHGGQGLPSTAGMDNQESRVAGTVFAPTLRGVRVVRLSVLTDETTSPERQREADDIAAAELGIDFGEGDALREAVDLDVSASKTSPFDRPQLGKWLARPDEFDALVWWRFDRAIRSMAHMHELAKWAREHRKMLVFAEGIGGGGKLVFDFRNPMDPISELMMTFFAFAAQVEAQSTKERVTGAMAAIRQMQYRWRGGRPPYGYMIVDMPKELGAGKTLMPDPEAVSVIERIIRYLLSRKTINWICQKLMDDKVPTPRDHWSLKQGRKKGGKTGGVKGETTVRESFNWVPSVIRKILTSVALIGWKTHKGKPVRDSEGAPVMLTTTPILTREEFDVVGKIFAANEKDYTPSRSDQASKLLRVVHCAGCGFRMYHMSNKTKGVQAASYKCTAHLVGVKCPTPVAIRADWIEEYVEREFLALVGPIPVSRTIITPGYDPTPEIEATLAEFAAHQEEKGQQKSAAAKRAWKERADALDNRLALLEATPARPETRDVTPTGRTLADEWADADDETRRHMLIDAGARLDVRKGTRGGWRTLDERRVEFTVSGELDPAIEEYVALREELTVTDEEAHAPTSRIRLIKRTDPTVIGLAA

SEQ ID NO: 19313 - protein, 657 aa, synthetic construct
MARKNIKYRTGNKGMSYLRVSSKGQVETEYDSEGMSLPAQRRKLSERARAKELVIVDELIDAGITATNIEDRKSYQGLIERLKADESLAFVMVYSVNRLHRNWTEAGLMLMQLRSMGVRLISAMEDIDDSTAAGRLQLGVLFSTAGYQSESSSEDLEYKMTQKAVIGGTPGFVPIGYLNVSEQFEGRKVNTVAVDPERGQYIPMAFEWFATGHYTYAELRTKLTEAGLRTRPNRKYPSGAISIHSIEKVLRNRYYLGYVVWNGQEYQGRHEPLVSQELFDQVQSVLEVMPGAGNRQRRYHHFLKGFVWCARCERRLIVMRGRSKTGELYFYYLCRGRQQKLCDLPYLRAGHVENAVTERYHTVALGGELKQQLSALFAGAAGQWRSSRGGNRKQMKKRLTEIDRQEDRYIELALDPDWPKEKLTNKLRQLRDERKRLTEELAAGEQTVTEAHTNASRVLDYLEEPYELYQRSGIRTKTAMNRTIFTGLRIDADEVTNRPYVASDVLTEAFEAIVELRRNWQAHSVAEADAQAPETTHYERTNNGSAPVRDAAADVRVLSLLEQAFYSPECSSNSTLAEDRGFEPLRAINPTRVPGERHRPLGESSVGHGSGLDWVLMSTTGLTGPDARRELATRAAPPISAATRMPSSGRNPRACAR

SEQ ID NO: 19314 - protein, 540 aa, synthetic construct
MSRPTTEIAIPPAIGVTWTAAEVKELEDLQAREDLLPPDAPRALLSIRLSVLTEETTSPVRQELDLRRMALDRRCRVAGVARDLNVSATKVPPWKRKALGDWIQNRAPEFDVILFWKLDRFVRRISDLHLMIEWCKTFKKDLAAVKDPIDLSSPMGEMMVTMIAGMARIEAANTGIRLESLWQYARTVERWVIGRIIYGYASEDTPDGKRLVVDSFKYRVLHWIKAMLQRRRALNNICIILNRAQVPSPGGGKWAPGNLKNVLTNPALMGYRTRREPGMPTNQPPFILYGPDGEPIRVAPGVFTPAEFSEVQELLRLRAKNTGGKPTAGRSKRTKFLGVIKCGFCGAVENMYQHITKKKRKDGTYRISGNKMRCQSATKLGICGGPTFDPEDTYGALTSTVLDQIGAMEVIHREYARGSENLMKKKELEASIKYHMKELAPGGSYSVGGFIESEARRTLASIGDQLSRIDPVSLEDRWIYASKGVTYQQHWEREGLHQMESDLIRAGITFVMYEDRAELLIPEDVKQRLVVKDDYFKKRV

SEQ ID NO: 19315 - protein, 600 aa, synthetic construct
MVTNPLTDVPGTFLSATALEAIAVGYVRQSSAKTNKTEASPLTQRAAIEGRAAELNARFVRHYEDIGISGWNPDAERPGFEEMLKAARAGAFNMLIVYDVSRFSRREVVDAIPIVTELHRLGVTIVSVCDGVFAPRDTMALIYLIMRLDAANKESALKSKKVRDVKAAQRAKGSWLGGQTPYGLDAESYVDGKLPLMRLIHNKAESANLRRIVALIFKHMKDPNGRKRGQRNPGTLSALCDNMTRDKIPTRGQRKGKERANSTWQVKTLKGILMNPAIAGMRAEPVYKLRENGTRTNTLIDYRIIRDEDGRPERICEAIIPPAKWFVLREWLRGRGQGEGVAHGTSLLSGLRNADGKAILTCACERPQGALNSGPKPVYRCTRGSSVPSKTGEHEALNAVMQSHLDAHVAGKVFALIQSATAGDADVETVAIMIEATRVFSRSIERPETAAERTEVVTERVDANNALSELYDDLDAGLYAGSMGRSRFKEKKARIEGRITAAEKRLGELADPESVTLPLAEWLDGAENGDPLGKGSWWARAALADKRKFIELFVCRVRVKSVKNSHQGRTRGGYDVAPRIDIEFVRPEDEEGAAANSAAA

SEQ ID NO: 19316 - protein, 531 aa, synthetic construct
MKLRALIVVRLSRVTDATTSPERQVTACRELCAIRGYEVVGVAEDLDVSAGKTTPFDRPQLGRWLADPSRFDVIVFFRVDRIVRRLFDLADLIRWSREHAVTLVSATETHFDLSTDFGDIIALLVAKVAEMELEAISERNASAFRHNIKAGKYRGGMPPWGYVPTRDEDSGDWRLVQDPIQVSVIHDVVERVLKGEPLRAIAHDLTAQGIPTPKDRFAQTQGREASGYEWHSAPLKRALTSPTLLGRVVTREPLLDAQGRIQRDTKGRKVFGPETVVVGDDGSPVIRAEPILSREVFDRVGVELSGRENRKEPTKRSSGLLLRVIYCGECGRPAYRLKGGTGRKARYRCASAQYKDPCPNRTIALDWAESELERRILMNLGPLERKRRVWFPGNDHSDELSEVNELLSDLTDQLGTGTFKRGTPQRVRLDERIQSLTKRQEVLAALPQEPAGWRYEATGELFSDWWESQDTEARNIWLRQMNFRVVWKSHAEGVSTVVDEFKLDGDLTMDLDADQLFGPIVDIARALSNAR

SEQ ID NO: 19317 - protein, 539 aa, synthetic construct
MRTVIYARFSSQLQNSRSIDDQIAVCRERADREGWTIVDIYTDYAISGAAGIGEAQRPGLAAMLARVEAGGVEQVLTESTDRIARHEGDSFAIRERLQFARSRLFTLSDGEVTNLTGTIKGLMDAQFRKELGAKIKRGQRGTVAQGRSPAGIAYGYRTANRIDPNGRPIRGLRAIDEEQAEVVRRIFREYAAGISPRGIAQRLNADGIPGPRGGAWKATTIAADRTRGNGLIQNQLYIGRIIHNRTSKIVEPVTRSVRIRPNPPSDWIIEEVPSLRIVGDALWEAVQEGRGSYETPQPQTARRPKHMLSGLGVCGVCGSGWIVKGNGYWACAGRKEGNNCTNERTVSTTRYEDRVLHGLREQMLDPDLVAIFVKEYHEARARGLREERQNRTRYERRLAEASVKVDRLVAAISAGAGEFAEVREALQQARAERDAAQEALSEMEALPVVALHPAVVTSYRREVEELHAMFADPEAKAEAVPKLRSMIDRIVLVPAAEGRGVDISVEGRLAAMLAIAGGNAAPKPITVTMERVKGIEPSS

SEQ ID NO: 19318 - protein, 453 aa, synthetic construct
MKAGYVRVSTREQDEGNALEQQTARVERAGAIVIFSDVESGRSDKRKEFNKMIAQCKQGKITEVICTRIDRLGRSVVGIHKAIAIFEEYKVKLTVLDAPVDPTSPFGWFSVNQMAGLAEFESRLLANRIKNGMNFFREQKKASPRPPFGYCRVDEKYAPDLSEMNGISKWAIAHKMIEYFLGDGATLRSTAQYLLQTYHLKWTAAGLRYWLLNPVLRGCTAYNIKDNLNKPENWDIHEDTHQPLISENIFKRIVAKLDENKSKYSYGREKKETEIFPLAGQIICADCGYKCFCKKRNSTYRVRCKKHENMGNNFCSNKISTYLPDIISAVDQTLVERHREIKEYAITSSNVETQDSPELIARQEQLKALRRLPKNPIIQDAIDQTILEINKIKQKETVVNKINSELFDILAFCCSNINFWDETPWADKSLIYKELVDYVKVANGEIKEVKLRV

SEQ ID NO: 19319 - protein, 584 aa, synthetic construct
METTTRRAAQGSSSLPATRTTSAPSTSRPPLVYSYLRFSDPRQRAGNSIDRQTEYAATWAVKHGLQLDTSLSLRDEGLSAYHQRHVKKGALGVFLRAVEEGRVPEGSVLIVENLDRLSRAEPIIAQNQLTSIVLSGIRVVTASDDMEYSRESASANPGILFMALGSMLKANLESHDKSKRVSNALLSQCRKWDKGEWRGKLSAGRDPAWVRWDKDEKKFVLEAGQAGAVRQLISYFRQGYSPMRSLELLTESLGNVPPGLSNAARAWVVLGSRMLVGEREVEVKGEKFTLEGYYPPLLTEAEFAELQYLRSQRGRRAGKRQVPGLITGLGICVCGYCGAAMNGQNILNRGRREDGLPQNGHRRIVCGGALAVPKCEAGSCSVVPIERAIMRYCSSQFNLDRLLEGDDHSGPLADKLALARDKAAKTQRRMDNLALALAEDGSGKDGPGAVMKLLHDLEAQRDKELDAVKSLEHELAALRGAAEPAAADAWAALVEGVLQLDHEARTKARQLVADAFSKIVIYQHGYEGDEGQVMRVVLCSKRGVMRELTIDRHSGYPVGDRTFVIAEGVDLAQNFTVAERRRVA

SEQ ID NO: 19320 - protein, 484 aa, synthetic construct
MNPRIGAYNRISLDVQGEALGVARQQQDNAEQASRRSWQIVESYTDNNLSAYKRAVVRPAFEKLLADLESGYLDGFVAYDIDRLWRQPSDLERVIRIYEDKPSLVFATVQGDIDLSTSQGRTMARIMVALANKSSADSSRRVSRKIKQQAESGEPHWSRRPYGYTLDKTLDPIEAPVVRQMGEWFVQGFSYREIAWRLNEQGIRTRAGSLWDVGTIRQFMKAERFAAIRIHEGKMYDGTWPGIFTKEEWAAIQLEVIMRKDNYAGRPVAKKYMLTGLLKCSCGGYLRGMTKRDAPGRPLRRTYQCPTSSETERRMDTCGGMCVDAGSLEHFIRESVLSRIETPELSDVVGTSSVDRERIAELRQESVEIKNRRDVLLDDYTDGTLNKDELKRTQERLSARKALIDTELDTLQRAQFNVSLNEGETAREAWMDRPDGWRRALVDLLISEITISKSSRKPFYDVDGKRTRFDKDRVQIEWKTDIDK

SEQ ID NO: 19321 - protein, 519 aa, synthetic construct
MKTCDSLVRVSTKKQSTDTKTGLVRQSDNVQSWLSRNPDYELRNVIELKGVSGFSGKHLQGEFGSYLDDLENNVLACPDAFLVDEMSRLTRLPLQQGIALVNRFSALGVTLVFVAEGQTYSPSSSDDLGSFLALTVRLHQAHEESQRKSRMLRSARLQETKSYASGGLVKNRLPNWITISDNQYVVDEVKADAIRYLHKLYQSNHTYSDILKIFKAESVPVVSIRSRDWSTAVIKNLLTASTTYGLLTRNHADREPQTFENHFPAVISKECYDLTQALIASKKGTRSGGVGKNFNNIFRGCIVCADCGYSVSVKRNSQGRVYMSCEGRNRRGYTVADCKNGGYLQQTLIARVLYILKHERLVDSSTPSEDLPELRLQLSTQQAEYTKFKGRLALIDEDLLPEFQQELRNKKQLLSDLENRIQKATVTTGTAFDLDAELDNLSRIDITTPDGRRNLNKHLSRRFKFSYSTTKGLIGVRALDSEYWCYHDLEGETFAELYEFFTRDAQEDSGDGSEDFTYG

SEQ ID NO: 19322 - protein, 535 aa, synthetic construct
MKIADLYIRVSTDEQADKGYSQRDQEERLRRYCSQNNFTVGNVIYEDHSAKSFNRPEWKKLLTELKKKGSRTNVILFTKWDRFSRNAGDAYQMISILSKLGVDLQAVEQPLDLSIPENKMMLAIYLAAPEVENDRRALNVFYGMRRAVKEGRVMGKAPFGYANKITENGKKYIAIKEPEATKMKWAFNELAKGIYAINSIRTKINESLRKGVSRTSFHIAIRNPIYYGKVFVPKHKDEQACFVDGQHEPLISEELFDRVQEKLDGKKRPKRPNTKITVQENFPLRGFLTCPNCGKTLTASASRGRNNRYYYYHCNSTCGFRERAEIVNKAFEDGLMALEMNTPVKKYLKKLLTENYQNFISDPLKEKKKIADEIDTLNNKLYFARNKFLSEIIDDDEYLEIKRECKERISKLEEELNKSSVPQISNIDKLLEQALKTLQNIGKHYQEGGIETKRAIIGSIFPEKLEFDGKHYRTARINSIAYHIFQINNGLDGVKKKRNDQNDHFSLNVDSQGFEPQMTEPKSVVLPLHHESFSV

SEQ ID NO: 19323 - protein, 667 aa, synthetic construct
MLAIYARVSQDKDDNQNSIETQVDLGKRYADKLGLNYDIYADNNISGTLEIENRPELFRMLQDIASEKITHIFAYDQSRLERNNVVWSNLYMLFQKNSIKLYFQADGDFDFESDSNFLTSNILSVFNSFYVKLTKKKVITALQRNVENGKVHAKPPFGYDKDENKLLIINNKESEIVKRIYKMSLEGKGTDKIAEILNYEGVLTAYSKLEKGGVYKIRDRYNPNIVIEKKKSDAKWRGRTIQGIIKNTIYMGKRSWKGKLYPAPAIFDEVYWQKVNENLKKNRNNTGKKVEHKYLLKGIIKCGCGKNMYGRSRVNKRDHTYICSSRRYKGESCGNKSINIDKIENLIWENFFIRKELLELLNNSSDNQNSLLEDIKQEEALLDQRIINLKKNKSNLIKAISNNIITDDDAKSEINNINNSLIKHSQDKISLASRIVDIRNFKSLIIDTRADFEAFSADVDFDTKRTLINKYIERIIISYDNGKKFQNGNTLPKHIYYIQIEFKNNIIKESYIYNVKNNVIISLRDSKFKLLSKEGIIDALDFTTFEKVLMRLSNGKIIPKPIIGKDNKTIILSNTIIPYGDAKLWSIQNIVDFYTLNTTWLSEKTGINIATENKNLKSYQWLVKEYCNYKNKPLIDWVTFLYKIFGYNDKPKSFKSSQEIDLNHVKF

SEQ ID NO: 19324 - protein, 606 aa, synthetic construct
MQQPAQKRMAYSYIRMSTEKQIKGDSMRRQLEWSQTYAARHGLDLQDVTSFADIGVSAWKGLNRSKGRLGAFIELAREGTIPSSSCLLIENLDRLSRTTPLEALDLFKEILQLGITVVARGEFGDEETYTWNSLNSNSNQLISTLTSMLRANRESERKSQLIRSAMKNRRADARLGKKTNQTPPSWITATKITKGEYEYHLNDRADVVRWIFERSAEGVGFDRIARDLNTRAEPTLKPSKQGWWHANVQAIVTSRSAIGEYQPGEMIEGKYVSEGDPIPDYYPAVIGHDLWLRAQKIVHRNRKGGRAGTQFSNLLDGLAECVHCRSRMYMLNNSRSEKQWRYLVCSANFRNLMRADEVTGENVPVCPTGRTRFRYDILEKSILENVTEFGGDDLLKQGKVTAEIADIDEELAKLSISLIDLRKREARLTEVIETEDGAQIAGLLKALRQRTLEREDAEKRHETLRHDREVMAAKHAALDPASAIEAMRLAWEAADDETRYALRARTNASMKGMIDHVEFDSEGNHYTVIIEQGRRAYRFANVKFKRKDFKNVPQVSDLVPHIETVPFGTYKDTVGPKLSPEMEAAFESIERLKSLPVKPSLVAGKE

SEQ ID NO: 19325 - protein, 523 aa, synthetic construct
MERVAIYLRKSREDSEAESRGEGETLIKHKKTLLEVAKRQNLNIVKIYQEIISGESIIHRPEMIKLLEAVKKGLYDGVLVMDIDRLGRGNMQDQGKILDAFKTSKTKIITPRKFYDLDDEFDEEYSEFEAFMARKEFKIIKRRLQSGRVRSVKDGNYVGTRPPYGYQKVKLDDGSITLAPDPDQAPIVKMIFEWYTSEESTERMGTTNIAKKLNRLGIESYSGAKWSNTVILQILKNSVYIGKISWGKVERKKSVDPSKGVDTRTRSEGDDGLIVVDGKHEPLISEELFEKAQEIRKKKRHPSWKPTTSLRNPLAGLIVCGKCGAMMKMKQASQSGGRRPWPHLVCTNRGKGGNCNKSSRLEHVERKILESLYKELKSYKMRFDFEDYSVDNGKIEVYQMTIDNIHQEIKNLQLQKGKLHDFLERGIYDEETYIERSKDIATRLNQARESLEATTSELKSIQDRLGARQSVIPRIEHVLDIYEDLDTPEQKNILLKTVLDKCVYTKEQHQRNDQFTLVIYPKI

SEQ ID NO: 19326 - protein, 478 aa, synthetic construct
MERAALYIRVSTEEQTEYSPDAQKKQLIEFAKKNNYIIDYNHIFIDEGISGRKAEKRPAFMRMIGTAKIKPKQFDVILVHRFDRFSRNREDSVVYKSLLRKECGIKVISITEQLEDDKFSIILEAMLEAMAEYYSLNLADEVKKGMFEKANRGEHSGTVPLGYKLINKKLEVDFNYCKIIENIFSLFVDKGYSILDISRYLNNNNIRTKNNSLFTTRTLRYLLQNPCYYGAHRYNYRVGTKNIPNSKNDWIIIDNTHEPIISKELWQKAQDKLYTTKLLSPNKKQAQKYWLSGLLRCKHCGGSMSSNIIKGKYVTYFCNNRKNGSCKTPNNISLRKLEKLVIETMENDLKRGIVDAERISDKNGISELEILEIELKNVQRKYKLANKAFLAEIDTLEEYKEKKEGIRKEENIIIDKIKELNQTTTPDFDMLEFQKNIEMLKSNKITQLDKNKIIKEFVSRIVISSQEKYIKLHYYYMG

SEQ ID NO: 19327 - protein, 527 aa, synthetic construct
MDQYLIYLRKSRQDQDKELQTGNFDTLQRHRDALLALAKQHGYTIAYIFEEVVSGDTIAERPEMQKLLAAVETGEYAGVLVMEVPRLARGNTRDQGTVAETFQYSETKIITPDKIYDPSDEADEEYFEFGLFMSRREYKAINRRLQRGRMASLNEGKYIAGTAPYGYCKVKIPHQRGYTLEIDPTQAETVHEIFRLYTVGDPQPDGTTEPIGSTGIANLLNARGVLSPGGIKWTATAVRDIIKNPTYAGYLRWSYRPVKKQMVDGKVVITAPVNQDMPLRKGVHPPIISEDTWAAARSVISSRSHAPVPNNKQLTNPLAGLVYCSTCGRSMVQIHKKGKSPMLICPTAKCPTVSSLRSVVESTLLGCLQDWLRGYRIQLPEPSNTDDSGIKAAERNLAKANRDLAALQKQKGSLYDLLEQGTYTQEVFLERSRVLAGRTAEAEANIKALSAHLSAIREAENTRKSMVPRIKHVLELYPALDSPDEKNALLRTVLDHAIYSKTVGGRYQESDMRLYVFPKIVGPKSHL

SEQ ID NO: 19328 - protein, 546 aa, synthetic construct
MQATKIPKKTITVIEPKRSLIVDKEKYRQQRVAAYCRVSTDSEEQLTSYTTQKKVYTEMIAARTDWEFAGLYADEGISGTRADKRPEFKKMINDCLSGKIDYIITKSVSRFARNTVDCLDHVRILKSRGIGVLFEEQNIDTLKIDSELYLVIYAGFAQSESESMSKNITWSYRKKFEDGNSIFMYKKLLGYRKGEDGMPEVVPDEAAIVMRIFNMYLAGETPPRISAVLKAEHTEIPGKNLSFSSSMIANVLANEKYCGDSILQKTVTVDCISKTRRKNTGEAPMYYVQNSHPAIISRDTFHKVQEELIRRKTVAPKSTKSSITSSGKYSRFALTDVLICGECGSRYKRVTWTAYKQKRVVWRCINRLDYGKKYCKESATIDEKALQNAIMRALNRFNEEDRPTYMALMKATIGEAIGLNGCSDEVDLLQRKVDALNRKMLELINESVQTGNDIESREDEFKQISDTIALLKNRINAIQELASSDNSPNDRLDQIQRVISEREQSGFQYDDSIVRQMIECIKVYPSGKLDIIFGGGYIVEENITAE

SEQ ID NO: 19329 - protein, 513 aa, synthetic construct
MPEARLISPITRQAMAKSRVAAYCRVSSNSADQQSSYANQIRVYTSMIQKRRDWELVEIFADEGLSGMNAENRTEFQRMIRMCELHQIDLIITKSVSRFARNAKESLVYVRKLKLLGIGVQFEKEGIFTLALGDEMLLNTFSAIAQEESKAISQNQRLSIVKRMEDGEYVDSNAPYGFRLMNKELTVYEPEAEIVRSIFRMYLNGCSTTEIARELNNRRIQTKTGKGTWRSAKVAYILRNERYIGDCRYQKTYRDTTVPFRQYANRGQEDQFYAKGTHAPLIDQDTFGKVQALLQKRQENFSKVATQNIYPLTSRIQCSECGSYFRRRLVSGTVKWACCRHINDRNACESSYYSEERIYDGFTAMVNKLRFGEEDILGQVISRLESAVLLYKKNNTAAREMSQSIAELNAKLLMLEQLRAKGYLAPEVHQTQSRDINNQLAKLKKERQTELDSHIIQMLDDVKHLKTILEELEDPLERFDEKLFTEVVKAISIDHNDEMTLTMIGGLRFTELI

SEQ ID NO: 19330 - protein, 506 aa, synthetic construct
MVAIYARQSVDKKDSISIETQIELCKRQLPDNTPCVVYPDKGYSGSNINRPEFQRLLADVKAGKIDRILTYRLDRISRSVLDFANLVDLFTKYGVSFNSTQETFDTGTPIGRAMLNIVMTFAQLERETIQIRIRDNYYARGEKGMYLGGPAPFGFRKIELRSEQGKLKLLEPNPETVGTLEQMFQLYGNEMMSLGAVARQFNEEKIPSPGGVDWDSCKISRILRNPVAVTADADVYHYYRDKGVKFTNEVADFTLGKGCYLYGKRDKNTRKFTDVSNHTLSLAPHDGVIPSSLFLRCQERLDNNRQIDNRTRSQLTWLTGLLKCGKCGHAVVPKSSNHGRYRYLYCTGRTAYSCCDAAGNLGSLSAVEAIVQARIFLWAKAYSALCSGASAPDHQARNHLRCGMEAVDARIEKLLDMAAESDDITVRYLNEKISALTHERQELESRLDQLCNCRQDAAPKEIRDIAAEWDKMTLAQKSRLAELLISRINVFRDGLNIEWKYRFDFR

SEQ ID NO: 19331 - protein, 559 aa, synthetic construct
MKTKLYSYIRFSSMRQNDGSSYERQIRMAREVAAKYDLELVNDYQDLGVSAFKGANSKTGALSRFLDAIGRSVPVGSWLFIENLDRLSRADIVSAQELFLSIIRRGITIVTGMDNKIYSLDTVTANPMDLMFSILLFIRGNEESQTKRNRTNSSALIKIKAHQENPQNPAVAIEEVGKNMWWTDTTSGYVLPHPVYFPVVQEIVELRKNGRSTAEILDHLNETYAPPPAVSNKKHSKWSRAMVERLFHTRALIGIKEVSVDGVNYELKDYYPRVIDDATFYHLKKNIGARAWNFGDKEEVKPIPLLSGIGLLKCDHCGCAMVKVKGTNKRSDQYRYTCDATRSRRLDCEHPNWSFRGDQLEKAVLQLLADKIWIAEDKANPVPALKVQVDEISRKIDNLIALSAMTGATKELADQITTLNSERETLYNQIKMAEEEMYSVDSQGWEKLAEFDLEDVYNEERLKVRFKIKQALKRIGCSRIDRNKNLFVLEYIDGKTQRVVIENSRGTRKGRIFIDLKTINDRQILESNGLVLHPCLDMLTDKNWKPEEEIPGPLQEFGI

SEQ ID NO: 19332 - protein, 507 aa, synthetic construct
MKRVISYIRFSSEKQAKGDSLRRQSKMVNDWLKAHPEYYLDQDLSFRDLGVSGFTGKHLKGGLGDFLTAIEKGLVKAGDTLLIESLDRLSRQDIDIASELLRRILRAGVDIVTLSDGEHYTRESLKDPLALIKSILIMQRAHEESLRKAERIQAAWDAKKEAAKAGIKISKRCPAWLKLNDDRKTFSVIPEKVETVKRCFQLRLEGKSIWEIVRTLNDEGHQTLNQYKAGKFGQTSVQDLLKNRSVIGYFTPKGCEEIAGYFPPIIPETDFYKVQQLSYSRYGRKPASDKPLSVNLFKGVIRCSECGHALIITGFSDTRNGIYRCPLRNENRCSAKGLSRKQTDGTLLALLSRLDRFDSDTTNTVDMLRLHREHISSNIEKLVQLSLEIEDLSAITIKLKQLKGELSQVDADIEKETQRLKSIDVGCLSDCDLTTKAGRIEAQLIIKSAVKEVVLNTAKRRCKVTFHNSKSITLSITENPSEDVTEAIQSLSEVTERGLIDVDVVAI

SEQ ID NO: 19333 - protein, 506 aa, synthetic construct
MRHVITYLRYSSAIQGAEGADSTRRQNDLFKQWLKKNSDAQVVASFNDEGLSGYKGKHLSGQFGDMLSRIESGEFSEGTVLLVEAIDRIGRLEHLETEALMNRIIAHGIEIHTLQDGLIYTRDALSDDLGISIIQRVKSYIAHQESKQKSFRVSQKWEQRAKLALAGEQRLTRNVPGWIDPDTFKCNEHAETVRLIFKLLLDGESLHNIARHLQSNGIKSFSRRKDANGFSVHSVRTILRSETTIGTLPASQRNDRPAIPNYYEAAIDASTFNKAQEILGKNRIGRTPASDNPLTINIFKGLFRCQCGASVHPTGTKNKYQGVYRCNNHLDGRCDVPPLKRKPFDKWMIDNFLGMIDVGNDGEAEGKIASLQHEVEIVTTRIKKATALLLEMDDIDELKIQLKELNQKRTELQTTIDNMRRKASLTDKELPQLKDIDLTTKAGRVECQLILSKHLKGLTLGKDSVTVTLQNDTEITIPTNPLPLNDGSPIFEIADKELLDIDAYQL

SEQ ID NO: 19334 - protein, 534 aa, synthetic construct
MTEQQHALLYCRISDPKQKHEGHGLESQEHRIRQFAENNGFYVDKVFHDDVTGGGDFSKRPAMTRLLDYLKHNQSRNYVVIFDDIKRFSRDVYFYWGLIRELDKYNAQPMSPNFVFEKTPEGRFQQSITVAAGEYERESNARQTQQKTKARLEAGYHAFNAPVGFKFVKDKVHGKLLVKNEPIASIITEAMTGYASGRFQTAQEMRFFIESQPAYPKMKNGRIGNSKARDILTNPVYAGMVEYKPWGVSIRKGKHEGMISYETFCNIQDKLAGRARVPTRKDLNKDFPLRGAVACECGNTLTACWSKSRNGTRHAYYLCQNRKCEYKGKSIRKDVLEGEFEKLLKTITPVQDVFETAQKMFRRLWAHKAESSQSAKQALEQEMCEIDQNIEVVLDRIVDTSNERVIQALEKRIEKLDQQKLIIAEKQQQTSKPMHSFDKMYRTAMQFLSNPYGIWDSGELDMKRNVCKLVFNEQLVWDRKGMYRTPNLSLPFKALDNILNYKIGMVPGTGIEPVRYFYRKILSLVRLPISPPGH

SEQ ID NO: 19335 - protein, 506 aa, synthetic construct
MRSVITYLRYSSAIQGAEGADSTRRQNDLFKQWLKKNSDAQVVASFSDEGLSGYKGKHLTGQFGDMLARIESGEFPECTILLVESIDRIGRLEHLETEALMNRILGNGLEIHTLQDGLIYTKDALADDLGISIIQRVKAYIAHQESKQKSFRVSQKWEQRAKLALAGEQRLTKMVPGWIDPDTFKLNEHAETVRLIFKLLLSGESLHNIARHLQSNGIKSFSRRKDANGFSVHSVRTILRSETTIGTLPASQRNDRPAIPNYYEAAIDAATFNKAQEILDKNRKGRTPASDNPLTINIFKGLFRCQCGASVHPTGTKNKYAGVYRCNNHLDGRCDVPPLKRKPFDRWMIDNFLGMIDVGNDGESERKIAALQHEVEIVTARIKKATALLLEMDDITELKAQVKGLNQKRTEIQTTIDTLKRKTSLTDKELPQLKDIDLMTKAGRVECQLILSKHLKGLTLGKDSVTVTLQNDTEIIVPTDPLPLNDGTSIFEIAEKELLEIDAYQL

SEQ ID NO: 19336 - protein, 563 aa, synthetic construct
MAKRAVIYARYSSDMQSASSITDQVRLCRRLCDSNGWTVVEVFTDEAMSGASHLRPAFQRMQMMATAGGYDVLVAEALDRLSRDQEHIAGLHKRMTYLGAEIVTKSEGLINEMHIGLGGTMNALFLKQLAAKTRRGLEGRVHNGKSAGGRSYGYRIDRQPLPDGTWTTGDLAIDAREKAVVQRIFKSYSLGKSARAIAVELNAAGIPSPRSGKGSGEWSFSTISGNWKRGTGILNNELYVGRRVWNRQRFVKDPATGKRQARPNPPEEWIIEQVGDLRLIDNDLWESVKRRQGAIRADMDDTAGSVAHGGNPLGTARRPTYLFSGMLKCGCCGASYTLMNKTKYGCSAARNKGTCDNRKLIHRERVETRILDGLKDKLLHPEMIEAFIVEYQREWNRLRSTEVSERATCEAELKTVTQKIDKIVDAISEGMFHMSMKEKMDALEAHKGDLTTKLANLGDAAAPIHLHPSLAQVYRQKVSDLTASLNDELARPEATEALRGLVSEVRMVPDDAAEHGHVIELYGELGAILGLAGGGNDEPRRITGGVSYSMVAGVGFEPTTFRL

SEQ ID NO: 19337 - protein, 541 aa, synthetic construct
MPKAISYIRFSTKIQSVGDSTKRQSKYINDWLKRNPDYYLDESLRFQDLGISGFSGANAKSGAFGEFLAAVESGYIEAGSVLLVESLDRVSRQDIDTAGEQLRKILRSGVEVVTLVDNEWYTKESLKDSLSMIKAMLVMERAHEESAMKSTRLRSMWAAKRERAANGEIMSKRCAAWLKVSDDRSHFEFIPENVKAVQRVFQLRLEGLSHVKIAKQMNDEGFSTLNQFKSVTGGWSQSSVTELLSNRSVIGFKVPSKSMAVKGVSEIPNYYPSIITDEQFYAVQQLKQGSGRKPSSDLPLLTNLFKGVLRCSECGFIVVVAGVSAKRSGIYKCSMKSEGRCNSVGFSRLQTDRALVQGLLYNTNRLSLNRDNGSAIGTLQSELEQLKKQRERLIKLAMLADDTESMAKDLKALNSQIKDAEKAVSEVHQREKSSQLETISHLDLTVKKDRVEAQIIIKRIVKEIRINTAGKKCDVLLHNGLKLLNFPLDKVVDGAQWLEILPLIDGDEFDFEGFTSKPRHIALEEAPEWVKEMEEQPSQPL

SEQ ID NO: 19338 - protein, 546 aa, synthetic construct
MSRKARNTALRRRLEEAPSRRVAIYLRRSTDEDNQPYSLEAQETRLRAFVASQPGDWQIVKIYSDDASGATTDREDLQKMLRAARVGMFDTLLVYRVDRFSRRLRDLVALLDDLEDAEVVFRSATEPFDTSTPVGRMLVQMLGVFAEFEREVIIDRVIAGMERKAAKGLLTGGRVPFGYAKDAETDNYIIDQAQAVTVRLIFDLYTKDRLGTRAIANVLNDRGLRTRAGTLWSQRSVEYVITNRQYLGEKSFRGIRVIDAHEAIIKRRQFNDAQRILAQRSERIGQRAANASDYTLTGKISCPSCGRKYIGTPAHGRTRRYRYYTCWSRNRYGTKAGCRIHRFNADEIEQAMERALIDFFTNAHEVIDDAIRAFIADHAAAAGNHRDELATIKQQTKETANALDRYLTAFEKGTLDDEDPDIQARLTKLKARSKQLRDRRAEIEFDLDEPLRAPTRAELNVIRDHIAETVREGNAKAKKALFEALIENITVTSASTIVPNFRIPLGATDGMATEAPSRDQQDADSAVRALPRLVGSAGLEPALKRT

SEQ ID NO: 19339 - protein, 597 aa, synthetic construct
MKKNNVEIIKADSLVRRRGDNFERESKRVAAYCRVSSDSEDQKNSYESQVRHYKDYISQRSDWELAGIYADEGISGTQVGKRQDFQRLINDCVNGEIDYIVTKAIARFARNTLDTLKYVRMLKDMQIGVYFEEENIDTLTMDGELLLTILSSVAQQEVENTSAHVKKGLKMKMQRGELIGFQGCLGYDYDVETKQLSINKKEAKIVRYIFERYLEGIGGKVIARELDELGYKSPRGLDHWNDTTVLGIIKNEKYKGDILMGKTFTVDPISKRRLSNFGEEDKYYIKDNHEPIISKEDFEKAQEIRLRRAGNKKTAANVNGKRERYSKMYAFSSMLECGFCGSILSRRSWHCRSDYRKVVWHCVTSIKKGKKFCKHSKGLEELAIEGAFMEAYRKLYHSNENLMTDLLETIESELNDNSLNKELKRITNKLRTLLKKEENLVNLRLEGKISDTIYNEKYNEISSEKEFLAEEKVNIETTLKSEIDVKKRLTEFKHLLSSQKMLTEFDRAVFESIVEKIIVGGVNSDGEIDPAMLTIIFKTGETQNKDGKQFKSKRKNAKLERDKLCPQNSDEDKKLYSQGPDNTCGVCGSARKSLETF

SEQ ID NO: 19340 - protein, 480 aa, synthetic construct
MQTINKVAIYVRVSTTNQAEEGYSIDEQKDKLKSYCQIKDWNVYKVYTDGGFSGSNTERPALEKLIKDAKNKKFDTVLVYKLDRLSRSQKDTLYLIEEIFIKNGIEFLSLQENFDTSTPFGKAMIGLLAVFAQLEREQIKERMQLGKLGRAKSGKSMMWARTSYGYDYHRETGAMTINELEAIAIRDIFESYLNGMSVTKIRDMLNDKYPKTPNWHYRIVRGILANPVYCGYNQYKGHVFLGNHEPIITEEAFNKTQEELKIRQQTALEKFNPRPFRAKYMLSGIAQCGYCGAPLSITLGTIRKDGTRNIRYQCKNRFPRATKGVTVYNDNKKCDSGFYEKSDIEQYVIEQICKLQHDKKYVEELFADHGPSVDRVACQKQIDLLTNKISRLNDLYIDDRITLEELQTKSSEFSSQRAILEEELENDPALKRKKREAEMKKILRTGDILGMDYERQKTIVRSLINKVRVTVDKIVIKWKI

SEQ ID NO: 19341 - protein, 413 aa, synthetic construct
MNIRKIEAKNNKRKKRICAYVRVSTTNGSQLDSLENQKVYFEKLYAERDDVEFLGVFCDKGISGSKYDRPDFQTMLGACRKGQIDVIHTKSISRFARDLINVLEISRELKTLGIDIFFEEQNIHTLSNEGEVVLTVLASLAEEELQSMSGNQRWSFRRKFQKGELLINAKRFLGYDLNEKGELVINKAEAQIVRTIFYSYLEGMGTHRIAKKLNEGKVPTVTGKKWYDSTIRNILKNEKYKGSLLLQKYFHDGVNGPKKLNQGQVEQYYIEDNHEGIVSKEIWEKVQVKMKSRSRIQGTNKTYKFSRMLKCQYCGSTLKRQVSYKKKIVWCCSKYIKEGKNSCKGMRVPERDIEDWKLSSPVIVLERIEDGEKHYGYTGQKATANGHISNSEKDQSSRLLSSVYRPRRTAIKL

SEQ ID NO: 19342 - protein, 430 aa, synthetic construct
MSTDQDEQLSSYENQVNYYREYILKHEDYELVDIYADEGISATNTKKRDAFNRLIQDCRDGKVDRILVKSISRFARNTLDCIKYVRELKELGIGVTFEKENIDSLDSKGEVLLTILSSLAQDESRSISENSTWGIRKKFERGVVQVNTTNFMGYDKDEKGNLIINHDQAKVVRYIFDRFLEGYSPEFISKELREQEIPGCTGKAKWCPSAIWKMLQNEKYKGDALLQKTYTVDFLTKKRIDNDGQVNRYYIENNHEPILDREKWEIVQLEIARRKKFREQHKLQFYIMQKENNPFTTKVFCAECGSAFGRKNWTTSRGKRKVWQCNNRYRIKGKIGCLNNHIDEEMLEKAVVMAVEQLSKNVDLLHGKWNKVLEENRPLEKHYSLKLAEMINKPLWEFDSHEMCQVLDNIIIAEDGQITVRFLEGTEVDL

SEQ ID NO: 19343 - protein, 611 aa, synthetic construct
MRNYEKITALYERLSRDDELQGESNSIVNQKKILEEYASKNNLSNIIHFTDDGISGTQFDRPGFMAMMNGVNQGNIGCIIVKDMSRLGRDYLKVGQCMEILRQKGVRLIAINDNVDSFYREDDFTPFRNIMNEWYARDTSRKIQSTFRSKGESGKHTASSPPYGYIKDEKDKDKWIVDEKAAEIVRRIFNLTMQGNGPYRIAKILEAEKIDIPAYHQQKLGYGLHQSKNFEYPYRWCSSTIASILKKQEYLGHTVNFKTRKHFKDKKSKYVSEDNWLIFENTHEAIIDQETFDNVQRIRGNVKRYPDGWGEYHSLTGLMYCADCGSKMYVHRTSNYKNIPYYTCSAYTKVPCGTLCPSAHRIKAEAVLNLIQETLKDLKKYLDEDNEAFIRSIQNEMEEKEKVEIERQRVRLIDSKSRIQELERLMCRIYEDMILEKIPSSRYEILNSQYETEQRALSKEIKDLELTISRYEKETDRARKFISLINRYENFDELTTTMINEFVEKIIIHERDRKGSQNSKQKIEIYFNFIGNYELPTEELTEEERLKLEEEERKINERKDRLHQNYLKRKANGKQQEYEERYKARREQKKQEKLKVLKRGGIPLSEYKKRD

SEQ ID NO: 19344 - protein, 551 aa, synthetic construct
MSNTKRTGQTALYERLSRDDEMQGESNSITNQKQLLESYAKRNGFTNIYHYTDDGVSGTTFDREGFQKMIKAVEENKVSTVIVKDMSRFGRDYLKVGFYTEILFKEKGVRFIAINNGIDSEKQAESDFTPFLNIMNEWYARDTSRKIQSIFRARMEEGKRVSPSVPYGYFRNPKNKQELLVDKESAKVVKRIYRLVIEGYGVTQIADILTKDKVLIPSAYAEIHYPENNHSSKKRGIEDPYFWTPTTVGYILEKREYMGHTILGKTICVDYKTKKRRKAKEDELIIFKNTHEAIIDEETWNNAQRLRKTVRRSPKYGTTSHPFTGLLICADCGGKLSYREPAEHKEKKYDSDYSFVCQHYRHRKGSCSMHYIKVKTVNEILLKSIKEITDFAKEEKQEFLKVMNKLSDEKRKEKYQEDTTKLEKLSSRNAELTTLITKLYEDHALGKIPAKHFDRLFNIYDTEQQDLENQIQYFENEIGSYHQRKVDTDKFLKMIEKYTDIEELTVPMINEYIEKVVVHEATGERKGKYRKQQVDVYFNFIGNCQVPQSEE

SEQ ID NO: 19345 - protein, 627 aa, synthetic construct
MKKNNVEIIKADSLVRRRGDNFERESKRVAAYCRVSSDSEDQKNSYESQVRHYKDYISQRSDWELAGIYADEGISGTQVGKRQDFQRLINDCVNGEIDYIVTKAIARFARNTLDTLKYVRMLKDMQIGVYFEEENIDTLTMDGELLLTILSSVAQQEVENTSAHVKKGLKMKMQRGELIGFQGCLGYDYDVETKQLSINKKEAKIVRYIFERYLEGIGGKVIARELDELGYKSPRGLDHWNDTTVLGIIKNEKYKGDILMGKTFTVDPISKRRLSNFGEEDKYYIKDNHEPIISKEDFEKAQEIRLRRAGNKKTAANVNGKRERYSKMYAFSSMLECGFCGSILSRRSWHCRSDYRKVVWHCVTSIKKGKKFCKHSKGLEELAIEGAFMEAYRKLYHSNENLMTDLLETIESELNDNSLNKELKRITNKLRTLLKKEENLVNLRLEGKISDTIYNEKYNEISSEKEFLAEEKVNIETTLKSEIDVKKRLTEFKHLLSSQKMLTEFDRAVFESIVEKIIVGGVNSDGEIDPAMLTIIFKTGETQNKDGKQFKSKRKNAKLETDKLCPQNSDEDKKMYSQGPDNTCGVRSVATTKQRVKILYFKHFFKHFVFIEKSDFNIKKVLKNILT

SEQ ID NO: 19346 - protein, 520 aa, synthetic construct
MTEKNIMVIPARKRVGSTAAKEKIKKLRVAAYCRVSTETEEQNSSYEVQVSHYTEFIKKNNEWEFAGIFADDGISGTNTKKRDEFNRMIAECMDGNIDMVITKSISRFARNTLDCLQYIRQLKDKNISVYFEKENINTTDAKGEVLLTIMASLAQQESQSLSQNVKLGLQYRYQQGKVQVNHKRFMGYTKDEDGNLTIVPEEAEIIKRIYREYLEGQSLVGIGRALEKDGILTAAGKPRWRPESVKKILQNEKYIGDALLQKTVTVDFLTKKRVKNEGHVPQYYVENSHEAIIPKELFLQAQEEIHRRSNIYTGEGKNKRIYSSKYALSAITFCGDCGDIYRRVYWNIHGRKEFVWRCVTRIEQGPEVCKNRTVKEDELYGAVMTAINKLLAGGNNMIKTLEENIHAVIGETTEYQISEINNSLEEKQKELIKLANKGQDYDHLADEIDELRDKRQILLVEDASLNGENERINELIEFIRKNKFRTLEYDDKLVRKIIQSVTVYEGHFVIAFKSGIEMEI

SEQ ID NO: 19347 - protein, 523 aa, synthetic construct
MAVSRNVTVIPAIKRVGNNKNSESKPKIRVAAYCRVSTDSEEQASSYAIQIEHYTNYIKKNKEWELADIFADDGITGTNTKKRDEFNRMIEECMAGNIDMIITKSISRFARNTLDCLKYIRQLKDKNIAVFFEKENINTMDSKGEVLLTIMASLAQQESQSLSQNVKLGIQYRYQQGEVQVNHKRFLGYTKDENKQLVIDPEGAEVVKRIYREYLEGASLLQIARGLEADGILTAAGKAKWRPETLKKILQNEKYIGDALLQKTYTVDFLSKKRVKNNGIVPQYYVENSHEPIIPRDLFMQVQEEMVRRANLRGGKGCKKRVYSSKYALSSIVYCGHCGDIYRRVHWNNRGYKSIVWRCVSRLEEKGSECTAPTINEETLQKAVVKAINELLANKDPFLKVLQKNIATVFNGENDNATDDIDSKLEELQQQLLIQAKSKNDYEDVADEIYRLRELKQNALVENAEREGKRQRIAEMTDFLNKQSAELEEYDEQLVRRLIEKVTIYEDKLTVEFKSGIEIDEEI

SEQ ID NO: 19348 - protein, 475 aa, synthetic construct
MITTNKVAIYVRVSTTNQVEEGYSIDEQKDKLEAYCKIKDWKIYDVYVDGGFSGANTQRPELERLISDVKRKKVDIVLVYKLDRLSRSQKDTLFLIEDVFAKNDVAFISLQENFDTSTPFGKASIGMLSVFAQLEREQIKERMMLGKEGRAKNGKSMSWTTIAFGYDYSKETGVLSVNPTQALIVNRIFTEYLNGKPVVKIIRDLNAEGHVGRKRPWGETITKYLLKNETYLGKVKYKDKVYEGQHEPIITQELFDLVQLEVERRQISAYEKYNNPRPFRAKYMLSGLMKCGYCGASLGLRYTRKDKNGISHHKYQCRNRHSKDLEKRCESGWYSKEELERGVIKELERIKFDPKYKNETLAKKEETIKVEEIKKQLERINNQVSKLTELYLDEIITRKELDEKNDKIKTERQFLEEQLENQKSNVLSIRKRKLTRLLKDFDVEKLSYEDASKIVKNIIKEIIVTKDGMSITLDF

SEQ ID NO: 19349 - protein, 537 aa, synthetic construct
MKQQIYNTALYLRLSRDDELQGESSSITTQRSMLRLYAKEHHLNVIDEYIDDGWSGTNFERPSFQRMIEDIEAGKINCVVTKDLSRLGRNYIMTGQYTELYFPSHNVRYIAIDDGVDSEKGESEIAPFKNIINEWVARDTSRKVKSAFKTKFAEGAHYGAYAPLGYKKHPDIKGKLLVDEETKWIIEKIFSLAYQGCGSAKITKQLRAEKVPTASWLNFTRYGTFAHIFEGKPDSKRYEWTIAHVKAILKSEVYIGNSVHNMQSTVSFKSKKKVRKPESEWFRVENTHEPIIDKEVFYRVQEQIKSRRRQTKEKATPIFAGLVKCADCGWSMRFATNKANKTPYSYYACSYYGQFGKGNCSMHYIRYDVLYQAVLERLQYWAKAVQQDEEKVLNKIQKVGNAERIREKKKKANALKKAENRQNEIDRLFAKMYEDRACEKITERNFIMLSGKYQKEQIELEQQITNLREELSKMEQDMIGAEKWIELIKEYSVPKELTAPLLNAMIEKILIHEATTNEENERIQEIEIYYRFIGKVD

SEQ ID NO: 19350 - protein, 538 aa, synthetic construct
MSQQINISVGIIGFYQFKNVTNSVTDVLKRGDNLDRICIYLRKSRADEELEKTIGVGETLSKHRKALLKFAKEKKLNIMEIKEEIVSADSIFFRPKMIELLKEVENNQYTGVLVMDIQRLGRGDTEDQGIIARIFKESHTKIITPMKTYDLDDDLDEDYFEFESFMGRKEYKMIKKRMQGGRVRSVEDGNYIATNPPFGYDIHWINKSRTLKFNSKESEIVKLIFKLYTEGNGAGTIANYLNSLGYKTKFGNNFSNSSIIFILKNPVYIGKITWKKKDIRKSKDPHKVKDTRTRDKSEWIIADGKHEPIIDEKIWNKAQEILNNKYHIPYKIANGPANPLAGVVICSKCNSKMVMRKYGKKLPHLICNNKECNNKSARFDYIEKAVLEGLDEYLKNYKVNVKANNKTSDIKPYEQQLNALSKELIVLNEQKLKLFDFLEREVYTEEIFLERSKNLDERINTSTLAINKIKNILDDEKKKNNKNDIVKFEKILEGYKKTKDIQKKNELMKSLIFKIEYEKEQHQRNDDFDIRLFPKLLR

SEQ ID NO: 19351 - protein, 513 aa, synthetic construct
MKRIAIYSRKSRETDTGESIKNQIDMCKTYFNRADEECSFEVFQDEGFSGGNTNRPSFQRMLELAKHKQFDIIAVYKVDRIARNIVDFVNIYDELENHDVKLVSITEGFDPSTPIGKMMMMLLASFAEMERMNIAERVKDNMKGLAKIGRWSGGTPPTGYRNKTIINDNGKKESYLELIPQKKQLLISIFEKAADGYTTYQIGEMFNMPPKTISNILCNPTYVKSDELSANYLKSVGYSVFGELNGNGYLSYNRRPRKKGKKLFNAKGMFVAVSEHEAIIDSKTWIKANNNLKDRATEARPRISPQSFLAHLVKCKCGSGMYIHKGHFKKNGTRNTYFVCSKKKSKDKCTSKWLRIDVVEAEVLDLLKKISLNPKILDAYLKKKNNSVNYVESIKNIKKQINKNTETINALTDKLILLEGASIDIVSKKINSMANENTRLNTQLLEIEREKMFLEVDGENLKLLISNISKFLAKFDKIDISEKQNFIKTIIKEVVWDSTSNDGEDEITIKFLE

SEQ ID NO: 19352 - protein, 540 aa, synthetic construct
MKTIAIYARKSLFTGKGDSIGAQVDTCKRFIDYKFANENYEIKIFKDEGWSGKTTDRPDFTNMVNLIKSKKIDYVITYKLDRVGRTARDLHNFLYELDNLGIVYLSATEPYDTTTSAGRFMISILAAMAQMERERLAERVKSGMIQIAKKGRWLGGQCPLGFDSKREIYIDDMGKERQMMKLTPNKEEIKIVKLIYDKYLEMGSMSQVRKYCLENNIRGKNGGDFSTNTLKQLLTSPIYVKSSDNIFKHLESQNINVFGTPNGNGMLTFNKTKEIRIERDKSEWIAAVGKHKGIIDDNKWLQIQQQLQQQSEKQIKSSGRQGTTSTGLLSGIIKCEKCGSNLLIKTGHKSKKNPRTTYSYYVCSKKDSSYGNRCSNKNVRTDEADSAVITQLKLYNKELLIKNLKKALVQNKKTDTDNIEILESKLKEKEKAVSNLVKKLSLVDDENISNIILNEVTNINKEINDIKLQLSNETLKINEVTQATLDTEIYIKILENFNKKIDDITDPIEKRNLLKSALENVEWNGESGEFRINLIGSKKK

SEQ ID NO: 19353 - protein, 500 aa, synthetic construct
MYLRKSRADEELEKTLGEGETLSKHRKALLKFAKEKNLNIVEIKEEIVSGESLFFRPKMLELLKEIENKQYSGVLVMDMQRLGRGNMQDQGVILETFKKSNTKIITPMKTYDLSNDFDEEYSEFEAFMSRKELKMINRRMQGGRVRSVEDGNYIATNAPYGYDIHWINKARTLKPNQKESEIVKLIFKLYIEGNGAGTIAKHLNSLGYKTKFGNSFNNSSIIFILKNPVYIGKITWKKKDIRKSKDPNKVKDTRTRDKSEWIVVDGKHDPIIDQITWKQAQEILNNRYHIPYKLVNGPANPLAGLIICATCKSKMVMRKLRGTDRILCKNNKCNNISNRFDAVEKSVVESLENYLKTYKVNLPELNKTSNFKLYERQISTLKKELKILNEQKLKLFDFLERGIYDEDTFLKRSKNLDERIEITNESLSNLNQIIAKENKAIKKEDIIKFEKVLDSYKSTADIRLKNELMKTLIFKIEYTKNKKGNDFKIKVFPKLKPLNI

SEQ ID NO: 19354 - protein, 600 aa, synthetic construct
MKEVEVIKAKGISTRRNKGRTIERLRVAAYCRVSTDSEDQLNSYKSQVAYYTELIKKNKEWAMAGIFADEAITGTQVTKREDFQRMINECMNSEIDMVITKSISRFARNTLDTLKYVRMLKEKNIAVYFEDEKINTLTMDGELLLVVLSSVAQQEVENISANVKKGLKMKMKRGELVGFQGCLGYDYHPEDKTITVNPEEAKIVQYIFNRYIEGAGGSVIGKELENLGYKTKYGSSSWAQSTVIGIIKNEKYKGDLLMGKTFTVDPISKRRLNNFGEEDKFYIRDHHEAIISEETFEKAQEILKRRNQNRVKTGDGNIKREKFSRQYAFSCMLECDFCGGRLTRRNWHSGTDHSKVVWQCVTATKKGKRFCSYSKAIPEKAIEDAFVESYRLLCSDNKEVLEEFLQRMEGNLNSSSVNKQISKIDKEINILEGKKNKLVDMRLEDSIDKATYEVKYADLVVTQETLIEDRKKLTEISENEKGIKLRLKEFKKTLEQNEVLDDFDRYIFESVVEKVIIGGIDEDGNKDPAQITFVYKTGFKSNIDGDKFRPQRKNAKGRHRTDELCSYDNNEVEKLCSDSSYHTCGDCSETKQIISRMQLI

SEQ ID NO: 19355 - protein, 1432 aa, synthetic construct
MSKEKIKVYLYTRVSTSIQIDGYSLEAQKSRMKAFALYNDYEIVGEYEDAGKSGKSIEGRVQFTRMMEDIKSGKDGVSFVLVFKLSRFARNAADVLSTLQIMQDFGVNLICVEDGIDSSKDAGKLMISVLSAVAEIERENIRVQTMEGRIQKAKEGKWNGGFAPYGYQLIDGKLIINEEEAIAIRTIFDQYVNTSIGANGLSKYLENHGIRKIPRQNGKNPLFDAGLIRKILKNPVYNGKIAFGRRTLEKVHGTRNEYRQVEQDDYLVAEGIHEAIIPDELWQAAQVKLKAQAKKYEHVNKGKNMRTHLLSGIVKCPICGAGMFGNKSIKYKKDGTKYKDFYYYGCKHRLMNRGHKCTYNKQIREELLDDAVAEVIIKLVSNPKFASMIQEKINMKVDTSAIENEIDNYQNELRKSHSTKYKLIEEIDNLDVEDKHYKRRKNDLDDRLYRMYDKIEELESQLIEAKAKKETIEVEKLTGDNIYKVLIYFDKLYKVMNDVERRQLIEALISEIQIYEEKQPNGQWLKSITFKLPIIDEDLNISLENDEQVDGVSVPGVDPNTGFPLPDIGGGIGVEVTFDVVVESIPNPNPTNNIATIDYSYTPVEGGIPNDFSVDSNPVPVEVISADVEVTKLSEPTIVNPGEELIYTIKVVNNGPFPSENVVLTDDVPASIINPEYSLDGGVTFQPWTGSLNIGTLEVGETRVIIIRGIVNPSTVGIITNTAVVSSTTADPNLNNNTSTIETEVNLLADILVMKTAEPNSAVPGTLLRYTIQVENLGPANAENVILNDDIPASIINPEYSLDGGASFQPWNGSLNIGTLNSGISLTVLIQGTVSLNSSEYIVNTATVSSTTPDPDLSNNISTIITPVNPQAGISIIKVADEDVAVPGEEFVYTIEIFNEGPSNATNVVLTDDIPDVILNPEYSLDGGATFQPWNGSLNIGTVAPGQLIRIIIKGLVSSTATGDITNTAEVSADVPEPVTDSSTVTTPIVPSADIEVIKTSNMDTAVPGETFSYTITVINLGPSAAQSIVLTDDIPDVILNPEYSLDGGVTFQPWNGNLSIGTLDAGEIRSIIIRGTVSQTAVGTIINTATISSPTPDPNPDNNTSTDETDISPLADISVIKGNEPVAIPGGRFIYGIEIANAGPSFAENVTLTDNIPASILNPEYSIDNGVTFQPWNGSLNIGTLDAGEIRNIIIRGTVSQTAIGTIINTATVSSTTPDPNLNNNTSTSEAEVSSSADISVVKRSNQTVVVPGDVLDYTIEVRNAGPSTAQNVTLTDNIPASILSPEYSIDNGVTFQPWNGSLSIGTLDAGEIRNIIIRGIVSQTAIGTIINTATVSSTTPDPNLNNNTSTSEAEVSSSADISVVKRSNQTVVVPGDVLDYTIEVINAGPSTAQNVTLTDNIPASILSPEYSIDNGVTFQPWNGSLSIGTL

SEQ ID NO: 19356 - protein, 501 aa, synthetic construct
MKPNIKEVAIYLRKSRDESDGKEDVLAKHESLLLEYAKNYNLKYKIYKEIGSSEYIDSRPKMVRLLSDVSQKLYDAVLVVDLDRLSRGDLEEMGRISRVFRDSKTIVLTPTKTYDFNNEDQALINNFEMVFANHEFRMIRKRMIRGKQQGTKAGKWTNGRPPFPYVYNRLTKELDVDPDKVKVYELMKKMFLEDMKATYEIAWKLNELGFKTNRNSYWYENTVRRILKNEVHLGKVVYGKTSGSGSKKKLNANGVQIKDRSEWIIAEGSHQPLKTEEEHQRILAILESRRYTPKGTRTNVQVLSKLIYCGKCNRVMSFTGKASGKKYVKTCLTTDHFGNRCHNRCLNVEVIYAQLFLDLEDYEQQLINHEPKEKQGDSSTLQLALHNKLEELERLEKGIERIKDLFIDEVIDKLEMKKRIEKQQQLMQTKKEEIRSIEQSLAVIENVRTDDDRLHAIREFKKAWNTKGISKRELNTLAKQLIDRVEYTREGNNIEMKIYFL

SEQ ID NO: 19357 - protein, 484 aa, synthetic construct
MKILKYAVYVRVSTDRDEQVSSVQNQVDICRYWLENNGYEWDSNAVYFDDGISGTAWLERHAMQLILEKARRNELDTVVFKSIHRLARDLRDALEIKEILIGHGIRLVTIEENYDSLYEGGNDIKFEMFAMFAAQLPKTLSVSVSAAMQAKARRGEYIGKPGLGYDVIDKKLVINEKEAEVVREIFDLSHKGYGFKKIANILNDKGTYTKFGQLWSHTTVGKILKNQTYKGNLVLNSYKTVKVDGKKKRIYTPKERLTIIEDHYPAIISKELWNAVNSNRTSKKKTKQDIRNEFRGMMFCKHCGGPITAKYTSRYAKGSKKEWVYMKCSNYIRFNRCVNFDPVKYDDIREVILYRLKQQEKELEIQFNPKMHQKRKDKSTEIKKQIKLLKVKKEKLIDLYLEGLIDKEMFSKRDFNFENEVKEQELALLKLTDQNKRNKEEQQIKKAFSMLDEEKDMHEVFKTLIKTITLSKDKYIEIEYTFSL

SEQ ID NO: 19358 - protein, 515 aa, synthetic construct
MKTAIYLRKSRADLEAEARGEGETLAKHRTTLLKIAKEMNLNVLAVREEIVSGESLVKRPEMLALLEEIEDNKYDVVLCMDMDRLGRGGMKEQGIILETFKRSNTKIMTPRKTYDLNDEWDEEYSEFEAFMARKELKIITRRMQRGRVASVEAGNYLGTHAPFGYDIHRLNKRERTLTINPEEASVVRMIFDWYANEDMGANAIRSKLNDLGYKSKLGNEWNPYSILDILKNNVYIGKVTWQKRKEVKRPDAVKRSCARQDKSDWIIADGKHEPIIPESLFEQVQEKLNSRYHVPYNTNGIRNPLAGIIKCSKCGYSMVQRYPKNRKETMDCKHRGCENKSSYTDLIEKRLLEALKEWYINYKADFEKHKQGEKLKETQVIQMNEAALRKLEKELVDVQKQKNNLHDLLERGVYTVDIFLERSKAVSNRINEITSTMENLKKEIKTEIKKEKVKKDTIPQVEHVLDLYFKTDDPKKKNSLLKSVLEKAVYKKQKWQRLDDFELILYPKLPQDGDI

SEQ ID NO: 19359 - protein, 467 aa, synthetic construct
MKCVIYRRVSTDMQVEEGISLDMQRLRLKQYAKSQGWVVVNDYCDEGYSAKNTERPAFQQMIKDMKKKQFDIILVYRLDRFTRSVSDLHSILKTMDEYNVKFKSSTEIFDTTTATGRMFITLVATLAQWERETTAERVRDSMQKKAELGLRNGAKAPMGYDLKKGNLYINHTEAEIVKYIFEMFKTKGVISIVKSLNSRGVKTKQGKIFNYDAVRYIINNPIYIGKIRWGEDILTDIAQKDFERFIDKDTWYTVQQIQDSRKIGKVRLHNFFVFSNVLRCSRCGKHFLGNKQVRNHNRIAMSYRCSSRHHKGTCDMPQVPEDVIEKEFLNLLEEAIVDLDDTEEKPIELSNLQEQYNRIQDKKARLKYLFIEGDIPKNEYKKDMLTLTQEENIIQKQLANITDTASSFEIKELLNQLKDEWFNLNNESKKAAVNAIISSITVDVIKPARVGKNPIAPVIKVTDFKIK

SEQ ID NO: 19360 - protein, 515 aa, synthetic construct
MKTAIYLRKSRADLEAEARGEGETLAKHRTTLLKIAKEMNLNVLSVREEIVSGESLVKRPEMLALLEEIEDNKYDVVLCMDMDRLGRGGMKEQGIILETFKRSNTKIMTPRKTYDLNDEWDEEYSEFEAFMARKELKIITRRMQRGRVASVEAGNYLGTHAPFGYDIHRLNKRERTLTINSEEASVVRMIFDWYANEDMGANAIRSKLNDLGYKSKLGNEWNPYSILDILKNNVYIGKVTWQKRKEVKRPDAVKRSCARQDKSDWIIADGKHEPIIPESLFEQVQEKLNSRYHVPYNTNGIKNPLAGIIKCSKCGYSMVQRYPKNRKETMDCKHRGCENKSSYTELIEKRLLEALKEWYINYKADFEKHKQDDKLKETQVIQMNEAALRKLEKELVDIQKQKNNLHDLLERGVYTVDMFLERSNVVSDRITEITSTMENLKKEIKTEIKKEKVKKDTIPQVEHVLDLYFKTDDPKKKNSLLKSVLEKAVYKKEKWQRLDDFELVLYPKLPQDGDI

SEQ ID NO: 19361 - protein, 452 aa, synthetic construct
MKAAIYIRVSTQEQIENYSIQAQTEKLTALCRSKDWDVYDIFIDGGYSGSNMNRPALNEMLSKLHEIDAVVVYRLDRLSRSQRDTITLIEEYFLKNNVEFVSLSETLDTSSPFGRAMIGILSVFAQLERETIRDRMVMGKIKRIEAGLPLTTAKGRTFGYDVIDTKLYINEEEAKQLRLIYDIFEEEQSITFLQKRLKKLGFKVRTYNRYNNWLTNDLYCGYVSYKDKVHVKGIHEPIISEEQFYRVQEIFTRMGKNPNMNRDSASLLNNLVVCGKCGLGFVHRRKDTVSRGKKYHYRYYSCKTYKHTHELEKCGNKIWRADKLEELIIDRVNNYSFASRNVDKEDELDYLNEKLKTEHVKKKRLFDLYISGSYKVSELDAMMADIDAQINYYEAQIEANEELKKNKKIQENLADLATVDFDSLEFREKQLYLKSLINKIYIDGEQVTIEWL

SEQ ID NO: 19362 - protein, 452 aa, synthetic construct
MKAAIYIRVSTQEQIENYSIQAQTEKLTALCRSKDWDVYDIFIDGGYSGSNMNRPALNEMLSKLHEIDAVVVYRLDRLSRSQRDTITLIEEYFLKNNVEFVSLSETLDTSSPFGRAMIGILSVFAQLERETIRDRMVMGKIKRIEAGLPLTTAKGRTFGYDVIDTKLYINEEEAKQLRLIYDIFEEEQSITFLQKRLKKLGFKVRTYNRYNNWLTNDLYCGYVSYKDKVHVKGIHEPIISEEQFYRVQEIFSRMGKNPNMNKESASLLNNLVVCSKCGLGFVHRRKDTVSRGKKYHYRYYSCKTYKHTHELEKCGNKIWRADKLEELIIDRVNNYSFASRNIDKEDELDSLNEKLKIEHAKKKRLFDLYINGSYEVSELDSMMNDIDAQINYYEARIEANEELKKNKKIQENLADLATVDFNSLEFREKQLYLKSLINKIYIDGEQVTIEWL

SEQ ID NO: 19363 - protein, 597 aa, synthetic construct
MDATQSPKTAVLYLRVSTASQVNTDYDPEGLSIPTQRKICLVKAKQLGITIVDEYVELGRSGTKTVNRPEFQAMLERLHTRGDVDCVMVYKLSRLNRSRFDDAVTMMELRKANVTLISATENIDETPEGQLVHGMLAAVNEYRSAADGADIRIKLLRKIEQGGTIGPAPLGYLNIIETIEGRRINTIGLDPERAPLIRKAFELYATGDYSCEHLQQKLTDLGLTTRPSAKRPTPKPLAVSTIHRLLADPYYTGIVTFKGKQYPGRHKPLISQELFDRVQEIRALRSNNTRDRVHFHYLKGGILHCERCHKAGKRSRFVYTEAKGKGGTYAYYLCRGRQDGHCDMPYLPVSLVEEYVERYICTLSLGSDFTQRTEAEITQALDNQQALIRQSNHAITHKLKDITAKEDRLIDLVADGSLDTTAARRHLTDLTQQRHHLEQTKQTLDQRLAIGRDVLTTSLHLLQDIGTLYHQSPNPVRGMLCQALFHTIYLDDTTVTTSTLKEPYSSLQAAATHDGKQPTPTKHTTPSSADSSRAGQTKGTKANSGAPKRRKSQKQHTTTAIPLPSDEHEQTLGSRIATEGSSKHEMAERGGFEPPVR

SEQ ID NO: 19364 - protein, 458 aa, synthetic construct
MDKIKRVALYIRVSTEEQVLHGDSIRTQTEALEQYAKDNNFIIVDKYIDEGYSATNLKRPNLQRMIEDVKNNKIDLVMITKIDRLSRGVKNYYKIMEILEKHKCDWKTILENYDSSTAAGRLHINIMLSVAENEASQTSERIKFVFNNKIRRGEVISGSTPFGYKIVDKHLVIDGEKAEIVRECFTSYEKLTSMIKVLQHINNSFNANFSYNFIYKLLKNNIYIGTYIHNNLAVENFCDAIISSEQFNTVQKLLSKNTKVYNNKYLNSLGMQYIFSSMVICKCGRKMSGTYCLSSDKKIYKYYRCHVSQTTKKCNNTKRLSEKKLEDFLLKNVRRQLEEIAFGYESNNSKSKNNNNQLKNKIKKQINKLQDLYFDDLIDKEDYKLKYQKLNTQLIKLEKNNSEEKKSIINLKNIRSFLEINFEKIYSDLSDQEKRTLWTSIIDTIVIDENKNLTINFL

SEQ ID NO: 19365 - protein, 506 aa, synthetic construct
MDESIDAQIRAIEEYADKNDIKIVNKFIDRAKSATSDKRPAFQEMIKYCEADNTGISMVIVHKLDRFSRDKYDSAMYKQKLKVKGIRVVSVLENLDNSPESVILESVIEGMAQYYSANLAREVAKGQKENALKALHNGGDAPLGYDVAFDKTYLVNEEEAQAVKIIFDMYVNGYSYSNIIDKLNDLGYKTKRGNKFGKNSLHGILSNEKYTGVYVFNKTQRKGVNGKRNGHNQKSEDEIIKVEGGMPQIIDKEVFRQAQEMMQKRKKAPGSHKATTSYLLTGLIKCGECGGYAMQGNKRKDKYGNDYISYRCGCRKQKRGCNNKEIKRDYLEEFVLTELEKHVLNDEAIPALSKELNERLKIKSNDNHDMLNNLRNKLEKVNKEIENILTAIMNGIVNNMLKDKLDELEQIKLNLDLKIDELSIESNGVESVDITEDQIRSMFGKFKEFVLTRNLPECKKFISDYVKEVTVYRDYIEVIFNVVFSCADNEITHDLHITTLREKIIC

SEQ ID NO: 19366 - protein, 601 aa, synthetic construct
MARKKKFAPNDNNLAIAYYRFSSHSQNEASIDQQRELAHEWADAHGFKIVQEYEDAAISGTTDARPGFQQMLSEVAKIRPHTLIMWKTDRLGRDKYVLAMAKKKIRDAGCEIHLLAEHIPTEGPEGVLIEGLMEAMAEYYSRQLSQNIQRGMDYNAQHALYNGHKLFGYDVDRSTKKYIPDPNTAPFVQWAFKEYASGKPLKAIAEEMNAQGLRTPRNAKFSVNMLNKMLKNRAYIGEYHHGDIVVAGGMPVLVDEATFDRAQRRFAENKRKGSQRAHGMGGSDAPRYWLTGKLYCGECGSTMQGVSGTSKTGRTYYYYYCSAQRRKECHLHKARKRDLEDMVLFALHNIVDDEENVTALALDAAEYYEKSHDDTAYLEALEAKRREVEKSLANLVKVIEKGVVSDTVTQRLTQLEEQKSALNDAIGTENVRVSLCEDRHSIQAYFDKFLHADVNDPEIRDQVFEYFVDKVYLYDDKLVVSVWFSEDDKQEITWRDWFSLDEYWTDESPFVKGEAAEFDCFPLGSTEQNVPPSGRGVSCFFEPIPAGEDPRHRQLPGHDRLGAQAPPRLRFRCAGRRVARRARHRFRCSLLQRLPAMGAES

SEQ ID NO: 19367 - protein, 510 aa, synthetic construct
MYRPLIKCAIYTRVSTDHQADSTINQEAQGREYISRLGPEYDKTDIIVYRDEVVSGYYTSVFDRAEMKRAIQDAKENKFKLLIFKEVSRVGRDKQENPAIIGVFEQYGVRVIAINDNYDSLNKDNITFDILSVLSEQESKKISSRVSSARRQKARRGQWGGEAPIGYKVNRETKKLEIDPENCYIPKLIFDLYVNHGLGTFKVAEHLNGHGIRTKNGNLWGRVSINRVIRNQAYIGNVVYGTRRNALQREYDDTGKMSKKKVQIKIDKTEWEVAEDVHEPIIEKETFYNAQKILLSKSHGRTPRRAYHPLTGILFCAKCGQGMVCQKRTCKDKEYRYYICKTYHKYGRSVCSQANVNADVLEQDVIDIVKNELNSIPADKVEITGSKTNDIERLGKEIKKNNVKREKLKKDQIDIFNQRELFDESTYQQQMLEIKSQINHIDEEIQIIENQIKVLMEQVAESSTLDYLIEEVKNISLNDPEKLRVLLHDIIKRIELKEKHLQIEFNYDFR

SEQ ID NO: 19368 - protein, 504 aa, synthetic construct
MRICMYLRKSRADEELEKTLGEGETLSKHRKALLKFAKEKNLNIVEIKEEIVSGESLFFRPKMLELLKEIENKQYSGVLVMDMQRLGRGNMQDQGIILETFKKSNTKIITPMKTYDLSNDFDEEYSEFEAFMSRKELKMINRRMQGGRVRSVEDGNYIATNAPYGYDIHWINKARTLKPNQKESEIVKLIFKLYIEGNGAGTIAKHLNSLGYKTKFENSFNNSSIIFILKNPVYIGKITWKKKDIRKSKDPNKIKDTRTRDKSEWIVVDGKHDPIIDQITWKQAQEILNNRYHIPYKLVNGPANPLAGLIICATCKSKMVMRKLRGTDRILCKNNKCNNISNRFDAVEKSVVESLENYLKAYKVNLPELNEISNLKLYEQQISTLKKELKILNEQRLKLFDFLERGIYDEDTFLKRSKNLDERIEITNESLSNLNQIIAKENKAIKKEDIIKFEKVLDSYKSTADIRLKNELMKTLIFKIEYTKNKKGNDFKIKVFPKLKPLNI

SEQ ID NO: 19369 - protein, 592 aa, synthetic construct
MKITLLYYIKKFNIYCNRYLSQQINISVDIIGFYQFKNVTNSVTDVLKRGDNLDRICIYLRKSRADEELEKTIGVGETLSKHRKALLKFAKEKKLNIMEIKEEIVSADSIFFRPKMIELLKEVENNQYTGVLVMDIQRLGRGDTEDQGIIARIFKESHTKIITPMKTYDLDDDLDEDYFEFESFMGRKEYKMIKKRMQGGRVRSVEDGNYIATNPPFGYDIHWINKSRTLKFNSKESEIVKLIFKLYTEGNGAGTISNYLNSLGYKTKFGNNFSNSSIIFILKNPVYIGKITWKKKDIRKSKDPHKVKDTRTRDKSEWIIADGKHEPIIDEKIWNKAQEILNNKYHIPYKIANGPANPLAGVVICSKCNSKMVMRKYGKKLPHLICNNKECNNKSARFDYIEKAVLEGLDEYLKNYKVNVKANNKTSDIEPYEQQSNALNKELILLNEQKLKLFDFLEREIYTEEIFLERSKNLDERINTTTLAINKIKKILDNEKKKNNKNDIVKFEKILEGYKKTNDIQKKNELMKSLVFKIEYKKEQHQRNDGLLYIYFLSFCVRCISYLTQFISFFVYPYRILEIYLTFSFFIISYEH

SEQ ID NO: 19370 - protein, 608 aa, synthetic construct
MPATPTPKAYSYIRFSTPEQQKGDSSRRQTELSQQYAEAHGLTLDENLTYRDLGVSAFDKSNIRNGELGAFLRAIDSGAVEPGSYLLVESLDRLSRAKVTDALEVFMSIINRGIRLVTLADGREYSKERINEQFTDLIISIVVMSRAHEESQTKSKRLKEAWKAKRGRIGDAKLTEMAPAWLKLNDERTAYSLIPDRVELVQRVFQLSKDGIGSESIARRLNQQGIPTWGTRKADQWHASYIKKVLDNRAVLGEFQPHILVSGKRVPEGDPAPDYFPRIISDEDFVLAKVARQSRRTNSAGRKGQTFSNVFSGILRCGYCNGSMVYVNKGHSGPRAKLLVCARAKAGKGCHYVPWEYPQFERSVLTYCKGLDFDAFLQTRDTVKSELAALSARIAVLESSITDNEQKQANILEAIESGAKFQQFEARMVELEQNRMKFNAELDETRQKYDLRANAKVDVTAVRASIDELLQRLSELEGDELYDVRARLSQHIKRLIARIAMYPGGYIEKPFFVEKLRAHLVSKGSDTNAADEYIASRLKLTPNVSERFFTMISRSDAVRMIRPDLENPELLHLEVPDGGHLIAHAATIGAMLEKLAAMAQSSSHEARS

SEQ ID NO: 19371 - protein, 644 aa, synthetic construct
MTLSPLLASPTLSPQPVAPDPLSVIGEMLTPKVAVLYLRVSTARQAQRGDEKEGFSIPAQREANRKKAQSMGAMVAKEFVDRGESAKTANRPALQEMLEYIREHSVDYVVVHKVDRLARNREDDVEIMKQLTAANVALISATESIDQSPSGALLHGIMSSIAEFYSRNLAHEVTKGMTQKVQKGGTPGRAPLGYLNVREFDSDGRESRTVRPDADRAPLITWAFHRYTEPSVSLSQLALELAQRGLTTRRTPQVPSRALTDTDLHKILTNSYYLGLVSFSGATYAGKHEPLIDQETWDKVQDALQARRSGERRRRHDHYLKSTVYCGNCHNRLIVQMTRSKSGEIYPYFYCSARQAKRNVCTQKAVLIHVVEDKIVEEYQKRLRLDQIARDDLKRLFHDEFVATRGDAERQRAQITTDLERLEREQLRLLQAHYADAIPLELFKKEQDRIRSERTTAERDEARLTQDIADVEHAVQIALDVTMECARLYGSAPDHIKRLFNQVFFERVLVHTDETITVELNEPFATITSRAVQASAHEKSTTHRSGARTLTSSLEVEIGAETAFFSGKGFSNDTAVPLEGLEPPTCSLGRSRSSIELQRLAEPVYPPRPAARRRSRSAPASLQPQPSISAPLDSGPARLAWLVT

SEQ ID NO: 19372 - protein, 564 aa, synthetic construct
MAAKQQVSGPAQSTRQSTPVTTQLRGVSVLRLSVLTDETTSPERQRAANAAAAAGLGIDLGDREAVDLGVSASKTTPFERPELGKWLRRPDDFDALCFWRFDRAVRSMADMDDLVKWARENKKVIVFAEGPGGRLTLDFRNGVDLITELILKIFAFAAQFEAQSIRERVISAQDAMRVMPLRWRGSRPPYGYMPAPLDGGGWTLAQDPEAVAVIERIILELMGDPSKSVLGKSAADVARGLNADGIPSPRDHWSLKKGRDTGGKTGGRAGETVTRGRFTWRHGSIKELLTSERMLGWKTQDNKPVRDSEGKPVMATAEPILTREEFDAIGAVLSERSVDNKKVDRVDTMALLLRIIHCEGCGQRMYLHRPSANSKSTSKTETYKCGALTRGQKCDAPSIIKREWAEEYVERQFLWMLGALEVTHTRTIPGYDPQPEIDATLAEFEEHQAQRGRQKSNAGKAAWQRHADSLDARLADLESREKTPPRVEEIRSGKTYSRIWASADTAGKRKMLQDAGAHLNVKRSSRGGWRKLDERRVDFTVRDPFFAEAASELTSMGDELAANG

SEQ ID NO: 19373 - protein, 553 aa, synthetic construct
MSTITKIQSYHRNVKQLRVAAYCRVSTDNIEQLESLENQREHYQKYISNHPNWQLAKIYYDEGISGTKLTKRDALKELLADCHNHLIDLVVTKSISRLSRNTTDCLRIVRELQQLNIPIIFEKEHINTGAMASELFLSILSSIAQDESHSTAGNLRWAIRQRFASGEFRVSSAPYGYSIEDGNLVINQAEARIVREIFQQFSKGMSASRIAKGLNHKHVATKRGGQWRSNTVINILRNSNYTGDMLCQKTYSDDQYHRHFNQGELTQYLIEDHHPSLVNHETFNRVQVLLKEAVQKCHIETGSHKYQHHYLFSGKITCGNCGTIFKRQTRPNKICWACQRHLSSAKQCPVKAVTEVSLEAAFCNMMNKLIYSRKFLLQPLLANLQVQANSDTNGQLSSLVNQVKANDRKAETLTELMQSGLLDKAIYVNQTAQLEQDTYQCREKIKQFNSNNTDSANNFENVRTLLHWCQQGQKLSGFNKAPFQDFVQQIVVNSPKEAVFKLKCGLRLTEKLTKAACLDEHFYRRVIRQRFSEPIRQAEYLYSIIESEGDLIG

SEQ ID NO: 19374 - protein, 571 aa, synthetic construct
MIHLAIPYRRFSSDKQTGNTSLTRQQDLVTKWLSKNPEYKTLPQYDYVDEAVSGYHGDNIKFGQLGEFISEVEKGTFNRYKAPTLLIENFDRFGRLKPRKALGYITDILEAGVSICLLDRGEVITPDKVDDDFFLMQLVMTASRAHGESKRKSDNVTKAWQIKAEGIADGATLTRNVPFWINPDDRQLVIPERAKLVERIFKMRLESMSCYAIGKTLNQEGIPVYTHRTVTPGKDYKKRRVAPCWHSANVSGLLSNKAVLGILPAQQVNKHNKHRQDTLRADTPGYYPAVISATLFAAVQSLKDEKHGKKRVLSNINSIQIFKKMLRCVCGAYMDVAGCRSTYSGVFKCASARAGSTLCTKPSINRQKVEKALLTRLLPSLTRLDVNHELSNQIETLKAEIEGLDILIRKGWEDYENSDHPFYLSDGQASRISQNEKKREEKRSELAALSVTEQSSVYENISHLDLSDYTQRCEARVIIKRMISSITIDTDKGLLDVHLVNGNIITGFCIDSTSNKKDVFTEATDEEKQAELTAIIGERLPLVIPAGDPVGVAYEPMLDWPDVDTGDYPNE

SEQ ID NO: 19375 - protein, 562 aa, synthetic construct
MEPKAYSYIRFSSPEQEEGDSLRRQIQLSEEYCKQHGLILDDTLKLTDKGLSAYKGHHRTKGALGEFLRLVEEGKIPPGSVLLVENLDRLSREQILDALNQFTSIIKAGIKIVTLQDGMEYDQESINQNWAQLIISITYMARAHDESETKSKRISAVWENKRSKAGNGGKKLTAKAPAWLKLSQDRTKFILIPEVAKAIELIFRKKLAGKGAERIARELNDDPNIWKPPKVGPKKTGGWRSSYINKILRSRAVIGEFQPHNLVDGKRQPIGDPIPDYFPPVIDKELFYQVQAQLQANAEKKGNAGGRTGKVSNLFTHVIKCGLCGYPMHFINKGKPPKGGKYLVCDASRRLKTCTAKPIRYEEFEQLFFDNFEELDISQLIPGEDETQARINELEKLLTVNRQRLLEIDSKVENFSDTIGRTKDSRIREQLEKKLSQAFDDKERLESENKKFEREITELRQQKAGLEKDIEQAKEIYQLLNSVQGEAERIELRLRLRQQIQKSIEWIKIYPLQEPYQEIQETEEPGIVKIMKSKYIDKVRIKFRGSRDLRVLYLKNHAELSE

SEQ ID NO: 19376 - protein, 647 aa, synthetic construct
MKPKLYSYVRFSSAKQRDGNSLERQQDTAARVAERYDLELDSTAYQDLGMSAFKGKNAYKGKLSEFIAQIGKKVPKGSWLVVENLDRISREDAWSALDIFKSLLKKGIIVVTGMDEKVYKYADVKNNPTDLIISLLMFTRAHDESLTKKNRVEAQARALIRHNLSRKPGTAAKAIESIGQNVWWVDTKSGNVDPHPIYFNTAQKIIELKQSGETLLGIQRYLNEHYPAPRKRVYKNQEGNVQPSKTEKWGKHLLRTFLNPTVHGQKVFTLDKRDESGAVIYDTETDEPLKETYIIPDYYPALMSEIDYLTLSQLDHHRAVTRSSSKHPEGNPEPEIPLLSGLGILFCGNCGSFMFKSGSSKNKYRYICGSKIVQGKPCGKKGFTSYQLEHAVLQLIADHVWTNHQEDKTAWYELEIAKESERIEKLLKLAILTDEIDALAEQINDHKKIKTQLENEFKQYKISRSETQISGWEQFKNFDVHDTKNPDRKRIRLRVKQAIKRIDCYDINDRYGHFLLIFADDKKQKIVIKFNRNRSAGTTYVDSKTIKNHELIKMQGLVLHSFIDELIDPEGFALQVKKNHEASILNPTFITELEDDLHQHSEDKIATYVVMSNGDSKTTVTVDGVKYEINSLEDIDKFEVAEKPISN

SEQ ID NO: 19377 - protein, 564 aa, synthetic construct
MFDGLRALVGARVSRKRKDDKGDAKVSHIAQHATGHRWTERHGAIVVDEFEDLDVSADKVSPFDRPDLAPWLEEDLATEWDVMVFSKIDRAFRSTVDCVKFGQWMKKHKKILVFADDGLTLNYLNPKSQLEEMMAELFLYIGAFFAQLEVNQFKDRAVSAHATLRLTPRFAGGTPRDGYKNVPAPDGEGSVLVIDEIRQLVMYQAARWFLKGDEAQVRGGETVIDIMHELNADGVEDFEGDSFNGVAGRLNEAAVETSGDYHREPEDKRKTKWSAGQVIDMLTSPGTQGIKMYIEKDEEGKKRKKNARPVLDKDGNRIQWAAPVFDAITWHRIQAKADERKYGPKSRVNNVNPLLDVVYCGLCEHKGTQKVQKRVSVGDDGEQFVREYRYYNCANPHSSCEGVNSRAEDVETLLEQTFLEECGHLPVTRRQFDPGYDATVELGQVQVQIQTLRDDRDAGLFKGADDELDYRRRMKGLVERRANLEAQPQRKASWNYVATDELYGAAWSKADQLKRRKMLVDAGVRFVLHGKQNWEVQIPDDIETRLKKAAAEDAKKPDPAASSW

SEQ ID NO: 19378 - protein, 527 aa, synthetic construct
MKIAIYSRKSKFTGKGESIENQIQMCKEYARNHFEAREFSIYEDEGFSGGNIDRPEFKRLVKDAEKKKYDVLICYRLDRISRNVSDFSNTLELLQKNNIAFVSIKEQFDTSTPMGRAMLYIASVFAQLERETIAERIRDNMHQLARTGRWLGGIYPTGFTSEPIIYIDQNMKERKLFKLIPVEEELEIIKTIFQKYLELQSLQKLETYCLINKIKTKNGNDFQKQSLKQILHNPVYAIADEDIYAYLKTNDADICNAKEEFSGKYAVIGYNKRDLKNTRMGRYNEKSDWIVAIGKHKGVIPGRDWVKVQQIFEQNKDKAPRAGTSAAALLSGLIRCSCGSFMRVLFGPKKPNSEERYHYYVCNKKVISKGVICDSKRLNGMKTDKEVIEKIESIITSTTFDQLESMKKKNKDKDLQNKLIVEKIDKNKKSIENLVRQIAGKEDSFAAEYLMAEVEKLAKENKTLEGNLVEDDSDRVNFNIDLFKEALLEFKSKIHIVDFQEQRILLKTIVNYVEWDDKELKVQILKF

SEQ ID NO: 19379 - protein, 534 aa, synthetic construct
MAKAVILKPTEYKQFNGRSKNEIKRVAAYCRVSTNHEEQLNSYQAQVSHYTALIQNNPEWELVDVFADEGISGTNSKKRPEFQRMIAEAKAGKIDLILTKSISRFARNTEDVLKYARMLKGIGVAIEFERERINTLEASGEVMMTIFSSLAQEESRSISENSRWGIVKGFKDGKVFCNTTRFLGYDKDENGNLVINKEEAEIVKRIYQEYLEGKSYQAIANGLEKDKIPTVTGNKKWWDSTITTILTNEKYYGALLQQKTVTVDFLTHKRVKNQGFADQYFIEDNHEAIIPKEMWDKVQEEKERRALLKNNVKGDRGKYSSKYPFSGRVICGDCGNTFRRRTWNSNNQSKKIVWQCKTYIQQGKDACDMKAVDEQVLKDAFVKIFNQMQENKEGFTKTLLENIEKVFKKRAKGDEIEKIGEKIEDIKNELKALVKLQTSGQMDGEVYNEEYIRISQELEDLRKEKAKFERANEAEEEYRDRVREIIEILDSMDGLLEEFNDEIFNALVEKIEILKPRHFVFVLKSGVRVEENIL

SEQ ID NO: 19380 - protein, 558 aa, synthetic construct
MKKRCYIYTRVSTASQVDGYSLDAQREKLEEYAKLTDMVIVKEYSDEGKSGKNVEDRDDFKQMMKDIEDQKDNIDFVLVFKLSRFGRNTADILASVQKMQDYGVNLFSWDEKIDSSIDSGKLMISVLSAVSEIERDNILLQTMAGRKQKAREGKWNGGFAPYGYLLKEGELLIAEDEVEVIKVIYEQFTTTNKGINAVASYLNNNGYKKKKRQNGTLDAFSASFVKAVLDNPVYCGKIAYGRRRNEKIQGKRNQFHIVKQKEFPVYDGIHEAIVSEEIWQAAQEKRKTTGFKHEKKYSLEHAHILSGILKCPNCGAPMYGNVNRKKKKDGTYYRDYFYYACKHRRSVSGHKCNYSKQWSQDLVDDAVAEIITKLVHNEKFENAIKDKINSKIDTAQLEENLETLKKSYRQENTAKNKLAQQIDGLDVMDSSYERKYKDMQERLNKFYERIDSIEIEMEEVKTRIQNVKLDRLNSDGIYNILKMFDQFYDEFTDFEKQEFIKSFVEKIEIYPEELEDGRILKNIKFRFPVFFNGSEVSEISWDKESTVECVVRIYKEEK

SEQ ID NO: 19381 - protein, 531 aa, synthetic construct
MASHSSWEIHPDLAAALASGKTVEEWLDGRTPVVSYARISVDLQKVKAIGVARQHGMHCDPAAKEQGWAVVYRYTDNDLTAADPDVQRPAFLQMVRDLRARQTAEGIAIRGILAVEEERVVRLPEDYLKLYRALTVEEDAVLYYTDKRQLVDVYAEVEQTRGLMSSSMGETEVRKVKRRAKRSTKDRAAEGKYTGGARRFGWLGADKDLGRTQNEKLDPDESVWLRNMIDMKLCGKGWHTIAVWLISESIATVRGGEWTSTGVKSLLTNPAICGYRILNGELVLDPGTGEPKVGNWETIATPEEWHQICEMAWPGGKLAKTKKPKGTKRARKHLSTGILRCGWIPKSGPKEDMCLHSMVGRPPHGNHKWGNYVCNGTDCRKVSRRMDKIDRIVEGIVVRTLKDQFATLAPEEKTWHGQHTLERLTARRQELKAAYKAEHISMADYLEFIDPLDAQIKESQADRDAFYAEQAAKNFLAGFTEERWHDFDLEQKQTAIGTVLQAVIVHPLPEGRSRKAPFDPSLIEIVFKNPH

SEQ ID NO: 19382 - protein, 478 aa, synthetic construct
MGKTITVIPAKSRQSEDQTSVSKKRVAAYCRVSTDHAEQLSSYEAQVKYYTDHIENHPEYDLAGIYADEGISGTSTKKREQFNKMIEDCHQGKIDRIITKSISRFARNTLDCLNYVRQLKDLGVGIIFEKENIDTLDAKGEVLLSILSSLAQDESRSISENASWGIRRRFESGQAQINHARFLGYEKNTDGELTIVPSEAETVKRIYHDFLDGKGAVQIAEELKEEGIPGWNGESKWRASTIERMLENEEYKGDVLMQKTYTVDFLTRKRMKNEGELPMYLIEDNHPAIIERDTWEAVQLEKQRRIAFVEETGSKKMTFNGDDYVFFGKVICGHCGSAFGRRTWHANDPNARRHVWLCKNRYVKGEKRCRVKNHHVNDLDLAPAFMQALKELLNQNNIKKWTEAKEQADPLLNYKLDQFIELARSQQGLSDYQPELVRRFLERVVIEDKQTLRFHFLDGAVVEMKANRYAEGWKNRIK

SEQ ID NO: 19383 - protein, 478 aa, synthetic construct
MGKTITVIPAKSRETEDQTTVHKKRVAAYCRVSTDHAEQLSSYEAQVKYYTDHIENHPEYDLAGIYADEGISGMSTKKREQFNKMIEDCHQGKIDRIITKSISRFARNTLDCLNYVRQLKDLGVGIIFEKENIDTLDAKGEVLLSILSSLAQDESRSISENASWGIRRRFESGQAQINHARFLGYEKNSDGELSIVPSEAETVKRIYHDFLDGKGSVQIAEELKEEGIPGWNGESKWRASTIERMLENEKYKGDVLMQKTYTVDFLTRKRMKNEGELPMYLIEDNHPAIIERDTWEAVQLEKQRRIAFVEETGSKKMTYNGDDYVFFGKVICGHCGSAFGRRTWHANDPNARRHVWLCKNRYVKGEKRCRVKNHHVNDLDLAPAFMEALNELLRQNNIKKWPQAKEQADPLVTYKLDQFIELARKQQGLSDYQPKLVRRFLERVVIEDKETLRFHFLDGSVVEMKANRYAKGWKNRMK

SEQ ID NO: 19384 - protein, 535 aa, synthetic construct
MDTLSVEKRVQRMDPLVPDTPKEPAKIRTAAYIRVSSLSDEQEGSLDNQKQHYTQLIRSNPEWRMVDLFIDQGKSGTSTVKRPAFNRMMRMARDGELDLILCKSVSRFARNVTDTIDAIRAFKELGVRLVFDKEGIDTADMTSEFILTLLAATAQEESRSTSDNITWAIKRQFEQGKAPYRRKLGYRKGEDGNWEVIEHEARLVRLAYEQAAKGYTAAQIARQFIMRKFKKINGRTDWSATTIRLILRNRDYTGDVICQKYYVDSYLTHQRKVNRGEREKIVLRGHHEPIIEKELFDTVQAVLDKRKKPNERREIVRYPLSSRMTCHCGGTLHRYECRNKVRWRCENQIKSKALCKQTSIEESLIKKVMKEAMMARFRSEKGTYPLGKMAKELSRAISARDVEYNQLRLNLERALLDESLVLFDTDLIGKPNYQEQLDERKQMREEIEQKLKQKEVWRSYLEADHVYREQAINVLETLKGMMEPNDRFYEHWNHTAFLRAWVTRIEILSPMSFRIVWFDGINTEIDLQNGVKWNE

SEQ ID NO: 19385 - protein, 546 aa, synthetic construct
MSDGKSRVRIIPATQKTNRFKDHEEGKKKRIAVYARVSTASEMQSNSYEIQVAHYTDYVNKNPDWELVQVYADEGITGTSTAKRTAFNQMIEDCENGLCDYIITKSISRFARNTLDCISRIRHLKSLNPPVGVFFEKEQLDTLDSRSELFLTILSSMAQEESRNVSENTKWGVQKRFQQGIVHFPTTYFLGYDKDKDGNIIIDEEQAVVVRRIFDDYLKGKGTPQIAKDLERDGIETARGNKHWTSNAVYDILRQEKYQGNTLTGKRVTVDYLTHKRVRNDNLETQYFVKNTNPPIIDSDTFERVQQEMKRRSMLRHDPERKYRQSYSNKSPFSNYLFCGKCGLPAHRRRLSTTVNKERTLFTAFHCRSSSGQREHEEYCGNQYVWEERMENSFIAILQDLKQNKAQVYEEVQEAIADVALSKDEQKRLDELNEQLGIVADRISELAGKSSGNQNSIYDATLRHLIYEQEILEQERDSYNESLQEKEYLESHLNRLYELLEEMKPEDPFDGDIFREVIDKGVIYPKRVVDFHFKCGIKRWVVVTKK

SEQ ID NO: 19386 - protein, 456 aa, synthetic construct
MIVAYVRQSTKKQQSISTQKELICKCAAKYNIDVDKINFYSDIGSGRNTNRTNYQRLIQEIKNNQVTTLLIYRISRIGRNLKNALDFVELLQNYQVKLVSVSDGYFDLSKAFDRMKLQLFLSFAENELENIRDNVSKAAREKARQGLLITTNAPFGYRYEDGNLFVHPEEGKTVKKIFQLYCDGYGYKAISKLISEDTRYISLTNVRVRNILLNKIYTGIVPSKYGEYQGHHQAIITQEIFKEAERIRLSKGIKRKPINTLLKRKIHCPYCNARLHSHKVKKNNRTYTMYVCRNHTVDYSGLNERCPFTSINADHIEDQVLYALKTFLKDTECAKRIEQAVNKVIRIHKKDQRKISQANAKLINELAEGKISAQEFQSNYVSDEGSVQASKNFSRQKLNNIVSTHVSFLKLKDINHIIEKVIIDKENNLTGLFITDYPLNIVPTKTETNQLHQAIG

SEQ ID NO: 19387 - protein, 470 aa, synthetic construct
MASTRALGYVRLSRDTEASTSPERQRKDIHRQIDARGWELVDVIEDIDQSATRKRLDRPGIHEMRRRISAGEADVVVVSRLDRMARSVSDISQLLDEGFVIVSATENFDASTATGRAMVQMAQVFAELEATAIGERVRSMRRHLPTVGRWPGGPPPYGFTTAPHPDTAGRTLVHHPEESKVIRRVVDEVMEGKGISEVTRGLNADRIPSRRGSHWSPPSLSRILRRGSLRGHATLGGDAVRDDRGLPVVVWPPLVTDDEWHALSRALSVNTKEPRFPEGGRVPLLQRLAICSSCGMPLTPRHFGHPTRSPLYMCQSRNRGRECEKPQTVTANPLEAEAERQFLDTWGDVEVIETISEEVVPEGLDNVLDAIAQTLESMGRPGADVMGLAARMVTLGEERDRLTALPTISAVQRRTGETYGEVWARGSVAERRKIMLGAGAFVTVYPAAARGHFDPERVAVSDELAGQLDD

SEQ ID NO: 19388 - protein, 650 aa, synthetic construct
MKKRLFSYIRFSSAKQMDGNSLERQQATAERIAARYDLELDTLSFHDLGVSAFRGKNATEGNLKVFINQIGKRVPVGSWLVVENLDRLSRDDALTALDILRDILRKGITVVTGMDDKIYTNASIKNNMMDLIMSVMLFTRAHEESVTKKNRVEAQVRSSILFNQNREPGTPARSIEAVGGNTWWSCTKNGIVEPHPVYYVVAQKIIELKWSGETPGNIQRYLNDHYPTPPKRSNKGDTRIQWGINLIRKFLNPTVYGRKEFVIDKRDSAGMVIYQSCLDDEGNEYYEPEKETLVIHDYYPALMTEADYYTLLSVDKRKAVTRKTNKHPEGNPNPQIPLLSGIGVLFCGVCGTFMSKATFRNKTVKYRYVCASANVHGKPCGNTGFTAYQFEHTLLQLIADHIWNNDQEDKTEWYKAELDKADQQIKKLVRFATLTDDDIDEIAQEINTVKRNRRDLETEFTSYKMNQHSVISSGWDEFRKFDITDDTNPERMQIRIRIKQAVKRIDFSAINKMLGLFIITYMDDKTQRIVIQHNRYQKPGCVYVDATTINDKQFMEHWGLILHSFIDVLIDPEGFARKIEAMHEFSRNNRTILSDLEDDERDPGPRIPPAPIQVSSTDSGKAYATIDGVKHEIHSTEHFEELLKENGMLG

SEQ ID NO: 19389 - protein, 539 aa, synthetic construct
MAQGDSESIKTQKAMLTQYAREHGFLVVETYVDDGWSGLNFDRPDFNRMLDDIEAGKIDVVITKDLSRLGRDHLKVGHFTEIYFPMKNVRYIAVNDCVDTANKNNDIAALKNVKNEFYSRDNSRKIRSSIRARAKAGLYRCSYAPFGYRKSSDNHNKLVVDGETAGIVRRIFELANAGMGAHKIASIFRDEKVPCPSWWQHTRGEKNYTERFKNPQNQYEWSHTIIRNMIGNPVYLGHSVMCKTEAIFKLGKYKKLPEEEWIRTDNTHEPLVSQEIFDGANAKILSRKRDTTNNFVSVFSGLVKCGTCGKALALRYWGRDRHRIYVCTTYAHNTKACTDHRIYYEDLYNAVLADIQYHARLAFENREKAVALAVKMNAKAEGNRGKNNETKLKQARKRYDEVTRLFDRLYEDSLSGRISNENFTRLIDKYQTEQGKLLEQIATLEDALQEVKDSKNNAVQWAELMAGYVGITELTAENLNLLVERIEVSGRTETEDGMQQTIKICYRFGGYIGEQTVKTKMIRKPRKKKDCLRKTVMAK

SEQ ID NO: 19390 - protein, 474 aa, synthetic construct
MRAAIYVRVSTLEQAEQGHSISEQISRLEKYCEAKEWTIVRTYTDPGYSGANTDRPALKSLINDVETGNIDIVVVYKLDRLSRSQKDTLYLIEDVFLKNKVEFVSMSENFDTSTPLGKAMIGILSVFAQLEREQIKERMAMGNIGRAKEGYWRGGSGVPIGYYFKNGELVIDEYEAMQIKEIFGLFIKGHTFCSIQKIMKQKYTNKYSSWNNAHTIAKIISNPTYIGKLRYKGKVYDGRHQPIIDEETFRLAQIRYEEVKRKMGHQQKSPYRGKHLLSGLMFCGNCGARYFTHSVVRKNGKTTRYYICYSRDGHGHMSKMKGCKNPNYKMEDLDNIIINEILKLSFDREAIEKIYNENRAVPEDKIEILNKRIKEIDKQVSKLMDLYQLDFMPLQDISARIELLQKEKENLSNEIKELTGKEPDITLDEARDILINASDVFKNGSMEEKRMFINSLIKKIIIYESEIKIYWKFC

SEQ ID NO: 19391 - protein, 528 aa, synthetic construct
MKLIYARQSVEKKDSISIESQIEKCITFCNYNGWDYKIFKDAGYSGKDLNRPGFMEMMEEIKAGNGDMVICYRLDRISRSIADFSNLIVEFENYNVKFVSVTENFDTSTPLGRAMVNIIMTFAQLERETIADRITDNYYSRTKLGRWGGGPAPYGYKLKKVSGPDGKRFTILEPDEYEAEIVRNIYNWYLEPDGSVGKIVNKLNELQIPSRGGSAGAAVWTSRVVSEILWRPLYAPNDIKIYNYFKNLNANIINNITEFDGLKSVNLYGKTEKNAGKHKRCRSIDKQYFIVSPHKPIVDSNTWLLVQAKKNEKKRQPARKGTGTTSVFTGLMKCGECGYSVSTVCDGKNYRGYICSTKKNRAKDLCSLPVISQRYADPIIFSDIAQHYSSDEVKQKIISAKQEYKASPSYLAKKNAIEMEITRIDAEIDNLLNSIAEGNTTVNKYINKKIETLDVHKSQLLSELNELELEERSSRNNIDGLEEIIDQISSLEETLNSGDFNKVKNMCRVLVKSITFHKDKSIEIEYYI

SEQ ID NO: 19392 - protein, 567 aa, synthetic construct
MSSAIQIKGDSFRRQAEASAKYAAEHDLDLIDDYKLADLGVSAFKSDNLTTGALGRFVAECEAGEIEAGSFLLIESLDRLSRDKILDAFSLFARILKTGVKIVTLSDGQVYDGSSDQVGSVYYAISVMIRSNDESKIKSTRGLANWSQKRKLAAEHGVKMSSQCPAWLRLSDDRKSYLIDKERTKVVRRIFESSASGKGANLITKELNRDKVPTFGRGALWAEAFVSKTLRNRAVLGEFQPGQYVNGKRQPAGDPIPNYFPPVIEEELFDIVQASLRGRLLAGGRRGEGQSNIFTHVAFCGYCGSKMRHRSKGSRVKGNPPHRYLTCFNRFNGPGCDCKPLPYAAFERSFLTFVRDVDLRGLLEGAKRKSEAKTIADRITVNEEKVRKADERIRDYLIKIEGAPDLAEIFMERIRELKAEKDDLVRSIEESNDALSKIKSDNVTDEELASLISTFQNPCGENRIRLADRIKSIIERIDVYPNGEIRKDDPAIDLVRASGDPDAEKIIAAMNAGSRLKDDPYFIVTFRNGAVQTVVPNPSNPDDIRVSVYAGEKTRRVEGSAYEYESD

SEQ ID NO: 19393 - protein, 484 aa, synthetic construct
MNPRIGAYNRISLDVQGEALGVARQQQDNAEQASRRSWQIVESYTDNNLSAYKRAVVRPAFEKLLADLESGYLDGFVAYDIDRLWRQPSDLERVIRIYEDKPSLVFATVQGDIDLSTSQGRTMARIMVALANKSSADSSRRVSRKIKQQAESGEPHWSRRPYGYTLDKTLDPIEAPVVRQMGEWFVQGFSYREIAWRLNEQGIRTRAGSLWDVGTIRQFMKAERFAAIRLHEGKMYDGNWPAIFTKEEWAEIQLVIDLRKLEYNGRPQSKKYMLTGILKCSCGGYLRGMTKRDAPGRPMRRTYQCPTSSETERRMDTCGGMCVDAGSLEHFIRESVLSRIETPELSDVVGTSSVDRERIAELRQESVEIKNRRDVLLDDYTDGTLNKDELKRTQERLSARKALIDTELDKLQRAQFNVSLNEGETAREAWMDRPDGWRRALVDLLINEITISKSSRKPFYDVDGKRTRFDKDRVQIEWKTDIDK

SEQ ID NO: 19394 - protein, 515 aa, synthetic construct
MKTAIYLRKSRADLEAEARGESETLAKHRTTLLKIAKEMNLNVLSVREEIVSGESLVKRPEMLALLEEIEDNKYDVVLCMDMDRLGRGGMKEQGIILETFKRSNTKIMTPRKTYDLNDEWDEEYSEFEAFMARKELKIITRRMQRGRVASVEAGNYLGTHAPFGYDIHRLNKRERTLTIIPEEASVVRMIFDWYANEDMGANAIRSKLNDLGYKSKLGNEWNPYSILDILKNNVYIGKVTWQKRKEVKRPDAVKRSCARQDKSEWIIADGKHEPIIPQSLFEQVQEKLNSRYHIPYNTNGIKNPLAGIIKCAKCGYSMVQRYPKNRKETMDCKHRGCENKSSYTELIEKRLLEALKEWYINYKADFEKHKQDDKLKETQVIQMNEAALRKLEKELVDVQKQKNNLHDLLERGVYTVDMFLERSNVVSDRITEITSTMKNLKKEIKTEIKKEKVKKDTIPQVEHVLDLYFKTDDPKKKNSLLKSVLEKAVYKKEKWQRLDDFELVLYPKLPQDGDI

SEQ ID NO: 19395 - protein, 595 aa, synthetic construct
MAHKKKFELNDNNLAIAYYRFSSHSQNEASIDQQRELAHAWADAHGFKIVKEYEDAAISGTTENRPGFQQMLSEVAKIRPRVLIMWKTDRLGRDKYVLAMAKRTIRDAGCEIRLLAENIPTDGPEGVLIEGLMDAMAEYYSRQLSQNIQRGMDYNAQHALYNGHKLFGYGVDKSTKRYIVDPDTAPFVQRMFAEYAEGKAMQTICDELNAQGLRTTRGAKFGVKTMNKMLQNRAYIGEYRHGDIVVEGGMPALVDEETFDKVQRKFAENKRKGSQRARGMDENDAPRYWLTGKVYCGKCGSTLQGVSGTSGTGRTYYYYYCSAQRRKQCTLKKVRKEKLEDAVTMILRSILHDSENLMSLAVDAAAYYEKNYRDTGYLDGLEAKRREVEKSLANLVKVIESGLISETVTERLVQLEEQKRALNEAIEAENIRAALCEDEHTIKAYFEKFLHADFDNPETRDQVLEYFVDKIYLTDDGLVVTSWYSEDRTEVTWDMLYGEDGNPFVKGEAVKFDCFPFGSTNQRQEPCRQHAGRAPLRCGHAAGSCARSARRPSIGRPHPARPGRPYFCFRNEKSKALLMSSKASFSSAATAMPSL

SEQ ID NO: 19396 - protein, 518 aa, synthetic construct
MRKAASKTPKAYSYVRFSTPEQQRGDSLRRQTEAAARWAAARGMELDNSSYQDLGVSAYAGDNAEVGMLGEFLGAVRDGTIEAGSYLLIESLDRLSRDKARRAVRLLGDLCDSGIAVVTLADGKEYTAEGLDNDPMGLMWALMVAMRANEESATKSRRVREAWGKKKEAAAAQRRPMTKRLPAWLTLSADRTTIGVDEDKANIVRRIFRDAIAGGGQHSIAQTLTAEGVDTFGDGRRKAPVWQRSYVKKLLESPAVIGTMIPHDTRKVRGKRVRDPLPPIPNYYPAIVSAADFARVNSARKGSNTPRVRASTGQVSNVLASLGKCPRCRATMTRVNKGRKGGTPYLVCVLAKAGGGCIYKQVRLESIEAAVREASGTFARDVPGRDDLLEEARRALEAKEHGIGDGIERLLEEIERGNASPALRKRLTDNEDQLTAVKDELEEVEEKIRQSGGKAIERRLARLVATLGNDRASITEINVALRETFRECVVNYFEGTLDFVWQHSDTPTEIRYAMPESV

SEQ ID NO: 19397 - protein, 543 aa, synthetic construct
MFHRATPSDQVIRCLGSVRLSLEGDHTTSPERQHDTLQRITGRDDRALIDVAEDLNVSGTTHPMEREGLGPWFRDLTPACKTSTCDHTPDAPCMGQWDAIVAWKMDRITRRAIHFHIVMDWMKTYGKAIITDDGIDTTTKSGQVMAEMMAMVASWEWQAIQERNMDATRKHRTLGYWKGGPVAYGWAAVRDPNRNGKYFLFFEEATIRWVELMVNLSWDGHSDGQIARLLEEKGAVAPAEWKERKRLIKAGLLTEEEAARRAPGQWHAGAVHAILTNRVLTGESWHDGRPVRNDEGEVVMRAQQLITKQRFEALQKKRASRSKLAGNAAASKGSMFLRDVAFCLSCNRPGYGVVGHRGADGHVDYKYLRCASANGTRKCHPEVKTVHMDEVKKLIQDYFLARVGDEPAMRREYHPGNDVGERLEEVNLLILDIRAEKDAGLYRYQGGQEDYLGRLKKLTDRKVSLEAQEAIKPHYEWVDTGKTYRESWEELSWVSRGDLLRECGVTAQFWPTGQTGNPVRMVLDFPDDMIDRLREYTSAAAAA

SEQ ID NO: 19398 - protein, 641 aa, synthetic construct
MSTATHETAPVEPTVSAPALTAVSYLRVSTREQAERGGTEEGFSIPAQREANQRKADELGARIVRQFVDAGESARSADRDGLQDMLAFIAATRVTFCIVHKLDRLARNRADDVKIHEALLAAGVTLVSATESIDQTPSGMLVHGIMSSIAEFYSRNLATEVSKGLTQKVAQGGTPGRAPIGYLNVRRTDDQGREIRTVDVDPERAPLIAWAFEQYAGGETSVTGLLCDLTARGLVSVPSPKRPSRPLGKNALYRMLTNPYYAGVIRYKGALHPGAHEPIVEPALFDQVQSLLKARNAHATRHVQHAHHLKGLLHCGTCGSRMLLDFATNTRGTTYAYFVCSGRAAKRTTCTRRAVPVQVAERLVEDSYANIAISEDDYRHLAAEVDAAFDERGAGRNQEFADLTVNRARLEAETDKLLAAHFADAIDLPTLKRHQDRIRAGLADIEQRLRAHDEQHIGGRAFLHDSLRLLTDAHDAYAHSDDGSRRLANQAFYTRLEITEDEQLRPRLAEPFATIVAEAAGGKEAKREHSTSSDVACSRKTLWGDLTGLEPLTSCMRSERFAYRPKEHLTRIEPPTSALGSGLSSSQYDHPLALPPHLVDEWSEAPCMAKLMPYLKGSTAMKIFQDRGIVPTVAIPRNPTL

SEQ ID NO: 19399 - protein, 565 aa, synthetic construct
MTRIALYARYSSESQRDSSIEDQFRICREQAKREGWKVVACYKDAGISGSSMILRPGIQMLLQDAQEGQFDLVLAEALDRVSRDQADVATLFKHLKFAGVPIITRAEGEITELHVGLKGTMNALFLKDLAAKTHRGLRGRVEDGKSGGGLCYGYKVVKKLDHRGELVRGDREIDVYEAEVVRRIFREFAAGIGPRTIAKTLNDEGFAGPAGKPWIDTTIRGHQKRGSGIVNNELYIGRLIWNRLRYVKDPSTGRRVSRVNPDSDRIVTEVPELRIVDDQLWQAVRARQSEIVEKYAKVTEAVREHHRKNKLNGARRPKSLLSGLIFCGCCGGRYSLRGAGRFACSSHIANKSCSNSRTIPREELENRVVAGLKDRMMSPEIAAEAMRTHAEETNRLNRERRSNGDTWRVELEKTGRELEKAINAILAGVPPLTLKEKIEKLETRKAELSALLADVPEDAPVLLPSASAIYAKKVAKLTETLNRPDGRAEAAEALRTLIEKIVLRPGPNRGEIEAMLYGELGTILNWVEPQAVGKTAKKNTPAENAAGVSVSVVAGTGFEPVTFRL

SEQ ID NO: 19400 - protein, 558 aa, synthetic construct
MRALIYSRFSSDKQRESSIEDQVRICRARCEAEGCEVVAEIGDEGISGSTPVSNRPAGAKLLADALAERFDVLVLEGLDRLARDQVEQERIVRRLEHRGIRIIGVSDGYDSKMGSRKIMRGVRGLINELYLDDLRHKTHRGQEGQFERGFIVGGKSYGYDIVRDAGGSRYQVNQEEARHVRWIFEKYAAGWSARRIAYALNEMRVPSPRGRLWAVSAIFGSAAKGSGLLSNELYVGRYIWNRSQWIKDPDTGKRQRVERPESEWHRAELPDLQIVDDETWLAVRARMDAPRLLGGRGKGQAPRTLFSGMLRCALCGAPVVSINSTQYGCINRKDRGPTVCPGVAVARDRLDTRLLALVRDELFSQAALGELEQLVRATIAERQKASSRASKATRERLAELDAEIGRLVDAIAKVGMSDSLQKRLMAAEAEKAKLAVIPSAVAPAALANVTDLMALIKRRILSIQEALRQGDTARARTVLADIFGPITLVRRDDAVYAEFATSAETMLLAASGKHSLVSTSGPRNQPHRCASVTPSTQTNPPSAGFLFLCRRAGPRHWP

SEQ ID NO: 19401 - protein, 585 aa, synthetic construct
MINFAENQFKDVVIYPRVSSDDQQERETIQSQIEFAIKYCELHGLNITDWYKDDGISGTIPLDERPEGKRLLEDAKAGKIKTVLIYNMKRLGRKARITLDAIYQLEEYGVTIKSMTEPFDTSTPMGRFVITLLAGQAEFDRDTLLETLWHGANRVARLGQWLGGIVPYGYQVIDKFLQINEEPLPGKEDLSEAAVIRLMYHLVGHEKWSTVQVADYFNSLKIPPSYVKDGRKIKKGKRKVNTAGVWTPGRIRNMIVSTTYKGIHVYGKRSKKDRELIKREVPAIVSEDQWNKAQQALRDNQIEAFRNQNRDNLLRSLIKCGSCGLTYHGASYAGSGRKPTAYYICGGKTVYRGPLQGKCQSKNIPAEWIDNMVWEECVRFILNPGDAIKEMNSGMEIRKSKVGEYLSEKEMVQKSIDDKQTERQDILSLYRLKMITALDVEKQLQEIMSETATLENRLHELDLLINAENDMSKDFKTAEELLYDLRMKIIAGNNAPSFSTRREIVKTLVHEIIVDTIPSPTGGRPKASVNVKYAFNKTVPADIAFAKGKNHTVVRAVITAVITPISAARAALHELLNTALEYQGP

SEQ ID NO: 19402 - protein, 522 aa, synthetic construct
MANVTIIPARRQVGNNVKQAEQPKLRVAAYCRVSTSSDEQETSYETQVSHYTEYIKSHPEWKLAGIFADDGISGTNTKKRDEFNHMIDECMAGNIDMVITKSISRFARNTLDCLKYIRLLKDKNIAVWFEKESINTMDAKGEVLITIMASLAQQESQSLSQNVKLGLQYRYQQGKVQVNHNRFLGYTKDENGNLIIDPAQAEVVRRIYREYLEGLSMKKIAEGLEKDGILTGAGKTKWYDSTINKILRNEKYMGDALLQKTVTTDFLTKKRVRNNGALPQYYVEDDHEAIIPKDIFMQVQAELVWRRKVHTGPNGQKRIYSGNNCFSQMVFCGECSELYRRVHWNNHGCKSIVWRCISRLEPSHAALNCTSRTVKEDLLQEVTVKAFNRILTDKDGFIRQMQENIAKAITAADTMSPDGIQARLDELQKELIRKANSKQDYDAIADEIFRLREQKSQAEADTFSREETRKRIIELQDFIGKQQTGITEFDESLVRKLIQQIIVYDDHFTIRFKSGLDVDIDE

SEQ ID NO: 19403 - protein, 519 aa, synthetic construct
MRKVTKIEQTSIKKNKSKKLKVAAYCRVSTDSDEQLESLETQKTHYENYITSRNDWQFAGVYYDEGISGTDKAHRPELKRLIQDCRAGKIDMIITKSISRFSRNTTDCLALVRKLLELNIPVWFEKENINTGSMESELFLSILSSMAADESLSISLNSKWSIKKRFENGTFKISYPPYGYNWDGETMTINPKQAEIVRRIFSEALSGKGIATIAAELNREQIPTKRGGHWSPSGIRGMLANEKYCGDCLYQKTWSDSAYKRHLNHGEQTQYLQQNHHEPIISRKDWEAAQKLISQRANEKNISKGNEKYQNRYAFSGRIICGECGAAFKRRINYTTDGSYAAWSCKTHLADKDRCSMLFIRDNDLKLAFTTMMNKLIFAHRLILKPYAESLKQNSTSQTLIRIQQLETKLAENADKRKTLTKLMAQGFIDQVIYSQQTSELLSQADGVRKQIDALKNTTSSETAALMQTKDLLHFVEKSKMLEAFDDRIFTRFVERIVIHSRHEAAFKLKCGLTLTERM

SEQ ID NO: 19404 - protein, 538 aa, synthetic construct
MAKNGARVYSYLRFSDPRQATGSSADRQLQYAQRWAAEKGLALDESLSLRDEGLSAYHQRHVKQGALGVFLQAVEDGRIADGSVLVVEGLDRLSRAEPIQAQAQLAQIINAGITVVTASDGREYNRAGLKAQPMDLVYSLLVMIRAHEESDTKSKRVKAAIRRQCEGWIAGTYRGVIRNGKDPQWLHWDGQGWQFIPDRVEGVRLVIDLFRQGYGSVRIIRELTERGLAVTAKGVTALQVYRLVRLPALVGAKVLELDGETYRLEGYYPSLMDAAEYADLELLINSRVRRKGKGEIPGLITGLGITYCGYCGTAVIGQNVMHRARPDGSLSDGHRRVICVGYSQNSGCPVGGSCSVVPIEKALMSYCADQMNLSSLLEERDQTQVIRARLAKAKTETSAIEQQLERVSEALLAAEGGAAPLTFVRKARELEEQHLSMQKEVAQAERELVAVSNRDQPALAEAWSSLASGVEALDFDSRMKVRHLVRETFERIVVYHHGMQAVGREGMLIDLLLVGKGGQPRLLRIDRKTGEWQVGFGV

SEQ ID NO: 19405 - protein, 529 aa, synthetic construct
MRKVYSYMRFSRPEQAKGSSIDRQSQYAEQYALEHGLELDKSLTMMDKGLSAFHGVHKTKGAFGQFLSAVTAGKVPSGSVLVVESLDRLSREDPLIAQAALTDLILAGITVVTAADNQVYSREEIQQNPFKLIMSLVVMIRANEESETKQRRSNAFLKSALNQYQTNGKIRRLGADPSWLDFNKEDGTYSFNARVDVIRRILSLYNQGIGSLKIARQLTEESIPTLSGKRNAWGQTTVANIVKSHALYGMKRINVQGVDYDLEDFYPALITKSKWLALQQHRSKRSKTMHGRGEVVHLITGHGKGFTTCGYCGGGLGAQTQKQYKRSGEYSRTVTRLHCLTHKETSSCCSSVFLEPIESAVLFAACIGVEPQSLVPTVNNVNYSALIDEIDNKVKHIVEQVTAGAPWELFKDAHDRLKLEKQKLIKERDSQKPDVNQSDVKKWVNKLLELADKARANDKEARLKCRTLINSICKSIVIKLRGHDLKSEPVVAITFVTDEQFEFKVSKNGAVQFVDNGMAVNRRLKPLLA

SEQ ID NO: 19406 - protein, 696 aa, synthetic construct
MNTKITSDHLGRAAIVYVRQSTMAQVTGNLESQRRQYDLAGAAATTGFASVTVIDDDLGRSGSGSVERPGFERLVALVCSGNVGAVYCIEASRLARNGRDWHHLIDLCALTGTLVIDPDGAFDPRLVNDRLLLGLKGTMSEYELSLIRQRGIAARDSKAGRGEFRFMLPPGFCWSEAGKIEIDPDEHVAEAIRLVFDKFRELGSGRQVFLWLRSADIKMPVVLRNVEVRKLVWKAPAYHSVMQILHNPLYAGAYVFGRRAQRTLIIDGRARKANGLRKPRDEWSVLLRDNHQGYITWREYEENQKLLTENAHMKRNCDRKSARGGRALLTGLIRCGRCGRMMRVFYGGAKGNAHRYQCRGDDARVGLGLCIGIGGVRVDRAVATQILEAVSDRAVEAAIFASDQVERSARDVIAAIERDLEGARYEASLAGRRYELVDPAKRHVARELEARWNDALERVSMLERKIEELSALSTARPAIDRGRLLQLAHDLPTAWNAPSTDTRTKQRLIHILVQEIICDLDDTTNQAVLLIHWTGGRHTEVRVARVKTGRYPSDMAPPAVEALRKLGGHWPDRELAVSLNRMLCKTGDGEGWTAVRVRDMRERLGIPEYDPTKAGSPVISLMKAAERLGICIGSAKSLVKKGILPATQILPGSQWMVPIEALTSEAVLIGVQGVVGRRPKIYEDYQYDKVVRLPGL

SEQ ID NO: 19407 - protein, 511 aa, synthetic construct
MVIDKIKCGIYARVSTDRQGDSIENQVDQAREYIRRLGDEYDSDDITVYPDEAVSGYYTSVFDRAEMKKAITDAREGRIQLLVFKEVSRVGRDKQENPAIIGMFEQYGVRVIAINDNYDSLNKDNITFDILSVLSEQESKKISVRVSSARKQKAARGQWNGEPPFGYRVNPETKKLVIHEELGKIPPLVFDLYVNKGMGTFKIAEYLNKKGVLTKNGKLWSRETVNRLIRNPAYIGQVAYGTRRNVLKREYDERGAMTKKKIQIKMNRSEWQIVEDAHPALVDKEMFYKAQKILASRTHERGIKRAHHPLTGILVCGICGVGMVCQKRTHGNKEYRYYICKTYHKYGRDSCPQANINADELEAAILSDVRDKLGSLPKHSLLLTANREEDVNNLRKEIKAVNIKRDKLIKDQKDIFNQRELFTEELYRSQMIELKNKIAALDDELVLIENQIKGIEEKITEASSLQYIIEEFNEVKVDDTQRLRVLLHDIISKITIKGEHSVIEYIYDFSS

SEQ ID NO: 19408 - protein, 533 aa, synthetic construct
MVCQPSHNLSDTSVMLSRYEGGHHDKKAIAYVRFSNASQQYGDSLRRQNALISEWLSQHPDYELDDTTYQDLGLSAYSGMNATRGALYDFLDAVEHGYIAAGTVLLVESLDRLSREKISDATERLRSILRSGVEVVTLCDHTHYCIDSLDDPYILIKAILIAQRANEESETKSRRMRAAWQKKREDAAATGKLITRSCPRWLTVSPDGEKFELIEEHARTINVIFRLRLKGSSLNGITKTLNERGVPTLTGEIGRWNPSTIESLLGNKALTGTFTPSYQTMAKGVSEISGYFPQVVPDKLFHDVQSVRLARFGNPGVSDNPYLINIFRSLMYCGTCGHSIILTSVDKKGRGYYACPMRRLKRCNEPAIRRDHVDAALVDVLLCSMDMLQANGTVVGTASRLESRLVELNMSINRLIAALQIAPDVPELAMKVRELSKELRAGELKLRALRSRGVAGSREWIAALNLADRRNRERCRDYAARHIDRLFLHSAEGRCDVHLLNGLKLINFPLKKKLPVSSFISSLAYLCGDTLIL

SEQ ID NO: 19409 - protein, 509 aa, synthetic construct
MKRIAIYSRKSKETDTGESIKNQIQMCKEYFLRKNEDCIFETFIDEGFSGGNTNRPEFQRMIFLAKHKSFDIIACYKIDRIGRNTKEFLTTFDELEQLNVSLVSITEGFDPDTPAGRMMMTMIAGFAEMERMSIAQRVKDNMNSLAKLGRWSGGTPPTGYKSVKLENGDKTAMYLELLPGDRERLIKIFKSAAEGYSCRYIGKLFDMPAKTILNIINNPTYCKSNILSKKYLESLGFEVYGELNDLGYLSYNRRPKDKKGKKKFNANGMLVAVSKHEAPINSELWIKANQQIKQRGDEANPRISQYSFLAHKVKCACGSGMYLNPGYLKKNGTRTCYFCCSRKKYDKTLCNNGQINVTYLESDILEILSIMSKDKKILEKYINSKSNNTNLNEEIKLLKKEIKHYDEQLDNLSENLSKLKGSAANKIIDNMNSISEKIDKLNEELLILERKNIFNSIDNINIDILQKDIKALLKNWSELSLDIKQVKINNLIKEIQWDGDKKFKIIFNI

SEQ ID NO: 19410 - protein, 543 aa, synthetic construct
MTRSATKRRGRKTTRTLDDLDTVRVGIYVRRSTDDEHQPYSIQAQDNRLESYVDSQPDWRLVKRFHDDASGATTDRPGLQRALGAARAGLIDVLLVYRVDRFSRNLSDMVTLLDELEECGVVFRSATEPFDTATPMGRMLVQMLGMFAQFERATIIDRVINGMERKHANGKWKGGKRPFGYQVDKTTDTLVPDESETVIVRLIFDLYTRDRLGTRSIAKVLNDRGHRTTTGGRWSGHQVLRALNNRVYLGELSFRETTKTGTHPVLITTETWEKAQTILEARGESHAHRASSGSDYVLTGRLRCPKCGKPMIGTRATGRNKTYRYYTCWNLARYDATKCDAKRLNADAVDAAILDALADFYRTRHDLITDAITAQQAQHRATHADRRAELTTVHAQITNTDQAIERYLTAFENGTMDEDLVADRLTGLRARIKELRAHRDHLVADLDDGPTAPDPATLAEVADHIGDVIADGSHNHTKTLIEALIATVTITGPNTLKPVFRIPQPRADEVATAQPAETAPKETVRTMTTSVGRAGLEPAAKGL

SEQ ID NO: 19411 - protein, 624 aa, synthetic construct
MDQPLNAQNSNTKALIHSAQETEEETGSAIPSAYLDSFDMSLNEAARAAALTAQPQGTSPAGARAVIYLRVSSAGQVKTDYDPEGISIPAQRVACQRKAEQLGLTVIDEYIEPGKSATEMTKRVAFQQMLTRVRTLRDVDYVIVYKLSRMARNRLDDAIVMADLRKRGVTLISATESIDDSPVGQLMHGILATFNEYQSRESGADIAYKMSQKAKNGGTLGRAPLGYINVFDRFEGREIRTVVIDPERAPLIKVAFELYAAGQYTLADLADELFDRGLRTRPTARYPAKQVSVSKLSDMLRDRYYIGYITYKGDEFKGRHEPLISEDLFERVQEIIEARAIAGERRRVHHHYLKGSLFCERCRQAGITQRLILQRTVNARGTEYLYFFCRNRQNGSCRAPHVNIIHIEDAVERHYARVRFSPTFIADIRTHIAETIGKEEAAARLLHQQLTTQLRALDTGEENLLELAADGTLPQAKIKAKLRDIERQRQHLKERLTEAGQDHSEGARLIDVCLRLLENPQELYRRCDDDQRRLLNQAIFHGLYVDEDQVADHDLQEPFARLHAVQVARQQPGAQNNSRSLPHKGKGPTLDTIEVLLGGVDSAPCSSKPSMVGDTGFEPVTSSV

SEQ ID NO: 19412 - protein, 524 aa, synthetic construct
MKYCIYLRKSRSDIEAELKGEGETLERHKKTLLELAKKNNLCITEVYSEIVSGETIAARPVMQKLLQEVEQGAWDGVLVMEVERLARGDTIDQGIVSQAFKYSNTKIITPLKVYDPLNEFDEEYFEFGLFMSRREYKVTNRRLQRGRITSVKEGKYVGNKAPYGYIRKKLYKDKGYTLEINPDEAEIVKIIFRLFIYGENDKKLGISLIAKKLNELKIPPQQKDVWTYSTIKNILTNPVYIGKIRWNSRPQVKKVVDGKIVKERPRAKIEDWILSDGLHDPIIQEEDYYKAQSMFNTNSPKCPKKYPVKNPLSGLIICGFCGRNMVRRPHPNGPDTLMCPIPACGNVSSILSLVETKLIQSLELWFANYKFETSKSINDISNSYGQDIYRLKKDALKKIEIEIVSTEKQINSIHDFLEKGIYDLDTFLNRSNVLSEKLNELTTQKSKIIKDISTMNQQSESTLIIIPKIRKVIDMYKATEDPELKNQLLKQLVSKATYTKKKPTRWHGDPTDFELVLYPKLPKD

SEQ ID NO: 19413 - protein, 534 aa, synthetic construct
MKVKVGAYCRVSTEKDDQVNSLQSQKKYFEEYIRNRPDWEFVDIYADEGISGTQAENRMEFQRMISDAKYKRLDLILTKEISRFARNTKISIDYTRMLKELGVGVIFINDNINTLDGDGELRLTIMSAIAQDESRKTSERVKWGQKRRMEQGVVFGRELFGYNLYKGVLTVNEEEAEIVRLIFHKYTIEGKGTHVIARELYEDNIQSKRYKNRWSNTVILRLLKNEKYVGDLAQKKTITPNYLNHKKKYNRGEEEIIYIKNHHTPIISRELWDATQEQISQRSASKEQKSKYSNKYWCSGKLICGECGSKFVGRSKKLKNGEVYKAWRCNQAKSYGSLKIDVNGNQVGCNNKSINHIVLSKIVKTVLYSINSNKEKIISELVSEIKKLNKLTDIKSTDSFTRKIEDLNRKKQEVINLMIEGSISKDDMVLMNKRYDFEINKAKTEIKNIEEINLINSRNADKLQLYIDRINSLVNRIEEKDSEEVFKLTVKKVILYKNNIMELYLTCMPEPIKLKYKSKGKNGNYSVEYSFIDN

SEQ ID NO: 19414 - protein, 548 aa, synthetic construct
MAAKARVYSYLRFSDPKQAAGGSIDRQLEYAARWAADHELELDSSLSLRDEGLSAYHQRHVRQGALGVFLRAVEDGQVPAGSVLVVEGLDRLSRAEPLQAQAQLAQIVNAGITVVTASDGREYNRERLKAQPMDLVYSLLVMIRAHEESDTKSKRVKAAIRRQCHGWIAGTWRAPIRVGKDPHWVQEAEAGGFDLVDDRASAVRLVIEMFKRGHGAVRIIRELAARGLQISQSGRTQASHLYKLLANRMLIGEKSVEIDGEAFRLEGYYPALLTAAEFADLRYLAEQRGRRKGKGEIPGVVTGLGITYCGYCGAAIVAQNLMGRRRAADGRPYPGHRRLHCVTYSKGDGCKVSGSCSVVPVERALMLYCSDQINLTRLLEGDSGTASVAAQLASARQRVAELEAQVQRVTDVLLLDDGEAPAAVLRRVRELEIQLTNERRDVESFEHHLAASVSNVAPAAADAWRDLVSGVEQLDYDTRMTARQLVADTFSKIVVYQSGFCLEQNRGNIGLLLVAKRGTTRMLLVDRKTGEWRGAEDVQLDDIKPSAI

SEQ ID NO: 19415 - protein, 499 aa, synthetic construct
MTLDATLTLKDEGLSAYHQRHVKQGALGVFLRAIEDGRITNGSVLVVEGLDRLSRAEPIQAQAQLAQIINAGITVVTASDGREYNRAGLKAQPMDLVYSLLVMIRAHEESDTKSKRVKAAIRRQCEGWMAGSYRGLIRNGKDPQWLRLAPEGWELLPERVAAVKRALELYSQGLGAGRAANVMHDEGFKLTEWGISGLQIYRMIKQPALRGVKRLSVDGEDYELEEYYPRILSDTEWAELQHLASQRFRRRGAGEIPGIITGVGLAYCGYCGTAVVAQNIMNRRRADGTIADGHRRLHCTSYSKNGGCTYGGSCSVVPVERAVLSFCSDQINLTRLMQAGDAGQTLQKQLVVARAAVTKITTQLSKVTDALLADESGAAPLAFVRKARELEAQQTAAEQKVAQLEHEAIATSGSVRPAQAERWVELAAEVEAGDYGAREKVRQLVMDTFNRIVIYMRGMQTDGRNGPFIDVQLFSRSGQHRLLRINRKNGAWVASEDWE

SEQ ID NO: 19416 - protein, 522 aa, synthetic construct
MKRAIIYVRVSTARQADEGISIDAQTDQCKKKAKELGASVLQIFRDEGVTGTSAMKRQAFQRAIHYCAVNDVDYFIVWSTSRFARNKLDAASYKLLLRESGTRLVYASMNIDSDTDEGWFTDSIMEIMDEQVSRQISRDTRRAMLKNAEEGWFNGGRAPFGYQITSQGKRRKLVPNDAEKTLVQEAFRRFAAGEGAIAIARSFTGRGYTRRGAEWQAASLSHMLKNRVYIGQTVYNKRSGNKPNPPEEWIIRQTHEPLVSEKDFEAVQKRYRPDYKQTGSPSSRFLFTGLLRCGHCGKAMSIETATSKTKRRYNYYNCSGFKKGCNCISRRISAEKLDDYLLNIVVDKLLTQEVVSDFIGEAYRKYVEKRTNNAEQRKLLQQELTELRRRRNTLFELVESGLSGSDSRSLLERVAGYDEREQTLLIELDKLAGAPDVDAIPEIDVDSALRTLKTILLNTANEKKLRILLQSFIRKIDINPTEVVIHYNPERIINDSIGVHSTESWHAQGESNPRYRRERAMS

SEQ ID NO: 19417 - protein, 547 aa, synthetic construct
MKLLVTYIRWSTKEQDSGDSLRRQTNLIDAFYSKHKNDYYLLPAHRYVDKGKSGFHQQHKAQGSDFRRMFENVMSGAIPEGSLIVVENFDRFSRADIDTAIDDVRQILRKGVSILTLGDGELYDKSALTDPVKLIKHIIIAERAHQESLVKQKRIAQVWNHKTQLARELKKPMGKQAPGWLELSEDGSHYIVDEDKASLVNIIYDKRLSGMSMFAICKWLNEQGYPTINQRKVRISKTKKPDGNWSALSVKHILTSRSVLGYLPAKISTEDRKTVLREEIEGFYPQIVTDSKFYAVQQLLEETGKGKTSSGEHWLYVNILKGIIRCKCGLVMTPTGIRKPVYQGTYRCNGNKESRCNYGTVSRKLLDTQLCSRLFSKLSQLHDEATDTAKLDELQRRLNTVDSELEKLTETLIQLPNITQIQEALRVKQEEKDELIVQLSREKARVKSVSSLDLSGLDMESVEGRTEAQIIIKRLVKEIVVSGNEKLVDIYLHNGNMIRGFPLDGKDDHTLTLEEATDEMQSLDDMLIFGEPVTRIYPAGDMEEVDA

SEQ ID NO: 19418 - protein, 541 aa, synthetic construct
MQASQGLVYSYLRFSDPRQAAGNSADRQAEYAKSWAAARGLTLDESLSLRDEGLSAFHQRHIKQGALGVFLQAVDEARIPAGSVLVVEGLDRLSRAEPIQAQAQLAQIINAGITVVTASDGREYNREGLKAQPMDLVYSLLVMIRAHEESDTKSKRVKASIKRLCDGWVAGHYRGLIRNGSDPRWVRLVDGHWELIPERAEVVRFAIDKYREGYGADRAHALMQERGFDTSYLGISPQQIYRLIKLVPLKGAKQISVDGEDFLLKDYYPRLLSDVEFDELQLLRGQRSRRRGKGAIPGVVTGIGITYCGYCGTPMTAQNVMHKVRSDGTLSDGHRRIMCMSYMNKGGCDVGGSCSVAPVERAVMSFCSDQMNLLRLQQPVGPSGDLQQGVMISRKHVIDLEAQLGRITEALALGEGDGVLPITFLRKARDLEEQLTAAKAKLHQDERELAGIASRQRPADARVWLDLAAAVEAQEVEARDKLRQLMIDTFDRIVIYMRGVVPAGRRARYIDVLLISKAGQRRWLRVERKTGEWAAGVDRPD

SEQ ID NO: 19419 - protein, 531 aa, synthetic construct
MTSTNPLPRAFAEVFQGDDTINVYSYIRFSSKAQKLGFGEKRQLDQLTRFFEQYPQARQVEHYEDLGVSAFKGKNLKSGQLARFVERIKAKQILPNALLLVESFDRISRMGGYDALELIISIIQADCAIYTLFDNRLYSRRKRDSSVDISLIQNILERANDESRNKSERISDAKARNLLKGESGEIITKRCPFWISYVDGEFILNEHAEAVKRAAELCFEMGARATAQELNKMNLPKKYTESIVGKVLRQPAIYGSFIAMEWSESGKPIQVKKEIKGYYPAVISESEFYRVGAKLSERQDPKLAGRKVAEFKNILRGIVFCACGSGFRYHAQKREYVDLVCSASLAGRCTYASPGKGVRYRYARIEEIFLAYQSLIPFHRIIPKSKDIKSLENEKQELAGKILQQEKSLASNFDILTNASETAKKYILSKIEEVAHDLDQLKAKHNEISLKISSLHLASKSMLNVMEIYKLLLNEHGRMRVNNFLIGQNVRLTITPIKKKHFIMDIHLADEHIDRISVTPDGYTAENRPHL

SEQ ID NO: 19420 - protein, 590 aa, synthetic construct
MKVIQKIEPTKPKIAKRKRVAAYARVSVDKGRTMHSLSAQVSYYSKLIQKNPDWEYVGVYSDGGISGRTTESRNEFKRLIKDCKDGKVDIILTKSISRFARNTVDLLETVRDLRAINVEVRFEKENIHSLSGDGELMLSILASFAQEESRSISNNIKWSIQKRFKEGKHNGRFNIYGYRWVGQELIVEPSEAENIKLMYANYMNGLSAEFTAKQLTKMGVTAMKGGPFKATSVRQILKNITYTGNLLLQKEYTPDPITGKSRYNNGEMPQYFVENHHEAIIPMEEWQAVQDERLKRRKLGARANKSINTTCFTSKIKCGNCGKNFRRSGKRQGKNKELYHIWICRNKSEKGVKVCNARNIPEPALKKYATEVLGLEVFDEQIFIDSIEEIVASEGNMLQFKFYGGREVEVKWTSTARKDYWTPEVRRAWSERNKRKESRTWNGRTTEFTGFVVCGRCGANYRRQAVTSKTDGTVRRKWHCSNSAVACNEGKSRNCIYEEDLKVMVAEILGIPTFNEPTMDEKLSRISIIDTEVTFHFKDGHDEVRTFEIPKKKARTFSEEERARRRLVMKKRWEEKKRDEESNNDTSDNH

SEQ ID NO: 19421 - protein, 528 aa, synthetic construct
MPIAVPYSRFSSQRQSYGSSFHRQETLIVNWLARHPEYTRYERKFEDLGVSGSSGKHIEAGALGELLAAIEDGHFPAGTVILVEAMDRFSRLEPMDTLNHLRTIVKAGIDLVTLDDGQRYDAKSLKGNSLLYLAMKAQAAHEFAVRLSDFTVGSYEKRAIKAKLRESIKRRNPFWLTSEGELKEVEAAALEQVFTAFTNGAPLRALAIQYAQYFGNRQSLKHALRNPAAIGHWQRTVTVEVDGKKKRVDGELIKGVFKPAVSDELFFQVQKMLDDLADQPVTVARKFPLAGLLQCGDCGANMVLLRQNSRQQTDTVRCYRRMQSSDKCTNQKTIPVPVVAWFYEATRKPHAFKAYQRTKLPENKRQRIKLEGQIDQLKQQQARLRQLVLLDDGDKDALADYSKLVNERKTLEQELAALPVVADTATVGMVEFYGFLQSDPFAVSNLLQQDGYRIVCHSDGVLAVNKLASDEPALLAISYEGYSRKYKMWRVAVPEGSDIFVDRHATQQFPHHTVITTPQQWKEHIGDS

SEQ ID NO: 19422 - protein, 563 aa, synthetic construct
MSKVFSYIRFSSAKQSAGDSYARQVKAAKAFCDENGLEMADPREYLFFDKGRSAFKGKHLDDTGELARFLSYVEDSTIPPGSYLVVESLDRLSREKVRDALPRFLDLLAKGINVYTSVDKRLYTKDYNELDLIISIISMSRAHEESAVKGGRVSSAWREKQKAARTTGKPLGKLRPLWLDVTPDGYVLNPDKAAVVRRIFDLSTKGHGSRIIAATLNQEGIPAFSAGRKNFSGLWGFSTVRHILDSRTTLGEYQPHIFTDGKRTPDGDPIKDYFPSVVTEDEFYLAQAARTSRKTHSVTKATTNFNVLAGILNCYKCGSAMHLQGQRGRKYYKCSKTTRGLCDAGIISAPRTEQVFKEILTKVDSLSLVQDSSGSLQKSLQIVEGRIASLKARQDDAEASHAEFPSRITAKLLHELEADIGALESERTAIAEQLASDKVMSKHDFFEKLDLVSFEGRVAANNLIKRLGLFIFASKNGRTDETYWVSKNNAIPLPFSAETPNLLFYLMHRGKEIQFEAMYDEYVDLQLTQGDLNEVEAAFAKTESWDSLPPHMLAMWKARHIIK

SEQ ID NO: 19423 - protein, 508 aa, synthetic construct
MKKAIAYMRFSSPGQMSGDSLNRQRRLIAEWLKVNSDYYLDTITYEDLGLSAFKGKHAQSGAFSEFLDAIEHGYILPGTTLLVESLDRLSREKVGEAIERLKLILNHGIDVITLCDNTVYNIDSLNEPYSLIKAILIAQRANEESEIKSSRVKLSWKKKRQDALESGTIMTASCPRWLSLDDKRTGFVLDPDRVKTIELIFKLRMERRSLNAIAKYLNDHAVKNFSGKESAWGPSVIEKLLANKALIGICVPSYRARGKGISEIAGYYPRVISDDLFYAVQEIRLAPFGISNSSKNPMLINLLRTVMKCEACGNTMIVHAVSGSLHGYYVCPMRRLHRCDRPSIKRDLVDYNIINELLFNCSKIQPVENKKDANETLELKIIELQMKINNLIVALSVAPEVTAIAEKIRLLDKELRRASVSLKTLKSKGVNSFSDFYAIDLTSKNGRELCRTLAYKTFEKIIINTDNKTCDIYFMNGIVFKHYPLMKVISAQQAISALKYMVDGEVYF

SEQ ID NO: 19424 - protein, 529 aa, synthetic construct
MRKVYSYMRFSRPEQAKGTSIERQSHFAEQYAFEHGLELDKSLTMMDKGLSAFHGVHKTKGAFGQFLAAVTAGKVQSGSVLVVESLDRLSREDPLIAQSALSDLILSGITVVTAADNQVYSRDEIQQNPFKLIMSLVVMIRANEESETKQRRSNAFLKSALNQYQSNGKIRRLGSDPSWLDFDKHNDTYSFNERVEVIRRILNLYNQGIGSLKIARQLTEDSIPTLTGKRNAWGQTTVANIVKSHALYGMKRINVQGVDYDLEDFYPALITKSKWLALQQHRSKRSKTMHGRGEAVHLITGHGKGFTTCGYCGGGLGAQTQKQYKRSGEYSKTVTRLHCLTHKETSSCCSSVFLEPIESSVLFAACIGVEPQSLVPTVNNVNYSALIDEIDNKVKHIVEQVTAGAPWELFKDAHDKLKLEKQKLIKERDSQKPDVNQSDVQKWVNKLLELADKARANDKEARLKCRTLINSICKSIVIKLRGNDLKSEPVVTVTFVTDEQFEFKVSKNGAVQFVDNGMAVNRRLKPLMA

SEQ ID NO: 19425 - protein, 562 aa, synthetic construct
MDKIIYPYVRFSSEQQSGGSSYKRQMDDILKYAKENGYTVNNSLELKDLGLSAYTAKHIEKGSLGDFLDALDAGVIEADGSAYLCIEQIDRLSRQSIDEAYQVFRKILKANVNVITLMDKKTYTKDSLNDLMSIMYSSMLMGQANEESAKKSERILKSFDKKIDQLNNNEPIQYVGIFPGWIDNRGTKQKRDFIINKKAKIVQNVFKMYIEGTSMGDIARIFNEKGIEQVAKRRHKNFTNSWSSAKINHLLKNRCVLGELYIKKTGEVYKNYYPQIISIDDWDVVQSMTSTKKITKTSGRKSINIFTGKIFCSGCGQKYYFETDDKVTKKGRTLYYMLKCQGRRVLGCKSKSIKYDDFLSSTPNMFGMITKTKKDNSEEIKKIKQKISEISSETKEVEKNINTLESMNDNGSLDYETYLKESSKQRKKIRVNDTRIADFKANIARLSSDNKLSYFDKTDPVSIIKGKRFVNENFAGFVISSDSKACTALYLNGQVIHFVLKNSKIEKQENVKAVDGFGEFFELKQEILDAYGSGKMDGRFIEILRATNFWGVDTPEKDYSFE

SEQ ID NO: 19426 - protein, 547 aa, synthetic construct
MRTAYSYVRLSSKKQIQGYGQERQWEAIQAAALAHGWSLSEKTFSDLGVSGWKGANIETGALSQFLQCVEDGYIEKGSVLIVENVGRLSRAGVQRAVSLLMQLLASGISIYTFTDSKLYEPDSHNPLMDLMAWALSAQRAFEESERKSQMILNAKAKAREKARLTGEIITRRCPSWLRVNQDKTEFELIPERVETVRKIFDLYVNGYGTPRIGRLLTEEGRKPLTGRAWYPRSISRILQYRAVLGEYQPTLHGKPEGEAIKNYYPAIIDEDQFNEVQAVLKEGGAGKGRRGKEMRNYFAGLLRCSCGEGMHIVSSCVKGKRYYQLRCLQYRISCFDSPWNFYRLSSFVLFALRRLPILEVMGSQDNNNIKELNAKERELTFLLEDTRRQLDNTINAIAALGLNDQLQSKFRELKTSVTNIEKQLSNVKTELETSQGKLVIQKQDSEMLTGRFLELIDSTKDIDGRIKLNQVLRRYLSKIEMHADKKEEYRYIKIYRKDGDELVSIQCDHSLKGALFESKDGLETFELLPATDAKRNEISNTLLCTPK

SEQ ID NO: 19427 - protein, 481 aa, synthetic construct
MITTNKVAIYVRVSTTNQVEEGYSIDEQKDKLSSYCDIKDWNVYKVYTDGGFSGSNTDRPALESLIKDAKKRKFDTVLVYKLDRLSRSQKDTLHLIEDVFIKNGIEFLSLQENFDTSTPFGKAMIGLLSVFAQLEREQIKERMQLGKLGRAKSGKSMMWTKTSYGYDYHKETGTVTINPAQALTIKFIFESYLRGRSITKLRDDLNEKYPKHVPWSYRAVRTILDNPVYCGFNQYKGEIYPGNHEPIISKEEYDKTQSELKIRQRTAAENVNPRPFQAKYILSGIAQCGYCGAPLKIMLGVKRKDGSRLKKYECHQRHPRTLRGVTTYNDNKKCDSGFYYKDKLEAYVLKEISKLQDDADYLDNIFLGDNAETIDRESYKKQIEELSKKLSRLNDLYIDDRITLEELQSKSAEFISMRGTLETELENDPALRKNKRKADMRKLLNAEKVFSMDYENQKVLVRRLINKVKVTAEDIVINWKI

SEQ ID NO: 19428 - protein, 481 aa, synthetic construct
MITTNKVAIYVRVSTTNQVEEGYSIDEQKDKLSSYCDIKDWNVYKVYTDGGFSGSNTDRPALESLIKDAKKRKFDTVLVYKLDRLSRSQKDTLHLIEDVFIKNGIEFLSLQENFDTSTPFGKAMIGLLSVFAQLEREQIKERMQLGKLGRAKSGKSMMWAKTSYGYDYHKETGTVTINPAQALTIKFIFESYLRGRSITKLRDDLNEKYPKHVPWSYRAVRTILDNPVYCGFNQYKGEIYPGNHEPIISKEEYDKTQSELKIRQRTAAENVNPRPFQAKYILSGIAQCGYCGAPLKIMLGIKRKDGSRLKKYECHQRHPRTLRGVTTYNDNKKCDSGFYYKDKLEASVLKEISKLQDDADYLDKIFSGDNAETIDRESYKKQIEELSKKLSRLNDLYIDDRITLEELQSKSAEFISMRGTLETELENDPALRKNKRKADMRKLLNAEKVFSMDYENQKVLVRRLINKVKVTAEDIVINWKI

SEQ ID NO: 19429 - protein, 481 aa, synthetic construct
MITTNKVAIYVRVSTTNQVEERYSIDEQKDKLSSYCDIKDWNVYKVYTDGGFSGSNTDRPALESLIKDAKKRKFDTVLVYKLDRLSRSQKDTLHLIEDVFIKNGIEFLSLQENFDTSTPFGKAMIGLLSVFAQLEREQIKERMQLGKLGRAKSGKSMMWAKTSYGYDYHKETGTVTINPAQALTIKFIFESYLRGRSITKLRDDLNEKYPKHVPWSYRAVRTILDNPVYCGFNQYKGEIYPGNHEPIISKEEYDKTQSELKIRQRTAAENVNPRPFQAKYILSGIAQCGYCGAPLKIMLGVKRKDGSRLKKYECHQRHPRTLRGVTTYNDNKKCDSGFYYKDKLEASVLKEISKLQDDADYLDKIFSGDNAETIDRESYKKQIEELSKKLSRLNDLYIDDRITLEELQSKSAEFISMRGTLETELENDPALRKNKRKADMRKLLNAEKVFSMDYENQKVLVRRLINKVKVTAEDIVINWKI

SEQ ID NO: 19430 - protein, 451 aa, synthetic construct
MQRVAIYMRVSTDQQAKHGDSLREQQETLDEYIKRNKNLKVVDKYIDGGISGQKLNRDEFQRLLDDVKNDQIDLILFTKLDRWFRNLRHYLNTQEILEKHNVSWNAVSQQYYDTTTAYGRTFIAQVMSFAELEAQMTSERIKSVFSNKIQQGEVVSGKVPLGYKIENKRLVPTSDKDIVIDLFDYYVRVGSLRKTTTYLEEKHGIVRDYQSVRKLLTNEKYIGKLRNNTNYCEPIIDKDIFETVQLRLSQNVKTSGSHDYIFRGLVRCADCDGSMSCSTLKSKYIKKTDGEVSYYIRSCYRCTRRRNNPTRCKNKKTYYERALERYLLDNIQTNIAMHVRTLKKEVTKKDSVKRKKDALFVKIERLKKAYLNEIIELDEYKRDRELLENEIASLKEPKINKNIAPLKKVLSDDFFEKYEKASINQKNELWRSIIESIEVSVDGNITINFLP

SEQ ID NO: 19431 - protein, 482 aa, synthetic construct
MEEWLEANPDYLLDDLTYKDLGISAYHGTHATRGAFSDFMDAVEGGYIEYGTALLVESLDRLSREKIGEATERLKSILKAGIDVVTLSDHTHYTKDSLDDPYSLIKAILIAQRANEESEIKSRRMKSAWKKKREEAEKSGKIITRSCPRWLKVNKSENGFELIPEHAKTIIEIFRLRLKGYSINGIVKILNDKNVITLTGEIGVWNPSTIEKLLVNKAVIGVNVPSYRTIANGIKEIPDYFPRVISDKIFYASREYRKPPFGKDKHTDNPYLINIFRSIMKCKACGHSIILNSIDAKGMGYYVCPMRRLHRCNTLSIRRDIVDVNLVTTVVILADKFQASSTSRESTRSLQDRNIEILKNIDRLIEALQVAPEVTALATKIKALHKEFKSNEVTMRAIKNKQRLAISDDITKLDLTLKEDREKCRRFIFKTFKEIVIDTESKTCDISFSNGFKLINFPLLKSLNPELLISALAYADDATLIL

SEQ ID NO: 19432 - protein, 549 aa, synthetic construct
MTDDLVQRAHWGDLEGQNWAVLVRLSLEADDEELSATAPGRKQDRPASNGEKWRPATGRDIKSREEQEKDARRFVESRGGRYVYTYEEPDTSAWKRKRVRQPDGTVAYRVIRPVFEGALADLKRGMAPDGERLDGLIVYDIDRLTRDNRHLEDAIEVVENFRRPIIDITGTLDLLTDNGRTVARLLVTVANKSSADTARRVRRKHRAMQQAGIPTGSTRPFGYQDDKRTLEPKEAAAIRKAVERIITGASPRSIAADWNKQGIATTLGNTWSKGTVKQVLRNPRICGYRSKKVREFNPETGTESVRIETVLDDDGAPVKGQWTAIISVADWEAVTEAIGRNPEPGDSYNARKYLGTSVLRCDKNGCGSRLRAQKAPASRNKPEGFFYYTCPDKRSGFGCGGVRISGPDTDEALKMLVITKYEEEAQERAATAVPEAWDGEEELARIREDIADWTEQREQRTVSKERYFAFLAKAEASERRLVKERNEWRRRALRVKGEPVDLRRVWDDLDFVERHAYVEKTLLTVLVSPAVRPRGPVWNRLTPIYREED

SEQ ID NO: 19433 - protein, 407 aa, synthetic construct
MKQKKKRVCAYARVSTMTEKQQDSLENQQAYYAHYYSQQPDIDFVGIYYDQGISGNRVNRPGFRQMIADCKAGNIDMIHTKSISRFARNTELLLEVSRYLKAIQVDIFFEEQQLHTLSSEGEVMLTVLASYAEEELRNMSENQRWAFQKKFQRGELVINTKRFLGYDKDPDGELVINPKEAQIVKRIFSLYLSGMGGHTIAKLFNKEKVPTVDQKQWHSTTVLNILKNEKYKGDALLQKYYFAEINKKQRLNKGQVQQYLIRDNHEAIVSRDDWDAVQKRLQQFQEKHATANCLQRYPLSGLLKCEHCGSTLKRQKYYKSRVVWVCSKYIREGKEACIGMRVPDSVVQDWQVTKPTIVKEEIINGKKHYCYSSKENDSSGNREACPENPNGGLLSGVYRPRRTAIKL

SEQ ID NO: 19434 - protein, 436 aa, synthetic construct
MAAYCRVSTDQDEQLSSYENQVRYYREYINQNPLYELVGIYADEGISGTNTKRRTEFNHLISDCRQGKIDRIIVKSISRFSRNTLDCLKYVRELKELGIGVTFEKENIDSLDAKGEVLLTILSSLAQDESRSISENATWGIRKKFERGEVRVNTTKFMGYDKDENGKLIINPEQAETVKFIYQKFLEGFSPESIAKYLNENDIPGWTGKANWYPSAIQKMLQNEKYKGNALLQKTFTVNFLTKKRSANDGQVNQYYVEDSHEAIIDKETWELVQLELARRKAFREEHQLNFYIMQNKDNPFTSKVFCAECGSAFGRKNWTTSRGKRKVWQCNNRYKVKGLIGCQNNHIDEGTLEKAVVMAVKLLSENVDLLHGKWNKILEENRLLEKHYSVLLAKLINKDCWEYDSFEMCQVLDSILISEDGQITVRFLEGTEVDL

SEQ ID NO: 19435 - protein, 527 aa, synthetic construct
MARTVTAIPATRALHTGAPLGQTNPAQVAGYARVSTDHDDQVTSYEAQVDYYTRYISDHAGWQFVKVYTDEGITGTSTKHRAGFQQMVTDALDGKIDLIITKSVSRFARNTVDSLTTVRALKDKGVEVFFEKEGIWTFDAKGELLITIMSSLAQEEARSISENVTWGHRKRFADGKVTVPYSRFLGYDKGEDGSLVINPEQAKLVRRIYNMYLGGMSIGTIARTLTDEPETFTAAGNKTWYYRSIRAILTNEKYKGDALLQKSYVADYLTKRQVINQGEVPQYYVTASHEAIISPAVWDFVQAEIAKGARDQRTQHRTRPFSSTLECSQCGHFFGSKTWHAGSKYEKVIWRCGHKYAGQEKCAIGHISDQRLKDMFLEAIRLRFGSSTDTGVNQAVLDALDTSDLEVEAAGLLAQINEVAKKLQSMIAHNARVAQDQQTYEKAFNASHEQHQALLADHAAVLAEIQNKHNRLAAYRYYQQETSRLDVDQLAFSPYLCITLLDKGTVNIDGTVTFHFRDGSQIRIANE

SEQ ID NO: 19436 - protein, 527 aa, synthetic construct
MTRKTNHKAVIYCRVSTKRQAKEGNGLTSQETRCREYAHGRGHEVIEVFNDDVSGKLASRPGFDAMLRFIRKNRKAEIVVIIDDVSRMARDVRNHFDLKEMIYAAGASLESPSWEFGTDPDSIFHENLMASLAQHQRQKNGLQAKERMRARMLGGYYVHSAPLGFRYEKHPNGGSTLVRDEPVASVIAEALESYACGRLGSKAEVKRFLETHPQFPRTRHGHVTNEQANRILTYCVYAGYVESECWGVSLRKGYHDGLISLETFQRIQERLNGKPFAPVRSDIHADFPLRGVIACGDCSHPMTANWTKGRTASYPYYVCRHRGCERFGKSVKREIVEGAYEGLLTQLVPSKEMFDAFSTVFRKRWDEGGRKTKERRAAIKLEMAAAEKAISQLVERVMASQSQTVISRYEEEIEKLERKKLVLTEKTAKCGTALPGYDESFRTAFEFLANPCELWKNGTYEDKRIVLKLTLDANLEYDWNQGVRTPVLSLPFKALGVSRGDEMVLADRVGFEPTVSLHPRRFSRPVP

SEQ ID NO: 19437 - protein, 573 aa, synthetic construct
MQQQRGLPQAPAIYARISLDRTGQALGVQRQIEACRERCEALGWPEPKVYSDNDISARSGKRRPRFEQLLADVQAGYVDGLVAWHLDRVLRRVVDLERVLDAIEAQRSAIPVVFLQAGEIDLTTPSGRLLARILAAVAANEGDVKSARLSAQRAQAAQAGRAHGPLGYGYDDEQHIIPEEAGVIRDVARRLIEGDSLYSIAADLNERGVPTPGSGKWDARRVQRAAERDERQAVTAVIEGARSSSSLTPGALARLLRKAGGNAEVCSAAWVRDQLWVEHVTSHDHGLDDSTIARMLFAAGVPADRSYWRAANVRAMVRRGSLCGWREFSPGQRGGYGELISPGDWTPILSKEAIEDIRLVTDRPRTKRGREPKYLLAAILKCGKCGSSLAGSPTRNGGPFRYACSKQPGRPHTCGGLTIAGPQTDRIVSMAIIDAVAEAKVRSGTAQRRTANGAAARGAEETIAEISRLRKHYGLEFAAGRLHQEEWDAVREGWALRQREAERVLGTWAPNLHAVLSDVPKDRPDIEKWWESASVRRKREIVQVLVERIEIAPREKINNRFDDSRIGEPVWRI

SEQ ID NO: 19438 - protein, 519 aa, synthetic construct
MPRKPAKHPAKPKRGKKLEIEEPGVLYGRYSSHNQKDISVEQQFEKGYELAAEYGIRIIDTYADRAVSGRTDKRRDFQRMMTDAAKGKFRYVIAWKSNRMGRNMLEALINEARLQDLGVRVLYVEEDFDDTAAGRFAARSMMNVNQFYSENMAEDIKRGLYDNAANCMVANGHLPYGYKADETLHYAIDEPKAAVIREIFTRVSCGEAFVDIMASLNVRGIKTSYGRPWGRSSFQKILSNERYRGIYIYGDVRKEGGIPRIISDELYFKVQEVITTKKNPQGRHRVNGDYLLTGKLFCGHCKSPMTGVSGTGRSGNLHYYYVCQKRRTEKTCDKKNVRRDEIELQVAQAIKDYALKDDVIEWIADSTVAYNERKEAESKVGILEDQLAGTEHGKKNIMSAIEQGIITETTKSRLVELESERATIKANIAAARADIVTVSRDDIISGLEMFRDGDVHDKKYQARLFDTFLVAVYAYDDDLRLVFSFSGNKNTIQIPIESAVNAVENNEAECSFKLCSAPP

SEQ ID NO: 19439 - protein, 532 aa, synthetic construct
MIKLPPGNYCSYLRKSRADLEAEASGEEDTYKRHDRILLDLAKRYGVVIKETYREKPISGERISERPEMIRILEDVEEEKWDGVFTVEVERLARGDTMDQGLVAQAFKYSQTLIVTPMRIFDPNDPNDEEYFEFNLFMSRREFKTINRRLQGGRISAVEEGRYIGSVAPYGYIKYKLPVGKGFSLRPHPEQAPIVQLIFSLYTDPDPEKRMGTTSIAEYLNDELKVPTARDARWIEATLNDILRNPTYLGNVRWGSRPLVKKKNTKSRPRRSRKDSNEHKGLHVPLIDVETFELAWKIRESNSNSKGPKAQISNPLAGLVRCGMCGGPILYRPYGGKNPDALICTKKGCPNVSSYLYLVEERLVQSLGIWLDGLKSQLNTRQETQSNRQEDTKINALLSVQRELKKQLEEVKKQQNNIYDLLEQQVYTIEMFKERAKVIAERYEEVKKAFDETEAELAGLRRRVEAQYETIPKLEKCIDGYRMAKTPAEKNALLEQVIESVIYTKKVGGRWSGAIDQFDLKIIPRISPQKTP

SEQ ID NO: 19440 - protein, 668 aa, synthetic construct
MKKEYNTSIVGRLDRQEENMSIQANRKTALYCRLSRDDELQGESNSITNQKKILSQFAKQSGFFQCEFFIDDGYSGTNFDRPEFQNMITKVANGEIGTVIVKDLSRFGRNHLHVGIYTTEFFPKHNVRFIAINDNVDTFTTDMETDISIPIKNIINEIYAVDTSRKIKAVYRAKGMEGRHTGSHPLYGYKKDPDNKEKWIIDEEAAKVVKRIYSLVVSGFGPYQIADLLYKEKVYSPSYYMAMNGYGNRVNKEFDTPYRWWGTSVQCIVKREEYLGHTVNFKTIKPSFKDKRRYTNKKENWAIFENTHEAIIDKETWEIANSLLKTTRRQSRMGTVNPLTGKLFCGDCGEKLYNSRGINYKGTGHYKENVRYDNYVCSTYQKHRNECSAHYIRTEVVRQLILEALKDISKYIENNEEEFKNIVISARLEEREKSQKENIKKLKADKSRLAVIDRLFVKLYEDNIGGRINDETFNKIAMQYTEEQKTLNTEIVELEEVTEKLQSVSDNTEQFIKTIKSFTDFSILTTSMINQLIDKIVIYQKQKLKRYKFTQRIDIYFNFIGKFEIEKDDETKEDTYVEKTEDKRYIHKDSRFAPITEYLKEQEREVEIDFSKVEELIGKKLCKSARKYPSYWYASEDRPMGNAIYNAGYDVLKVDIKKETIRLINYEK

SEQ ID NO: 19441 - protein, 535 aa, synthetic construct
MNNDYFGYVRVSTQKQGEGASLEAQRDAITRYGAQNGLIITEWFCEKETAAKAGRPVFAAMVRDLKKRRAAGFIVHKIDRSARNFKDWAMIGDLSDAGFDIHFATETLDFRSRGGRLAADIQAVIAADYIRNLREETKKGMKGRLKQGLYPFKAPLGYRDNGGGKVKTICPRKGPLVRELFIAYASGEHSLPSLQAYATELGLATQYGSPLSVGFLGGLLSNPFYCGIIKIKKTGDTYPGQHDALVTVATFKRVQAVKLGKHVKRVTRHRHRYRGLFVCAHCSYAMIAERQGKHVYYRCHTSTCPRNSIREDAIDRFVFDHIRQLRLTEEAQSRLMQEARKWQEPDLQDGAITLSASRQLHQLKENEQTLNEALLSKVVDAETYKQQKERIALERRRFEDCIAKGSENDQSAKTVQIFLELAKTVAGLYETMTCDEKREFLEIATSNRIIKDKNAQLEPRNWLRWVKSDPAFLNGTPARPNSRRPHDPAYHIEQVMEAMQCDEAKRFIALCQKMQDRNAAKENPPAKADRFRRAG

SEQ ID NO: 19442 - protein, 537 aa, synthetic construct
MKTENFNAFHSFTRRSKKTVHYVETEFVVTYSRVSTKEQYDKNLSLDTQQKAFDDEARRKGKTILANFGGTYESAKTDGRKEFERMLTYIKKNPGKISQIWVYMTDRFSRTGGGAIKLAEELREKYGVTIYAICQPTDTRDDTGILSQNMQFLFSQYDNTLRRKRAVAGLKAQYEKGIWSTVPPQGYDSVKINTEKKLVVNREGKLIKKAFLWKADGMKNEEIIERLNALGLPMYKQQLTKIFKKPFYCGLIAHGMLDGRIVRGQHEPLISEEIFLRVNNIHQQSPNYGVPHQKENEQLPLKVFVKCGDCGEPFTGYIVRAKGLYYYKCRTTGCKCNKSAKRLHELFEETLERLATKEDLAATIQHRLESFFYEVSKDRLEQQPALKRQLSDIDSKIDSLQEAFFITKEMDRDTYEKFKARYQRERQNIEEKLADCSLVISNLSECIEKAVILSRKLRTVWASSDIGRKEDLQKLVFPEGIHYDRENDAFRTTEMNIIFKLIAELADDPEGIKKGTNYLIDLLSPSAEREGFEPPEV

SEQ ID NO: 19443 - protein, 511 aa, synthetic construct
MKKAIIYVRVSTDEQSEKGYSLQHQEDRLRQYCQQQQIDIIGFYKEDHSAKTFERPAFNELLKFLKTKRGNVDLLLFLKWDRFSRNAADAYSMISQLTKLGVEPQAIEQPLDLNIPENKIMLAFYLAAPEVENDRRSLNVIAGMRRAMKDGRHVTMAPKGYKNARNEQNRPIIVPSKDAPMVKWVFEEVAKGVLSIKEVWRTARRKGLNVGRSNIWYLLRNPIYYGKILLPAYKDEETKIISGLHEPIISEDLFYEVQDVLDGKKRNPKPKYTAREELPLRGFLQCPRCGRALTGSPSRGNGGTYFYYHCTNGCKERVKAEEVNKCFTKELARITIKDKYITLFEKAAEHYYHQNQERKSEKEVQTEIDKHLQRIKKAQQLLLDGELSAAEYKEIKSQYEPEIAQLERKRQDIEQMDANLLEYVKGTADLLRNLLRYYNNATLPVKQKLIGSIYPKKLIYEKNEFRTTEVNEVIAAIRRLGAAEEKREKEKAPETGGQSEEVIRIGSIQSL

SEQ ID NO: 19444 - protein, 463 aa, synthetic construct
MTKPQTVLLRVALYIRVSSDEQAERGDSIRDQKERGTKYIDDHQNMILQDTYIDDGVSGQKLDRDDFTRLIGNVKAGLVDLIIFTKLDRWFRSLRHYLNIQVILDKYNVAWTAIDQPYFDTSTPYGRAFVAQSMTWAELEAQNGGLRVADVFRSKVEHGEVITGKVPRGYMIQNKHLVFSDEAPAMLDSIQFFHREQGLAKTVNYMRETHGINMSIQNLKNSILRNEKYTGRYRGNENYCPRLISDEMYQDIQRVLDNNSTIRSSQKYPYIFSGILICDECGHKMSGCHINVVSRRTCGKVYRYKYPAYECLQYRAYKKCSNGGEIREMRIEEYLLEHIREELSGYLVDFETGEAKRIDNRAKKNKIRRKLDRLKDLYLNEVINLEEYKKDRAEYEEQLAALPDMEQPIKNLKPLKQVLDCNFEIIYNNLNNEEKRAFWRSIIKEIRVSKSIGRNRKYQIIFL

SEQ ID NO: 19445 - protein, 551 aa, synthetic construct
MKLLNRTTLDAKNTDSLRAALYLRVSTGRQAENDLSIPDQRRQAQEFCKARGWQVVIEFVDAGLSGTDDRRPELQRLLDLAAGGDSPFDVVVVHSFSRFARDHFALEYHVRRLRKNGVKLVSITQDLGDDPMSVMVRQVFALFDEYQSKENAKHVLRAMQENARQGFWNGSAAPYGYAIVAAEQRGAKTKKRLAIDAVEAEVVRLMFRLVHEGNGTSGPLGVKALACHLNERGYRTRRGARWGIGPLHALLTSPTYKGEYRFNRKVWKTKEDKPEADQIMVAVDPIIDPVLFDAVQARLKSRNPKQTPPRVVTGPILLTGLATCASCGGGMTLRTGKSGRYRYYTCATCAQQGKSACPGRSIPMDKLDQIVTDQLNTSLFTPERVRAILSGLMARQASRSEDHAQRLAALQNKVADCENRLSRLYGAIENGIADASDPTLKDRLASLKTERDHAKAAKDRAFSELQPETRITEEKISAFAALMRENVANGAIPFRRAYLRSVIDQVEVDDTEIRIHGRRDVLERLVMGNGATPAGVPSFVRKWRTRQDSNL

SEQ ID NO: 19446 - protein, 568 aa, synthetic construct
MQSKKKRDKAGITALYCRLSRDDGVEGDSNSVANQKKLLKRYAKENGLTNTRYYVDDGYTGTNFERPGFQKMIEDIDLGYISTVIVKDLSRLGRRYDMVGYYMDTYFPDRDVRFIAVNDNIDSDEGESEIAPFKNVLNEFYARDISKKCRSSYRIRGSTGEPLAPPPYGYIKSPDNPKKWIIDPEAAQVVRDIFKMALEGKSNETIARILQERKVLIPMAYWREKGIRKGGKVTQPNKYKWCKTTVTKILTQQEYCGDIINFKTYSKSYKNKKRYDNPKENWVIFKDVHEPIISRDDFELVQTLVVKTKRRAPKQENGEKNMFCDFLYCADCGSKLWYHTNTTNKEIHYFSCSNYKKDTRGNCETRHYIRADAIEQVVMLELRRLAKYLESHEEEFAKLLAEKTNADMLAEQKTLETELNRATARNEMLTSLFAKTYEDNVSGKLSDEMYMELSHKYEVERLELKTKIFEYKERLAKISEMEQNKDDFLKAVRKFMEMDSLTAPMLRELIDHIDVYEKEGGKKNYTQRIVIYYRFVGYLELPSSEDENYKANTRKGVDVEYIPTAKSA

SEQ ID NO: 19447 - protein, 568 aa, synthetic construct
MQSKKKQDKAGITALYCRLSRDDGVEGDSNSVANQKKLLKRFAKENGLSNTRYYVDDGYTGTNFERPGFQKMIEDIDLGYISTVIVKDLSRLGRRYDMVGYYMDTYFPDRDVRFIAVNDNIDSDEGESEIAPFKNVLNEFYARDISKKCRSSYRIRGSTGEPLAPPPYGYIKSPDNPKKWVIDPEAAQVVRDIFKMALEGKSNETIARILQERKVLIPMAYWQEKGIRKGGKVTQPNKYKWCKTTVTKILTQQEYCGDIINFKTYSKSYKNKKRYDNPKENWVIFKDVHEPIINRDDFELVQTLVVKTKRRAPKQENGEKNMFCDFLYCADCGSKLWYHTNTTNKEIHYFSCSNYKKDTRGNCETRHYIRADAIEQVVMLELRRLAKYLESHEEEFAKLLAEKTNADMLAEQKTLETELNRATARNKMLTSLFAKTYEDNVSGKLSDEMYMELSHKYEVERLELKTKIFEYKERLAKNSEMEQNKDDFLKAVRKFMDMDSLTAPMLRELIDHIDVYEKEGGKKNYTQRIVIYYRFVGYLELPTSEDENYKANTRKGVDVEYIPTVKSA

SEQ ID NO: 19448 - protein, 557 aa, synthetic construct
MDILSVRNQIKSEGISFRDLPLRVAFYARVSTDYLEQLNSLENQKQYFTEYIGDMPNWEFAGGYIDEGLSGVSTKKREKFNEMIDDALDGKFDLIVTKEVSRFARNTLDSIQYTRQLLANGVAVYFQNDNINTLDDDSEFRLTIMASMAQDESRKISSRVKWGHHQAIKNGVVLGNSNIFGYRKADKRLYIDEEQAAIVRELFELYATGKYSMKNLETYFYNKGVRNTRGNKLAHNTMANIIRNPKYMGYYVGNKVQIIDMFTKKQKFLPEEEWVIFKDETGETVPQIVSEELWKRANEVLKVRSLDVIQKQNKTNHNNLLTGKLICAHCGKPFYRKDSVSKKGTANSAWRCSGKIKNGAESCPSMTIYENEIIPILEDVFKSSQQNINELSELIMRLSEELLNTNEGANRIETLNKSIANEQKKKQKLLQLNIEGRFPDSEFVRMSAECDEEIDHCQEEITAITDQMQNRKDVNKELAEIRSILDLAAESLNGDELDRSFVDRFIKQILVYPEENGMRLEIELNAGGKVVKNLAKSIGRTGKTSKKMIESYENAVK

SEQ ID NO: 19449 - protein, 490 aa, synthetic construct
MPSKTSPSPITFATDAKTLPLPYSKQAVGAIRVSTDQQEDRHGPERQRRDIEREAAYAGLTLAHWLEESVSGAKGARQHSNAYYDLARDNPGMNFIFSASNRVARHVEIIVGIARELQKLGAVVWVSGIGNLSHPRNWKEFLRDAVDAESDYTNIVRQLTDGKRDKAQLGHWAQGRVPWGYKLARDERGISTLPVIDEAAARVVRRVFEVYTVHGGNLLTARQLNLEGLTTAEGKAWGVSAVASLIRNERYTGRAEFYGHVVEYPAIIDAEAWAAVQAVIKGRRKGERMTSSEHLLTGVARCGVCGGAMSYVLSSGGGRGQGKEGNYYRYLRCARVPECSHSKNYRMGEMEAACWTEFTRTLAEPDLLRPLLTDAPAAPSNHSRRLAEIAQEMADTLTRAVRYGLPDDVVSAALKPLQLEQERLSREDAPRPVPEDALTPEVREIAAEVAAGLPNLKPEGRRELLRALRVRMSVQPGGAVLVTALDLPRA

SEQ ID NO: 19450 - protein, 572 aa, synthetic construct
MAPKPQVSTGRPLTHHIKGMATTQLRGVSALRLSVLTDETTSPDRQREANGGAAAALGIDLADREAVDLGVSASKTTPFERPELGAWLRRPDDFDALCFWRFDRAVRSMDDMQKLSTWARDNRKMIVFAEGPGGRLVLDFRNPLDPMAQLMVTLFAFAAQMEAQSIRERVISAQAAMRTMSLRWRGSRPPYGYMPAPLEGGGWTLVQDPETVPVIERIMKELIDGKTAAAIATGLNTDDIPSPRDYWSLKKGRETGGKTGGKAGETVTRERFAWRHGTVKSVLTSERMLGWKTHGDKPVRDSEGRPVMATAEPIVTREEFDAIGALFAARSVDNKHTDRADTVALLLRVIECAGCGGRMYLHRPSSKSTTTTETYKCGSYTRGKPCDSRATLKRDWADEYAEREFLRLAGQVEYTETREIPGYDPAPEIEATLAEYEAHQEQQGQQKSSAGKQAWQRRADALDARLAELETRPKVEPSREIIKTGRKVADKWRDADPAGKRAMLVNTGAHLSVKRGTRGGWRTLDESRVRFTMRGELDDVIAELLALSESLTDRPDVRVIGARLNIREGATS

SEQ ID NO: 19451 - protein, 510 aa, synthetic construct
MTPTRAVLLLRISYRTREDETDEPDGESERWSDRWRAEFSKGIGRQEEDGRAHAKRLGWTITKVIPEDDTSAFKRRKIALPDGTTGLRTVRPGFRAALDLLASGECDGLIADDLDRVARDPRDLEDLIDVVESRRPRIPVESVTGSLRLANDADITMARIMCAVANKSSRDTSRRVSRKHEELAAEGKPGGGGFRGYGYDRRNLEVVPEEAKIVREIAARVLGTWHDWTPEQWTAYETHGESLNSIADDLQAREVPTVTGAAWNARSVRSVVTKPRIAGLRAHRGEIAGTAVWPAILDTETWEQVCVRLSERGRHIDITLKRWLTDVLHCSQCGHGLTGKHGNAGEQYWCARNRGGCGKISIKAVPAEEEVERQMLDLLSLPDVLGRLRSIATHEATDAARAELVEDEAQLKQLAGMWARKEISFAEYGEARRIIERRVKESRALLTSAAPRVLRKLLAGDVREGWARLTPADKREVVLTVTAGYEVVPFIVGKPRRFDPDRLRPLDPQA

SEQ ID NO: 19452 - protein, 504 aa, synthetic construct
MKNSTPKRAILYLRLSVSKDESTSITRQRQELTALAKREEWTIVETLTDDGLSGGKPRANADHALAMLRKNQADVIAVFKFDRWSRMGARAVADLQDALDERAAKGNPALFIALQDGLRSDMTSWDIHVALTAALGRSERELIRSRVKSARKYQREARRHSGIPPYGYRPIPHPSGKGRALELHPEEAALVRRMADEVLSGATGYAVAKRLNAEGIKPRRAARWNAATVADLLRGDAILGYMSHRRPGDPSRASRPLLGEDGLPEQVWPAIITPDESAELRALLSRRPDWNSMPGAGRKRASRLLSDLVECVTCGSTLRVNYTDKLKNGTRAARYVCSASAGACPKKVSIHAVMLEDYVSKEFLAVAGGMEVFEIRESRRDTGELAQVQQAITATAADMAIPGADIAALASRLTDLHARREALEAVPVETVVESVSTGETFAEAWENRDTAGRRTLIASVLNGRIVVNPAPRGTRQIEDSRLYIPWRWTAPDLEAELVDAARAD

SEQ ID NO: 19453 - protein, 519 aa, synthetic construct
MKKVFLYIRVSTDEQADKGYSQRDQQERLHRYCQQNSIEVLKIIFEDHSAKTFVRPEWSRMLVDLKRVKSRPDAILFTKWDRFSRNVSESYQMIGVLSKLAVQPISIEQPLDMTIPESKMMLAIYLAAGEVDNDRRALNVFYGMRRAKKEGRFMGTAPLGYKNLSTPDGKKYIAPYEPEAGIMKWVFQEISRNVFAVDQIRKKANQLGLKCTRMTFWRNIRNPMYCGKLVIKQHKDEASYIVDAQHEPLISEAQFYDVQDILNGRKRVPAAKLLSMELLPLRNFLKCNKCHRMLTGSSSKGKRKHYYYYHCDSSCGVRYNAEETNKLFLKLLKSWVINPAAVELLKMVISSVYKTRTKTEFNLKTQVMNDITKQNEKIAKARRLLLEEDIEPADYKEIKADCDAVVARLEVKLQEVSETKMIRLDINKLMDKIITTFCNLDKVFQKAPLKKQRHILCSLFPEKIDFNGAKHRTPRTNSIAHVIWLINRELRSLKTNTAPDFQTLYQKVVPTRIELISKV

SEQ ID NO: 19454 - protein, 499 aa, synthetic construct
MSKIADLYIRVSTDEQAEKGFSQRNQEEMLRKYCSINHMEIRNVIYEDHSAKTFNRPQWKKLLVNLKKHKNKVDLILFMKWDRFSRNAGDAYQMINLLRKLGVEPQAIEQPLDLSVPENKMMLAFYLAAPEVENDRRALNTFQGLRRGKKEGRHMGMAPYGYVNKATEDGKKYIAPEPKAATQLIWVFEQIAKNAFSTESIYQMAKEKGLRIAKSNMWVILRNPLYCGKIVVPKYKDEEVRWVDGQHEAIISEGLFYRVQDVLDGKSRTYRPKVRTIENFPLRGFFQCPQCGRKLTGSKCKGRNKYYYYYHCDKLCKWRVNSEIANKIFIEQLNKFKPLEPVKKLYTAVLLEAYREHTGIIANEKRKSLEQISEYEKKLSVARNLLVTEKIEVEDYNLMKKEYNGIISNLEKQIGNADDDKGNIEQLMNTGLENLLKLGEACENSSLADTRELIGLIYPENFTFRENQFQTTRLNEIINCIYLVNNRLSDLDWKTDLYY

SEQ ID NO: 19455 - protein, 507 aa, synthetic construct
MKRVISYIRFSSEKQAKGDSLRRQSKMVTDWLKAHPEYYLDQDLSFRDLGVSGFTGKHLKGGLGDFLTAIEKGLVKAGDTLLIESLDRLSRQDIDIASELLRNILRSGVDVVTLSDGEHYTRESLRDPLALIKSILIMQRSHEESLRKSERIQAAWDAKKEAAKAGIKVSKRCPAWLRLNDDRKSFSVIPDKVETVKRCFQLRLEGKSIWEIVRTLNAEVHRSMNQYKPGKFGQTSVQDLLKNRSVIGYFTPKGCEEIAGYYPSVIDETTFYKVQQLSHSRYGRKPVSAKPLSVNLFKGVIRCSECGHALIITGFSDTRNGIYRCPLRNENRCSAKGLSRKQTDGTLLTLLSRLDRFDSDMTNTIDTLKLHREHISSNIEKLVQLSLEIEDLNAITNKLKQLKNELSQVDADIEKETQRLKSIDTGSLSDCDLSTKAGRIEAQLIIKSAVKEVVLNTAKRRCKVTFHNGKVIDLPITEDPSENVTEAIQSLSEVTERGLIDVDEVII

SEQ ID NO: 19456 - protein, 508 aa, synthetic construct
MKKAIAYMRFSSPGQMSGDSLNRQRRLIAEWLKVNSDYYLDTITYEDLGLSAFKGKHAQSGAFSEFLDAIEHGYILPGTTLLVESLDRLSREKVGEAIERLKLILNHGIDVITLCDNTVYNIDSLNDPYSLIKAILIAQRANEESEIKSSRVKLSWKKKRQDALESGTIMTASCPRWLSLDDKRTAFIPDPDRVKTIELIFKLRMERRSLNAIAKYLNDHAVKNFSGKESAWGPSVIEKLLANKALIGICVPSYRARGKGISEIAGYYPRVISDDLFYAVQEIRLAPFGISNSSKNPMLINLLRTVMKCEACGNTMIVHAVSGSLHGYYVCPMRRLHRCDRPSIKRDLVDYNIINELLFNCSKIQPVENKKDANETLELKIIELQMKINNLIAALSVAPEVTAIAEKIRVLDKELRRASVSLKTLKSKAVSSLGDFHAIDLTSKNGRELCRTLAYKTFEKIIINTDNKICDIYFMNGIVFKHYPLMKTISAQQAISTLKYMVDGEVYF

SEQ ID NO: 19457 - protein, 507 aa, synthetic construct
MKKAIAYMRFSSPGQMSGDSLNRQRRLIAEWLKVNSDYYLDTITYEDLGLSAFKGKHAQSGAFSEFLDAIEHGYILPGTTLLVESLDRLSREKVGEAIERLKLILNHGIDVITLCDNTVYNIDSLNEPYSLIKAILIAQRANEESEIKSSRVKLSWKKKRQDALESGTIMTASCPRWLSLDDKRTAFVPDPDRVKTIELIFKLRMERRSLNAIAKYLNDHAVKNFSGKESAWGPSVIEKLLANKALIGICVPSYRARGKGISEIAGYYPRVISDDLFYAVQEIRLAPFGISNSSKNPMLINLLRTVMKCEACGNTMIVHAVSGSLHGYYVCPMRRLHRCDRPSIKRDLVDYNIINEFFNCSKIQPVENKKDANETLELKIIELQMKINNLIVALSVAPEVTAIAEKIRLLDKELRRALVSLKTLKSKGVNSFSDFYAIDLTSKNGRELCRTLAYKIFEKIIINTDNKTCDIYFMNGIVFKHYPLMKVISAQQAISALKYMVDGEVYF

SEQ ID NO: 19458 - protein, 506 aa, synthetic construct
MRHVITYLRYSSAIQGAEGADSTRRQNDLFKQWLKKNSDAQVVASFNDEGLSGYKGKHLSGQFGDMLSRIESGEFSEGTILLVEAIDRIGRLEHLETEALMNRILGNGLEIHTLQDGLIYTKDALADDLGISIIQRVKAYIAHQESKQKSFRVSQKWGQRAKLALAGEQRLTKMVPGWIDPDTFKLNEHAETVRLIFKLLLDGESLHNIARHLQSNGIKSFSRRKDANGFSVHSVRTILRSVTTIGTLPASQRNDRPAIPNYYEAAIDASTFNKAQEILDKNRKGRTPASDNPLTINIFKGLFRCQCGASVHPTGTKNKYAGVYRCNNHLDGRCDVQPLKRKPFDRWMIDNFLGMIDVGNDGESERKIAALQHEVEIVTARIKKATALLLEMDDIDELKIQLKELNQKRTELQTTIDSMRRKASLTDKELPQLKDIDLTTKAGRVECQLILSKHLESLTLGRGQVTVKLSNGTEIIVPTDPLPLTDGAAIFEIAEKNLLNIDTFQL

SEQ ID NO: 19459 - protein, 507 aa, synthetic construct
MKRAISYIRFSSEKQSRGDSLRRQSKMVNDWLKAHPEYYLDQDLSFRDLGVSGFTGKHLKGGLGDFLTAIEKGLVKAGDTLLIESLDRLSRQAVDRASELLRNILRSGVDIVTLSDGEHYTSESLKDPLALIKSILIMQRAHEESLRKSERIQAAWDAKKEAAKAGIKVSKRCPAWLRLNDDRKSFSVIPEKVETVKRCFQLRLEGKSIWEIVRTLNAEGHRSMNQYKPGKFGQTSVQDLLKNRSVIGYFTPKGCEEISGYYPAIIDETTFYKVQQLSHSRYGKRSVSDKPLSVNLFKGVIRCSECGHALIITGFSDTRNGIYRCPLRNENRCNAKGLSRKQTDGTLLALLSRLDRFDSDMTNVIDALKLHREHISNNIEKLVQLSLEIEDLSAITIKLKQLKGELSQVDADIEKETQRLKSIDVGCLSDCDLTTKAGRIEAQLIIKSAVKEVVLNTAKRRCKVTFHNGRAITLPITENPSEDVTEAIQSLSEVTERGLIDVDVVEI

SEQ ID NO: 19460 - protein, 515 aa, synthetic construct
MKTAIYLRKSRADLEAEARGEGETLAKHRSTLLKIAKEMNLNILTVREEIVSGESLVKRPEMLALLEEIEDNKYDVVLCMDMDRLGRGGMKEQGIILETFKRSNTKIMTPRKTYDLNDEWDEEYSEFEAFMARKELKIITRRMQRGRVASVEAGNYLGTHAPFGYDIHRLNKRERTLTINPEEASVVRMIFDWYANEDMGANAIRSKLNDLGYKSKLGNEWNPYSILDILKNNVYIGKVTWQKRKEVKRPDAVKRSCARQDKSDWIIADGKHEPIIPESLFEQVQEKLNSRYHVPYNTNGIKNPLAGIIKCSKCGYSMVQRYPKNRKETMDCKHRGCENKSSYTELIEKRLLEALKEWYINYKADFEKHKQDDKLKETQVIQMNEAALRKLEKELVDVQKQKSNLHDLLERGVYTVDMFLERSNVVSDRITEITSTMENLKKEIKTEIKKEKVKKDTIPQVEHVLDLYFKTDDPKKKNSLLKSVLEKAVYKKEKWQRLDDFELVLYPKLPQDGDI

SEQ ID NO: 19461 - protein, 515 aa, synthetic construct
MKTAIYLRKSRADLEAEARGEGETLAKHRSTLLKIAKEMNLNVLSVREEIVSGESLVKRPEMLALLEEIEDNKYDVVLCMDMDRLGRGGMKEQGIILETFKRSNTKIMTPRKTYDLNDEWDEEYSEFEAFMARKELKIITRRMQRGRVASVEAGNYLGTHAPFGYDIHRLNKRERTLTINPEEASVVRMIFDWYANEDMGASAIRSKLNDLGYKSKLGNDWNPYSILDILKNNVYIGKVTWQKRKEVKRPDAVKRSCARQDKSDWIIADGKHEPIIPESLFEQVQEKLNSRYHVPYNTNGIRNPLAGIIKCSKCGYSMVQRYPKNRKETMDCKHRGCENKSSYTELIEKRLLDALKEWYINYKADFEKHKQGEKFKETQVIQMNEVALRKLEKELVDVQKQKNNLHDLLERGVYTVDIFLERSNVVSDRINEITSTMENLKKEIKTEIKKEKMKKDTIPQVEHVLDLYFKTDDPKKKNSLLKSVLEKAVYKKEKWQRLDDFELVLYPKLPQDGDI

SEQ ID NO: 19462 - protein, 484 aa, synthetic construct
MKILKYAVYVRVSTDRDEQVSSVENQIDICRYWLEKNGYEWDPNAVYFDDGISGTAWLERHAMQLILEKARRNELDTVVFKSIHRLARDLRDALEIKEILIGHGIRLVTIEENYDSLYEGGNDIKFEMFAMFAAQLPKTISVSVSAAMQAKARRGEFIGKPGLGYDVIDKKLVINEKEAEIVREIFDLSYKGYGFKKIANILNDKGTYTKFGQLWSHTTVGKILKNQTYKGNLVLNSYKTVKVDGKKKRVYTPKERLTIIEDHYPAIVSKELWNAVNSDRASKKKTKQDTRNEFRGMMFCKHCGEPITAKYSGRYAKGSKKEWVYMKCSNYIRFNRCVNFDPAHYDDIREAIIYGLKQQEKELEIHFNPKMHQKRNDKSTEIKKQIKLLKVKKEKLIDLYVEGLIDKEMFSKRDLNFENEIKEQELALLKLTDQNKRNKEEKKIKEAFSMLDEEKDMHEVFKTLIKKITLSKDKYIDIEYTFSL

SEQ ID NO: 19463 - protein, 549 aa, synthetic construct
MKNKLKSSLNIESPKIAIYMRVSTSKQTDNQSLDTQEKTINSYIASRHDWINPICYKYIESHSASIKPKVSNTLKESSFDSLKRPKLRELFLDATIGKFDYVLCASHDRLTRNTNEGIILKHLFSRLNITLIYCRPGETISSENEALNKFFENLLVNIAALESNITGGRVTLANKHKIQNNFWAGGPPPFGYNLVSQPSNKRNSFLEINFEEARIVKKIFELYNLGCSYNEILTRLNRDFTLPPKRLWTHNTLKEILRNPVYTGFLVWNKRGGARKPNRHSPNDFVKSNLVEKNIIIPENEFLETQKLRNILSRDSKFLSTDFLLRDFLYCNKCNKKLLAKNYGNNKRFYYCSSHNNMEINKKCRSIKASKIESTILSNINDLINSSLQSEVQIEKFYDNYIENFNAELLDNKKSLEITINQLKLSTDLLELCVNEINISKDNLTVDYEDLSSSSTEFSFINALLEFQVVTQTEIKSLKARKEYLTYKINSSPKSFDDFKSNLNKSFKLFKYDEEKQKLISSPRSFRLFLFKVVKKIILSDHEITIIFK

SEQ ID NO: 19464 - protein, 515 aa, synthetic construct
MKTAIYLRKSRADLEAEARGEGETLAKHRTTLLKIAKEMNLNVLSVREEIVSGESLVKRPEMLALLEEIEDNKYDVVLCMDMDRLGRGGMKEQGIILETFKRSNTKIMTPRKTYDLNDEWDEEYSEFEAFMARKELKIITRRMQRGRVASVEAGNYLGTHAPFGYDIHRLNKRERTLTINPEEASVVRMIFDWYANEDMGANAIRSKLNDLGYKSKLSNEWNPYSILDILKNNIYIGKVTWQKRKEVKRPDAVKRSCARQDKSDWIIADGKHEPIIPESLFEQVQDKLNSRYHVPYNTNGIKNPLAGIIKCSKCGYSMVQRYPKNRKETMDCKHRGCENKSSYTELIEKRLIEALKEWYINYKADFEKHKQDDKLKETQVIQMNEAALRKLDKELVDVEKQKNNLHDLLERGVYTVDMFLERSNVVSDRITEITSTMENLKKEIKTEIKKEKVKQDTIPQVEHVLDLYFKTDDPKKKNSLLKSVLEKAVYKKEKWQRLDDFELVLYPKLPQDGDI

SEQ ID NO: 19465 - protein, 478 aa, synthetic construct
MESTLKMIRAAGYGRVSTEEQANEGHSLDAQREFNLKYIENEKWILSGYFEDPGYSGKNLNRPDVKRLIQEIKSKNLDALVVHKLDRLTRDIKDLYEMLQMFDEYNIKFVSISEKIDTDTAMGRMFVFMLGIFAQWYRENLSEEVTKGMRARAKKGLPNVFVNMFGYTRTPEGELIINEEEAKWVRWIFEQYLNGKGTPTIAKELNNLNIRRARGGRWSQTKVMDVLENQHYVGNITWKSKKDDEEDRIIRKGSHIGIIDQETFDRVQRWIQRRRDGFRSRNSYNYAFGGVLRCGKCGGRYKGKYSVSGGTITYNYVCSNKERYHTCDQSSISEVKLVKMLFKSLDMDNENLFWKDDVKESNNSEEEQIRRAIKASEERRERWQMAYGDGFMPYQDFSNRMKEEMQRVVELEEKLSGLPGAVVSTLDPAEVINVMKDIKDNWWYMERSTQKQLIQELFQEITILKDGKEWGIKGIAFA

SEQ ID NO: 19466 - protein, 546 aa, synthetic construct
MNAYITAIYPRVSTGMQASEGTSLEGQVEICCNKARKLGIQENTLQVYQEEGFTGEDIDRPALNRLMQDIKLGKIKSLIVTHPDRLTRDLTDKLIICRELEKHDVELIFVDTEYKNTPEGQLFFNMMSSIAQYELSLIKKRTVRGRLRAVEKDKKIMPMRVAPYGYDLVDGQLIINEEEAKFVQFIYHWYVHDSKTMKQIGENLYLMGAVPKRAESKQWSASSIGRVLTSEIYIGKYYYNRRSTKKIKGEKTATGKAKKTYTIRNKEEWISVDVPPLIDLGTFELAQKKKRTNFTRTGRNVKHHYLLRSLIKCSHCGRVWEATSYPGKAKNGEKKSYPIYRCANKYPKRYGEGVEKCDIPVIRTEILDEYIWGIIVNVLNNPEHLKNDLSKKDSHATDELMNLKNIFEKQIEEKEKEREKIKFMFRKGVIEEDELETDMTTLNKEVKRIQGELGRLEEKISLLNRQSMSEDVIKVMVSKYQEVLNNELAPEIKRRIVENLIDEIIIRYDHEKKQFNLSFYGFLNRMVDGFSKDNYFVSGTQREKIR

SEQ ID NO: 19467 - protein, 537 aa, synthetic construct
MKAAIYSRKSKFTGKGESVENQIELCKSYAKNNGYDDIYIYEDEGFSGGNINRPEFKSMMKDAVAKKFDAIICYRLDRISRNVSDFSTLIDELKVLGINFISIREQFDTSSPMGTAMMFISSVFAQLERETIAERIKDNMYELAKTGRWLGGTPPFGFSSEPVYYLDSNSKQKRMMKLSSINEEISLVKLFFEQYLTLGSLGKLQKYLIQNNIKTKRNSPWDIKALQLLLRNPVYVKSSELVISYLSIKGATVFGDPNGNGILSYNKKDSKDKYKDISEWILSVSKHEGVIDDNLWIKVQRQLDKNKDLAPRLVNGSEYGVFNSVLHCAKCGGKMIQKQGHVSRKTGEILRYYICINKINPSDNTCDSKNIRLDKLEKSVMKELFKATDNKGSLIKAIEEYKKSLESEAVDKNSIKSYEKQISQKELQVKNLIDKLSLNPNIYDLLSSRIEELNKEIKELKFKKFELENTNSNLKAAIKEINASTSMLLNFKKLWENADYSMKKLLINSFVDYISYNSDTQEVVIKPFCTNKKKGAL

SEQ ID NO: 19468 - protein, 542 aa, synthetic construct
MKIAIYSRKSIFTGKGDSIENQISMCQEYISSKLGKNVEISVYEDEGFTGKNTNRPEFQRLMKDIKNKKVDRIVCYKLDRIGRSVAQLSNMFEMLDQYNCSFTSITEQQFDTTTPMGRAMINIASTFAQLEREQLAERVRDNMLQLAKSGRWLGGQSPLGFTPEKIIYIDEEMKERTLMKLTPDEEELNIIRFIFKAYLEEHSINEVTRQLNVKCVKGKNGGDFDTTQVRRMLRNPLYVKSDESTHNYLNNIGTNVYGEYNGNGYLTYNKKKQTTIGRNFEEWIVAVSKHKGVINSEEWLKVQIILDKNKSKQSIRLGTGNSNNACLSGVLKCAKCGSNMIVKHGHPSKVNAYTKYDYYVCSNKQNKYVDRCDNPNIRVDKLDSIVTSEIKAYNKELLIDELTKSLTNNDTTLENEQIKELNSQIKGKKLASSNLVKQLSLAPNDDVASIIMNEISSISYEIKELESDLNNIEFDKNEIVNQTVNLELIINSLKHFNENIDTVNDISKKRMLIQSIASKILWDGDNYISTVKILGMDASKKK

SEQ ID NO: 19469 - protein, 562 aa, synthetic construct
MPNYARQLDDQLDQFSRTGTQKRAAIYARVSTLEQAEEGYSIDEQVRVLKEMCEREGYVVHKEYVDRGKSGKNIKGRPALQQLLHDAKGKDFDLVLVWKVNRFSRKTKDLLNIVEELETRNIVFRSFTEHYETETPAGKMQFRMLAVIAEFERDNIAQNVKMGMLARAKEGSWNGGQVLGYDVVSVPGENRKRKLSTLVVNPTEAQTVRKVFDLYVEGNGYKSIANKLNIEGHRTKKNKDFSINGVKTILSNPLYAGLIRYNVRRDWNEKRRNNINPHPVIEKGQHEAIISEETWEKAKNIMASRSGKPNRIHDGEFPLTGIMKCPACGAGMVIGRTTNTLKDGTKKVLEYYVCGAWKNKGSTVCRSNGVRTDYADPHVLEKLSNIATSDMLIEQIVERINNKKERDSSPLQHEYETLKKALESNQQKKEKVLGLYEDDLIKKADLVQRLSNLNEEKERLEERLSPIELQMGQGGTQLINFSMVKQVMQNFKSVYQESLTREQRKRLMHLLIRQITINEDRKIDTIQIQLNKEVAKHFTFKGREDSSITDEFSPPFSILIDL

SEQ ID NO: 19470 - protein, 501 aa, synthetic construct
MKPNIKEVAIYLRKSRDESDGKEDVLAKHESLLLEYAKNHNLKYKIYKEIGSSEYIDSRPKMVRLLSDVSQKLYDAVLVVDLDRLSRGDLEEMGRISRVFRDSKTIVLTPTKTYDFNNEDEALINNFEMVFANHEFRMIKKRMIRGKQQGTKAGKWTNGRPPFPYVYNRLTKELDVDPDKVKVYELMKKMFLEEMKATYEIAWRLNELGFKTNRNSYWYENTVRRILKNEVHLGKVVYGKTSGSGSKKKTSANGVQIKDRSEWIIAEGSHQPLKTEEEHQRILAILESRRYTPKGTRTNVQVLSKLIYCGKCNRIMSFTGKASGKKYVKTCLTTDHFGNRCHNRCLNVEVIYAQLFLDLEDYEQQLLNHEPKEKQGDRSTLQLALHNKLEELERLEKGIERIKDLFIDEVIDKSEMQKRIEKQKKLIQTKKEEIRSIEQSLAVIENVRTDDDRLHAIREFKMAWDTEGISKEELNILAKQLIDRIKYTREGNNVQINIKFL

SEQ ID NO: 19471 - protein, 515 aa, synthetic construct
MKTAIYLRKSRADLEAEARGEGETLAKHRSTLLKIAKEMNLNVLAVREEIVSGESLVKRPEMLALLEEIEDNKYDVVLCMDMDRLGRGGMKEQGIILETFKRSNTKIMTPRKTYDLNDEWDEEYSEFEAFMARKELKIITRRMQRGRVASVEVGNYLGTHAPFGYDIHRLNKRERTLTINSEEASVVRMIFDWYANEDMGANAIRSKLNDLGYKSKLGNEWNPYSILDILKNNVYIGKVTWQKRKEVKRPDAVKRSCARQDKSDWIIADGKHEPIIPESLFEQVQEKLNSRYHVPYNTNGIKNPLAGIIKCSKCGYSMVQRYPKNRKETMDCKHRGCENKSSYTELIEKRLLEALKEWYINYKADFEKHKQDDKLKETQVIQMNEAALRKLEKELVDVQKQKNNLHDLLERGVYTVDMFLERSNVVSDRITEITSMMENLKKEIKIEIKKEKVKKDTIPQVEHVLDLYFKTDDPKKKNSLLKSVLEKAVYKKEKWQRLDDFELVLYPKLPQDGDI

SEQ ID NO: 19472 - protein, 525 aa, synthetic construct
MKTIRDVLEKGKKGAFYARVSSDRQTIDAQRHHVYEFIKNYECEIVKEYVDPGESAFKKKLIKRPQIMALLRDVEQGKYDFVITYADDRLARSEIEHVQIRVIMKEAKTDVILTSTGELYTERDIITQLIREGGTRYEVERISARTKDAYEQRTDYGQWMGGPVPFGYVQDENTKNFFILEDEKEIVLKIYQLYQNGEGFADIAKILNEQKAKTNTIHWKKERVKHILTNPIYAGYVTFGRLKPGSGNSIEGLSKWKMAKCEEIPPIMTKEEWLATFQMFEKKRNKELPPKQLKTEYVLRDLIYCKSCDAPLLPKNQETRGKNGKKYGIKKYMCSNKLCKVWFSTDELHALVFDSVIKEVTDKVISKSQTELMYEMEQILEKDIKQIKKEIQRLKKQVDNCLVWIKDAEREIDELYNQKKKLVKVNPKIDPLLDVMLDYRLHLLHEIRETEELIAKKEAKMKHIEDVDSNQSMLQKNVLQAFRIEFTNLQKDMKRVRQLLVYLIDKIIIDQNGKTEYILKINLEQ

SEQ ID NO: 19473 - protein, 543 aa, synthetic construct
MSQKITYQRLEDILKKGSRIALYARYSTGKQDENAQIHDVRKFLSDYGCELLDNNIYIDPKTSAVKVPMDQRKDLQRLIKDSKENKFDCIVSYKNDRIARNTQEHNELRTEMQRLGMPVVLSSTREIYTVGEIVPLTIKDALTQIEPLLIAERTRDTFSSKIENGEWTGGQAPYGYIYDKETELFEITDKKVEVVQEIFRLFKLGYGLQQIANKLIADRRDIGQKWYKDKIKYIITNPFYAGHMTMNRYVKGKLQLKMETWTWSKKQESIPAIMSRDEWEYCFYLYVERRKSQTVRKSSTPFWLRDILHCNECQLPFKTKNQKTKSKRKNGEKVEYGKILYECRNCGLKLETEKIHDKFKEDVGRVLKKLLEKHRENLIQQTQLQIEKEHEEITNVQKELANKRIKLIENIDVLDKKISQLYKDITTGKGLKANHTEDVLGKEDEQDDWNSKLVEILLTGRSQKHNDLEEIKQQQQLLEDKQERLNIVMNALKNQYQDELLNFSFDPENEKSMRNFLLQFVKAVYVSRDMRLDYKIYENLISE

SEQ ID NO: 19474 - protein, 515 aa, synthetic construct
MKTAIYLRKSRADLEAEARGEGETLAKHRTTLLKIAKEMNLNVLSVREEIVSGESLVKRPEMLALLEEIEDNKYDVVLCMDMDRLGRGGMKEQGIILETFKRSNTKIMTPRKTYDLNDEWDEEYSEFEAFMARKELKIITRRMQRGRVASVEAGNYLGTHAPYGYDIHRLNKRERTLTINSEEASVVRMIFDWYANEDMGANAIRSKLNDLGYKSKLGNEWNPYSILDILKNNVYIGKVTWQKRKEVKRPDAVKRSCARQDKSDWIIADGKHEPIIPESLFEQVQEKLNSRYHVPYNTNGIKNPLAGIIKCSKCGYSMVQRYPKNRKETMDCKHRGCENKSSYTELIEKRLLEALKEWYINYKADFEKHKQDDKLKETQVIQMNEAALRKLEKELVDVQKQKNNLHDLLERGVYTVDMFLERSNVVSDRITEITSTMENLKKEIKTEIKKEKVKKDTIPQVEHVIDLYFKTNDPKKKNSLLKSVLEKAVYKKEKWQRLDDFELVLYPKLPQDGDI

SEQ ID NO: 19475 - protein, 481 aa, synthetic construct
MKYAVYVRVSTDRDEQVSSVENQIDICRYWLEKNGYEWDPNAVYFDDGISGTAWLERHAMQLILEKARRNELDTVVFKSIHRLARDLRDALEIKEILIGHGIRLVTIEENYDSLYEGGNDIKFEMFAMFAAQLPKTISVSVSAAMQAKARRGEFIGKPGLGYDVIDKKLVINEKEAEVVREIFDLSHKGYGFKKIANILNDKGTYTKFGQLWSHTTVGKILKNQTYKGNLVLNSYKTVKVDGKKKRVYTPKERLTIIEDHYPAIVSKELWNAVNSNRTSKKKTKQDTRNEFRGMMFCKHCGEPITAKYSGKYAKGSKKEWVYMKCSNYIRYNRCVNFNPVQYDDIREVIIYRLKQQEKELEIHFNPKMHQKRKDKSTEIKKQIKLLKVKKEKLIDLYVEGLIDKEMFSKRDLNFENEIKEQELALLKLTDQNKRNKEEQQIKRAFSMLDEEKDMHEVFKTLIKKITLSKDKYIEIEYTFSL

SEQ ID NO: 19476 - protein, 515 aa, synthetic construct
MKTAIYLRKSRADLEAEARGEGETLAKHRATLLKIAKEMNLNVLSVREEIVSGESLVKRPEMLALLEEIEDNKFDVVLCMDMDRLGRGGMKEQGIILETFKRSNTKIMTPRKTYDLNDEWDEEYSEFEAFMARKELKIITRRMQRGRVASVEAGNYLGTHAPFGYDIHRLNKRERTLTINSEEASVVRMIFDWYANEDMGASAIRNKLNDLGYKSKLGNEWNPYSILDILKNNVYIGKVTWQKRKEVKRPDAVKRSCARQDKSDWIIADGKHEPIIPESLFEQVQEKLNSRYHVPYNTNGIKNPLAGIIKCSKCGYSMVQRYPKNRKETMDCKHRGCENKSSYTELIEKRLLEALKEWYINYKADFEAHMQGDKLKETQVIQMNEAALRKLEKELVDVQKQKNNLHDLLERGVYTVDMFVERSQVISDRINEITSAIENLKKEIKTEIKKEKVKKDTIPQVEHVLDLYFKTDDPKKKNSLLKSVLEKAVYKKEKWQRLDDFELVLYPKLPQDGDI

SEQ ID NO: 19477 - protein, 491 aa, synthetic construct
MGLAAIYLRLSRNEEQLNIDEILLNHRNALTKLAKQQKLTYDIYQEISSGVNTERPELNLLLSRLDDYDALLVMDIDRISRDNAHAEEIKKMLIIHDIKILTPQGAIDLSQESNEMLFSFQAMMANFEYKQIRKRLGRGRLAAAEQGKWTMSNRVPLGYKKNEEKRLEVVEEEAKIIRFIFQKTLERVSANEIAKQLDILGWRSRQGKVLTSTHISNMRRNVVYYGVVKAGRKVNGRVVDEVFVEDAHEPIVSKQMFLEVQKILEENTTGNFFNKLKATRKLQNLIYCNCCKRKRYIQCDGNGIDYIKSCIYKVDNNKCRDRGYKYEPIEQFVLQKVKEKKPAFEKELQMLKALDTTEVEKKLSIQRESLEKQINRFNKRQRNLKEMRMDGEISKAEFYEMRDENEEKIKQVKQQMELIDIKLENLSNTDEEQARLQDAIKKLDKLEELKAESCNTFLKKFIKKIWFSSNTEANHDTTRPKEDATIEIEWL

SEQ ID NO: 19478 - protein, 515 aa, synthetic construct
MKTAIYLRKSRADLEAEARGEGETLAKHRTTLLKIAKEMNLNVLSVREEIVSGESLVKRPEMLALLEEIEDNKYDVVLCMDMDRLGRGGMKEQGIILETFKRSNTKIMTPRKTYDLNDEWDEEYSEFEAFMARKELKIITRRMQRGRVASVEAGNYLGTHAPFGYDIHRLNKRERTLTINSEEASVVRMIFDWYANEDMGANAIRSKLNDLGYKSKLGNEWNPYSILDILKNNVYIGKVTWQKRKEVKQPDAVKRSCARQDKSDWIIADGKHEPIIPESLFEQVQEKLNSRYHVPYNTNGIKNPLAGIIKCSKCGYSMVQRYPKNRKETMDCKHRGCENKSSYTELIEKRLLEALKEWYINYKADFEKHKQDNKLKETQVIQMNKAALRKLDKELVDVQKQKNNLHDLLERGVYTVDMFLERSNVISNRITEITSTMENLKKEIKTEIKKEKVKKDTIPQVEHVLDLYFKTDDPKKKNSLLKSVLEKAVYKKEKWQRLDDFELVLYPKLPQDGDI

SEQ ID NO: 19479 - protein, 515 aa, synthetic construct
MKTAIYLRKSRADLEAEARGEGETLAKHRSTLLKIAKEMNLNILAVREEIVSGESLVKRPEMLALLEEIEDNKYDVVLCMDMDRLGRGGMKEQGIILETFKRSNTKIMTPRKTYDLNDEWDEEYSEFEAFMARKELKIITRRMQRGRVASVEAGNYLGTHAPFGYDIHRLNKRERTLTINSEEASVVRMIFDWYANEDMGASAIRNKLNDLGYKSKLGNDWNPYSILDILKNNVYIGKVTWQKRKEVKRPDAVKRSCARQDKSDWIIADGKHEPIIPESLFEQVQEKLNSRYHIPYNTNGIKNPLAGIIKCAKCGYSMVQRYPKNRKETMDCKHRGCENKSSYTELIEKRLLEALKEWYINYKADFEKHKQDDKLKETQVIQMNEATLRKLDKELVDVQKQKNNLHDLLERGVYTVDMFLERSNVISNRITEITSTMENLKKEIKTEIKKEKVKKDTIPQVEHVLDLYFKTDDPKKKNSLLKSVLEKAVYKKEKWQRLDDFELVLYPKLPQDGDI

SEQ ID NO: 19480 - protein, 515 aa, synthetic construct
MKTAIYLRKSRADLEAEARGEGETLAKHRTTLLKIAKEMNLNVLSVREEIVSGESLVKRPEMLALLEEIEDNKYDVVLCMDMDRLGRGGMKEQGIILETFKRSNTKIMTPRKTYDLNDEWDEEYSEFEAFMARKELKIITRRMQRGRIASVEAGNYLGTHAPYGYDIHRLNKRERTLTINPEEASVVRMIFDWYAHEDMGANAIRSKLNDLGYKSKLGNEWNPYSILDILKNNVYIGKVTWQKRKEIKRPDAVKRSCARQDKSDWIIADGKHEPIIPESLFEQVQEKLNSRYHIPYNTNGIKNPLAGIIKCAKCGYSMVQRYPKNRKETMDCKHRGCENKSSYTELIEKRLLEALKEWYINYKADFEKHKQDDKLKETQVIQMNEAALRKLEKELVDVQKQKNNLHDLLERGVYTVDMFLERSNVVSNRITEITSTMENLKKEIKTEIKKEKVKKDTIPQVENVLDLYFKTDNPKKKNSLLKSVLEKAVYKKEKWQRLDDFELVLYPKLPQDGDI

SEQ ID NO: 19481 - protein, 491 aa, synthetic construct
MGLAAIYLRLSRNEEQLNIDEILLNHRNALTKLAKQQKLTYDIYQEISSGVNTERPELNLLLSRLDDYDALLVMDIDRISRDNAHAEEIKKMLIIHDIKILTPQGAIDLSQESNEMLFSFQAMMANFEYKQIRKRLGRGRLAAAEQGKWTMSNRVPLGYKKNEEKRLEVVEDEAKIIRFIFQKTLERVSANEIAKQLDILGWRSRQGKVLTSTHISNMRRNVVYYGVVKAGRKVNGRVVDEVFVEDAHEPIVSKQMFLEVQKILEENTTGNFFNKLKATRKLQNLIYCNFCKRKRYIQCDGNGIDYIKSCIYKVDNNKCRDRGYKYEPIEQFVLQKIKEKKPAFEQELQMLKSLDTTEVEKKLLIQRESLEKQINRFNKRQRNLKEMRMDGEISKAEFYEMRDENEEQIKQVKQQMELIDIKLENLSNTDEEQARLKDAIKKLDKLEELKAESCNTFLKKFIKKIWFSSNTEANHDTTKPREDATIEIEWL

SEQ ID NO: 19482 - protein, 501 aa, synthetic construct
MKANIKEVAIYLRKSRDESDGKEDVLAKHESLLLEYAKNYNLKYKIYKEIGSSEYIDSRPKMVRLLSDVSQKLYDAVLVVDLDRLSRGDLEEMGRISRVFRDSKTIVLTPTKTYDFNNEDQALINNFEMVFANHEFRMIKKRMIRGKQQGTKAGKWTNGRPPFPYVYNRLTKELDVDPDKVKVYELMKKMFLEEMKATYEIAWRLNELGFKTNRNNYWYENTVRRILKNEVHLGKVVFGKTSGSGSKKKPSANGFRIKDRSEWIIAEGSHQPLKTEEEHQRILAILESRRYTPKGTRTNVQVLSKLIYCGKCNRVMSFTGKASGKKYVKTCLTTNRFGNRCHNRSLNVEVIYAQLFLDLEHYKQQLLNHKPKEKQGDSSTLRLALHNKLEELERLEKGINRIKDLFIDEVIDKSEMKKRIEKQQQLMQTKKEEIRSIEQSLAVIENVRTDDDRLHAIWEFKKAWNTEGISKRELNTLAKQLIDRIEYTREGNNVQINIYYL

SEQ ID NO: 19483 - protein, 536 aa, synthetic construct
MIKVVIYARVSTAEQAEEGYSIDAQLDVVKKRCEQEGRIVVDNYVDRGISGKAMENRAELQRLLRDAGENKFQEIWVWKTNRLARNHLDLLKIVDELNKNNVGFKSCSEAFDTATPTGKLLMNVLASIGEFERESIVENVKMGMKQRAREGKWNGGTVLGYNTVKIDNIENKTKLEIEEKEAFIVKEIFRLYAEGRGLKAITNLVNKLGYKTKRGNFFTPIAIRTILLNPIYIGKIRYNVRENWSEKRRKGINKNPIYAAGSHDPIISLDLWNRVQELYKRKSQKPKRLFDGTFPLTGLIKCPMCGASMVAGRVKRKLKNGNINIIRYYQCGAWRNKGTAACRSNGVRADKVEEQVFKRINQIVLNDKILKDTVSKLNDNAHNKIKPLEEELYITNKKIQNLEKKKNRVFDLYEEGMIAKDILTSRLEHISNEIEINLAQKVRIEKELRQNTSNPVSVYTIKKLLIRFYDLIEKVEPIKQKLILQLIITKININNKRELDSIVIHINEQIEKYILNVEEDGSLQKDPSSFGFTIVI

SEQ ID NO: 19484 - protein, 536 aa, synthetic construct
MLRQTNQQPITALYPRLSHEDELQGESNSVSNQKRILETYAKQNGFSNLRWYTDDGYSGANFQRPGFQAMLADIEAGKVGTVIVKDMSRLGRNYLQVGMYTEMIFPQKGVRFIAINDGVDSAQGDNDFAPLRNIFNEWLVRDTSKKIKAVKRSKGMSGKPITSKPVYGYLMDEDENFIIDEEAAPVVKQIYNFCLAGNGPTKIARMLTEQQIPTPGTLEYRRTGSTRRYHPGYECKWATNTVVHILENREYTGCLVNFKTEKLSYKVKHSVENSPEKQVIFENHHEPIIDTQTWERVQELRKQRKRPNRYDEVGLFSGILFCADCGSVMYQQRYQTDKRKQDCYICGNYKKRTHDCTAHFIRTDLLTAGVLSNLRKVTSYAAKHEARFMKLLIEQSEDGGKRRNAAKKKELEAAEKRIAELSAIFKRLYEDSVTGRISDERFTELSADYEAEQRELKERAAAIQAELSKAQEATVNAEKFMNVVRRHTSFEELTPTLLREFVEKIVVHECSYDENKTRRQDIEIYYSFVGKVDLPE

SEQ ID NO: 19485 - protein, 514 aa, synthetic construct
MNAYSYRRFSSATQSHGDSIRRQIQLAEDYCHKHNLELSTDSFEDLGVSAYHSNNSLEDAGLGQFIAALEEGKIPTPCYLLVESLDRLSRANIDEALQQLLAITNQGVIVVTLFDNQTYKKGMGLAEFITAIVTMARANEESETKSKRLKAVWHKRRTDPNALKTNNKPFWLDLSDDKKSFILNESAELVREIYELSIGGMGSHLISKHLNAKGIPSPKGKTWGDAVITKVLNTKAVLGEYQPNQRVNRKSVPIGEPIQDFYPSVIEEQTFYLSQAQIKQRAKSLKRGSTSSHLNILKDVGTCKRCSAPLRLQKQSHLYYFRCPESLKGTCDSKPINIMFLRDWLKEQWLTPAFYKTWSKPKTAVRKLKPLEAKRQHLSDALDTMLEAFASTSNSQVIANIQKRTDELKELDSLIELEKQEQAKETNTIKMNMKESIGLIDTAFKPEITTETITARNKLRQLMNQFSRFEVDMIDKQAIFEIDSTSSFIFQSIQNPYHYMKAKPMFVWKMLSIR

SEQ ID NO: 19486 - protein, 678 aa, synthetic construct
MSSNLSNTTTPKIYSYTRVSTLEQKKGSGVAMQINDKVLEALALEHQLPLAEETYQDLGKSAFHGQHLKHELGTFLQAIKDGVIAKGSIIVVYSLDRLSRLEIGHAKQTYLDLTNNGVSVYSIVDNHLYRAHNAADDIIATITFERAHNESKNKSSRVIDASKQGLKRWKETGEPQSSLGRSPFWIDQPTNEFNINAAGVKKAIEMKIAGYGDLKIKKYLDNHFEYKPTRRKGKVKQSNTWDYIAISKLWRRRSLTGENSYTIEGVTHVMENYYPALIDDDTFRKLQVKNTKKQGRDTSSGKIPLLKSLARCGTCGGAMVFVDKGESRINYVCNLAMKGEHAREVYNVNMLDLLTLEVCKDAYLSESSKSHNIHAEQQKLKLETELFEQQESRDNLRDYYKATPSKTLLDLIIDSESKIIDLEAKLDAINTNTVELNADELSNLPEVYTESVRTDYLNPTRHEIRNNLRRFISSITLNRSEEPCPDAKTKVANCIDITWHFKNAQKRRLAMLPYQFTKAVEGDKTLYLPYAYMYGSKSNIKVEDGDQFLSNIFNKLHSLDLTRFLYPSRGRYQWSNLNLECGKTYWAPLDRAVFIEQGMEHIAFTERGTPNEAGHAANYLSLMFNYPSSDGGAYDYPDSKFIELACKFGFVEEHDFSLFLQDNQFNQELYSSLDFLMS

SEQ ID NO: 19487 - protein, 496 aa, synthetic construct
MPTRVILPKPEESKKKRTAAYCRVSSSSEEQLHSYAAQVKFYTEMLSADMSCEFVGVYADEGITGTSAKKRLQFMAMIEDCRAGKIDVIVTKSVSRFGRNTVDTLSYTRELKTLGIDVYFEKENMHSISPDGELLLTLMAAFAESESVSMSENIKWGLREAYKRGQAESLPLGKFYGYKQENRTISVVEEEAKVIRRIYDEYLMGLNSAEIAGKLTAEEIPTERGNSVWHETVIRKILRNEKYKGDSLFQKSYIVNPLTHQRKKNSGELTKYHATFAFPPIVDREIWDLVHAEEQRRIEYCLEHGLAHYANSSEQFPFSSRIVCGVCGNTYQMLSSKQRDNYGKIYWRCTSFHGNKGSPIEGHAFTPNGQPLRLNIDETQKHIKYQRARRKLPQPRQMLCTDISVDGGKPEKVFVSAWNLLVSKKLLYQASLRRIAETETNALTRYRAEQLILIIDNVGKIQTYDYPLALQTLERIEVNPNGKLSICFLAGIRITI

SEQ ID NO: 19488 - protein, 549 aa, synthetic construct
MSNKNVTVIPAKTAGFLQGLPGLIIKRKVAGYARVSTDKDEQQNSYEAQVDYYTDYIKRNPEWEFVEVYTDEGISATSTKHREGFKRMIADALDGKIDLILTKSVSRFARNTVDSLTTIRQLKDKGTEVYFEKENIFTMDSKGELLLTIMSSLAQEESRSISKNITWGKRKSMADGKVSFAYSSFLGYDIGTDGHLYIVEDQAKIVHRIYDEFLAGKTTYDIAKRLTEDGIPTPMKKVKWQESTVRNILQNVKYRGDSVLQSTFVEDYLTKKVKKNNGELPQYYVSQNHPPIIPPEKFEMVQEEFRRRKEGGPYTCISPFSGRIVCGDCGGFYGRKVWHSGSSYHSFVWHCNNKFAKRKYCSTPTVKEETIMRCFVDAFNSLIARKDEIARNYEECLAAITDDSAYKTRLAEVEELCAGLASRMHDNLTRESRMMDDCSEDSPLKKERDEITLEYETLQKEHKELNSKIALCAAKKVQIRGFLQLLKKQKKALVEFDPLVWQAAVHYMVINEDCTVKFVFRDGTELPWVIDPGVKSYKKRKAVESCPQE

SEQ ID NO: 19489 - protein, 432 aa, synthetic construct
MEKQIIDITPTRTAFAVKQRVAAYARVPCDKDTMLHSLAAQIDYYRKYIIRNPEWEFVGVYADEAKTGTKEDREQFQKLLSDCRSGLIDMVVTKSISRFARNTVTLLGTVRELKELGINIFFEEQNINSVSEEGELMLTLLASQAQEESLSCSENCKWKIRKGFELGQPNTCTMLGYRLVNGEITLVPDEAKIVKEIFDLYLSGCGVQKIANTLNERGVRTEKIPFWHLDTIRGILRNEKYMGDLLLQKSLSESHLTKRQVKNEGQLQQFYITDDHEPIVSRAVFSEAQREVQRRAEKHKCGAGTKSVFTGKIKCGICGKNYRRKTTPHNTVWCCSTFNTRGKAYCASKVIPENTLKDYISDALGSKYFAEDFFTETVDSIVAEPGNTMRLIFKDGTEKRITWKDRSRSESWTDEMREAVRQKMLERNGAKK

SEQ ID NO: 19490 - protein, 468 aa, synthetic construct
MRVYGYARVSTQEQAEEFDALNQQIARLKTAGATEILIDIESGRSDSRKQFNELLYLVQRNQVDEIIVTRVDRLGRSVITIHKAIEIFVKHEVNLRVLDAPVDPNSPFGWFSINQMSGLAEFESRLLSQRIKHGNNYFREQLKFCTPPFGYGKDENQRLVPNRNIHEKSGKTYFELGKLIIELILEMRSLKDVCTYIYVEYEIVFSVAGLRDWVKNLALQGHTAYFVKKKKGVNREPIINFDTHEALVSAATVEAIQQKLSANRRYRSSATSTRGDYPLSSLIKCAHCGGGMYRNFSRHKTKTEYMRCANYSKPGKYHCENSKCTRLREIIAQTITELCRHAPQLIDHLQSQSVTTVIVNTKEIENLSNELSVMRGLRSSNPDIIHAIAKIEETINSLSTPVKIVDRDAFENAQKQITIASQATFWESLDDLELRAALVEFVEKVEVNSSGSITPTFKLPLTRSSMRP

SEQ ID NO: 19491 - protein, 469 aa, synthetic construct
MRDLSRALGYCRVSTQRQHTEGHGLERYIDRLKQYGLTEEQIHWDIESGASEKRKGYNRVLELVRSRTVDKIIVPCFDRFTRSALGWEVARQELQEFGVELIFLDGGSLDLETPEGLFTSRILAAMSAQVRDKNRYNATQGHRYFQEKRKIYQAIFGFVKDGDTVVPNTKQYRDTNQTHIDIARECVEIFIESGELSKSIRKLTEKYGLERVGKFKFEDFPRDVSSFRRWLENPQLCGMVCYYPFNSDKKLTLQSTHEGIISVGQHQQIIQILATHPCGRRKYSTNPLVGLCKCAKCGSTMEKRSTTINGKTYEHLKCPGAYPKPRQQRKCDVRTYFRLEDAIDNTIQALKQKAESLADHMPVETTEVVPVEILELQQQILKLKRLNDPDFHSTIKIKEQKLESLLKTSELDIVADASRTQVLRGIAASLGFWEAVTREELTAIFHELVEEVVCSVVDRAQLFAARLKI

SEQ ID NO: 19492 - protein, 577 aa, synthetic construct
MSNNTLATMESATAVKIAVSYLRVSTKEQAERDGEPDGYSIPAQRDANRRKATSMNAVVQMEFVDRGASARSADRPQLQEMLRYLENNHVDYVIVHKVDRLARNRADDVEISLAIKKSGAELVSATENIDETPSGMLLHDIMSSIGAFYSRNLAVEVLKGMDQKAKTGGTPGMAPIGYLNIPKLNANGSQVRTVEVDPVRGPLIAWAFQAYATGNWTVTALAEELNTRGLTTRPNSRTPGRPVSRSSVHQFLINPYYKGIVTYRKATYDGRHEPLTDAVTWARVQEILRDHAVGEKQREHPHYLKSSVYCWSCGSRLVVTMAKNRHGTVYPYFMCVGRHQKRSTCQQKAKLIPVVEQEVEDEYDRQLLQLKAEERDEIEAMISDGLQDFRRSSETNRKTLTVQKDRLVSERMRLLQAHYGGAIPLDLLKQEQDRIASQLASIEERLTSSATEFDRFEQLIKRALDLATYAAQAYRHAATVKGSDQIRRLFNQAFFTRIRVSDDQATGELAEPFKTLLSPEMAAAAKHHRQTKSATQNATHTLTGAITAENDKPTPRGAGLKETFLVPPMGFEPTLPP

SEQ ID NO: 19493 - protein, 559 aa, synthetic construct
MKGKIALYSRVSTSEQSEHGYSIHEQEQVLIKEVVKNFPGYDYETYTDSGISGKNIEGRPAMKRLLQDVKDNKIEMVLSWKLNRISRSMRDVFNIIHEFKEHDVGYKSISENIDTSNASGEVLVTMFGLIGSIERQTLISNVKLSMNAKARSGEAITGRVLGYKLSLNPLTQKNDLVIDENEAHIVREIFDLYLNHNKGLKAITTILNQKGYRTINQKPFSVFGVKYILNNPVYKGYVRFNNHQNWAVQRRSGKSDKNDVILVKGKHEAIISEDVFDQVHEKLASKSFKPGRPIGGDFYLRGLIKCPECGNNMVCRRTYYKTKKSKERTIKRYYICSLFNRSGSSACHSNAINAEVVERVINVHLNRILSQPNVIKQIASNVIEELKQKHSNQTEIKYDIDSLEKQKAKLKTQQERLLELFLDDQMDSEMLKAKQSQMNQQLEVLDQQIKEAKQANQSQDDIPNFDKLKARLILMITRFSVYLRKATPEAKNQLMKMLIDSIEITKDKQVKLVRYKIDESLIPQSLKKDWGSFFIPKFNFVINVTKKNRIENLSLLPLF

SEQ ID NO: 19494 - protein, 452 aa, synthetic construct
MKAAIYIRVSTQEQVENYSIQAQTEKLTALCRSKDWDVYDTFIDGGYSGSNMNRPALNEMLSKLHEIDAVVVYRLDRLSRSQKDTITLIEEYFLKNNVEFVSLSETLDTSSPFGRAMIGILSVFAQLERETIRDRMVMGKIKRIEAGLPLTTAKGRTFGYDVIDTKLYINEEEAKQLQMIYDIFEEEKSITTLQKRLKKLGFKVKSYSSYNNWLTNDLYCGYVSYADKVHTKGVHEPIISEEQFYRVQEIFSRMGKNPNMNRDSASLLNNLVVCGKCGLGYVHRRKDTVSRGKKYHYRYYSCKTYKHTHELEKCGNKIWRADKLEELIIDRVNNYSFASRNVDKEDELDSLNEKLKTEHTKKKRLFDLYISGSYEVSELDAMMSDIDAQINYYEAQIEANEELKKNKKIQENLADLATVDFDSLEFREKQLYLKSLINKIYIDGEQVTIEWL

SEQ ID NO: 19495 - protein, 478 aa, synthetic construct
MKVALYVRVSTLEQAEEGYSINEQKDKLKKYCEIKDWTIVKEYVDPGRSGSNINRPSMQQLIKDADTGLYDAVLVYKLDRLSRSQKDTLYLIEDVFQKNNIHFISLSENFDTSTAFGKAMIGILSVFAQLEREQIKERMSMGRVGRAKSGKIMEFNNPAFGYEVDGDNYKVDPLRAEIVKRIYKMYLSGTSINKIKETLNSEGHIGNKKNWSDTRIRYILSNPTYLGKIRYDGKTYDGKFSPIIDEETFNKTQNELKERQTATYKRFNMKLRPFQSKYMLSGLLRCGYCGATLFVNSYVYNGKRKLRYNCPSTYKSKQKTRTYKIMDPNCPFKLVYAKDLEPAVINEIKNLALNPQSIQKPVKKTPDIDVEAIQKELAKVRKQQQRLIDLYVISDDVNIDNISKKSADLKLQEETLKKQLAPLDEPDNDDKIIAFNEILAQIKDIDSLDYDKQKFIVKKLIKKIDVWNDNKIKIHWNI

SEQ ID NO: 19496 - protein, 553 aa, synthetic construct
MSTITKIQGYQHDVKQLRVAAYCRVSTDNFEQLESLENQRAHYQKYINNHPNWELAKIYYDEGISGTKMTKRNALKELLTDCHNHRIDLVVTKSISRLSRNTTDCLQIVRELQQLNIPIIFEKEHINTGAMASELFLSILSSIAQDESHSTAGNLRWAIRKRFASGKFHVSSAPYGYSIEDGNLVINHTEAKTVRQIFQRFLSGTSASQIAKELNQKQVSTKRGGQWRSNTVINILRNSNYTGDMLCQKTYRDDQYHRHFNQGELAQYLIEDHHPSLINHENFNRVQVLLKEAVKKRHIETGSHKYQQHYLFSGKIICGQCGTIFKRQTRPHKIYWACQQHLRSAQQCPTKAVSEASLKAAFCNMINKLVYSKKFLLQPLSEGLKEEANVNSDGQLISLTKQIKANDHKAETLTELMHAGLLDKAIYVNQTARLEQDTYQCQEKIKQLNGQNTDSANDFEDVRTLLRWCHQGKQLTEFDEGVFQEFVQQIVVNSSNKATFILKCGLKLPEKLNKNATIDGHFYRDIIKQRYNDPIKQTEYLYSIIESEGDLIG

SEQ ID NO: 19497 - protein, 525 aa, synthetic construct
MGKVRIIPAHQQKGNSVQPQQSRQPFEQLRVAAYCRVSTDYDEQASSYETQVVHYKELIQKEPTWEFAGIYADDGISGTNTKKREQFNQMIAACKAGKIDLIVTKSISRFARNTIDCLKYIRDLKAINVAIFFEKENINTMDAKGEVLITIMASLAQQESESLSQNVKMGIQYRYQQGKIFVNHNHFLGYTKDAQGNLVIEPAEAKIIKRIFYSYLNGMSMKQIADSLKADGILTGGKTKNWQSSGVSRILKNEKYMGDALLQKTYTVDFLNKKRVKNNGIMPQYYVENDHPAIIPKPVFMQVQQLIKQRQNGITTKNGKHRRLNGKYCFSQRVFCGKCGDIFQRNMWYWPEKVAVWRCASRIKRSKSGRRCMIRNVKEPLLKEATVQAFNQLIEGHKLADKQIKANIMKVIKNSKGPTLDQLDKQLEEVQIQLIQAANQHQNCDALTQQIMDLRKQKEKVQSRETDKQTKLHSIDEINKLVEFHKYGLVDFDEQLVRRLVEKITIFKRYMEFTFKDGEVIKVNK

SEQ ID NO: 19498 - protein, 538 aa, synthetic construct
MTNQSTNNLKITALYVRLSNDDEREGESNSIVNQKKMLSKYASDHNLRKTTFYIDDGVSGTTFNRKGFQAMITDIEAGIVGTVVVKDMSRFGRDYLQVGMYTDIMFPEHDIHFIAINDGVDSEQGDNEFTPFRNIINEWYAKDTSKKIRAVFKAKGMTGAPLTTNPPYGYIKAPDNPTQWLIDDYSATIVRRMFQLTLEGYGPTQIAKKFQAEKILVPTHYAISQGRKTNTVPSQSPYYWSDRTIAKLLEKPEYLGHTVNFRTTRKSYKDKRKVERDKKDWVIFENTHEAIIEQSIFDTVQELRKHKRRPTKQKELPLFSGLLFCAECGGKLYFCRGKGVTRNQENYICSSYRRRTTECTSHYIRSVVLEEVVTNNLRKTMTYIQANGKSFFCDVLKGDQQAKKKEAQQKQKQLHDAQKRITELDTIFPQLYEDMVSGRINSERFDKLSSSYEEEQVLLKQQVVDISKEIQTELDVNVYIRELRKFVHKHVNFDSLTPELLHEMIDKIIVHTGKKIEVHYKFGLGELGNLVDEHIIKK

SEQ ID NO: 19499 - protein, 452 aa, synthetic construct
MKAAIYIRVSTQEQIENYSIQAQTEKLTALCRSKDWDVYDIFIDGGYSGSNMNRPALNEMLSKLHEIDAVVVYRLDRLSRSQRDTITLIEEYFLKNNVEFVSLSETLDTSSPFGRAMIGILSVFAQLERETIRDRMVMGKIKRIEAGLPLTTAKGRTFGYDVIDTKLYINHEEAKQLQMIYDVFEEEKSITSLQKRLKKLGFKVKSYSSYNNWLTNDLYCGYVSYADKVHTKGVHEPIISEEQFYRVQEIFSRMGKNPNMNRDSASLLNNLVVCVKCGLGFVHRRKDTVSRGKKYHYRYYSCKTYKHTHELEKCGNKIWRADKLEELIIDRVNNYSFASRNVDKEDELDSLNEKLKTEHIKKKRLFDLYISGSYEVSELDAMMSDIDAQINYYEAQIEANEELKKNKKIQENLADLATVDFDSLEFREKQLYLKSLINKIYIDGEQVTIEWL

SEQ ID NO: 19500 - protein, 515 aa, synthetic construct
MKTAIYLRKSRADLEAEARGEGETLAKHRTTLLKIAKELNLDVLSVREEIVSGESLVKRPEMLALLEEIEDNKYDVVLCMDMDRLGRGGMKEQGIILETFKRSNTKIMTPRKTYDLNDEWDEEYSEFEAFMARKELKIITRRMQRGRIASVEAGNYLGTHAPYGYDILRLNKRERTLTINSEEASVVRMIFEWYANEDMGASVITNKLNQLGYKSKLGNDWNPYSILDMLKNNVYIGKVTWQKRKEVKRPDATKRSCTRQDKSEWIIADGKHDPIIPESLFEKAQEKLNTRYHVPYNTNGLKNPLAGIIRCGKCGYSMVQRYPKNRKHTMDCKHRGCENKSSYTELIEKRLLEALKEWYINYKADFEKNKQDESTKETQIIQMNEAALRKLEKELVDVQKQKNNLHDLLERGVYTVDMFLERSNVVSNRINEITETIENLRKEIKTEITKEKVKKDTIPQVEHVLDLYFKTDDPQKKNSLLKSVLEKAVYTKEKWQRLDDFKLVLYPKLPQDDDK

SEQ ID NO: 19501 - protein, 540 aa, synthetic construct
MKQPYNTTIYNTALYLRLSRDDELQGESGSIQTQRMMLRQYAAEHGLTVVDEYIDDGWSGTNFERPSFQRMIDDIEDGKINCVVTKDLSRLGRNYILTGQYTEIYFPSKGVRYIAINDNVDTINGESELAPFLNILNEMHARQTSKKVKAAMRTRFANGAHYGAYAPLGYVKDPDKKGHLLIDPETRWIVEKIFDLAVHGRGAASITRILVEEKVPTPGWLNYERYGTFANIYAGAPAEKAYAWTIAQVKSILKEETYIGHSVHNKQSNISFKNKKKVRKPQEEWYRVENTHEAIISEEVFQKVQELIASRRRKRRNGTTQIFAGLIKCADCGWSLAYGENKQNKNPYGYYHCSKNGQGLRQCSMHYIRYDVLYAYVLARLQYWSMMVQKDEDKLLKRLLNASDRERNSAKKKQAAELKKAEKRKAEVDGLFAKMYEDWSAGRITEYNFNMLSEKYQNEQKELEIKIRQLHETMEAAVQTAADAEKWIALMKQYVNPVELTAELLNTLIEKITVHEAVKGEDGSREQEVEIYYRFIGKID

SEQ ID NO: 19502 - protein, 622 aa, synthetic construct
MSKQKITALYERLSRDDELQGESNSISNQKKLLEEYAAQQGFTNCVHFTDDGISGTCFDRPGFLDMMRQVEAGNVDYLCIKDMSRLGRDYLKVGQIMEILRQRGVRLIAINDGVDSARGDDDFTPFRNIMNEYYARDTSRKIKSTFKTKGMTGKHLTGTVIYGYLWNETRDQWIVDEYAAEVVKRIFAMTIDGYGPYQIAKKLSEDKILIPSAYLAQHNEGVNKNKTFKDVYGWGSSTIVNLLDKREYLGHTVNFKTRKHFKDKKSHYVPEDEWTIFENTHEAIISQETFDLAQKIRSKVRRYPDGWGEAAPLTGLLYCADCGGKMYVHRTNNGKRISQYTCSQYTKVPCGTLCKTQHRINEDVVLSLVSDMLRAIAEYAKHERAEFVRVVQEAQSSQQTSEVKKQRTRLATAKQRVSELEVLLCKIYEDNVLGKLPDARYAVLDAQYAKEQAALTAEIATLEKAVGDYEKHEKSADRFIALIDKYQNFDKLTNTMLNEFVDKILVHERARKGSRETTQEVEIFFNFVGRFVPPAFAEVELTPEELEEIRKREERKDKLHQNYLKRKASGAQKRYEDKIKAAKKAEMDEKKNAIRAEDIARGVFIPVSNLPKREPQKGAITA

SEQ ID NO: 19503 - protein, 560 aa, synthetic construct
MTKLYSYIRFSSSRQADSSSYERQKRTAKEIADRYGLELVTSYQDLGVSAFKGANSKTGALSRFLDEIGKSVPVGSWLVVENLDRISRQSIIEAQELFLSIIRRGITIVTGMDGKVYSKESVNANPLDLLLSVMMFARANEESQTKRNRTNSSALIKIKAHQQNPQSPAVAIEEIGKNMWWTDTTSGYVLPHPVYFPILQKIVKMKQEGHSTGSVLDYLNEHHEPPAPTSNKQHRKWSIAMVSRLFKTKALIGVKEVTVDGVQYELKDYYPRVLSDSEYYFLKNNLIKKAWSFGHAQEKTIPLLSGIGLLKCAHCGSPMVKRKAANGKVEQYRYTCDGEGSGRTDCLYPNWGFRASSLEGAVLQLLADKVWIAEDKANPIPEIQVQIDEISRKIDNLINLSAMTGATKELANQITDLNTQREALHEEIRLFEREMYSVDSQGWEKLAQFDLSDVQNEERLQIRLKIKGALRSIECARVDRNKNLFVLVYLDGLRQRIVIENNRGIRKGQIFVDLKTINDRQILESAGMVLHDHIDILIDEKAFYDGLPKEEDGPLSKFGI

SEQ ID NO: 19504 - protein, 522 aa, synthetic construct
MQRPTNLDVFIYLRKSRKDIEEERKAIENNTHFDTLDKHRNELLELVKREKHHVVDIFSEVVSGEYLSERDVAQEMLRQVEEGSVDGVVVMDLDRLGRGDMIDAGTIFRSFKYSETLIITPHEVINCNSEGAELLFGIKSIIAREELKQINKRLQGGRRRSARDGRSITRRPPYGYDRDEDLKLIPNPDQASVIKKIFELISNGQGRQAVVKQLDSLGYKPPEGDLWEQSTISYIIKNEVYLGHIVWGKRRNIKRNGKYISRAVPPDQWTRHDNAHEPIISQELFDQANLALSSRWRPPTRDGTTLTNPLAGIVKCGVCDRAMYYLPKKDRPNPQFRCINSRCQGIQKGAMFYLVEERLIESLRHVVNEFATNQKMIASASPDNKSNPEEIIGRKKKQIEKLESEIEELNQMRQTAYEMLERKIYTEEIFLERQKANSEKMKDVEKSIAELQDEIELEEHRMKHQKTIIPKIRAVLETYNKLDDPEKKNNLLKSVVEKAHFIRKKEWTKRDHFELEVFPRLP

SEQ ID NO: 19505 - protein, 497 aa, synthetic construct
MEQEIDLYLRRSKITREGVEALTFKTQEERGRAWADQHGYHVRKVWKDNLSAWTDVKRPDFIKALGALRRKEVPALWCYAVDRFDRQGAGSVIQLLDSGARIIFDYERLDSAVQRDRERIISDAERAKTVSDLLSHRVRDTKQGQRRRGEWLGAAPFGLRKDKSGKLHHDKHWDTVVRLITDVADGHAPRAVAQRLTEARRESPRGGPWNASTVRRIVHNPVYEGWQVVAFSRKYTWPVAYRNEAGERVRVFADGVEPVPAELVARARRVHAGHQRGTLGSRVGKASHLLTDLLRCAGCGAKMPTSGRSYVCNGHAMGKPCPAPASAMKARIEEYVYAEWLAKVSSADVAAGDPLMIAVAERWAALTAPEETEAAHEALAAVKAAEAAIERLANDRAKGIYDGAMGKHFPRLVAEAEETLKEAQATADALTGRNVDLTMFDDDELLQQAWNGADLPMRRDLLRVAIDKITVTRADRRGAPFDGDARCTIEWATPEED

SEQ ID NO: 19506 - protein, 551 aa, synthetic construct
MTRAYTYIRFSTPEQSEGNSLERQQAAIDAFVREKNLTLTESSAFQDLGVSSYRGANLRNGLGKFIAEVDAGRVPKGSYLLVESLDRLSRQKVMDALSLLVSLIDKGIKIVPLNDDGAQVLDKASGLGPLVIALSVMHRANEESETKSRRVKAAWQAKRRNAANKPVSRRAPEWLEFDEATGSFKPIPERVDAVRKIYELADAGLGRGRIVKYLNSNGFASFRNPNEGWQTSSVSKILRNRSLIGFYQPHRMYYDSATGVKKRVPDGDEVPDYYPKVLDEDLFLRVNARQYAPIASLVGRQGETLTNLFTGFVYCHWCGAPMSMANKGPGRKGGRYLVCSKGRRGKDCKYRSWNYDDVEMYVLYALRQLDLAAVLAGVDTNQRRQDIRTELARVSLELADSERRLASLSAELVSQAPANVRTLVSVVATLEGVADEQRRRCDELQAEDAALGMAVDDPGTFAQNLLRLYDQMASVEKQQLYLLRVRLRQNISRLLSRIDVMAVGRGEPHVTKNGNNSPKLFLTFKDGRRRMVLPIGKNSVHLSDLPPIGKG

SEQ ID NO: 19507 - protein, 560 aa, synthetic construct
MTKLYSYIRFSSSRQADSSSYERQKRTAKEIADRYGLELVTSYQDLGVSAFKGANSKTGALSRFLDEIGKSVPVGSWLVVENLDRISRQSIIEAQELFLSIIRRGITIVTGMDGKVYSKESVNANPLDLLLSVMMFARANEESQTKRNRTNSSALLKIKAHQQNPQSPAVAIEEIGKNMWWTDTTSGYVLPHPVYFPILQKIVKMKQEGHSTGSVLDYLNEHHTPPAPTSNKQHRKWSIAMVSRLFKTKALIGVKEVTVDGVQYELKDYYPRVLSDSEYYFLKNNLIKKAWSFGHAQEKTIPLLSGIGLLKCAHCGSPMVKRKAANGKVEQYRYTCDGEGSGRTDCLYPNWGFRASSLEGAVLQLLADKVWVAEDKANPIPEIQVQIDEISRKIDNLINLSAMTGATKELANQITDLNTQREALHEEIRLFEREMYSVDSQGWEKLAQFDLSDVQNEERLQIRLKIKGALRSIECARIDRNKNLFTLVYLDGLRQRLVIENNRGIRKGQIFVDLKTINDRQILESAGMVLHDHIDILIDEKAFYDGLPKEEDGPLSKFGI

SEQ ID NO: 19508 - protein, 673 aa, synthetic construct
MIGAKALREEIFQYDKTKFKGICVPYARFSTKGQSKVGKKSLERQLSKAREYAKRNNLFINEDLIFTDKGVSGYSNQGELSKAFKKGQMATMLLLLEEVPPEERDNVYITFHNFDRFSRMSPDAAQAHFNKILNRGFKIVTTIDNQLYDRRDKGMSNMLISIIKMTTAWQESLNKSIYITDALSRKKKVIDYLYNHPSQKGKHKHIGVVQPSIPRWIDQENITYEYIDADGSKRTDTFKKFSLNQNKAEIVRKIFELKIAGLGYTRICQKLNNDGVEVFEQGRFKKAKKWHLYAVQNIITSDKVLGHITLKEMVTEEYHCKETDEIKTKQVKKDATSKLENYYPAVVDEEVFRLANVLKFQEKKGKPLGRIGERTNIFTTFMSCYCGATLQYSRSKINTRSNKEPVYREQLRCNNALVKNECFDDYINYVELEQAFFKYVNHIDFREVCLVGDKSLETEIKNLQTEITFLNGQKKELKLKNSGLVKTFESAISQGLNADYVLVALNEAKKSADLIETKINDLKVRITKLQLSLDSKESDFLDIVEYSKRIKNSSTETKIMMRKKLNEFLHSKIKWMEVCSSKHSKFVILCFHDNVIRTFAYSENYANDLMFNSIKINYEVDVPQLNYELFLIYIDQIKRSLRGETEVISSDDLKNALRHLRRKFYDAKGIDYV

SEQ ID NO: 19509 - protein, 653 aa, synthetic construct
MFDYDKSMFDGICIPYARFSTTEQDKIGRKSLERQLEEAKRYASQNNFYIDDNLIFTDKGVSGFAKQGQLSKAFENGQMALLLEALEDVPFKERENIYLCFHAFDRFSRQHPEVAYEQFSRILKRGFNIVTTIDDCLYSSKEADLESMLISIIKMSSAHYESEVKSVYVSDAHRRRRETLEYLYNHPTQKGKHKYIGLKQSTTPRWILESEIIYDFVDENGVARKDSFSKFSLDEAKAVIINQIFDWKIQGLGHTKICQLLNQKQIPTFEDGNCRKAKQWHTFAISNLFKNKSTIGTFTLKTIEHEEYFCESERIFKTRSNKVDATSEMENYFPAVVTVEKYETALKVIAMNNKGEKISEPEDKTHVFSKVLRCTCGGRLVFKGTRKTGNSEKSDWFEYLRCENAILKDGCDAENIIYKDFEMAFLRFATSSNYTVFSTTQSKLKTKLKRLSIKQSRLNSEKEQLLLEANGLKKTFESIVTQNLDATLLLDSISKNEASLHTVQNELVKIDEQVKGVEREYEKSGKPIDKRTINNELRSEDYSKRLLMRRAVNQQLRKNVVHMEVCSTKLLKFVIVCFDDYVIRTYAYQDEFSSDLMFNSIKINVENHDESEAYDLIMHLFKEVRISLSGGNAVITNFDLKAHLSAIKEKYLK

SEQ ID NO: 19510 - protein, 554 aa, synthetic construct
MPTAFILTRYSTDNQNPDTTAVQVKKCAEYCRQHQLTVLDIFSDEAVSGMKQHRPEYDRMMAAYQAKAGADVVVIYDQSRMFRDMVEWFNFRRQLQALGARVVSVTQPMVGGDLLDPSVFVSEGSMALFNQLHVLVTRQKVVEKMRYMASQGKCPGGRPALGYDLDAERRYIINEFEAETVQQIFTMHAAGASYGEIITAMAAQGRLTKAGKPFGKNSLHEVLKNEKYIGVLVYGAVPSVSPTGHRNSHQPAAEGCVRLEGAVPRIISDELWAEVQKRMKERTHPGGRYSAKAEYLLSGKVFCGDCGGAMVVAGTSSGASGQRYRYYSCVNKRQTKTCNAKGISVPRLEQMVAEAVKQRLSSPEGLRDVISAAAQYRDALTQAAAPRTDELAQQIQDTTMKIQNLVNVLAGGVTSKAITDQLAELEGEKARLEAAARNIAAAASEVGLTDTQITTAVTKLSQMDESTQAGRRALLSIVAKVVVYGDRVDVYTILGPDGKKPDLDTAAKDFINTMGATSLAPKRRKRSNACGVFLLFAARPFPCLIDNPLQVYYI

SEQ ID NO: 19511 - protein, 525 aa, synthetic construct
MNIAAYCRVSTDKSDQLNSLETQKQFFTEYVQRTGDHLVKVYADEGISGTKIKNRKEFLQMMADAEHGLFDMVVVKDISRFARNTVDLLQNIRRLKALGIETQFLTANMTSMGNSEFVLTIFGALAQEESANTSKRIKFGKKVNAEKGRVPNIVFGYDKTIGDYFNLTINEKEAKVIRQIYQLYTEEGYGCAAISNKLNEQGSRTKRNCKWSQNAVSRILTNELYTGKIINGKQEVADFLTGQRKEKDETEWLVTERPELRIIDNEVFEQAQKILHSRNQAFNLNHERQSNKYLFSTLIKCKECGWSFRRTVRKYKNTYVRWVCSGHNGKGADSCPNAVTLDEEELIEVLQEYFSNVLKNKKKVIQYVVKEFQRVYKAKDENVEYEKELKDKLTKLKAMREKYMDMYTDDLITRQELNDRIGGARQEIERLENELKMVTYQITKGDQLEELLNTTFQSIEDITDVHQMTNTQLKKIIEKIEVDKDGNVDIYLKLLGDLGLDEAILVEDRTEIPDAENAQNNHDRT

SEQ ID NO: 19512 - protein, 556 aa, synthetic construct
MPTKPASTALRAWVYARYSTNKQTQKSLDDQISECQRFADRHGWHIERILTDAELTGYSDHRPGYQELLRGIEGGMIDIVVAENIERLTRDGEHSAQLEKLCAFHDVKIMTIIDGEANALNMGLKSLMSGALLKSIALQAHRGLAGNVAAGKSAGGRSYGYVTPRDERGDKIKGALVINEGEAQIVRRILTEFAEGISPKKIVDQLNQDGIPSPSGRAWRQNTVFGNRKRGTGILNNELYIGVRVWDRLEYRRHPQTQKRVSRLRPEEEWVRVEVPELRIIDDNLWARVKARQDSFQVKPRRGSNSGGVGPRPKFLLSGFLRCAKCGGPLTIAGTVHKRYYCKTAKEQGPSQCTGMTGLLKDEAEQAVLGGVKRALLGSDAFTRFREEYARALVDATQSLQADRASVTRQLRAVETEIRNGTDAILAGVNSPALIEALSKAEARKLKLQAQQRQIEDTRPMLPTDLEEVYAAHVRKLETILAEPELVIHARDILRILVETISVEEVEEGGHLLGIEGDLTKFPMTYAKAAPKGGFANKSSIGLVAGVGFEPTTFRL

SEQ ID NO: 19513 - protein, 599 aa, synthetic construct
MKKIIPYGYLRVSSLEQVRSGGGLEAQDEEVRRYITQKSDVFDIDKMVMMSDEGLSAYSGRNIKEGELGRFLADVDAGLIPAGSALVCYSVDRLSRQNPWVGTQLISTLIGAGIEIHSVAENQILRSDDPVGAIMSTIYLMRANNESVIKSERAKHGYTKRLNESIANNKVLTRQMPRWLYDNDGKYAIDPNMQKVIDFTFDSYIAGQSTGYIAKKLNDMGLKYGDTSWRGSYVAKLIRDERLIGKHIRYSKQIKGVKREIIETIPDFYPVTIDTDKFHIANNMLTSVAKNIRGRTRMTYGDISILRNLFNGVIKCGVCSGETSVVQNTRRKITNGVVTYVPYKTFLRCRNRYELKTCTQGDIRYEVIERAILNHLMGLDITTLLAAPVDNKIERYRTELELCKAEEEELQAIIKERENEGKRPRPQTLKSYEDVADRIDELTQLIESHVEDNFIPHFNVDLDSITDVSNVSERSLIKKGIATIADSICYKRISDFILVEIKYRNLNDKHVLVIDNKNSEMVVNFSIEYNEENKVYICNSFVMEYDNLSCEFTVSKTTMEDYAHMMNFVDYVSDDESYNAKEFLVKNFTHIEFIDKSNE

SEQ ID NO: 19514 - protein, 630 aa, synthetic construct
MPQLYSYIRWSTDRQDKGTTRNRQLAAAKVYAAEAGLEMVEIEDPGVSAFRGKNTNTGKLGDFIDAVKQGAIASDSWLYVENLDRITRQNVTTAQKLFIELLELGLTLVTGMDKRVYTLDSVNKNPTELMISLLLFSRANEESETKSNRTIGNVVALVERHQAGLPVNIKSVGRHPFWIDDSGSQYEAVKEHPVYWSIAREAIDMFLDGNGIYTVKRYLDEKYPNGLKDKEWDYQVLKKMRDNRALIGERTINVRGATYKLDNYYPWLCKDEAEFLTLAERKQQNNYKAKKDKTEEIKLLSGLQVLRCSKCGGTMHSFMNHGSARYICTNGVHLQKNCSGWSISAQLVEHCTMISLLIGYMDKSRKDGIDTTAIEEEISRKEILIIDLESRIANMAQAIAIAPDVSALAVQLNTFDLERKKTVLEVDKLKERLHSLKGKGSLEVDITDFLMLIQWSVFTNMEDADRNKIRKIISSIIESIIVEKADGCITIKIKCHHKDEWLVFGGVNRKPFWAFTIEYSTNDAKEIEGGDSSNFVSNPLFQKAVEQLDSIKQSYLKLFETANTMLGVVGYSDIRGASFWPNTGQYERANVEYDGITYSIAMNGRVSKAITAALEATGLSRKDFIERYKV

SEQ ID NO: 19515 - protein, 490 aa, synthetic construct
MPRAIGYVRVSTNKQLENTSIEKQRAEIERYCEQNNLTLVKIYDEGARSGESMKDRPVFKELYHHAFDKEEKIDYVVVFKADRISRDNLDALYIFKKLTQADKTLISIADNVDTRDPQAKLLYHIMALVSELEKDLISFRTTTGMEKNAEDGKFNGGKIYGYYSENKELKLIPEEARVIQYIFEKYTYDQWGYRKIASNLNDQGFKTKNDKHWTIMAIKTILNNRLYNGVTKWKGQYKKGKHVKIIDDKLWDQTQKMLKLRSSETKKVHPGNYPLSGLMKCPQCGSPMVQGNSSPKYKYYQCSKNKNGGKSVCSSNLVKKEYAEDFVYSQLFTTLKSLDIVTPVISTTISSLQNEVEPLGEKLKSMKKELKNIPLEKKNLIVLNRKGAINDLTFEQEMADKQKEEGQLIQFVEVLERQIEQQKKPNLKESIQIAFEKFELFFKIMSDEDKKTVLHTFIKEIHIDQGKSTKNRTIRKVYYDFSLNNISKIA

SEQ ID NO: 19516 - protein, 599 aa, synthetic construct
MSEIKHVAIYCRVSTEEQASEGYSINAQLQTLRQYTQLYGWKIAEEYVDEGISGKNIKGRPAMTRLVADVEKDKFQAVLVWKISRLSRNMLDTLTLLDKFEDYGVKFISYSENFDTGSPIGRLVVQLMASIAEMERNTLSENVKLGMKQRALEGSWNGGVVFGYDAIEKELIINQREAEVVQLIYKLYAEGKGLKAIANHLNNAGHRTKRNRHFSINGVATILDNVIYNGKISWLKVENWDTKRRRGKNPNPIIVKGHHEAIISDELWSVVQARRKSKSFKQRQSNEPFLLSSLLRCPDCGQGMVPSITTYTRKDGTKLKHRYYVCGNFHNKGSSVCKANSIKAYEAEDAVINKIDNFLSNKKRLYKTLQDINWNSIDSISQLNKDLEQIEDQLSEIKLLQNRYLEAFEKNTLPTAILQERLQKVANEIGELEQRKSEITIKLGSTETKIIQPEIIEKLLGRFLLIYKNTSRDNKKHLLQLLIYQITIKQLNERSRTLNKIELDFDFTEVNISKTFILIHKLYRETDKEDDFSKPLPVSDNKTPPYLQKFLPLFMVRFTPLNPKRPVNLFQQHQPHQLMWKRHLRKAQCIITPLLHIIT

SEQ ID NO: 19517 - protein, 530 aa, synthetic construct
MIAAIYSRKSKFTGKGESIENQIQLCMDYAKNLGVNEFLVYEDEGFSGKSMDRPKFKEMLKDAKDKKFDYLICYRLDRISRNVSDFSTLIEDLNKLNISFVSIKEQFDTSTPMGRAMMYISSVFAQLERETIAERVRDNMYELARTGRWLGGMPPYGFISTQINYYDENMNQRKMYKLKVDEDTIEIVKLIFDKYLELRSLSKLYKYMYENGIKGTRGGNLDPSALSLILKNPAYVKADKSVVDYLRKSNIDVMGDIDNIHGILTYAKNTDSPIAAVAKHKGVIDSDKWIEAQKLLNANKAKAPRAGTGSKALLSGLLKCSKCGSNMRITYKNSKSGTIYYYICGTKKSLGVSACDCRNIRSDKAESKVIDELKNKSIKSIMSSYKDSKLENSKNSKNIKTEINSINNQIKEKETYIDNLVMQLAKVTESSASTFIINKLESLNNDLSNLKSQLESLNTMSMENKQVDININMLIDNLNKFNKEIDNSDINKKRLLLSTVVDYMTWDSDTDTIKVNLIGINSSNTIASGK

SEQ ID NO: 19518 - protein, 522 aa, synthetic construct
MTTRNVTVIPARKRIGNSAKAEELPKLRVAAYCRVSTDSEEQATSYEAQIEHYTNYIKSNPEWELAGIFADEGITGTNTKKREEFNRMIEECMQGKIDMIITKSISRFARNTLDCLKYIRQLKDKNIPVYFEKENINTMDSKGEILLTIMASLAQQESQSLSQNVKLGIQYRYQQGKIHINHNRFLGYTKDKDGNLVIVPEEAEIVKRIYREYLEGSSMLQIARGLEADGILTGAGNPRWHTSTINKILRNEKYIGDALLQKTYTVDFLSKKRVPNNGIVPQYYVENSHEPIIPREIFMQVQEQLVKRRCVYISKNGKKRNYSNNHPLSQMVFCGNCHEIFRRVHWNNRGKKSIVWRCVSRLENTGLFCTASTILEDTLKEKIVEAINVAVSGKNSFLAILKKNIETVLSEDLDESTADIDKRLEELQTELIQKANSKEAYDNIVNEIYRLRDLRQETLSRNALRQDKRDRIAEMTDFLKTQTGDISEFDDKLVRKLVEKAIVYDDRLMVEFKSGLEIEVKL

SEQ ID NO: 19519 - protein, 519 aa, synthetic construct
MRKVTRIDGNNALQAFKPKVRVAAYCRVSTDSDEQMASLEAQKDHYESYIRANPDWEFAGIYYDEGISGTKKENRTGLLRLLADCENKKIDFIITKSVSRFARNTTDCIEMVRKLTDLGVFIYFEKENINTQRMEGELVLTILSSLAENESLSIAENSKWSIRRRFQNGTYKISYPPYGYDYVDGKLFINKEQAEIVKRIFSEALAGKGTQKIADGLNLDKIPTKRGSHWTATTIRGILSNEKYTGDVLLQKTYTDENFKRHYNRGEKDQYMIKDHHEAIISHEEFEAVKEILKQRGKEKGVIKGSSKYQNRYPFSGKIKCAECGSSFKRRIHGSGDRKYIAWCCTKHIKDASSCSMKFIREDAIHQAFVVMINKLIFGHKFILRPLLQSLKKTNYSDNITKIQEMETKIKENTERVQVIMGLMAKGYLEPALFNTQKNELSKEAALLKEAINRAINGGMTALVEVEKLLKFAMKAEKQIDRFDSEIFENFIEEIIVFSQEEIGFKMKCGLNLRERMVR

SEQ ID NO: 19520 - protein, 599 aa, synthetic construct
MKKVEVIKGEGLLNGRRNGAEINLKRVAAYCRVSTDSEDQLQSYHSQVKYYTDLINENSDWTMAGIYADEAITGTQVDKRLDFQRLINDCMNGDIDMVITKSISRFARNTLDTLKYVRQLKEMNVAVFFEEENINTLTMDGELLLVILSSVAQQEVENISANVKKGLKMKMQRGELVGFHGCLGYDYDKESKTISINEDEAEIVRYIFRRYLEGAGGSVIGRELENLGYKSPRGSSKWSATTVLGIIKNEKYKGDLLMGKTFTLDPITKRRLENFGEEDKFHIKDHHEPIISEEDFDKAQAIRLRRAKNRNTVGSKNGKREKFSREYAFSCLLECGFCGSNLSRRSWHSNSQYKKTIWQCVTGTKKGKKFCPNSKGIEEIAIEKAFLESYRQLTSNNKDIVDKFLELIESTLKDNTLEKNIKKLEREISKITNKQNSLVDLRLEEKIEEKLYEEKYIDLQKEYSEKNKEKENLEYNLENNNEIKNRMKTFKTMLERKEVLKEFDRYVFESIVEKVIVGEIDENGNVDPYKLIFVYKTGFKDDLDGEKFKTPRKNASSKNKFIGKDSAELSTYTNNHVNKSCSHSSDATCGDYNSDGVLR

SEQ ID NO: 19521 - protein, 502 aa, synthetic construct
MNKICIYLRKSRADEELEKTLGEGETLSKHRKALLKFAKEKKLNIVEIKEEIVSGESLFFRPKMLELLKEVENKQYTGVLVMDMQRLGRGNMQDQGIILETFKKSNTKIITPMKTYDLSNDFDEEYTEFEAFMSRKELKMINRRMQGGRVRSVEDGNYIATNPPLGYDIHWIKKSRTLKINAHECEIIKLIFKLYTEGNGAGSIAEHLNNLGYKTKFNNNFSRSSVLFILKNPIYIGKVTWKKKEIKKSKNPNKTKDTRTRDKSEWIVVDGKHEPIISMKMWNKAQEILNNKYHIPYQLVNGPANPLAGVVICSKCKFKMVMRKLKGIDRLLCRNNKCDNISNRYDSTEKAIVQALERYLNEYRINISNKNKTSNIKPYERQVNILEKELAALNEQKLKLFDFLERGIYDENTFLERSKNIEERITKTSSGIEKINDIINKEKKVVKEEDVIKFQKLLDGYKNTDDIKLKNELMKKLVNKVEYTKDKRGETFGIDIFPKLKP

SEQ ID NO: 19522 - protein, 503 aa, synthetic construct
MNNRIDAIYARQSVDKKDSISIESQIEFCKYELKGGNCKEYTDKGYSGKNTDRPKFQELVRDIKRGLIAKVVVYKLDRISRSILDFANMMELFQQYNVEFVSSTEKFDTSTPMGRAMLNICIVFAQLERETIQKRVTDAYYSRSQRGFKMGGKAPYGFHTEPIKMDGINTKKLVVNPEEAANIRLMFEMYAQPTTSYGDITRYFAEQGILFHGKELIRPTLAQMLRNPVYVQADLDVYEFFKSQGTVIVNDVADFTGMNGCYLYQGRDVKASKKNDLKDQMLVLAPHEGIVPSDTWLTCRKKLMNNMKIQSARKATHTWLAGKIKCGNCGYALMSIYNPSGKQYLRCTKRLDNKSCPGCGKIITSELEAVVYQQMVKKLASYKTLTGKKKAAKANPKITALQVELAHVDSEIEKLVDSLTGANNVLFSYVNVKIAELDGRKQELLARIAELTVEAISPEQVSQISGYLDTWENVSFDDKRRVVDLMITTIAATSDSLNITWKI

SEQ ID NO: 19523 - protein, 544 aa, synthetic construct
MSAYTGSNIKEGELGRFLADVNAGLIPTGSALICYSVDRLSRQNPWVGTHLISTLIGAGIEIHSVAENQILRSDDPVGAIMSTIYLMRANNESVIKSERAKKGYEKRLKESITNKKVLTRQMPRWLYDCDGKYAIDPNMQNVINFTFDSYIAGQSTGFIAKELNNRGLMYGNTSWRGSYVAKLIRDERLIGKHIRYSKQIKGVKRVVIETIPNFYPVVVDVEKFFVANNMLTSVAKNIRGRTRVTYGDDSILRNLFNGVIKCGVCGGDTSVVQNTRKKIVNGEATYIPYKTFLRCRTRYELKNCVQSDIRYEVIERAILNHLMRLDISALLSVPVDNKIESYRTELELCKAEEVELHTLIEQREREGKRVRPRTIKAYEDVSDRIDELNKLIESYVEDTFVPEFNVDLNSIADVSNVSDRSLIKKGIATIAESICYKRISDFILVEIKYRNLSVKHVLVIDNKQSKVVVNFSIEYHENSHDYTCNSFILKYVKSPEEFHLMGVNIEDYAHMMNFVDFISDNEAKKIKEYLVSNLSRVLISNIPE

SEQ ID NO: 19524 - protein, 559 aa, synthetic construct
MKSYLYSRISTLQQSEGFGIQRQINTVTDFLSFAEIDSRLGFSLDPSNYEILESDLGKSAFTGRNWKPSSSLGRFYESVMRREIIEGILIVENIDRLTRQSNYEAARKLINLITNGITIIEVESGMCFSTKIPESLSILNMSISRAHGESLRKSRMIKKSWDNKKAKLLEQGIAPSKKVPRWLKVIDGAYVVDEVLATLFREAFVLYDKGHGNAAIVARFNSEGRLNNGKQWTTITMHRVLRDKRLNGIMTFGKNTDRDNEELHVFPVVVENELFNRVQEKINGKTKYDRTTKSQKNLFKGMLKCSLCKQAILTTTDGSRNTHARCIGRRDHKNCTARGFIYIPFERGLLQYIRGINWSSIYNSGVDNSQAIENCNVKIATIDFEINELSEELKIADDDVVLALVRTINNKKKTRKSLSDELELLTRELPKVDFDNIKDNLHDPSNVKERQHVNIELQKVVKEIRVLRMSDYIFANISYYTCTVIHMIALDMKGNLITTSSIDENLRFHSDFIEWDLLNNKMEVINTSWTDVHQILWDLWSDIFDEAFEQAKGMFDGKH

SEQ ID NO: 19525 - protein, 518 aa, synthetic construct
MVAIYVRQSLDKKDSLSIESQINDCITLCKRNGWDDYQVYKDKGWSAKNLDRPEFQKMNNDVEAGKIKAVVCYKIDRISRSIRDLVNLIEDYHELGVHFVSFADNINTAAPGGLMMATLFGSLAQMEREAIIARVTDNYYYRCELGYWGGGPAPYGFNLKKIVENGQKHTVLEINEREAAVVKQFFKWYLEPDGTIYEILKKADKAGITTRKGGAWTSRVISELLSKPMYAPNSMDIYNFYAAQGVRVRVTPEQCDGKLSLNVFGRRDRGSKHPKRSRPVNEMTLAICKNPPIIDSDTFLKTQFKKKAKLQVSPRTGTAKTTMLSGLVKCAICGRAMSPSGSSRGVRYFTCSGKRNYAAGTCTSKSIKVSALEKIVIDDILRYATNPKVIDMFHAMQGSKLTAEQSHEVNLLQQEAAKLDIEIDNLLDACSAGNTTAIEYLNKRIERIDTRKHEILTRINEIKRDTENVISLFSGIEIENVPYILAHGSIAEKKNVCQFLLSSVLFTNADDVKVYYKM

SEQ ID NO: 19526 - protein, 545 aa, synthetic construct
MRIAIYARYSSENQHERSIDDQIRLCREHAARLGGSVVEVYADYAISGAHLKSRPNAMRLLEDARAGLCDAIVAEALDRLSRDQEDIAGIHKRLSFAGVQLITVSEGAISELHVGLKGTMNALFLRDLAQKVRRGQQGRALQGEMAGGLSYGYEVVREFDAKGEPIRGKRVINEAQAEVVRRIFREYAAGRGPRSIVSDLNREGIPSPTGKAWLASAINGNKARGNGILWNALYIGRLVYNRQTFVKDPETGKRVPRLNPPEKWTVVEVPDLRIVTDEVWHAVQAVKEEHARLPLTARPRAKHLLSGLVRCAVCGGSYVVKTQDYMGCSTHRESGAGACSNNRTVKIEALEQRVLAGIKEKLMSPASIAEFVRLYHAERQQLEAASRRKRTEATTRLADVTKQIERIVDAITEGLVTPKLKTRLAELESERVRLERDIAQCEQEDTVVTLHPSAANGYRQEVEILERALGGVESERMEAITLLRRIVDRVEVHPLNGRGKYELRLVGLIAEMLNLPRRKPGEVLQGHITVQMVAAEGFEPPTKGL

SEQ ID NO: 19527 - protein, 574 aa, synthetic construct
MRRKPRSSRPNGTIGDRVVIYARYSDQKQDPSSIQAQLALCQDFAASKGWEVAGEFTDAMISGATKAREGYQAMLRTVDAGGADIVFAEALDRLTRDPEESHALFKRLKHRGVRLVTLAEGEVSNIHVAVSGISNALYLEAVAFKTRRSILDKVRKGEIITGLAYGYRVVKVHAEDGTLVDRHWEIVEEQAAVVRDIFTAFAGGHSPKQIARDLNDRGVPGPRGGIWRDTTIRGHHQRASGILRNALYIGLLVFNRQSFSRNPADDAKRVASLNDESDWVRVPWPELAILPQALWDRVQQRLQNIRNGAASSAIRDVRPWEHRRQHLLTGLAVCAGCKTSLGNAGRDYLTCNTAKLSSASCSNQGSVRRSVLEKLVMDALCDRLMQDDMVAAFIAAFREAVRTDGQEQSAEQRRMEAELRKVRQDLDGLDATARQGRLTDRLHRLMRDLEVKLETLEAALASPPPPAVVLPDNLAALYRERIADLAATLEDPDHRIEARDRLRPLIERVAVRFCTADTRGVEIELEGDLVALLSLGLSPNAAKAGATGAAGLREQVRSLMVVAGAGFEPAAFRL

SEQ ID NO: 19528 - protein, 547 aa, synthetic construct
MPVAFSYVRYSSLRQAHGDSLRRQTAMVAEWLKHHPEYVLSADDAYQDLGRSGFSGAHLDNAFGRLRAAVSTGIIKPGDCILIEAIDRAGRLAPSIMLNLLTEIVNAGVSLISLDDGITYDSDPYKSNNLFLLVAKVQQAYQYSDALSRRVKSAYERKRETARSGGATGRRAPIWIKTEYPNGKKAQPVVSLREDLAPLVAQAFQDYADGLGERRIHHRLRDQHPELAKLSTTSLKRWMRNPTAIGSWNDIPDVYPAVVSKELWYRVQKRLNAKSKPKSAASNHLLVGLVKCAKCHANFHAHVTPDNAAMKCGQRHRLGDQGCSNKKSLPMAVLDLIRCQTTFKALQRASLSRNLTASEKRALEIEGELAELNRQAATAAEGAVKYGMTAFGPALDRITAQIGVLEDEKLTLVSKAAPSTDGEMIDLQEELLDVDEMRLNALLQEAEYVMWCDDRTITVEEPSIEFSAERQVITYLGKDRVKGVFRITWNGARIDLPDLLSAPQRAELEQYMAQEARYKSGELERTVMRFNSDTGDMDHVSGPPLKS

SEQ ID NO: 19529 - protein, 547 aa, synthetic construct
MKLLATYIRWSTKEQDSGDSLRRQTNLIDAFYSKHKNDYYLLPAHRYVDKGKSGFHQQHKAQGSDFRRMFENVMSGAIPEGSLIVVENFDRFSRADIDTAIDDVRQILRKGVSILTLGDGELYDKSALTDPVKLIKHIIIAERAHQESLVKQKRIAQVWNHKTQLARELKKPMGKQAPGWLELSEDGSHYIVDEDKASLVNIIYDKRLSGMSMFAICKWLNEQGYPTINQRKVRISKTKKPDGNWSALSVKHILTSRSVLGYLPAKISTEDRKTVLREEIESFYPQIVTDSKFYAVQQLLEETGKGKTSSGEHWLYVNILKGLIRCKCGLVMTPTGIRKPVYQGTYRCNGNKESRCSYGTVSRKLLDTQLCSRLFSKLSQLHDEATDTAKLDELQRRLNTVDSELEKLTETLIQLPNITQIQEALRVKQGEKDELIVQLSREKARVKSVSSLDLSGLDMESVEGRTEAQIIIKRLVKEIVVSGNEKLVDIYLHNGNMIRGFPLDGKDDHTLTLEEATDEMQPLDDMLIFGEPVTRIYPAGDMEEVDA

SEQ ID NO: 19530 - protein, 506 aa, synthetic construct
MRTVITYLRFSSATQGAEGADSTRRQNELFKQWLRKNSDAQVVASFNDEGLSGYKGKHLSGQFGDMLSRIESGEFPEGTILLVEAIDRIGRLEHLETEALMNRIIAHGIEIHTLQDGLIYTRDALSDDLGISIIQRVKSYIAHQESKQKSFRVSQKWEQRAKLALAGEQRLTRNVPGWIDPETFKLNERAETVRLIFKLLLDGESLHNIARHLQANNISSFSRRKDANGFSVHSVRTILRSETTIGTLPASQRNDRPAIPNYYEAAIDAATFNKAQEILDKNRKGRTPASDNPLTINIFKGLFRCQCGASVHPTGTKNKYAGVYRCNNHLDGRCDVPPLKRKPFDRWMIDNFLGMIDVGNDGESERKIAALQHEVEIVTARIKKATALLLEMDDIDELKIQLKELNQKRTELQTTIDTMKRKASLTDKELPQLKDIDLTTKAGRVECQLILSKHLKGLTLGKGSVTITLQNDTEITIPTDPLPLNDGSPIFEIADKELLDIDAYQL

SEQ ID NO: 19531 - protein, 584 aa, synthetic construct
MKTNNVEIIKADSLVRRRGVKVERHLKRVAAYCRVSSDSEDQKNSYESQVRHYKDYISQRSDWELAGIYADEGISGTQVGKRQDFQRLINDCVNGEIDYIVTKAIARFARNTLDTLKYVRMLKDMQIGVYFEEENIDTLTMDGELLLTILSSVAQQEVENTSAHVKKGLKMKMQRGELIGFQGCLGYDYDVETKQLSINKKEAKIVRYIFERYLEGIGGKVIARELDELGYKSPRGLDHWNDTTVLGIIKNEKYKGDILMGKTFTVDPISKRRLSNFGEEDKYYIKDNHEPIISKEDFEKAQEIRLRRAGNKKTVANVNGKRERYSKMYAFSSMLECGFCGSILSRRSWHCRSDYRKVVWHCVTSIKKGKKFCKHSKGLEELAIEGAFMEAYRQLYHSNENLMTDLLETIESELNDNSLNKELKRITNKLRTLLKKEENLVNLRLEGKISDTIYNEKYNEISSEKEFLAEEKVNIETTLKSEIDVKKRLTEFKHLLSSQKMLTEFDRAVFESIVEKIIVGGVNSDGEIDPAMLTIIFKTGETQNKDGKQFKSKRKNAKLETDKLCPQNSDEDKKLYSQGTDYTC

SEQ ID NO: 19532 - protein, 558 aa, synthetic construct
MIKKRAYIYTRVSTGMQVEGYSLAAQEERIKQYANAFNIEIVQTYQDAGRSGKSILGREQFLEMLNNIESERDNIDCVLVFKLSRFGRNSADTLKSLEIMENHNVHLICVDDGLDSSKDAGKLVITILSAVAEMERENILAQTMAGRKQKAREGKWNGGFAPMGYSISQGVLQINEEEAELIKMIFDLYANTDMGSNKVAQHLVKLGVTKPIRQNGKTPYFSANVIRNILKNPVYNGKIAFGRRKSKFDSKTNKIRIVPSDSYMVVEGQHEALVDDALWEKTQAKLKAQSKKYEKVNRPKGEHIYLLSGIVKCPYCEASLYGNISKKKNNNKDGEYYKHYFYYSCKHRKMMDGHKCTFTKQIKMEALDREVLTIISKIVSEPSFAKKLQEKINIQIDTEEIDKILEQYGTQLRKYLSTKLSLMRQIDNLDYEDRHYNQKFQDLNERLDSIYDMIEEVESLIEENKERKEVIQREKMTAENVYSILLKFETLLAVMEDIDKKRFCQLLIEKVVIRDEKNDSGRWVKSIIFKLPIIEKDLEISLDNNEHVEVVSLLEKRN

SEQ ID NO: 19533 - protein, 623 aa, synthetic construct
MKKNNVEIIKADSLVRRRGDNFERESKRVAAYCRVSSDSEDQKNSYESQVRHYKDYISQRSDWELAGIYADEGISGTQVGKRQDFQRLINDCVNGEIDYIVTKAIARFARNTLDTLKYVRMLKDMQIGVYFEEENIDTLTMDGELLLTILSSVAQQEVENTSAHVKKGLKMKMQRGELIGFQGCLGYDYDVETKQLSINKKEAKIVRYIFERYLEGIGGKVIARELDELGYKSPRGLDHWNDTTVLGIIKNEKYKGDILMGKTFTVDPISKRRLSNFGEEDKYYIKDNHEPIISKEDFEKAQEIRLRRAGNKKTAANVNGKRERYSKMYAFSSMLECGFCGSILSRRSWHCRSDYRKVVWHCVTSIKKGKKFCKHSKGLEELAIEGAFMEAYRKLYHSNENLMTDLLETIESELNDNSLNKELKRITNKLRTLLKKEENLVNLRLEGKISDTIYNEKYNEISSEKEFLAEEKVNIETTLKSEIDVKKRLTEFKHLLSSQKMLTEFDRAVFESIVEKIIVGGVNSDGEIDPAMLTIIFKTGETQNKDGKQFKSKRKNAKLETDKLCPQNSDEDKKLYSQGTDYTYRSCGIIKKTQLDCPACSPVFEQATSKVPRTFELPKRMAL

SEQ ID NO: 19534 - protein, 557 aa, synthetic construct
MKRKKAYIYTRVSTNMQVEGFSLDAQETRIHQYANAFDIEIVKTYQDAGKSGKTMLGRTEFMAMISDIEAEKDKVDYVLVFKLSRFGRNAADTLKSLAIMESHGVNLICVDDGLDSSKDSGKLVITILSAVAEMERENIISQAMEGRRQKARAGQWNGGFAPVGYSLVNGQLQVNYEEAESVKMIFDLFANSDMGTIAIAKHLANLDIKKPIRHNSTLPYFSSSGIARILDNPVYNGKIAFGRRESTRDKVSGETKVKQSENYILTDGIHEAIIDDETWKKVRKKREANAHKYKREKPSKGDSIYVLSGLIKCPLCHAGLYGNKSIKRNKNKKDEYYKNYYYYACKHRKHVDGHKCTFNKQLKTGNLDHEVLSIISKLVSRPDFARKLQEKINIQVDTSRIDSEIEQYKSLFRQLNATKLNLIQQIDSLNFEDPHFQQKSIDLDMRLNTIYDKLADVEMLIETSESKREVILKDKMTADNIYKILVNFASFMDVMEDIDKKRLCQMLIEKVEIYDDKNKAGRWVKAIHFKLPIIEEDLEISLDNSTPVEAVVKLSKK

SEQ ID NO: 19535 - protein, 580 aa, synthetic construct
MKRKKAYIYTRVSTTMQVEGFSLDAQEAKIQQYANAFDIEIVKTYQDAGKSGKTMLGRTEFMNMISDIEAEKDKVDYVLVFKLSRFGRNAADTLKSLAIMESHGVNLICVDDGLDSSKDSGKLVITILSAVAEMERENIISQAMEGRRQKARAGQWNGGFAPVGYSLVNGQLQVNHEEAESVKMIFDLFANSDMGTIAIAKHLANLDIKKPIRHNSTLPYFSSSGIARILDNPVYNGKIAFGRRESTRDKISGETKVTQSENYILTDGIHEAIIDDETWKKVRKKREANAHKYKRENPNKGDSIYILSGLIKCPLCNAGLYGNKSIKRNKNKKDEYYKNYYYYACKHRKHVDGHKCTFNKQLKTGNLDHEVLSIISKLVSRPDFARKLQEKINIQVDTSRIDSEIEQYKSLFRQLSATKMNLIQQIDSLNFEDPHFQQKSIDLDMRLNTIYDKLADVEMLIETSESKREVILKDKMTADNIYKILVNFASFMDVMEDIDKKRLCQMLIEKVEIYDDKNKAGRWVKAIHFKLPIIEEDLEISLDNSTPVEGIKDKPNDSPFCYRQDYTYPSSLSIGPSGLS

SEQ ID NO: 19536 - protein, 481 aa, synthetic construct
MITTNKVAIYVRVSTTSQVEEGYSIDEQKAKLSSYCDIKDWSVYKIYTDGGFSGSNTDRPALEGLIKDAKKRKFDTVLVYKLDRLSRSQKDTLYLIEDIFIKNNIAFLSLQENFDTSTPFGKAMIGLLSVFAQLEREQIKERMQLGKIGRAKAGKSMMWAKTSYGYDYHRETGTITIKPAQALAVKFIFESYLRGRSITKLRDDLNEKYPKHVPWSYRAVRTILDNPVYCGFNQYKGEIYPGNHESIISKEEYDKTQSELKIRQRTAAENVNPRPFQAKYILSGIAQCGYCGAPLKIMLGVKRKDGSRLKKYECHQRHPRTLRGVTTYNDNKKCDSGFYYKDKLEAYVLTEISKLQDNAGYLDKIFSGDNAETIDRESYKKQIEELSKKLSRLNDLYIDDRITLEELQSKSAEFISMRGTLETELENDPALRKNKRKADMRKLLNAEKIFSMDYEGQKVLVRGLINKVQVTAEDIVINWKI

SEQ ID NO: 19537 - protein, 481 aa, synthetic construct
MITTNKVAIYVRVSTTNQVEEGYSIDEQKAKLSSYCDIKDWSVYKIYTDGGFSGSNTDRPALESLIKDAKKRKFDTVLVYKLDRLSRSQKDTLHLIEDVFIKNGIEFLSLQENFDTSTPFGKAMIGLLSVFAQLEREQIKERMQLGKIGRAKAGKSMMWAKTSYGYDYHRDTGTITINPAQALAIKFIFESYLRGRSITKLRDDLNEKYPKHVPWSYRAVRTILDNPVYCGFNQYKGEIYPGNHEPIISKEEYDKTQSELKIRQRTAAENVNPRPFQAKYILSGIAQCGYCGAPLKIMLGVKRKDGSRLKKYECHQRHPRTLRGVTTYNDNKKCDSGFYYKDKLEASVLKEISKLQDDADYLDKIFSGDNAETIDRESYKKQIEELSKKLSRLNDLYIDDRITLEELQSKSAEFISMRGTLETELENDPALRKNKRKADMRKLLNAEKVFSMDYENQKVLVRRLINKVKVTAEDIVINWKI

SEQ ID NO: 19538 - protein, 561 aa, synthetic construct
MKRKVAIYTRVSTKEQLKQGYSIQQQADLLIKKAKQIFPDDEYEIYSDEGISGKNIEARPGMKRLLEDIENRQIKVVMSWKLNRLSRSNRDIQNIIYEFRRGGAYYISISENIDTSTQNGEMMIGAFGLVAQIERETIVSNVKMGMNAKAKQGEAITGRVLGYVLKPNPLTGKNELVIDEFEANIVRQIFDLYLNQNKGLKAIANYLNKQGYHTINKKPFSVYGVKYILNNPVYKGYVRFNNYQNWAVERRSGKNDKSKVILVQGKHKAIIDEEIFDKTHEKLAAKSFKPGRPIGGDFWLRGLIKCPECGNNMVCRRTYYNTKKSNERTIKRYYICSLFNRAGSAACHSNAIKAEVVERVVYFHLRRILSQPHVVKTIATQVIDAMEKKKANQTPMSIDTNSLENQKKKLQKRKERLIDLYLDEEIDKETMQNKQDKLNVQLEKIDEQLKQAEVMNKASQDIAIPNYKKIKGQLYVMLYRFTGYMKKANPEAKNKLMHMLIDSIELTTDKQVKLIKYKIDESLLPQSIKKDCGNFFMPKFNFVINVTKKNRIENLSLLPLF

SEQ ID NO: 19539 - protein, 481 aa, synthetic construct
MITTNKVAIYVRVSTTNQVEEGYSIDEQKDKLSSYCDIKDWNVYKVYTDGGFSGSNTDRPALESLIKDAKKRKFDTVLVYKLDRLSRSQKDTLHLIEDVFIKNGIEFLSLQENFDTSTPFGKAMIGLLSVFAQLEREQIKERMQLGKIGRAKAGKSMMWAKTSYGYDYHRETGTITINPAQALAIKFIFESYLRGRSITKLRDDLNEKYPKHVPWSYRAVRTILDNPVYCGFNQYKGEIYPGNHESIISKEEYDKTQSELKIRQRTAAENVNPRPFQAKYILSGIAQCGYCGAPLKIMLGVKRKDGSRLKKYECHQRHPRTLRGVTTYNDNKKCDSGFYYKDKLEASVLKEISKLQDDADYLDKIFSGDNAETIDRESYKKQIEELSKKLSRLNDLYIDDRITLEELQSKSAEFISMRATLETELENDSALRKNKRKADMRKLLNAEKVFSMDYEKQKVLVRGLINKVQVTAEDIVIKWKI

SEQ ID NO: 19540 - protein, 413 aa, synthetic construct
MSVKKIRVNNQKHKQRICAYIRVSTTNGSQLESLENQKQYFENLYSNRDDIDFVGVYHDKGISGSKDNRPNFQAMIENCRKGMIDVIHTKSIARFARNTVTVLEITRELKAIGVDIFFEEQNIHTLSSEGEVMLSVLASIAEDELRSMSGNQRWAFQKKFQRGELVINTKRFLGYDLDENGELIINPEEALIVRQIFALYLEGYGTHRIAKLLNEKGVATVTGAKWHDTTIRQMLSNEKYNGSVLLQKYFHDGVNGPKKLNQGELEQYFIEDNHEAIISMEDWQAVQGKLNSRRWQQGRNKTYKFTGLLKCQHCGSTLKRQVSYKKKIVWCCSKYIKEGKAACKGMRVPEVDISNWTVTSPVTVIERDRDGEKYYSNTGQESADQRSSSGQEENQSSRILSSVHRPRRTAIKL

SEQ ID NO: 19541 - protein, 430 aa, synthetic construct
MSTDQEEQLSSYENQVNYYREYISKHEDYELVDIYADEGISATNTKKRDAFNRLIQDCRAGKVDRILVKSISRFARNTLDCIKYVRELKELGVGVTFEKENIDSLDSKGEVLLTILSSLAQDESRSISENAMWGIRKKFERGEVRVNTTKFMGYDKDDNGRLIINPQQAETVKFIYEKFLDGYSPESIAKYLNDNEIPGWTGKANWYPSAIQKMLQNEKYKGDALLQKTFTVDFLTKKRVQNDGQVNQYYVENSHEAIIDEETWETVQLEMARRKTYRDEHQLKSYIMQSEDNPFTTKVFCGACGSAFGRKNWATSRGKRKVWQCNNRYRVKGQIGCQNNHIDEETLEKAVVMAVELLSENVDLLHGKWNKILEENRPLEKHYSTKLAEVINKPSWEFDSYEMCQVLDSITISEDGQISVKFLEGTEVDL

SEQ ID NO: 19542 - protein, 430 aa, synthetic construct
MSTDQDEQLSSYENQVNYYRDYISKHEDYELVDIYADEGISATNTKKRDAFNRLIQDCRAGKVDRILVKSISRFARNTLDCIKYVRELKELGVGVTFEKENIDSLDSKGEVLLTILSSLAQDESRSISENATWGIRKKFERGEVRVNTTKFMGYDKDENGRLIINPQQAETVKFIYEKFLEGYSPESIAKYLNDNEIPGWTGKANWYPSAIQKMLQNEKYKGDALLQKTFTVDFLTKKRVQNDGQVNQYYVENSHEAIIDEETWKTVQLEMARRKTYRDEHQLKSYIMQSKDNPFTTKVFCGACGSAFGRKNWATSRGKRKVWQCNNRYRIKGVEGCYSSHLDEATLEQIFLKALELLSENIDLLDGKWEKILAENRLLDKHYSMALSDLLRQEQIDFNPSDMCRVLDHIRIGLDGEITVCLLEGTEVDL

SEQ ID NO: 19543 - protein, 595 aa, synthetic construct
MKKNNVEIIKADSLVRRRGDNSERDLKRVAAYCRVSSDSEDQKNSYESQVRHYKDYISQRSDWELAGIYADEGISGTQVGKRQDFQRLINDCVNGEIDYIVTKAIARFARNTLDTLKYVRMLKDMQIGVYFEEENIDTLTMDGELLLTILSSVAQQEVENTSAHVKKGLKMKMQRGELVGFQGCLGYDYDVETKQLSINKKEAKIVRYIFERYLEGIGGKVIARELDELGYKSPRGLEHWNDTTVLGIIKNEKYKGDILMGKTFTVDPISKRRLTNFGEEDKYYIKDNHEPIISKEDFEKAQEIRLRRAGNKKTAANVNGKRERYSKMYAFSSMLECGFCGSILSRRSWHCRSILSRRSWHCRSDYRKVVWHCVTSIKKGKKFCKHSKGLEELAIEGAFMEAYRQLYHSNENLMTDLLETIESELNDNSLNKELKRITNKLRTLLKKEENLVNLRLEGKISDTIYNEKYNEISSEKEFLAEEKVNIETTLKSEIDVKKRLTEFKHLLSSQKMLTEFDRAVFESIVEKIIVGGVNSDGEIDPAMLTIIFKTGETQNKDGKQFKSKRKNAKLETDKLCPQNSDEDKKMYSQGPDNTC

SEQ ID NO: 19544 - protein, 507 aa, synthetic construct
MRAVAYARYSSDNQREESIDAQIRAINQYAQNNDIQIVTTYIDEAKSAKTDDRPSFTRMIKESALGLFDMIIVHKLDRFARNRYDSAFYKKKLKDNGVRIVSVLEHLDSSPESIMLESVLEGMAEYYSVNLAREVMKGMKETALQCKHAGGTPPLGYDVKADKTYEINLEESKTVKTIFKMYASGHSYNKIIDYLNNEGIKTKRGNIFGKNSLHDMLKNEKYNGVYVFNKSSSEVNGKRNSHLYKPDDKIIRIEGGMPQIIDDELWNQVQKKMDINRRGKSGNSAKRVYLLTGLIYCGKCEKAMTGNTRYAGRNKTLYQTYECSTRKRNHECDMKSISKDYIENIVMNHLYNTLFSPKGIENTIKSIRNSALIKNQEIEKDIKEYSVELSGIETKINNITNAIANGMFHSSMKNKLDELETRKSVLNMRLSEAKRESEVMTPSDEIIRAYLLKDSNIKNKSLEEQRLIIQTYVSKIIVNENTIVINTIVSFNGGGEGNRTPVRKPNS

SEQ ID NO: 19545 - protein, 540 aa, synthetic construct
MAQAVTAKKVVIVPVKTLNIVEGIQSIQKKKVAAYCRVSTDSEEQKESYTNQVNHYTQYIQNNLEWEMADIYADEGITGTSTKNRTHFNRMIQDARNGKLDLILVKSISRFARNTLDLLKYVRELKSLGVAVFFERENINTLDTTGEVLLTILSSLAQDESRNISENSRWGILRGFQNGKVFCNTTRFLGYDKDEHGELVINEPEAEIVRRIYEEYLDGKSYQAIARGLMRDHIRTVTGGDTWWDSSITLILTNEKYYGALLQQKTVTVDFLTHKRIKNRGQEQQYLIENNHEPIVSKEIFETVQKEKKRRAKLKGSVMGESKRYSSKYALSSKVYCGCCEAIFKRRTWNSNNPSKKVVWQCKTYVNEGKAVCDAKSVDEQVLHSAFVRLFNRMYENKERFIKTLKANIESVLSSKVGQEPLLDIEGQMQQLKSDLKELVNLKLRNQIDETVYDEETNRLSSELNELRQQMLILEEEEDQKEKIKERVDEIIQLLNSRQDILEQFDDNLFNALVEKITILSPAHFVFTLKSGMSLDEILD

SEQ ID NO: 19546 - protein, 521 aa, synthetic construct
MNKSITVIPARKRVGNTVKMEDKPKLKVAAYCRVSTDSDEQATSYEAQIEHYTNFIQKNEEWEFAEIFADDGISGTNTKKREEFNRMIEECMAGNIDMIITKSISRFARNTLDCLKYIRQLKEKNIPVFFEKENINTMDSKGEVLLTIMASLAQQESESLSKNVKLGLQFRYQNGEVQVNHNRFMGYTKDGEGHLIIEPTEAEIVKRIYLEYLQGASLKQIGESLESDGILTAAGKARWRPETIKKILKNEKYIGDALLQKTYTVDVLTKKRVKNNGIVPQYYVENSHEAIIPRDLYMQVQEEMLRRVNLHSGTDRKKRVYSSKYALSSIVYCPKCGDIYRRIAWNNRGKHSIVWRCISRVEYGPERCDAPTVQETELQGAVIKAINMALGGKDDMLAVLEQSIASVLALGDEGSMESINIKLEELQKELLKRANAKKDYSDLADEIDRLRELKQNAMAENAEREGLKQRIVEMQEFLAEQTEQIEEYDESLVRRMVEKVTVYEEKFRVEFKSGTSVDVER

SEQ ID NO: 19547 - protein, 519 aa, synthetic construct
MKRITKIEENKVLSVKKKTRVAAYCRVSTSSDEQLISLDAQKAHYEKYIKSNDEWEYAGLYHDEGVTGTKKDVRDGLLSLIADCEKDMIDLIITKSISRFCRNTADCLELVRKLLDLNVYIIFEKENINTGSMESELMLSILSSLAESESVSISENEKWSIKKRFQNGTYIISYPPYGYANINGEMVIVEEQAEVVRQIFADTLAGKSTYVIAKDLNERGIPSKKGSKWNSGSVNAIIRNEKFTGDVIFQKTYTDSSFNRHINYGEQDQYLCTGHHEAIVSYEVFNKANEIMSQRGKEKGNGENTQRYQNRYGFSGKIRCGECGGIFKRRMHYKPSGSYVAWCCNNHINNKDSCSMKYITDDGIKTAFLTMFNKLIFAHQVVLRPLLRSLKGLDNKDQLLQIQEYESKLEKNREQRQVLTSLMASGFLEPALFNSENNTLIQEEEMLQAEKNRLMYSASGDRTRFDDVEKLIKYVSGREMLKVYDDEVFLDHVDRITVVSRKEIIFILKCGLELRERMA

SEQ ID NO: 19548 - protein, 495 aa, synthetic construct
MNIDKNSKVAVYSRKSREDPDTEDTLLKHREQLKALLTRYSFTDVEWFEEVVSSDSIDNRPIFSRLLPRIRSGEFDVVCVIANDRLSRGSQIDSGRIMEAFKESNTLLITPQKIYNMSNESDEMLSEFELVIARNEYRAIKRRLLNGRKGAVKEGRPHSGSVPFGFKWDKNDKTAKVNEEKIKIYRMMIDWFLKEEMSSAAIADRLNQLEIPPPSSRGKMWYGEVVTYLLLNDFHRGYVWYGNDEKNKGVHQPTKTEEEHTQIVERITKLRTYPDVGRRLNMNSHKLSGIVRCPYCLKVQNVHQPKGRQKHVRKCLRKSSAREPMCETTKGINEDILYSAILQEMKQYSSEIFKRNENRESAETTTISVHLIELKEKAIKKLRGRIERLKELYLDGDLDKNEYKEKLEKAQGNLMKSEKELGELYSSIEYQKAKALEKRTSLWQEEDVQALLESDEGMSDTEINIVLKKLISHISYKVKDEDGKQPELSVKVYYN

SEQ ID NO: 19549 - protein, 475 aa, synthetic construct
MKCVIYVRVSTDEQAKHGFSIAAQIEKLEAYCVSQGWEIVEAPYVDDGYSAKDLNRPHFQAMLQRIQQGGIDVLLVYKLDRLTRSVPDLHTILAELDQYECKFKSATEVYDTTNAMGRLFITLVAAIAQWERENTAERVRLGMEKKVKLGYWKGGTPPYGYQVENGALIMDEDEAQIVRNIFTLAKTLGFYTIAKQLTSKGVPTRKGGQWHVDSVRDIANNPTYAGYLMFSLNPKDIKKPPRERVLFEGNHKRIIDRDEFWALQDLLDKRRTLGGKRETSNYYFSSLLKCARCGHSMAGHKAGKKKTYRCSGKKAGKACTSHMILESNLVQAIFAQWDDLVGGHFTSNEGDATFPAAQLTALQQELAVVQKLLHKKKTMFEHDIIGIDELIRDSEKLRNKEKEIQASLKKIQLLDDRHHEEIRAIIRNIDTLWINADDTERKQLMTTIFEQIVVDTKDDYRSSKQAREITIVTAK

SEQ ID NO: 19550 - protein, 452 aa, synthetic construct
MKAAIYIRVSTQEQIENYSIQAQTEKLTALCRSKDWDVYDIFIDGGYSGSNMKRPALNEMLSKLHKIDAIVVYRLDRLSRSQRDTITLIEEYFLKNNVEFVSLSETLDTSSPFGRAMIGILSVFAQLERETIRDRMVMGKIKRIESGLPLTTAKGRTFGYDVVDTKLYINEEEAKQLQMIYDIFEEEKSITFLQKRLKKLGFKVKSYSSYNNWLTNDLYCGYVSYKDKVHTKGIHEPIISEEQFYRVQEIFSRMGKNPNMNKESASLLNNLVVCSKCGLSFVHRRKDTVSRGKKYHYRYYSCKTYKHTHELEKCGNKIWRADKLEELIIDRVNNYSFASRNVDKEDELDNLNEKLKTEHTKKKRLFDLYISGSYEVSELDAMMADIDAQINYYEAQIEANEELKKNKKIQENLADLATVDFDSLEFREKQLYLKSLINKIYIDGEQVTIEWL

SEQ ID NO: 19551 - protein, 548 aa, synthetic construct
MELKNIVNSYNITNILGYLRRSRQDMEREKRTGEDTLTEQKELMNKILTAIEIPYELKMEIGSGESIEGRPVFKECLKDLEEGKYQAIAVKEITRLSRGSYSDAGQIVNLLQSKRLIIITPYKVYDPRNPVDMRQIRFELFMAREEFEMTRERMTGAKYTYAAQGKWISGLAPYGYQLNKKTSKLDPIEDEAKVVELIFDLFLNGLNGKDYSYNAIATHLTNLQIPSPAGKKKWNRFTVKAILENEVYIGTVKYKVREKEKDGKRTIRPENEQIIVPDAHTPIIDKDQFEEANKKIENKIPLLPNRSDYKLNELAGVCICADCGGPLSKYEAKRKRQNKNGTESLYHVKVLRCLNNKCMNVRYNDVEEAILDYFRLFQSLNDKELTNLIEDMVHSHENKNNIKSQKQINEQFEQREKELQNKLNFIFDKYESGIYSDEIFLQRKATLDKEMKELKKAKDELNGLTDIKSGIDISKVRSQMKNLIQIYETSNDKEEKNNLLRIALEKVIVKMTAKRKGPVPAQFEITPILRFGLLTGDTLTDTKESSFS

SEQ ID NO: 19552 - protein, 557 aa, synthetic construct
MSKEKIKVYLYTRVSTSIQIEGYSLEAQKSRMKAFAIYNDYEIVGEYEDAGKSGKSIEGRIQFNRMMEDIKSGKDGVSFVLVFKLSRFARNAADVLSTLQIMQDYGVNLICVEDGIDSSKDAGKLMISVLSAVAEIERENIRIQTMEGRIQKAREGKWNGGFAPYGYKLEDGKLFINEEEAIAIRTIFDQYVNTTIGANGISKYLENHGIRKIPRQNGKNPLFDAGLIRKILKNPVYNGKIAFGRRTLEKVHGTRNEYKQVEQDEYLISEGIHEAIVSDEVWQAAQVNLKSQAKKYEHVNKGKDTRTHLLSGIVKCPICGVGMFGNKCIKKKKDGTKYKDFYYYGCKHRQMIRGHKCTFRKQIREELLDDAVAEVIVKIVSNPKFASMMQEKINMKVDTSEIETEIDNYQKELRKCHSTKFKLIEEIDNLDVEDKHYKRRKQDLDDRLYRMYDKIDELESSLIDAKAKKQTIEAEKLTGDNIYKVLIYFDKLYKVMNDVERRQLITALISEIQVYEEKQPNGQWLKSITFKLPIIEENLNIGLDNDEHVEMLSLLKK

SEQ ID NO: 19553 - protein, 518 aa, synthetic construct
MRRAVLYGRVSSDEQKKRETIGNQVEIFESYIDFKADFKVCNMYLDDGISGAIPLYDRPFGKKLIEDAKKGLFDIIIVWKVDRFGRDTLTGLQAVEVLREYGIEIISITEPFDLNTPTGRYQFINYLNMAELERNNILDRTFMGATRAAKKGKWLGGIVPYGYIVNNDGYLEINEEEAKVIRDIFNLYINEKMSNLDIAVYLNNLNIPSSCGEGKGKRTKKITGKWRSSSIQRILSSTTYKGVHLYGKRSTRRKEPILRKVPIIISEEIWEKVQKQKKENIIVSKRNIKIRDYLLRGLIKCKHCGKSFYGISYKDKNCVYSCSGKRSENKKVMNIKCNSININTQDIEEEVWKDCLLILKNYDNYIKKVKNKSNVTSENIEGDLEKLRKSLNNKKLEKNNILTLFRKNLITEEELEEQLKDIRKEEESALKLINAIEIKLDSHNYEDELINNMCSKLKMYHDKVDNLSFEDKYKIVRLLVKEIQAETIVKDGKRIPKAHVVYNLVKHEDYMGMDLKLL

SEQ ID NO: 19554 - protein, 528 aa, synthetic construct
MTYQEGGEAMKKITKIEGNKVASIIKPKLRVAAYCRVSTGSDEQLVSLQAQKSHYETYIKANPEWEYVGLYYDEGISGTKKENRTELLRMLSDCENKKIDLIITKSISRFARNTTDCLEMVRKLLDLGIYIYFEKENINTQSMESELMLSILSGLAESESISISENNKWAIQRRFQNGTFKISYPPYGYDNIDGQMVVNPEQAEIVKYIFAEVLSGKGTQKIADDLNQKGIPSKRGGRWTATTIRGILKNEKYTGDVILQKTYTDSRFNKRTNYGEKNRYLIENHHEAIISHEVFEAVEAALNQRAKEKGIEKRNDKYQNRYSFSGKIICSECGSTFKRRIHSSGTRKYVAWCCSKHLKQITECSMQFIRDEDIKKAFVTMINKLIFGRKLILQPLLDALRGMSNSDNLSRIQELEKQIEKNAEQRELLVKLMAKGYLEPALFNRENNELQMEADNYMGQKEALIHALNGELSKVQEVSNLIKFTNKAEMINTFSEQIFNDYVEKIIVYSRVEIGFVLKCGITLRERM

SEQ ID NO: 19555 - protein, 523 aa, synthetic construct
MAVNKNVMIIPAIKRVGNSRKEDETPKLRVAAYCRVSTDSDEQASSYEVQIEHYTEFIKKNSEWEFAGIFADDGISGTNTKNRDEFNRMIDECMAGKIDMVITKSISRFARNTLDCLQYIRKLKDKNVAVYFEKENINTLDAKGEIMLTIMASLAQQESQSLSQNVKLGYQYRYQQGEVMVNCSRFLGYTKDENKRLVIVPEEAEIVKRIYREYLEGSSMDKIKKGLETDGILTGAGKKRWHTSTIRKILSNEKYIGDALLQKTYTVDFLTKKRVVNNGIVPQYYVENNHEAIIPREIFMQVQEELVRRSRGHISTSGKKRNFSSNHVFSQIIFCGECGEIYRRVHWNNRGKKSIVWRCVSRLENTGLTCHSRTVLEDMIGIATVEAINKLIVQKDGFLTILKENIETVISETGNNVVSEIDKKLEELQKDLLRLANSKEDYNDIADEIYRLREERHKALAEEAGKKGSKQRLEDMEKFLNEQSTLLEKYDEQLVRRLIEKITVYDDKLTIEFKSGVEIDIEK

SEQ ID NO: 19556 - protein, 443 aa, synthetic construct
MAAYCRVSTDQSEQLSSYEAQVAYYTSYITNHPDYEFGGIYADEGISGTNTKKREQFNKMIEDCKAGKIDMIITKSISRFARNTLDTLNYVRQLKELGIGVIFEKENINTLDSKGEVLLTILSSLAQDESRSISENSTWGIRRRFEQGKLHINHTKFLGYDKDEEGNLVINEKQAKIVRRIYKDYLDGKGPNRIARELEEEGVPNWNGKPKWYESSIRKILSNEKYKGDALLQKTYTVDFLTKKRAVNNGEVPMYYVEESHPAIIDKETWEAVQLEMERRRAFAEKYNISKLDYATVDNPFAGRVICGHCGSAFGRKVWNSTDERLRRVVWRCNKKYEVKGKKSCENKHIDDKVLYYAFINTFNVMVENKEYFIKKWEDELDSENVLVRYKAKLFINILADVEKVEEFDVDMYFRLVEKMTVFDGEKIIVSLLDGTEIEVVIE

SEQ ID NO: 19557 - protein, 429 aa, synthetic construct
MRVRIIEPVKKHENKKKRVCAYARVSTGSEAQGESLENQIQYYENLISNNPDYEYAGVFADRGITGTTDNRPEFQRMLNLAREGKIDLIITKSISRFARNTAIMLQVVRELKDIGVEIIFEKENIKTLSGDGELMLTVLSSFAQEESKNVSDNLKWRVKKKFERGELIINTTRFLGYDKDEYGDLVINPKEAEIVRRIFEDYLKGKGTFTIAKELNEENIPTVAGGRWQESTILNILKNEKYKGDAILQKYYTPDHLRKVSVRNEGVIDSYYIEDNHSPIVSREMWEQVQIEIAKRAKAKGNKTGDTKKYTNRYPLTGMLFCSKCGSTLRRRTWNSKHSCRKIVWQCSNYIKNGKNACSGTSIDDEVISRLNIEEPIIVREEVKDGKKHYSYTCKSKQNQSGRADTAAEKENGSLLQSINRPIRTVIKL

SEQ ID NO: 19558 - protein, 555 aa, synthetic construct
MDRLTQAAYEKKNVFTKASVCYKAALYMRLSKDDDGTGESSSIGTQRKMLRSYAIENDFEIYGEYVDDGYSGTNFDRPAWSRLLKDIDARKVNLVITKDLSRLGRDYIMTGQLTEIYFPSKGIRYIAVNDGYDSDSPWSDIAPFKNIVNEMYARDTSKKIRSAFQTKINEGAFIGNFAPYGYQKDPQNKNHLLVDPVAASIVREIFEWAEQGAAPSQIAVSLNERQVLTPAMYRCAGRPYLNLDDYSRRKEWTSGTVCKLLSNPVYLGHIVQGKTVKVSFKSSLTLRKPRNEWVVVEDKHEPLISGETFERVRRRSVSRKSTAATDFTNIFSGLAKCGDCGRNMSSTGAGGRTGSRKLVCGGYKLYGKKECTNHFMDYELLYHVVLQEMRSLLSFTENEKEEIEKALREPVCPGEMQGEEKAVFSLKRREIELGCIIEKLYEDRVNGRIGEDRFYKMLDSCEKEERKIAESLALMEKSCSLAQEREPAFEGLLSSLLDDISRGKGLSSDLLGKFIDRIEIFQSCEGGEGKTGCKCQTIRICYKVIAPDEEGNGLA

SEQ ID NO: 19559 - protein, 527 aa, synthetic construct
MSYLMYLRKSRADKEAEARGEGETLARHEQLLTELAIKMGLDVGAIYKELVSGETISARPKMQQVLLEVMQGMWEGVLVMEVERLARGDTKDQGTVAEAFKFSNTKIVTPLKTYDPSDEFDEEYFEFNLFMSRREYKTINRRIQRGRIAAFRDGWYIAGTAPYGYKKVKHKGDKGYTLEIVPKEANIVEYIYELYIAGERKEDGSQAPFGSYQIRDRLNELQIPSRSEKPWSASSILDILSNPTYCGYQRWQWRKVQKQMLGGKIIETRPKDADCKKVRGRFTAIIPEETYDLVQKIKAGKPLPINSSTTLRNPLSGLVYCFKCGTLMTRQPSNTRLRYAILRCPNSKCSNISSPLSLIEEQIIEGLKEWIPEYELDWPEETVKESGTTLAVLENSLHNIKEKYIQTVTQLNKTFDLLEQGIYSLDIFQERRKNLEDQKKELQDELKLIQEERNRIAAKEQARRDFIPAIKHLVEVYWEVDDILVRNSMLRNVLDHVDYLKAERNKKGAGNTANFTLQFYPRIPQDR

SEQ ID NO: 19560 - protein, 449 aa, synthetic construct
MKQAMGYLRQSTTKQQSLPAQKQAIKTLAEKHNIQHITFYSDKQSGRTDKRNGYQQITELIQQGQCDVLCCYRLNRLHRNLKNALKLMKLCQKYHVHILSIHDGYFDMDKAFDRLKLNIFISLAELESDNIGEQVKNGIKEKAKQGKMITTHAPFGYQYHNGTFTIDTVKAPTIKAVFSYYLQGYGYKKIAQYLEADEKFINRKPYQVRNIIMNPNYCGRVINQYGQYDNMCPSIVSTSIYEQAQAIRSQKQLKRTSSANQLKQKIKCPYCGSTLTNITIRKKHRTLRYYVCPQNMNASRFVCEFKGINAQSLEASVLATCQDFFQNQQLYSKINHTIQQRLKKQKDIEAKSTLTQEQLIEKLAQCKIDAETFREQTQSLCQQSKPISSIHTHQIRKALQNVIQQRFTLNMLYPYIDEIHITKSKTLTGIYFKNEPLNIVNQTAQSSIA

SEQ ID NO: 19561 - protein, 567 aa, synthetic construct
MAIKAKVYSYLRFSDPKQAAGSSADRQMEYARRWAAEHGMTLDSELSMQDAGLSAYHQRHVTRGALGLFLQAIDDARIPAGSVLVVEGLDRLSRAEPIQAQAQLAQIINAGITVVTASDGREYNREGLKAQPMDLVYSLLVMIRAHEESDTKSKRVRAAIHRQCQGWTAGTWHGLVRNGKDPHWLRLVGQAFEIVPERGEAVRTAVSMFREGHGAVRIMRNLADRGLQITNGGNPSQQLYRIVRNRALIGEKVLEVDGQEYRLAGYYPPLLAPAEFADLQHLTAQRSRRKGTGEIPGLITGMRIAFCGYCGAAMVSQNLMTRGRREDGRPQNGHRRLICVSNSQGGGCPVAGSCSVVPIEHALVTFCADQMNLSRLLDSGNRADGIAGQLTIARVQVSDTTARIDKITDALLASDAGQAPAAFLRRARELEFELAEQQRRVEALEHELAAVALSPEPAAAKAWAGLVEGVEALDHDARIKARQLVADTFDRIVVFHRGRKPEQSRSWKGTIDLLLMAKRGGARLLHIDRQTGGWKAGEEIDTVQIPLPPGVAEASSQSEASLGPVSR

SEQ ID NO: 19562 - protein, 439 aa, synthetic construct
MSRKITKIERTAELPSRQRVVAYARVSCGKDEMLHSLAAQVSFYSNLIQSNPEWEYVGVYADEAETGTKDSRPEFQRLIADCRAGCIDLVLTKSISRFARNTITLLATVRELKDLGVGVSFEEQNLHSLSGDGELMLTILASYAQEESRSVSENQKWRIHKNYSEGKPSNNIRIYGYAYSKGKLTVIPKEAEVVRMIFADYISGMGKNAIMKKLTRLGIPTKCGGRWSESTVGSILTNEKFIGDTCLQKGFIADHITKHWKPNSGELPKYYVEGSHEAIIDRETFEAVQAEMTRRAAKANHPRKSTFSEFSGLITCGQCGAKFRKKINGIGTKYAKATWACATFTYRGKDQCGAKRIPEDILKAKCAEALGVHEYDAEKLKAKVAVIAVPDDGVLVFTFKDGTGRTLTWENPSRRNSWTDEMKAAAREKVKEGHANGKC

SEQ ID NO: 19563 - protein, 527 aa, synthetic construct
MANVRVIPATAPIVSAQATNATCKRRVAAYARVSTDSEEQLTSYEAQVDYYTKFINNRSEWEFITVYTDEGISAVNTKKREGFKQMVADGMAGKFDLLVTKSVSRFARNTVDSLTTVRKLKEKGVEVWFEKENIYTLDSKGELLITIMSSLAQEESRSISENVTWGQRKRMADGKITLPYKQFLGYCKGEDGLPQIVPEEAEVVRLIFRLFMEGKTYSAIAKHLVKYGFPTPAGKDNWQACVVQSILTNEKYKGHALMQKTYCANFLTKKMVKNTGQVQQYYVEDSHPAIVDPDEWEAVQAEIIRRKKLGSIGRCGSPFSGKIVCGECGGWYGKKVWGSYRFDKTYRREVYRCNDKYKGEHKCETPVVTEDEVKERFLTAFNTLMENRDGLIEDCRLAQSTLCDTTAIDTELAELLREIEVVAELSRKAIYENARTAQSQNDFNERNNGYLERHRKAMEQIDMLETAKQERLAKSKTLEIFIRDIESRPLVIAEFIEALWLAVIDRVAIATDGAMTFTFRNGAEVTV

SEQ ID NO: 19564 - protein, 538 aa, synthetic construct
MKVALYARVSSEAQDVELSIAAQLRALRDYAAKNEQQIVYEFIDEAESGRTASRPEFKKMIALAKSNTSPFEAILVWKLNRFARNRVDSITYKTLLQKKGIKVISINEPLDDTPTGKLMEGIIESLDEFYSANLGQDIKRGMKENALRGFFNGSQPPLGYRIIKVKDGPKQRNRLEPESDTSSGIKTVRHIFGLADKGQGCKEIAVTLNREGYRTRAGERWGRTTVHKILTNEAYIGTLVWGARAGRPASKNGEGVKLGNAFPGIIDKEVFQRVQQNMTARQPGNIHPRTIPSQYLLSGLAFCGCGASLTGHSAKSGRHFYYQCNRKFKQGNEVCNGQAIPKSKLESAVITQIKSRILTEENLENLVSLVNKDLELASVQYNERLAVIDTELEDIRQRLNRLYEAIESGKLDYSDLSPRIKDLRSRQSDLEKSMIVAEAELLASGSESIKIEQVKAYAGDLKQLLAEAEISECKAFLKTFVKKIEINGNEATLKYRLPLPGLKNGKEVLPIETLGGAGGIRTLYLLTASYGSSKQPMH

SEQ ID NO: 19565 - protein, 581 aa, synthetic construct
MTTRTPAGYAYIRHSTKRQGGDDKDSVTRQKESIRALAEHHKVEIPDENFFYENGVSAYSGKNLTHGKLKDLIDQIASLRIRPGDYVFVESIDRLSRQRLLQAKELVNGILEKGIILVTTIDNQRYEKASDTNGIDDLSQDILLSVIAKRAHEESRTKSVRRLSAWTKAKNAAIENQVPFNAKRPPFGVRYNESTNRFEPHPEQVAELTKIFESLKLQGVTNTIKEINKDSMVRWTNNRVKNIFETKYPLGFMYSQVKKDGKMVFDKYIENYYPQIISYELFEQARQSMQSRRVHRRAGRASQDNTNIFRHTAMCGICNESMFFANHFGNKTKRYFYMSCRSNFEQEEKCGNRFRYDYAVAVLLHMIGSTFFWDFLSRKPALFEAVKNSDFSVGTAKGMKIETPEEMDNYSRIGKQFMRFLEGNNENKSLNKEKIEKEIIFSRKKMTLENLEKTVESITDGAVPAAILKMLMKAEEEVAKAKEELEILTVNSVDTTARLNVKTVDDFVSLFKTEQGRLEIINFLATNGLTFYFNFEKKTNMLETKVAVNKEVMATYNIKTEVDVLEQYGFGNLAEEFKITV

SEQ ID NO: 19566 - protein, 571 aa, synthetic construct
MAPSNVRCAALYRVSTLRQARQHDADEETIPMQRQAVRRYVEAQPGWQLVTEYTEEGVSAYKHSSAVRDVLQDALRDARARAYDVLLVFKADRLSRQSLEYPVILAKFQEYGVRVISVADEAGGKELKSDGQFDKLLRFIEGWQAETESYNTSIRVAEKMRQMAEKGQWTGGKPPYGYRMDPAGTHPAAPLVPDPVEGPVVQEMFRLYLDEGLGTPSITRMLNERGTLQRNGKRWTDGSIRRVMQNPIVAGRLAYGRTYRVGRNARKARGAHDFQDVILSPVYPHLVLVEEARWTEAMDRMASYNQRVKNPHMIRHSRAETGPLLLTGFARCAHCGGPLFSKKIATKKPTLAGPKKYFHMAYQCATQASQGPQFCDGQRTYSQVKVERAVLSALRTVLEHMDTQAIVRQAQTLAEQRLWAQTTRRQVIEKQLAEAQRLRQAWLDRLDHYFLHPETSLYTEEVLAAKVREASDRVAALEAERRALGQQVQDLASQRRSLEAFLAVKDQWWQQFLAATPARQKRLLTHLIQEVQIGRDGFTIRYRFDLAALSGDTHVPPLEWQAHEAWVAESR

SEQ ID NO: 19567 - protein, 450 aa, synthetic construct
MIKAAIYIRVSTQEQVENYSIEVQRERIRAFCKAKNWDVYDEYIDGGYSGSNLDRPDIKRLLKDLNKIDVVVVFKLDRLSRSQRDTLELIEEHFLKNNVDFVSITETLDTSTPFGKAMIGILSVFAQLERETIAERMRMGHIKRAEKGLRGNGGDYDPAGYARNEGHLVTKDDEAKHIKRAFELYEQYNSITRLQEILKEEGYSVWRFRRYRDILSNPLYAGYVTFAGKTYKGQHEPIISLEQFKRVQAILSRHKGHNAHKAKQSLLSGLMTCSCCGEPFVAYSTGKSKDVSRRYYYYICRAKRFPSEYEQRCMNKTWSRKKLEDIVIGQMKDLTVAKYHNQKKEKKINYEKLIKDIDKKMERLLDLFTTNTNISRQLLEKKMEEHNLEKEKLILKQQKSEQEISISNDMLTKTLKSFDSLEFKDRQIVINHFIEEIYIDHENVEVIWRF

SEQ ID NO: 19568 - protein, 523 aa, synthetic construct
MKLSHILQPNRKAAFYGRHSTDKQDMDMQLNSVMEVIRKYDCIHTHSFLDKAVSARKNKITSRKELENMFEGAKRKEFDFVIVYKSDRLARDPLEHQTIRIVMKTLDIPIIISSTESVYNTDNDLIVQLMEDGFTKYEVDTIIARTRSGLENKAKQGKWLGGKSPFGYTYDKNSEQFIEHTEELCYVKEIFNLYLNGHGFHHIANTLPNGSRRGKDWGKENVKAIVLNPFYCGLLSWRRQTGGKQNARDIWGEAPNHYVKPIISRTTWELCWRIYSEKRNGNMVPKHYKTSFLLQGLLSCEKCQELMKTKNQQTVSSTNKKYGGKIYFCSNCKLRIDADLLHDKVVNQTLTDVKISGFHNVYHAIEQKIQYEIQELNNNIQKHQRRLFENYTIKLHNITEELKQRMKNNDDKRFLKSLAIYRSDVQRKIDGIIQQKNDFKQQITLKEKIEKSKETWLHTLNEVFQDDVKLQEISDMDKRRFLLPLIQSVSIKENKKCNEYDISLQLRTDFSKRDVKNQISLIL

SEQ ID NO: 19569 - protein, 641 aa, synthetic construct
MEVEVIKANNPFDESAKIRKTDRLRVAAYCRVSTDDEDQIKSYNSMVKYYTELIKNNNQWVFAGVYADKAITGTKVDKREDFQRLIQDCMDGKIDMVIAKSLPRFARNTLDTLKYVRMLKEKGIAVYFEVEKINTMKDGEFLMTILSSVAQQEVENTSAYVKKGLKMKMKRGELVGFQGCLGYDYDVATKSLSINAKGAETVRYIFDRYVAGAGSTMIARELNEQGITTIKGNPWTTSSVMGIINNEKYKGDILLGKTFTVDPISKRRLENLGEEDRFYIRNHHEPIISEETFARAQEIRERRNGGRKSPTPGKREKYSRQYAFSCMLECGFCGASLSRRRWHSSSKYKKTIWQCVKSTKSGKRYCPDSKGIPEQVIEEAFIESYKMLCSDNKDVLEEFITRVEKTLSENTARDKLMKYQKSADNLQTKRKALLEKYLEGIVSQDIYEETDVGYERKLSDIRANIEMLEQQMEDEVSLKRRVEDFKKALSQNEVLQEFDRGIFESIIEKVIVGGYDEDGNKDPYKITFIYKTGFRNEVGNAKQRFDKTKSVGDKAKELCSHIADEVKDVCSYVSDNTCGDCSVTAKGELVEVLEFTHFYEHFTFEKTDWSERGKHLKKYIRVIVAVELDTVGAKRTPTSTQ

SEQ ID NO: 19570 - protein, 461 aa, synthetic construct
MKRAALYIRVSTDEQARHGFSLGEQQHDLESYAASHHYTVVDVYADEGNTARKAISKRKELQRLLDDVRAGHIDVILLKCLDRWFRNVQDFYKVQEVLDAHGVEWECTQEDYNTTTTNGRLMLNLKLTIAQNESDQTSDRIKYINEGKKRRKEECTGKHPFAYTSVDKKLTIVEEERPIVEFAFAQLLAGSSNHSIAKKIWEEFHFAIDARRVWRIVRNPTYKGERYGIPDYCPAIIPPEDFDRVQELLSRNKPPTRTGLTYLFNGKIVCPSCGSILVVNCGKSKKTGKYTRPTYLCGKKYTTGKPKDAGGCQFGGGVSENVVERWLVKNIFPLLKGYEAQLKASRGHSVNYKSKVKGINAKLTRLKDLYLDALIDKDTYKADYQKLQDELARAVIDAKKQIRLSPAMDSILSDEDFETTYYNLPREQRRELWQTLIKRITIGRRPEERGKSYKDFIVEFM

SEQ ID NO: 19571 - protein, 498 aa, synthetic construct
MFKLKTEEEEIEAVGYVRQSDEREDKEDISEQTQRAKIKAYCDFNNIKLVEVFKDIDYSGFRISYTKRPGIMEAFKYCREHPKVKKFVVFNLSRLTRRKKDFHLIHSLLSSIDVDICSASEQLDFGTATGRLLTSMLVDFNEYYSDNLSDVMNDNKATNAEKGRWNGGPAPYGLKKNSDGGFTADGEKAITVKTMFRMTFEGKGPYLVAAWLRNQGILTETGVHWTPRRVRYVLKNVTYAGMQRWKGKFHKLANTETLISWEEFEYLQKTRFSKDNVWRGMHNRQLLSTLLRCPDCGSKMSSRKTTATSKRRYICDNKNSYGKCTSPNYDTETLDSAVIGLIGKLAKERYQPVHVLPELSEQTQKDQGISSIKKLQNELTVLEQAKQKVYDDYYLHQKLDETQFNSLMSRYDARQKDVTLMLEKIPLPTKTNYGDYDDVIDLFAEALDVLEPDEKRKAVGLVIQKVIPGNPAIIEFRWGEKREIPASAIKYGNRSVIY

SEQ ID NO: 19572 - protein, 525 aa, synthetic construct
MAKTVRAIPATISRYTSSPINSRKKRKVAGYARVSTDHDDQITSYEAQVDYYTNYIKGRDDWDFVGMYTDEGISATNTRHRDGFKRMVKDALDGKIDLIITKSVSRFARNTVDSLSTIRKLKEHKIECYFEKENIWTFDSKGELLLTIMSSLAQEESRSISENVTWGHRKRFADGKVSVAYSRFLGYKKGPNGGLVVVPEEATTIKLIYKLFLEGLGTTTIAKQLTKRGLKTPGGKSKWSARTVYSILQNEKYKGDALLQKSYTVDFLTKKTKINEGEVPQYYVEHDHEAIIEPQTFEMVQAELKRRNKARKYFSGTSIFSTKIQCAECGGWFGAKVWHSNDKYRRIIYQCNNKFRNNTGCRTPHLTEEEIKMYFVRAMNKMITEKDEIIQTIEDARQVICDNGDLLAKRDAMQKEIGILVEMAQNAVEQNARVAQNQEEYQKQYDDIISRYDAMKIEYEQLCEKIENRQDRNEQLGRFIQELKGRDSLLTEFDQSLWCALVDKMVVKDKENVTVVFQDGTEIKA

SEQ ID NO: 19573 - protein, 587 aa, synthetic construct
MKKITRVSRPMPAIVRRKKVAAYARVSVESERMNHSLSAQISYYNGLIQKNPEWEFAGVYADDGISGTTIDKRKGFKQMLADCEAGKIDIILTKSIQRFARNTVDLLTTVRHLKDLGIEVQFEKEHIHSLTGDGELMLSILASFAQEESCSISENVKWATRKRFAKGVPNGRFRIYGYRWQGDQLVPEPKEASVVKLIYDNFLKGLSAETTEKQLEEMGIKSFNGKHFGNSAVRRILENITYTGNLLFQKAYSTDPITGKTKINHGELPQYFVENTHEAIIPMETYKKVQEERERRRELGALANWSIDTCCFTTKIRCGICGKSFVHIRSKRKNKDCWTCISHKERGRTCRSKGAIPQKVLVKECTEVLGLSEFDENVFLNQVDIIVVPEHHVMVFHMKNGEQITRQWVSTARKDAWTSERRKEWGERHKLKSTNPNRKAFNEFTGFIKCGYCGENYRSQQTTYSDGKKERYWRCAGICGNEAIKDSTMKKLTASVLGLDTFNEEKMDESLEKAVVLNREITFHFKDGHTETRQYRERKRGTRHSEAYRAYMHEIMQYAKRKDPEAKKIMLALKEEWKREDNRWQKQ

SEQ ID NO: 19574 - protein, 649 aa, synthetic construct
MLGIYARISREKDDGKDRSINDQILSGKELAAELGLKYDTYIDEGLSGMLDIEERPGLMQLIEDILNKKITHVFAYDQSRLERNKDVWSKLYSIFQDKRIKLSFKGVLEFDFESDENYLFSHITSLMNNFYTKVASRKIKSVLSRNIQAGKAHAIPPYGYGKDNNGYLIVDENEKNIVKQIYDSSLKGIGLDSIAYTLNEANVPTRYNKINTGTYTVRNKHTGEERKLEKSKTKWRGGTIRNIITNPIYKGTRIWKGQSYSAPSIISAEHWDEVNSNLSKNANNTGKKVLHRYLLKGVLRCGKCGRNMVGRSRVNKKDHYYQCSSKRYKGESCGNKSINIDKIEGIIWSRFFKGNDLLSLLQNELIKDDNKVELLNKELKKLHKKIENEKKEKANLINAVAKGLLKDEEIITNKRQIDRKVKETETLIKDIEKQIYNAKNSDKLVTNYITEFERYTDNLSFLEKKEIINKYIKSISVLSPYTNANTYTLLIKFKINLKDEIYIYEKSRNFLMSYSDWTVVDSKFFNSESSKAISIVDISIIKRIRFNPETNTWYTPPYHITDDGMINFHPNSIIPYHNFPKNTIVWTKESICDFYKQYPDLLCKESGVSTISKDETQEYYNQMKNDYQQFKNKPLIEWLDFIEDRSKSS

SEQ ID NO: 19575 - protein, 524 aa, synthetic construct
MGKIADLYIRVSTDEQADKGYSLRDQEDRLRRYCELKEISVRNVYIEDYSAKTFNRPEWKKLITALRKQKNIKNVTLLLFTKWDRFSRNTSQAYQTIDILRSLRSEPQAIEQPLDMSIPESKIMLSHYLTIPEVENERRALNVFYGMRRARKEGRWMGTAPLGYVNKITEDHKKYIAIKEVEAEILIWAFDKILENSFNTNQIWKMVREKAKGMSRFSKNNFWTAIRNPIYCGKIFIPAFKDEEAYFVKGLHEPIISELKFREVQDVLDGRKRDFTKPKIVSMDNLPLRGFLKCPKCERMLTGSASKGKLGRYYYYYHCSSQCGVRFRAPEVNAAFERQLSELLPRPGMSEVFIETVLEDFQSKTKKENIERKQMLKQVEDLNARLQKALIQKVDGTLDDDDYNFIKKDTYAKIERLEFDLSHLSDQNTEISRLLKSELAKIINLYKYYVEGDMEQKRQIISSMFPEKLVFDGEKHRTPRINSAVQLIYSKEREIRGNKKGTNLSFLDLSQQVAPPGIEPGSKV

SEQ ID NO: 19576 - protein, 506 aa, synthetic construct
MRTVITYLRFSSAIQGAEGADSTRRQNDLFKQWLKKNSDAQVVASFSDEGLSGYKGKHLTGQFGDMLARIESGEFPEGSILLVEAIDRIGRLEHLETEALMNRIIAHGIEIHTLQDGLIYTRDAISDDLGISIIQRVKSYIAHQESKQKSFRVSEKWKQRAKLALAGEQRLTKMVPGWIDPDTFKCNEHAETVRLIFKLLLDGESLHNIARHLQANNISSFSRRKDANGFSVHSVRTVLRSESVIGTLPASQRNDRPAIPNYYEAAIDAATFNKAQEILDKNRKGRTPASDNPLTINIFKGLFRCQCGASVHPTGTKNKYAGVYRCNNNPDGRCDVPPLKRKPFDKWMIDNFLGMIDVGNDGESEGKIAALQHEVEIVTTRIKKATALLLEMDDITELKTQVKELNQKRTELQTTIDNMRRKASLTDKELPQLKDIDLTTKAGRVECQLILSKHLKGLTLGKDSVTVTLQNDTEITIPTNPLPLNDGTSIFEIADKELLDIDAFRL

SEQ ID NO: 19577 - protein, 507 aa, synthetic construct
MKRVISYIRFSSEKQAKGDSLRRQSKMVTDWLKAHPEYYLDQDLSFRDLGVSGFTGKHLKGGLGDFLTAIEKGLVKAGDTLLIESLDRLSRQAVDRASELLRNILRSGVDVVTLSDGEHYTSESLKDPLALIKSILIMQRAHEESLRKAERIQAAWDAKKEAAKAGIKISKRCPAWLKLNDDRKSFSIIPEKVETVKRCFQLRLEGKSIWAIVKALNDEGHQTLNQYKAGKFGQTSVQDLLKNRSVIGYFTPKGCEEIAGYYPAIIDETTFYKVQQLSHSRYGRKPVSAKPLSVNLFKGVIRCSECGHALIITGFSDTRNGIYRCPLRNENRCSAKGLSRKQTDGTLLTLLSRLDRFDSDTTNTIDTLKLHREHISSNIEKLVQLSLEIEDLSAITSKLKQLKGELSQVDADIEKETQRLKSIDVGCLSDCDLTTKAGRIEAQLIIKSAVKEVVLNTAKRRCKVTFHNGKVIDLSITENPSEDVTEAIQSLSEVTERGLIDVDVVEI

SEQ ID NO: 19578 - protein, 559 aa, synthetic construct
MKTKLYSYIRFSSMRQNDGSSYERQIRMAREVAAKYDLELVNDYQDLGVSAFKGANSKTGALSRFLDAIGRSVPVGSWLFIENLDRLSRADIVSAQELFLSIIRRGITIVTGMDNKIYSLDTVTANPMDLMFSILLFIRGNEESQTKRNRTNSSALIKIKAHQENPQNPAVAIEEVGKNMWWTDTTSGYVLPHPVYFPVVQEIVELRKNGRSTAEILDHLNETYAPPPAVSNKKHSKWSRAMVERLFHTRALIGIKEISVDGVNYELKDYYPRVIDDPTFYHLKKNIGARAWNFGDKEEVKPIPLLSGIGLLKCDHCGCAMVKVKGTNKRSDQYRYTCDATRSRRLDCEHPNWSFRGDQLEKAVLQLLADKIWIAEDKANPVPALKVQVDEISRKIDNLIALSAMTGATKELADQITTLNSERETLYNQIKMAEEEMYSVDSQGWEKLAEFDLEDVYNEERLKVRFKIKQALKRIGCSRIDRNKNLFVLEYIDGKTQRVVIENSRGTRKGQIFVDLKTINDRQILESNGLVLHPCLDMLTDKDWKPEEEIPGPLQEFGI

SEQ ID NO: 19579 - protein, 528 aa, synthetic construct
MKVPVWCYARISTLKQIDGFGIQRQINTINQFLQCVELDHRLPFTLDVDNVTQMVAEGKSAFRDKNWNEKTKLGQYRKLVMDGVISDSVLIVENIDRLTRLDPYMAIEIISGLVNRGTTILEIETGMTYSRYIPESITVLVMQCNRANGESKRKSIMMQKSHANRYGKVSKVRPRWFDVVEIDGIKQYRPNETAKAIQRMYNDYINGIGAAHIVRTYGNTDNGKAWTLVTVLRALSDKRVADDARYPPIIDKKLYDSVQALKAATNKKGNTHQKNMLNIFSGMSRCPVCNQSIIVKRNSHGNLFTVCLGKRTNKTCEARSISYFALERPLLTAIRDLDFSEVYKHEDKNVLTLRDQWIQNERDIAAFRERLSKASRYEKFVILDELETMNREQEELTIRLKSVDVPKDIQLTFDDDKLDLDTNYRIELNNRIKKLIQYINIVREDVTKSSYTIYCTIKYWTDVISHLVIIDVNIKRTGTGGTNTLTTTLRSVSSLNMDGTVSGNPDSDAWEYWKSFLDGTIGLVDYKK

SEQ ID NO: 19580 - protein, 507 aa, synthetic construct
MKRVISYIRFSSEKQAKGDSLRRQSKMVTDWLKAHPEYYLDESLTFRDLGVSGFTGKHLKGGLGDFLTAIEKGLVKAGDTLLIESLDRLSRQAVDRASELLRNILRSGVDVVTLSDGEHYTSESLKDPLALIKSILIMQRAHEESLRKSERIQAAWDAKKEAAKAGIKVSKRCPAWLRLNDDRKSFSVIPEKVETVKRCFQLRLEGKSIWEIVRTLNAEGHRSMNQYKPGKFGQTSVQDLLKNRSVIGYFTPKGCEEISGYFPPIIPETDFYKVQQLSHSRYGKRSVSDKPLSVNLFKGVIRCSECGHALIITGFSDTRNGIYRCPLRNENRCSAKGLSRKQTDGTLLTLLSRLDRFDSNTTNTIDMLRLHREHISNNIEKLVQLSLEIEDLSAITIKLKQLKGELSQVDADIEKETQRLKSIDVGCLSDCDLTTKAGRIEAQLIIKSAVKEVVLNTAKRRCKVTFHNGRAITLPITENPSEDVTEAIQSLSEVTERGLIDVDVVEI

SEQ ID NO: 19581 - protein, 508 aa, synthetic construct
MKKAIAYMRFSSPGQMSGDSLNRQRRLIAEWLKVNSDYYLDTITYEDLGLSAFKGKHAQSGAFSEFLDAIEHGYILPGTTLLVESLDRLSREKVGEAIERLKLILNHGIDVITLCDNTVYNIDSLNEPYSLIKAILIAQRANEESEIKSSRVKLSWKKKRQDALESGTIMTASCPRWLSLDDKRTAFVPDPDRVKTIEIIFKLRMERRSLNAIAKYLNDHAVKNFSGKESAWGPSVIEKLLANKALIGICVPSYRARGKGISEIAGYYPRVISDDLFYAVQEIRLAPFGISNSSKNPMLINLLRTVMKCEACGNTMIVHAVSGSLHGYYVCPMRRLHRCDRPSIKRDLVDYNIINELLFNCSKIQPVENKKDANETLELKIIELQMKINNLIVALSVAPEVTAIAEKIRLLDKELRRASVSLKTLKSKGANSFSDFYAIDLTSKNGRELCRTLAYKTFEKIIINTDNKTCDIYFMNGIVFKHYPLMKVISAQQAISALKYMVDGEIYF

SEQ ID NO: 19582 - protein, 507 aa, synthetic construct
MKRVISYIRFSSEKQSRGDSLRRQSKMVTDWLKAHPEYHLDQDLSFRDLGVSGFTGKHLKGGLGDFLTAIEKGLVKAGDTLLIESLDRLSRQDIDIASELLRNILRSGVDVVTLSDGEHYTRESLRDPLALIKSILIMQRAHEESLRKAERIQAAWDAKKEAAKAGIKVSKRCPAWLKLNDDRKSFSVIPEKVETVKRCFQLRLEGKSIWEIVRTLNDEGHQSMSQYKPGKFGQTSVQDLLKNRSVIGYFTPKGCEEISGYYPAIIDETTFYKVQQLSYARYGRKPASDKPLSVNLFKGVIRCSECGHALIITGFSDTRSGIYRCPLRNENRCSAKGLSRKQTDGTLLTLLSRLDRFDSDMTNTIDMLRLHREHISSNIEKLVQLSLEIEDLSAITIKLKQLKGELSQVDADIEKETQRLKSIDVGCLSDCDLTTKAGRIEAQLIIKSAVKEVVLNTAKRRCKVTFHNGKVIDLSITENPSEDVTEAIQSLSEVTERGLIDVDEVII

SEQ ID NO: 19583 - protein, 529 aa, synthetic construct
MTIAYSYIRFSSSQQSQGDSLRRQTQLAERYCSEHNLTLSDTTFQDLGVSAFNSANSNEDSGLGQFLSALNQGLIDRGSYLLVESLDRLSRARVQTALRQMLNIIELGVKIVTLMDNRIYDQESDTTDLIISLTIMERAHNESKTKSERIRAAWENKRQNPHTTNRHSITPFWLTLNSDKRSYTVEKKHADIVRKIYQLSIDGWGVVKIVRFLNDSEIPAPKGGSWSGTTVCRILNTKAVLGHYEPTQNRQSLNTVIENYYPAVIDEQTYYLSQKRKSERSTPESAGRKTEYPNPLHQIAKCKLCGSSMYYDNKSKTLKYLTCREFKKKNCTNKPIRIELIHRFILEVFNSPMYIKQHVELADKSHQRDTNKLLELEGNINEKKKALKGLLSFTNDFTNALIRDEVKTRSEHIQELEKQLESAKAEQAVERDTDTQVSFKEALKLTINAFQLPLEGKTELSAEELFNTRVRLNRVLKQTFNTLSILHDKESKRITIETEVTDNNKFSYKFETNKKAISEPLSNNIWSMY

SEQ ID NO: 19584 - protein, 541 aa, synthetic construct
MSEMKKKRIGGYIRVSTEKQVMGYSIEGQITQIEQYCQFNGYELVDIYADRGISGKSMNRPELQRMLNDAKNGKLDCVMVYKTNRLARNTSDLLTIVEELHRQNVEFFSLSERMEVKNSTGKLMLQILASFSEFERNTILENIYNGQHQRALEGYYQGNLPLGYNNIPDNKKELMINQHEANIVKYIFESYAKGHGYRKIANALNHKGYVTKKGNPFSISAVTYILSNPFYIGKIQFAKYKDWNDKRRKGLNDKPVIAEGKHTPIISQSLWDKVQARKKQVSEKPQVHGKGTNILTGLISCPQCSASMSASTTVNTLKDGTKKRIRYYSCSNFRNKGSKVCSANSVRADVIEKYVMDQILEIVKSDKVLKQVVERVNQENHVDVAALNHDIAYKQQQFDEINTKLKNLIQTIEDNPDLTSALKPTIHQYETQLNDITNQMNQLKHQQNQEKPSYDTKQIAALLQQIFQNIESMDKAQLKALYLTVIDRIDIRKDGSHKKQFFVTLKLNNEIIKQLFNNTSLDEVLLSTSSLFLPQTLFLQI

SEQ ID NO: 19585 - protein, 449 aa, synthetic construct
MKQAMGYLRQSTTKQQSLAAQKQTIKALAEKHNIQHITFYSDKQSGRTDKRNGYQQITELIQQGQCDVLCCYRLNRLHRNLKNALKLMKLCQKYHVHILSVHDGYFDMDKAFDRLKLNIFISLAELESDNIGEQVKNGLKEKAKQGKLITTHAPFGYHYHNGTFTIDTVKAPTVKAVFNYYLQGYGYKKIAQYLEADDKFINRKPYQVRNIILNPNYCGRIINQYGQYENMFPAIVSTTIYEEAQVTRTQKQVKHKPSENQLKQKIKCPYCHSTLTNMTVRKTDHSLRYYVCPQNMNNARFVCEFKGINAQELETSVLAICQDFFQNQQLYSKINHTIQQRLKRQRDVETKTTLNHEQLIEKLAQGKIDAETFREQTQSLHQQSKPISSISAYQIRKAFQNIIQQRFTLNMLYPYIDEINISKNKTLAGIYFKNEPLNIVNQTTQSSIA

SEQ ID NO: 19586 - protein, 541 aa, synthetic construct
MDKMKKKLVGGYIRVSTERQVEGYSVEGQIIQIEQYCQFNGYELVDIYADRGISGKSMNRPELQRMLNDAKNGKLDCVMVYKTNRLARNTSDLLTIVEELHRQNVEFFSLSERMEVKNSTGKLMLQILASFSEFERNTILENIYTGQHQRALEGYYQGNLPLGYNNIPDNKKELMINQHEANIVKYIFESYAKGHGYRKIANALNHKGYVTKKGNPFSISAVTYILSNPFYIGKIQFAKYKDWNDKRRKGLNDNPVIAEGKHTPIISQDLWDKVQARKKQVSKKPQVHGKGTNLLTGIIFCEKCGAAYAASNTTNTLKDGTKKRIRYYSCSNFRNKGSKVCSANSVRADVIEKYVMDQILEIVKSDKVIKQVVERVNQENQVDVAALNHDIAYKQQQFDEINAKLKNLIQTIEDNPDLTSALKPTIHQYETQLNDITNQINQLKQQQNQEKPSYDTKQIALLLQRIFQNIESMDKSQLKALYLTVIDRIDIRKDGNHKKQFYVTLKLNNEIIKQLFNNTQLDEVLLSTSSLFLPQTLYFQI

SEQ ID NO: 19587 - protein, 558 aa, synthetic construct
MKGKIALYSRVSTSEQSEHGYSIHEQEQVLIKEVVKNYPGYDYETYIDSGISGKNIEGRPAMKRLLQDVKDNKIEMVLSWKLNRISRSMRDVFNIIHEFKEHGVGYKSISENIDTSNASGEVLVTMFGLIGSIERQTLISNVKLSMNAKARSGEAITGRVLGYKLSLNPLTQKNDLVIDENEANIVREIFDLYLNHNKGLKAITTVLNQKGHRTINQKPFSVYGVKYILNNPVYKGYVRFNNHQNWAVQRRSGKSDENDVILVKGKHEAIISEEVFDQVHEKLSSKSFKPGRPIGGDFYLRSLIKCPECGNNMVCRRTYYKTKKSKERTIKRYYICSLFNRSGSSACHSNAINAEVVERVINVHLNRILSQPDIIKQIASNVIEELKQKYSNQTEIKYDIDSLEKQKAKLKTQQERLLELFLDDQMDSEMLKAKQSQMNEQLKMLDKQIKEAQQATESQDEVPNFDKLKSRLTMMISRFSVYLREATPEAKNQLMKMLIDSIEITTDKQVKLVRYKIDESLIPQSLKKDWGSFFMPKFQFEIYGQNDYFIDQITTFTT

SEQ ID NO: 19588 - protein, 449 aa, synthetic construct
MVEVIGYVRQSTLKQQSLATQKSLIIETANQYGWYNVTFYDDKRSGRHTKRSGYQRMVEAIRSGKCKVLCCYRLNRFHRNLKNAIQLFEICKTHRITIISVNDGYFNLAKEFDCFRLNILMSLAEMESNNISEQTKNGIREKAKKGKLITTHAPFGYTYRNGTFTINQAEAPTVKSIFHYYLQGYGYKKIAQYLETDDKCINRKPYQVRAIITNPNYCGRVINQYGQYDNMFPSIVSTSIYEQAQAIRSQKHTKRTPSSNQLQKKIKCPYCNSTLTNMTIRKKHHTLRYYVCPKNMNASRFVCDFKGINAQVLETSVLATCQDFFQNQQLYSKINQTIQQRLKRQRDIEAKHTLTQEQLIDKLAKGMIDAETFRNQSQSVLQKRKTISSISDTQLQTSLQKVIQKNFTLNMLHPYIDEIRITKNKTLVGIYFKNEPLNIVNQTSQSLNV

SEQ ID NO: 19589 - protein, 705 aa, synthetic construct
MQSLSHSPQIYSYSRFSRLRQKDGDSLKRQREYAEEVAKEYSMTINEDLVFSDHGKSAFHAEHKKKGKYGIFLDAVKQGKVAKGSVLIVESFDRLSRENAMRAQSDITALIESDITIITSSDKRVYNKEVVYRDPSQIFMMVAVMVRAHEESLTKQKRSLKRIKGAVEKWQGGDKAVSVGGANPSWLKRTKIGLVFDKEKADVAKKICDMFTSGKTMVYIAAYLNEGNIPTFGRASHWRVTTITTLLENEALFGRKIVDLGGSEDGVVLPFRAILEGYFPALITKEEFDLIQEIKKLKAKGRAGHRTKRKVTDEIGNVIEEIEENAIYLLSGYGVALDGAAKSRCAKCGGSMGTRRQHQYTRKGVYTKTEYRFECAESSTTGFKKCDVGSIRLGNMEASFLLTVSKHIDFNLLNKNVDSREVEVIDSKLKEIEVQLESATELLITTTNVTIRQTAQKKLSELEAEQRELERKKLDGKEFVINQDAIDHFVSVVDRAAFNVADHEARSEVKNILMQSTTKLVMHIKKKQTMKDFGFSNIMPNVNVYAIEVYFKSGKVMWYFHDAKRDQLAFTVILDSEEVAGGLSESYLKKWNELGDDSYEEHLAFEDGEVFADLMEKLIESQQDDGSFADYDEVFGFYDQKKTRAEEIQEKWDDWKFRVDLDANNREYDELLSKNSSKASSVSKSEFSSEVDLHCDTWGFSLGRE

SEQ ID NO: 19590 - protein, 547 aa, synthetic construct
MRTAYSYVRLSSKKQIQGYGQERQWQAIQAAALAHCWELSEKTFSDLGVSGWKGANIETGALSQFLQCVEDGYIEKGSVLIVENVDRLSRAGVQRAVSLLMQLLASGISIYTFTDSKLYEPDSHNPLMDLMAWALSAQRAFEESERKSQMILNAKAKAREKARLTGEIITRRCPSWLRVNQDKTAFELIPERVETVRKIFDLYVNGYGTPRIGRLLTEEGRKPLTGRAWYPRSISRILQYRAVLGEYQPTLNGKPEGDAIKNYYPAIIDEDRFNEVQAVLKEGGAGKGRRGKEMRNYFAGLLRCSCGEGMHIVSSCVKGKRYYQLRCLQYRISCFGSSWNFYKLSSFVLFALRRLPILEVMGSQDNNNIKELNAKERELTFLLEDTRRQLDNTINAIAALGLNDQLQSKFRELKTSVTNIEKQLSNVKTELETSQGKLVIQKQDSEMLTGRFLELIDSTKDIDGRIKLNQVLRRYLSKIEMHADKKEEYRYIKIYRKDGDELVSIQCDHSLKGALFESKDGLETFELLPATDAKRNEISNTLLCTPK

SEQ ID NO: 19591 - protein, 449 aa, synthetic construct
MKQVIGYLRQSTMKQQSLAAQKQAIEAIAEKYHIQHINFYSDKQSGRKDNRSGYRQITQLIQQRQCDILCCYRLNRLHRNLKNALKLIKLCQTYHVHILSVHDGYFDMDQAFDRLKLNIFISLAELESDNIGEQVRNGLQEKAKQGRLITTHAPFGYEYHNGTFIINQNESPTVKAVFNYYIKGHGYKKIAQLLEEDNTYINRQPYQVRNIIINPNYCGRVNNQYGQFDNMFPSIVSTSIYEQAQRLRLQQQTKQTSSDNQLKQKIKCPCCNATLTNMTVRKKNHILRYYVCPKNMNASRFVCDFKGINAQTLEDKVLEVCQDFYQNQRIYTKIKGAIDKRIKRQRNIEKHHTLTQEQLIEKLAQGIIDAETFREQTQSLRQQPQRTTSINGHQIQHTIQNIIQKRFTLNILYPYIETIHITKDKNLIGIYFKNEPLNIVNQTMQSSIA

SEQ ID NO: 19592 - protein, 618 aa, synthetic construct
MAGIKEEKKIYLVGIYCRLSKDDGTDNESASIATQKSILTDYVKKQGWHIAKTYVDDGYSGTNFQRPSFQNMIKDIESGLINCVITKDLSRLGRNYLDCGLYLEVFFPEHNVRYIAVNDGVDTLNKSAMDITPFRNILNEMYAADISVKIKSAYRARFQQGKFMGTTAPYGYIKDPADHNHLLIDDKVAHVVKEIFDLALKGNGVAKICRHLNKQHILRPAAYAAERGETGFERHFEGNEDKRYIWSGNSVRSILRSPIYAGNLVGYKRIAANMKSKKRPSKLPEEWEVIPNTHEGIVTQEEFDIVQQLITSRRLPQNKGGFVNIFAGVIKCVDCGCALRAMNVHRRKRPEIIDCVQYSCNNYARNGRSECSAHNIEARDLFNAVLADINCFADMAVNDEKAVRAIEKRLTETDQSRAKALEKERKKLNKRLAELDRLFSSLYEDKVMERITERNFEMMSGKYQKEQLEIEARLKEVTETLNESYEKSRGIRDFPALIRNYQGLKELDATVINALIDKILVSEREKMADGTVKQEIKIYYKFIGFVDELHIIPTKRWAAMPAKNCTVCGVEYVPGSGASRYCPACAKKIRREKSNESKRRSREQKRIACMNCPQKMTD

SEQ ID NO: 19593 - protein, 531 aa, synthetic construct
MTIAYSYIRFSSSQQSQGDSLRRQTQLAEKYCIENNLTLSDTTFRDLGVSAFHSTNSQEDSGLGQFLSALNQGRISEGSYLLVESLDRLSRAKVQTALRQMLNIIELGVKIVTLMDNRIYDQESDTTDLIISLTIMERAHNESKTKSERIKAAWVHKRQNPTTTNRHSSTPFWLSLNADKKTYKLKEKYVEIVRKIYQLSIDGWGVIKIVRHLNESNIKAPKGGSWATTTVSRVLTSKAVLGHYEPMQNRKSLNLTIEDYYPSIIDEATYYLSRQRQNERSKPEAAGRKTDYPNPLNQIAKCKLCGSSMYYENKSKSLKYLTCREFKKGNCTNKPIRIELIYRFIYEVFNSPMFHQCQAKLVEKSNQKGSNRLEELTAKQTEEENALRGLLSLSNDFSNTIIQEEIKVRSERIESFKKQIENVKAEQAVEHTRSVHINFTEALQLAVSAFRFPLGEVEVEELSREELFNTRVRLNRILKRAFNSLSIYHSGESKRITIETEVMEGFTEGLKYETTRQSIKEPVSSRIWSMC

SEQ ID NO: 19594 - protein, 528 aa, synthetic construct
MYTPQSLSEHYSQITTPQTEQPLAILYSRFSSRNQVGNDSINRQLEGAQKFCEYHNLKLSEANYSDLGISAYKDNVREGLELLLNAVRDGTIPANSWILCHTTCRLSRKGFQHVLKLVSELVATGCKFCTINDNQVYDSTNINKLSSALPLIISADLAFSESEKKSLMIKHAKEQTRKNRKIVGKQPYWITLQDGKPMLNDFSTIVKTIIDLRLKGYSAQRIAKQLNADGHLSPTGKSWGAAAIRKTIDNHVLYGAKEYSEMKDGKLVPVEIVEDLYPALCSKSIWLQIKYEKGTKEVGKRSKSSPFSKLLRCACCGSAMTTRSTYQKGVKYDYRVCIRSTEGSCDQKSRFRDLDNIILGELKHLKYEVKTHATVEVDSIKVFQDKLTLLNQTKELLQSNPTALAAIYADIAKTEQELHEAKRTKELLESQPNEVNFQAIVDVEDQSQRNVLLRRIIESIEVKRIDKEKLVSQVRVVVRFKNSHTQTFVVCYRYRGYDIKWLTDTEKYKEQLNAFVNDAVKQLEEWEK

SEQ ID NO: 19595 - protein, 481 aa, synthetic construct
MITTNKVAIYVRVSTTNQVEEGYSIDEQKDKLSSYCDIKDWNVYKVYTDGGFSGSNTDRPALESLIKDAKKRKFDTVLVYKLDRLSRSQKDTLHLIEDVFIKNGIEFLSLQENFDTSTPFGKAMIGLLSVFAQLEREQIKERMQLGKIGRAKAGKSMMWAKTSYGYDYHRETGTITINPAQALAIKFIFESYLRGRSITKLRDDLNEKYPKHVPWSYRAVRTILDNPVYCGFNQYKGEIYPGNHESIISKEEYDKTQSELKIRQRTAAENVNPRPFQAKYILSGIAQCGYCGAPLKIMLGVKRKDGSRLKKYECHQRHPRTLRGVTTYNDNKKCDSGFYYKDKLEAYVLTEISKLQDNAGYLDKIFSGDNAETIDRKSYKKQIEELSKKLSRLNDLYIDDRITLEELQSKSAEFISMRGTLETELENDPALRKNKRKADMRKLLNAEKIFSMDYEGQKVLVRGLINKVQVTAEDIVINWKI

SEQ ID NO: 19596 - protein, 481 aa, synthetic construct
MITTNKVAIYVRVSTTNQVEEGYSIDEQKAKLSSYCDIKDWSVYKIYTDGGFSGSNTDRPALESLIKDAKKRKFDTVLVYKLDRLSRSQKDTLHLIEDVFIKNGIEFLSLQENFDTSTPFGKAMIGLLSVFAQLEREQIKERMQLGKIGRAKAGKSMMWAKTSYGYDYHRETGTITINPAQALAIKFIFESYLRGRSITKLRDDLNEKYPKHVPWSYRAVRTILDNPVYCGFNQYNGEIYPGNHEPIISKEEYDKTQSELKIRQRTAAENVNPRPFQAKYILSGIAQCGYCGAPLKIMLGVKRKDGSRLKKYECHQRHPRTLRGVTTYNDNKKCDSGFYYKDKLEASVLKEISKLQDDADYLDKIFSGDNAETIDRESYKKQIEELSKKLSRLNDLYIDDRITLEELQSKSAEFISMRGTLETELENDPALRKNKRKADMRKLLNAEKVFSMDYESQKVLVRRLINKVKVTAEDIVINWKI

SEQ ID NO: 19597 - protein, 450 aa, synthetic construct
MKRVALYMRVSTEQQAKHGDSLREQKETLYEYINQNKDLKVINEYIDGGISGQKINRDEFQKLLQDVKENKIDIILFTKLDRWFRNLRHYLNTQEILEKHNVSWNAVSQQYYDTTTAYGRTFIAQVMSFAELEAQIDSERIKAVMANKISQGEVVSGKTPLGYSIENKKLVINDDAPIVVDIFDYFLSSGSLRKTVYYLGSQYGIVRDYQSVKNMLTNKKYIGELRNNKNYCPPIIDKKLFYAVQKALPKNLKTNAKRDYIFKGLLKCSDCQGSVAGQTIKSRYKKKDGTESIYERTCYRCVKRRNNKLRCTNKRAFYEKNLERYIFEATKQKFEQIQINYSKKQPKTIKKKNSKKNIENKLDRLKKAYLNEVIDLEEYKKDREALMKELNEIEVEPAKIDMKNVEFILSKEFDKVYKESSKEEKNALWRSIIDNIIVFPDGNITVNFFI

SEQ ID NO: 19598 - protein, 481 aa, synthetic construct
MITTNKVAIYVRVSTTNQVEEGYSIDEQKDKLSSYCDIKDWNVYKVYTDGGFSGSNTDRPALESLIKDAKKRKFDTVLVYKLDRLSRSQKDTLHLIEDVFIKNGIEFLSLQENFDTSTPFGKAMIGLLSVFAQLEREQIKKRMQLGKLGRAKSGKSMMWAKTSYGYDYHKETGTVTINPAQALTIKFIFESYLRGRSITKLRDDLNEKYPKHVPWSYRAVRTILDNPVYCGFNQYKGEIYPGNHEPIISKEEYDKTQSELKIRQRTAAENVNPRPFQAKYILSGIAQCGYCGAPLKIMLGVKRKDGSRLKKYECHQRHPRTLRGVTTYNDNKKCDSGFYYKDKLEAYVLKEISKLQDDADYLDKIFSGDNAETIDRERYKKQIEELSKKLSRLNDLYIDDRITLEELQSKSAEFISMRGTLETELENDPALRKNKRKADMRKLLNAEKVFSMDYENQKVLVRRLINKVKVTAEDIVINWKI

SEQ ID NO: 19599 - protein, 481 aa, synthetic construct
MITTNKVAIYVRVSTTSQVEEGYSIDEQKAKLSSYCDIKDWSVYKIYTDGGFSGSNTDRPALEGLIKDAKKRKFDTVLVYKLDRLSRSQKDTLYLIEDIFIKNNIAFLSLQENFDTSTPFGKAMIGLLSVFAQLEREQIKERMQLGKIGRAKAGKSMMWAKTSYGYDYHRETGTITINPAQALAVKFIFESYLRGRSITKLRDDLNEKYPKHVPWSYRAVRTILDNPVYCGFNQYKGEIYPGNHESIISKEEYDKTQSELKIRQRTAAENVNPRPFQAKYILSGIAQCGYCGAPLKIMLGVKRKDGSRLKKYECHQRHPRTLRGVTTYNDNKKCDSGFYYKDKLEAYVLTEISKLQDNAGYLDKIFSGDNAETIDRESYKKQIEELSKKLSRLNDLYIDDRITLEELQSKSAEFISMRGTLETELENDPALRKNKRKADMRKLLNAEKIFSMDYEGQKVLVRGLINKVQVTTEDIVINWKI

SEQ ID NO: 19600 - protein, 457 aa, synthetic construct
MRVACYDRTSVYEEAKISNDAQYDAVKEYVLEKYEQIPQRFSDKGESGGKAERPAFRQLRAWVCASEEEGVIYVWRYDRLARQAKIALEFIELCQQHQVQVYSISEPLPASFSHASTNKLFVQLLFTFAEQQRNVIIENVRAGLAYKKQQRQYLSSAVPYGYRLVNGKIQQEAHEARIVRYIFQLYLTKKYGYKKLCQRLTQQKFFFRERPFQPYHIYSILKNPLYYGEIKGGSLGKYLGTFEPILSKTIFLQAQEIRQSRRTTKKDTYPYLLRQKIKCPFCGRHLSSKYQWNTKKTKKLHYYHCTDRSCQGIFLRAERVESEVLEKIQAFFQYEGIYQALIAQLTQQLAEKRKDEKHKVIQQKKQEAQWLKAFEEGNCSLEELKQQLQALQKPRSTSSFLSLQQCEAKVKEWLQLKDLSSRQLLCDHVCRIEVTKEKTVCGIYFRQMTQNILEGNE

SEQ ID NO: 19601 - protein, 593 aa, synthetic construct
MARKNPKNPDATRPLSCVLYIRVSTKLQVEKGESIDAQRFELTRYAEAHGMRVLGEYVDAGFSGKNVRGRPQFRQMLDDIIKEQPGRRPTYVLVFKLSRFGRNAADTWNSLQMLQDYGVELCCVKDGIDSATTMGKAMLSIAAVFAEMERDNIRTQTMSGREEKARKGYWNGGQAPYGYRLVDRGGKFKELVVDEDEAKVVRRIFKMYAYENKGPMAIASWLNRHGVTKAARGNATMETFGNTTIARMVVNPVYIGKIAYGRRRTEVIEGTRGETHVVKSDGYEVYDGRHEAIIDEATWAAAQAIVGTRKPNAKRHDDGHVNLLNGLLVCPKCGRKMSSHPNRGKVKKDGTRGKTTYAYYCPHTSKARGATCTFRRQYPQEYVDAEVVEMVKLASRSDAFVEALRRRINDETDVEQLREDAERIGREQAANDKRMRMLMNQIDALDPADRSYERKFSDLQRRLDDLYDRDAGFQEALEETRAKIAAADKRRVGERRLLDELDRIPELLEEADEQTRFDIVHEAVSEVRILAGRNPRKERVVQSVTFKCPVRFFWEEVPGEADGYTAVTPDSFDADGNFRDDETHVEYCLVERS

SEQ ID NO: 19602 - protein, 516 aa, synthetic construct
MAGKKVTVIPMKPRQWAAENTEEKPKLKVAAYCRVSTEMEEQASSYEAQVQHYTDYIQRNPDWELAGIFADEGISGTGTKKRDGFNRMIEACQKGDVEYIITKSISRFARNTVDCLQYIRQLKDLHIAVFFEKENINTMDAKGEVLLTIMASLAQQESQSLSQNTKMGVQYRFQQGQLRINHNHFLGYTKDEDGNLVIEPKEAEVIKRIFREYLEGSSLQEIANGLMSDGILTGGKRKLWRGEGVRLILRNEKYMGDALLQKTYTTDFLTKKRVKNDGSYAQQYYVENSHPAIIPRDIFMQVQQELDRRKSMKNKHSQCFSGKYALSGITVCGDCGNAYRRVHWKNRGTVWRCKSRVDKREHNCSGRTIYEKDLHEAIIKAINETVVDREDFLQQLSENINSVLTDGLTGRLEELDSKLKELESEIISMAIGGQGYYELASQIFSLRDERDAVAKQIAANTNLQQRVDEMVVFVKEHDVINEYSEVLVRRLIEKVTIFEKNIVVDFKSGVRVTVEI

SEQ ID NO: 19603 - protein, 602 aa, synthetic construct
MDNLAYKLGSRAVSNRYRTNQNDKVRVCFYGRVSTQHEAQINALDNQLQWYESVLKDHPNWEKVKVYVDKGISGTQAKKRHGFMQMIEDASKGMFDLVCTREVSRFARNTLDSLDYTRRLKNMGVEVFFYNDNIWSCESDGELRLTIMSAMSQEESKHISDRVLAGHKTSREKGVLFGNGNILGYRLVKGKTSVENTYEIIEEEAETVRLIYDLYLSGLGVKAIASKLIELHRKKANGEYNWEQSAVHRVLNNKTYAGYIGYNKSYTANFLDHRRVPILDRSQYEYVKGNFPPIVSEDTWNRVQALKAKKTICIGERTRGKPMATDKWVKTLVCECGSTYKKYTWRVNKNGEESNGYQCRNQVVNRKRSFHVKNGLDGTGRCDVPSICEWKLDFMAKAIFQRLWKNQKDSLAELMGTIEEHYTVDKEEHSERYEVEKLQRELDRLQKRKNNLVDMRLDDLIDETQYQKKYNLITVRIEEVEISLQKLQCDGKEIEPVDVTAEIQKIQEYLDKACNLEEKQISGELIEAIVERVTPTEEGVFKWYLKEEDSDMEMQFQEEQYVLMDRFTLGFEEAKTYRKSFGNFIRAKQWKDLDVEVYIKKL

SEQ ID NO: 19604 - protein, 498 aa, synthetic construct
MKVAGYIRVSTNKEGQKESPENQKQLILNFLAENQYDLYDFYMDVETGTTDKREGLKKLIRDAENKQFDIIVAKELSRLGRNVELLYQLKRIAETKGVRLITLDGRVDTQDISKQTMFGLYAWVYESESQRISDRIKSVFHMKCKSGKFMGSIPPYGYKLQDGKLIIRDDYTVEVVREIFNKYLEGWGHDKIARYLTKKQVPTPAQVAGKSNAGLYWQGTTIKKILSNPHYMGDLVQNRETSTNITNKKRKVNTQNEWIIVPNTHEPIISREVFEQAQKLLESKARRGKGRTKAPKHLFTNILYCADCGASMWYRHNRKGYICGNYAKHGNIACSHHAIKEQQLIETILTDLKSIYESFERLDTENQIKNKVHELQKKNAVRLQTIEKQIQKQMDLKRNALQKFINGDISKEDYHDFVSMVQDKLQQLEMEKSTIKKAMVDSQSTTDLSTIRKQLDEFLSFKTLTTEMVLRFIERIEVDNNQNVKIHYKFAPIECVKV

SEQ ID NO: 19605 - protein, 498 aa, synthetic construct
MKVAGYIRVSTNKEGQKESPENQKQLILNFLEENQYDLYDFYTDVETGTTDNREGLKKLIRDAENKQFDIIVAKELSRLGRNVELLYQLKRIAETKGVRLITLDGRVDTQDLSKQTMFGLYAWVYESESQRISDRIKSVFHMKYKSGKFLGSIAPYGYKLQDGKLIIRDDYTVEVVREIFNKYLEGWGHDKIARYLTKKKVPTPAQVAGKSNAGLYWQGTTIKKILSNPHYVGDLVQNRETSTNITNKKRKVNNQNEWIIVPNTHEPIISREVFEQAQKLLESKARKGRGKTKAQKHLFTNILYCADCGASMWYRHNRKGYICGNYAKHGNIACSHHAIKEQQLIETILTDLKNIYESFERLDTENQIKNKVHELQKKNTIRLQTIEKQIQKQMDLKRNALQKFIGGDISKEDYHDFVSMIQDKLQHLEMEKSTIKKAMVDSQSTIDLSTIRKQLDEFLSFKTLTTEMVLRFIERIEVDNNQNVKIYYKFAPIECVKV

SEQ ID NO: 19606 - protein, 604 aa, synthetic construct
MKFRTAYIYSRVSKGAQAKGDGLRRQIESATNFIKSTNETNRRNGGYTYHIADSLIIDKGLSAYKGLNTEENAGLGAFLEASRKGEIEKGSLLVVEAIDRISRLPADDAREIFSKFKTYGVDVAIVKFGIIIHHNESTKLEHDLLLTAAIHLAHLESDQKSKRIKARFEYKRGEEKKGGEKRTSICPAWMRISDDKKSFELIPNHEAVLKRMIDMKLNGIGCLRIAKSLNEEGILNFSGKKWQVKLVEKYLKMEQLVGSFQRVEHVRDEDGVIRKKPLGALEKHYYPSIIDEATFLRLKKSFKRAGGRQTGAYKNLYSNLLYCPTCGTAMSYFKPNRGKIKIRCRKQIDNRGCNQRALNYEVLEKRLIAALSGLDYAKINSQSFAMLEKEISLLEATITDLEEQQKAVESAFLDEDDVRIQVVFRSKIKAILDKIDMERSRYEQLIVVKQDYDMSVVNELKLEKPEDREKYNQFVRNFVSYIVATDDLEDSPRFIRVVFKAQSVGEVDFGFNGELVENENAVSGLYTREENVKDVNVTRTISLSKVLTFDEQLKEILDVTPPLAQDVREKIRYYFELQQAVKANPTKWLKIAKNAHLPLAGRVI

SEQ ID NO: 19607 - protein, 508 aa, synthetic construct
MKKAIAYMRFSSPGQMSGDSLNRQRRLIAEWLKVNSDYYLDTITYEDLGLSAFKGKHAQSGAFSEFLDAIEHGYILPGTTLLVESLDRLSREKVGEAIERLKLILNHGIDVITLCDNTVYNIDSLNEPYSLIKAILIAQRANEESEIKSSRVKLSWKKKRQDALESGTIMTASCPRWLSLDDKRTAFVPDPDRVKTIELIFKLRMERRSLNAIAKYLNDHAVKNFSGKESAWGPSVIEKLLANKALIGICVPSYRARGKGISEIAGYYPRVISDDLFYAVQEIRLAPFGISNSSKNPMLINLLRTVMKCEACGNTMIVHAVSGSLHGYYVCPMRRLHRCDRPSIKRDLVDYNIINELLFNCSKIQPVENKKDANETLELKIIELQMKINNLIVALSVAPEVTAIVEKIRLLDKELRRASVSLKTLKSKGVNSFSDFYAIDLTSKNGRELCRTLAYKTFEKIIINTDNKTCDIYFMNGIVFKHYPLMKVISAQQAISALKYMVDGEIYF

SEQ ID NO: 19608 - protein, 591 aa, synthetic construct
MWRRTGDGVYANGTATVVREGRRWRLNGGTLYSTLRDAKTAAGAAPVHAPRVSAQRRAGAPVPARKSAPVPAADPSTAVDLYLRKSKKVQNGDRSLSIRAQEDLGRAWADRSGYTVRHVWVDNESAFKAVDRPEFDAAMSALAAVEVGALWCYALDRFTRMGAGAITPVMDAGQRVVFDYEDLDSSRPRDRKWIIQRAEDAREHSERLAYNVKRTKERQRREGRWLGRAPFGLICDGARKLRPDTEPWVSSAVSRRTYSRWDVLSRIFHMIADGKSTRAVARELNAEGIPAPRTGRIDPAIRPSWRGSTIKYMIDNLAYEGWLTESSDGRRKPTAWRDDEGQRVRVAGHGVELIPAALAARARRSLHGTGATPKDPGKGRPKLLLTGLLRCEACGSGMTSKGDSYGCLRFHSGGDCPNPASIRRDHAEAYVSARWIAALNAAEPEDAFLLAVAERYAALRQPEASAEVVEAQEAVRAARIELAAFEKEFSAGVYKRQRAMALSLREQLTEDVEAAQAAMSALSSPTTDVSVFLNGWAAKAWEGAERSERRDFLRLAIDCIYVKRGKRGQVFVGDARMAVQWAGTNMLALAA

SEQ ID NO: 19609 - protein, 564 aa, synthetic construct
MNRSGKKCVLYPRVSTEMQVDGFSLDGQKSNLRRFADREEMEIVNIYEDAGKSGKSIEGRPAFKQMLLDIENGLEIDYVLVYKLSRFGRNAADILNSLEHIQAFGVNLICIEEGIDSSQTSGKLLISVLSAVAEIERENIIEQTMNGRKEKARQGGWNGGFAPYGYFLKDKQLFIQEDEAEAVRIIFDKYLNGNMGFHKIANYLNLQGIQKVQRNNGTLSLWGTHFIRMIIDNPVYCGKISYGRRVREKVKGSKNEYKQVPQEDYIIAEGQHEAIISEELWNAAHEKRELTGVKSPSKIGRDRAHLLSGILKCPKCGGPMYTNKHAWTNKDGTYKEVYYYVCSKARAARGKTCEYTTMLKKTDIEPLVIEAIRELIQNQDFAGEIKSRIGKEIDTSTLNRELKNYESKLKETELNKTRLENEIDSLPEDTRFRERKIHDMTLRLDGLYDIIVELEEKIEDVLLRRKAVEQDAITLENIYTLLANFDKVYDKISDEEKKSLISSLIKEIEIFPCGEAELPLKSILFNFPVYKDGEDACDFLWDKSTHVSTCPVCGNISTGCTVTT

SEQ ID NO: 19610 - protein, 515 aa, synthetic construct
MEKAYSYIRFSTKGQIEGRSLQRQSETANRYAEEHGLALQPLSFQDLGVSGFKGRNSEQGALSHFIDAVKEGAISEGSWLLLESFDRMSRQPVEKSMRLLMELVDLGINVVTLMDNQVYKKGQLDMTKLIISLVIMSRAHEESASKSKRLADAWHAKQAIAHEKPLGAHLPAWLEYNEDKTAITVNVMKAAIVKYMFMLSADGYGRVALIRRLNTEGIKPIGSRAKQWHISYVTKLLNGTSVLGEYIPHITNKLGERVPTGNILKDYYPQIIDKDLWHRAQAATQARRKGGTGAIRNGKTKNIFSGFVSCECGSTVQFVNKGTSDKGGYYLVCGTARHGAGCKYVGHRYYSVQWVVLIALQKLLTTFANKPNDNAKEMQLEGELVGLEKKVSNLISDLEENGSSTYISTAIRKAEQRVEAIKQELIDLQSLKVIEDDYVDLEEVTAKINEDSERLRLHQYLKRHIETVVLHRCKERIDIKVKNGDNIHLRYTPSDDTWESDSGVRFKVTFDTRWG

SEQ ID NO: 19611 - protein, 554 aa, synthetic construct
MSRAFLPLQVVKVAIYARVSTEEQAEHGFSIEAQLAELGVKCKEEQKVIYGEYVDAGISGKSMDKRPALQNMLEDIKNGKLQEVWVWKTDRLSRKLADLMQIMEFFNRHNVTFRSISEKDFDLSTSSGKAMMQMMGVMAEFQRNIIVENVKMGMKQRARNGKWNGGQVLGYDVVEVSVPKGKDSALQINPIEAELVRKIFHMYAGGRGLRSIANELNHNGYKTKPNKSFSAVSIKTIINNPIYIGKIRYNVRENWSEQRRKGINHDPIIVDGEHERIISQDVWETVQKLYAKKSVTSPRVFNGTYLLTGMMRCPDCGATLVAHRIHDTLKDGTKVVRRYYICSNFRAKGSRVCTSNSVKADMAEQYVTDRIAAVVRKPKILEDIVARINNNRTVNVVPLQKELASVDKELGTLDAQKKKYFKLYEADVVDNEFLIQRMNELKQQHEALTRRRHEASRQLERSSAEPVPLHQVKQVLSQFHELLSSAPIETQKNLLQIIVKQIHVKKGQKIEGIELEFDDKINACFLGYAPSTQTVAGAFAFSKQKSNASYTIVI

SEQ ID NO: 19612 - protein, 516 aa, synthetic construct
MPLKSVIKPGMRAVFYGRHSTNKQTMDAQRNTVKDFMDKYECQFVGEYLDPAVSARKTKLKERNGISQLLADAHMDKYDLVVISQHDRIARNPSEHQMIRMTLKNYNIPVCIASTENLYDSGDLIVDIIKDGNSKLEVDNTRIRTKDTMYNLFKQAKWRGGKPPFGYKYNKATKAIETVDHELQLVKDVYSMYLQFEGFDAIACKLPKGSYSGSDWTDQAVRAVVTNPFYAGYLHRGRKKQQANNSLNARADWELVRSKLIHPVITIEEWERGWDLYQKRAEGTHAPNRYKTSFLLADLLVCDSCNDKLRGKDQTTRSKSGARYGKKVYLCTNCGYKIDIQKTHRIIDHLLNDLKFRHEEMIVDKIIQSLELDLLNLQKNIQVLQASKQTIQDKLSKVNHEINEQFKCVQNPGDKDEQQKRAEMMIRILTMTKENCLKQINSFDEQITQKQLQMNRIRTADLNADHIRSRVDQLMDSHTQGKLLRGLLLEFVHQIRIDKTGRVKISARYALLETEI

SEQ ID NO: 19613 - protein, 523 aa, synthetic construct
MSLKAAVYARYSSDNQRDESIDAQVRAIDEYAKKNGYTIVEVYADKAHTATTDRRPEFQRLISDCNKGIFDAVIVHKLDRFSRDKYHSVIYKRKLEVAGIRLISVLENLDDSPESIILVSVLEGMAEYYSKNLARETMKGLKETALQGKHTGGRPPIGYMVDKATQTLILNEEESPIVELIFSQYLNGHGYKQIAQLLDQKGFRSRLGRPISKATIHDVLRCEKYTGTYLYNVTDSKDALGKRNGNRKKDESEIIRIENGIPSIISKTDFEAVQKLIADNQRTRRSGSYTAKEQYLLSGLIFCGECQRLHNTKSGMTGNVKYSGRSKLKYVTYRCNRKDNSRSCSNKEIRREHIEGYILNYLQDHIFSKENIPRLVEQVNNQILKAEAKDIGEKTNLEQRLRAATDQITNIVNAVAQGFTQASFGEKVNLLEAEKANLEVELAKLITKEKRAGITEDTLHSLLFSLKDSIAHENFPELKKFVQTYVQRVLVYAEHVEVEFKLPVVTHVSVHNGAEGSRTPVRR

SEQ ID NO: 19614 - protein, 525 aa, synthetic construct
MINPNVTAIYVRVSTTKDSQKDSPEHQRGLCEEKARVLDLDVQYSYEDRDTGTSIVAREEIQKLIQDAKSKYFGTIIFASLSRFSRDTLDSLNLKRILVDALGIRLISIEEGFDSLKDNDELKFQIISAVNQKLSEQISLSSKRGIRQSALKGNFTGSVAPFGYRKIVSSDKKTLALDENYSYIVELIYHLYVSRKMGEKAIVQYLNKEMEIPSPKGGVWGITTIQRILTNEVYTGQNVFGKYEVKKVYNDINNMSDRSKKQVQREKAKWERSAEQTHEAIIDDETFELAQEIRLKRGGGRRGGVRNRVNVFAGIIFCKHCGASLVSCKGKSRKDGPEYRYLICSTRRRQGETGCVNNAWIPYNNFRDTVINEVSKKLKRVINVETETTESKERILKKKSSIDMDKDLKRLEKAIQGNRKLLFELRKQNMLGEIDEEQYRFEKQEYEQEIASLQSQLTQSSQNKEEQINLDKVHDEIRSALVTLVNLEFDRLDEMRIILSKLIDKLVVSVDGEVEIYTPLGQLES

SEQ ID NO: 19615 - protein, 530 aa, synthetic construct
MKTIEEVLGPGSKKGVFYGRESSDKQDADMKTQKHMAYSLVEKYKCEIVREYVDTGVSAYKKKMEQRAGLMEMLDDLDKNKVDFVVVFQGDRLARNPMEHFKIRAFMNAREIYVIQSSGQDLYNSGDLLGQLMKDGYSKYEADNISTRTRDDFETRISKGIYNGGGAPFGYRYLGNHQFKIMPDEKIVVKNIFELYKSGQGFQSIAEILMTDKNTKDIWCKETVKSIITNPFYMGYLTFGRVNKSSRNSINDKSKWTITRFKGIEPIITQEEWEQCWEIYKKKSQGDLPPKHFKTSYLFKGVIYCKDCKQPLMCKDQRTKDKGKPYGSRVYKCPNRNCGLSYRADDLHEFIINDILPSVYIKARTAPHETLHEEILSSLKKDANQLLKDIKELEEQVADYIIELSQAESRVLSLYQESIESNETELMILIEHRMRLKKWIEGTKHVIDKKTKRIQYINHVESDFEIWKDSFLGSVLEEYDLQNDTKLRRLILYIFEKVEISKNWEINYTTRIDLEGDAALHVMGSFLENK

SEQ ID NO: 19616 - protein, 511 aa, synthetic construct
MENKIKCGIYARVSTDRQGDSIENQVGQGTEYIKRLGDEYDTENIEVFRDEAVSGYYTSVFDRAEMKRAIEYAREKKIQLLVFKEVSRVGRDKQENPAIIGMFEQYGVRVIAINDNYDSMNKDNITFDILSVLSEQESRKTSVRVSTARKQKAARGQWNGEPPYGYIVNPETKRLEIHEERGKIPPLVFDLYVNRGMGTFKVAEYLNKKGYVTKNGKLWSRETVNRLIRNQAYIGQVAYGTRRNVLKREYDERGAMTKKKVQIKINRQEWQIVEDAHPALVDKELFYKAQKILMSRTHERGGAKRAHHPLTGVLVCGSCGEGMVCQKRSFKDKEYRYYICKTYHKYGREACSQANINADDIERAVVEAVRNKISRLPADTLLITADREQDIKKLTSELKDNNSRRDKLMKDQLDIFEQRELFPDDLYRSKMIEIKNSIAHLEEEKEIIEKQIEGIKEKITESSSLQHIIEEFKELDIEDVGRLRVLIHETVGSITVKGDNLRIEYVYDFDS

SEQ ID NO: 19617 - protein, 447 aa, synthetic construct
MSTTPKIRCAIYTRKSTDEGLEQDFNSLDAQRESCANFIASQKQEGWVLVPDHYDDPAYSGGNLDRPALQRLLQDIEAGKVDSIVCYKIDRLSRSLMDFAKLVEIFDRHQVTFTSVTQSFNTANSMGRLTLNMLLSFAQYEREVTAERIRDKYAASRKRGIWMGGHPPLGYDVEDRKLVINAEEAQQVRQIFKRFIQMGSATLLIKELGEKGITSKIRQLADGRTKGGKSIDKGTLYKILNNRVYLGEVAFRGEVYPGEHAPIIAQDQWDKVQSILKKNRRSRSNNTRNQSPAPLKGIIRCGHCNRAMRPTHTRKNGIQYRYYLCMTASKNSHADCPLASVSAPQVDEAVFKRVRQIITTPEMVSHVWRQTSEELPEVRQQEISTALKKIDPIWDELFPIEQNRLLNLLVENVILTTTSMEVRVRVEGITSLVAELTPTPQTEEAIQ

SEQ ID NO: 19618 - protein, 445 aa, synthetic construct
MKNKPTKKIRCAIYTRKSTEEGLDQQFNSLDAQRESCESYIISQKAEGWTLVPDHYSDGGFSGGNMNRPALNQLLNDIKAGRIDCVCVYKIDRLSRSLVDFTKMVELFDQHGVTFVSITQSFNTTTSMGRLTLNVLLSFAQFEREVASERIRDKLAASRKKGMWMGGHPPLGYDVENRKLVINPQEADLVRHIFDRFAKTGSTTLLVKELGEQGRHTKSYTAKSGRVREGKPIDKGYLYRILGNRTYLGEVVIKGETYPGEHEPIITLRQWEKAQSVLNQNKRPRSTKTRADTPFPLKGIITCEHCGRAMTTTYTRKKGRMYRYYTCTSAIKKSYDSCPMGNIAAGEIEELVLGHIESMIRSPELVAKTWQTANDADNSDCSENSIITTLQNLEPVWEELFPLEQARLLQLLVRKVVLSNERLQVHLRVEGLTSLVDELNTEEAA

SEQ ID NO: 19619 - protein, 441 aa, synthetic construct
MTAKHQKIRCAIYTRKSTEEGLDKDFNTMENQRESCSSYITSQKAEGWIELADAYDDPGFSGGTMKRPALTRLLQDIENGKVDCICVYKIDRLSRSLVDFTKMIDLFDKHGVTFISITQSFNTTTSMGRLTLNILLSFAQFEREIAAERIQDKFAASRRKGMWMGGHPILGYDIQNRALVINQQEADQVRFIFQRYSECGSPTITLKGMADKGITNKTWTNGSGKLRIGTPFNKSTLNRLLKNRVYIGEVVHKGNIYPGQHEAIISQELWNKVQQTIKLNNRPNSIIPKGQTPFPLRGLVHCKHCGMAMTPTQTKKNGQVQYRYYSCSGARKGVTENCPLPNVPAGDIERLVLAQVQNLVNSPEVLAKTISMVKAQEPAIPEHEIIGLLASLSPVWDELFPLEQNRLLKLLVKSIDLSEQGADLFLNVEGIHTLVHELEAA

SEQ ID NO: 19620 - protein, 445 aa, synthetic construct
MKNKPTKKIRCAIYTRKSTEEGLDHQFNSLDAQRESCESYIISQKAEGWTLVTDHYSDGGFSGGNMNRPALNQLLNDIKAGRIDCVCVYKIDRLSRSLVDFTKMVELFDQHGVTFVSITQSFNTTTSMGRLTLNVLLSFAQFEREVASERIRDKLAASRKKGMWMGGHPPLGYDVENRKLVINPQEADLVRHIFDRFAKTGSTTLLVKELGEQGRHTKSYTAKSGRIREGKPIDKGYLYRILGNRTYLGEVVTKGETYPGEHDPIITLRQWEKAQSVLNQNKRPRSTKTRADTPFPLKGIITCEHCGRAMTTTYTRKKGKMYRYYTCTTAIKKSYDACPMGNIAAGEIEELVLGHIENMIRSPELVAKTWQTANDTAESNCTENSIINTLQSLEPVWEELFPLEQARLLQLLVRKVMLSNEQLQVHLRVEGLSSLVDELNTQEAA

SEQ ID NO: 19621 - protein, 441 aa, synthetic construct
MTAKHQKIRCAIYTRKSTEEGLDKDFNTMENQRESCSSYITSQKAEGWIELADAYDDPGFSGGTMKRPALTRLLQDIENGKVDCVCVYKIDRLSRSLVDFTKMIDLFDKHGVTFISITQSFNTTTSMGRLTLNILLSFAQFEREIAAERIQDKFAASRRKGMWMGGHPILGYDIQNRALVINQQEADQVRFIFQRYSECGSPTITLKGMADKGITNKTWTNGSGKLRIGTPFNKSTLNRLLKNRVYIGEVVHKGNIYPGLHEAIISQELWDKVEQTIKLNNRPNSIIPKGQTPFPLRGLVHCKHCGMAMTPTQTKKNGQVQYRYYSCSGARKGVTENCPLPNVPAGDIERLVLAQVQNLVNSPEVLAKTIFLVKAQEPAIPEHEIIGLLASISPVWDELFPLEQNRLLKLLVKSIDLSEQGADLFLNVEGIHTLVHELEAA

SEQ ID NO: 19622 - protein, 534 aa, synthetic construct
MLRAAIYARFSSENQNDKSIEDQIALCRELCAREGLKVVAVFDDRAISGTSAANRPGFQKMMRAAEAKSFDVLVAEDIDRISRDQGDWHTARKSLEFLGITIHTATGKVTKIDGALRALMGEMFIENLVLHTRRGMEGVIRDGRHAGGKAYGYRPIAGRAGELEIVEDQAKIVRRIFKEFANGYTARDIAGRLNGDGVEPPHGIRWNASTIYGSVQRGNGILLNEIYVGQIVWNKVRMVKDPETGKRLSRPNPITQHKRSAAPHLRIVDDGTWEAVQAKRRIIPHTKPKHRVARLLSGLLRCPTCGGGMGSVGLHRGEPRVQCSTYRESGSCTNSRMVHRRKIEAAVLDGLREVLKDADYFKVYLTAYNDERTQLARGAVKDRAKLERRLGEIKRELGRLVDSIAQGLPADAIIPKAQALDAEKASIAEQLMAADDKRKLVSIHPAAIKNYLKDVAAMREALDDEEAAERPELIAPLRRLLHSVVVHAEPGVKGFEVEIKGRLQELLGAPFLRRSVGGGLVVAGEGLEPPTPGL

SEQ ID NO: 19623 - protein, 596 aa, synthetic construct
MARTKKATAPAIYASPRVYSYLRFSNAKQASGASIARQLDYAVKWAEQHGMELDTSLTLKDEGLSAFHEKHIEKGNFGVFLKAIEDGLIPPGSVLIVESLDRLSRAEPIIAQAQLYGILIAGIEVVTAADNTRISLESVKKNPGILFLALGVSMRANEESERKKDRILDAAHRNAQAWQAGTSRKRAAVGKDPGWVKYNAKTNEYELLPEFVTPLMAMLGYFRAGASTRRCFAMLHEAGIPLPPPKLDLHGKLKKTRMGNVISGLANTTRLYDIMSNRALIGEKTIVLGKSQYHDAQTYVLSGYYPPLMTEAEFEELQQMRKQGGRVANHQSRIVGIINGVGITKCMRCRSAMAGQNVLSRSRRADGKPQDGHRRLICTGVTKAKNLCTESSVSIVPIERAIMAYCSDQMNLTALFTEQEDQSRNLNGQLALARAAVAQTEAAMQKLLDAIEAAGDDTPAMFIQRARKREIELKTQQQAVADLEYKIESAHRASRPAMAEVWAKLRNGVEQLDPAARTKARLLVVDTFKRIEIKRATDRGQDLIEIRLESKQNVRRGFLIDRKTGAFYRGDHVENESIIAKPTTRPTRARRVKAAA

SEQ ID NO: 19624 - protein, 603 aa, synthetic construct
MASEFSGPLAYSYIRMSTDIQLRGDSLRRQEQASKRYAEQHDLQLVEDFKLEDIGVSAFKGANVSSGALGRFLELVRAGQIAKGSYLLVESLDRISRQQILDSVPIFFDIVKGGINVVTLADNHVYRAGDTNVADVIYSVVVLGRAYEESKTKSIRVGAAWENKRKNAASRKLTKVCPAWLLLQEDRTGFDLIPERVEVVRQIFQLADTGNGSFSIARRLNQSAIQTFTKSNGWHESYVTKILNNRAVLGEFQPHRYDDHGDRVPHGEPVAGYFPKVIEEDQFHRVQASRRRRLVEGAGRKGPEYRNLFTKIAKCEYCGAPMRFVHKGRPPKGSQALKCTNAVRGLGCESISWRYSDFETSFLYFVKEIDLTATLRAAAENSERASVEQQITAIEEKIRQLSAKRERIFDLLTEPGSSTAFIKGKLDECEASIATEEALIAEIREQRSMADMLPTLSADELRSLIASVQDMSAPDIFERRAAVANRLSILVTSLRIAADGRRPKMKGIRTFLESQELSPAERDRLIDHIEKSNEEGQRYNRSFKVMLADGVSRYVVVRSDEPTDIIAEVLVDKDGGISGSDRGMPIGWSEGWDNIFDEPASVQ

SEQ ID NO: 19625 - protein, 591 aa, synthetic construct
MPKRKRTPKKTPRAVGYIRVSTDMQVEQGYSLENQEYEIKNHVESKHMTLVHIYKEEKGASGKNIEGRPQFQQMLADIAKNRDIDYVVVYNMSRFARNAADALTTLQKLKSYNVSLYVIKEGIDSTTKTGEAMFSFASIFADLERDNIRENTTAGRYQKARNGLWNGAQAPFGYRLDNGKLVIEESEAEVVRIIFDRYVHTPDGIHKIAVWLNEHGYKKEPRGNGKYVFFSPGTLKNILDNPVYAGKIAYGRRRMEQVEGENNEFRPVRQDKEDWQISDGQHEAIVSSELFEEAQKRREAESTPFPRKRTDHVNLLTGLLVCPICGRKMIATNTKGKVKKDGSLGKETHAYSCKYSKKAFGPDCTFTKQYRQELIDKEIDDVIGVCLDDKLIAEMLTYMHNEMQDTEAIEGEIAAYEKQMAKLDTAIRSLSATMDSMDGTEPAYERKYRDLQERQDKLYEQIDDAERKLDEAQRRLDGAREGEATVEEVKLFLTEFGKTIGQVDKATRKTLYAEIIDTIEIVPDADWKHGEGIVSRIRFKLPMIYGDKRTLEVSRREDGTLKPADKEVGNKYFRVTENTDECIALIQRVKS

SEQ ID NO: 19626 - protein, 430 aa, synthetic construct
MSTDQEEQLSSYENQVNYYRDYISKHEDYELVDIYADEGISATNTKKRDAFNRLIQDCRAGKVDRILVKSISRFARNTLDCIKYVRELKELGVGVTFEKENIDSLDSKGEVLLTILSSLAQDESRSISENATWGIRKKFERGEVRVNTTKFMGYDKDENGRLIINPGQAETVKFIYEKFLEGYSPESIAKYLNDNEIPGWTGKANWYPSAIQKMLQNEKYKGDALLQKTFTVDFLTKKRVQNDGQVNQYYVENSHEAIIDKDTWELVQLELARRKDFREEHQLKAYIIQNDDNPFTTKVFCKACGSAFGRKNWTTSRGKRKVWQCNNRYRVKGQIGCQNNHIDEETLEKAVVMAVELLSENVDLLHGKWNKILEENRPLEKHYCTKLAEMINKPLWEFDSYEMCQVLDSITISEDGQISAKFLEGTEVDL

SEQ ID NO: 19627 - protein, 413 aa, synthetic construct
MSVKKIRVNRQKHRKRVCAYIRVSTTNGSQLDSLENQKQYFENLYSNRDDIDFMGVYQDRGISGSKDKRPDFQAMIEECRKGKIDVIHTKSIARFARNTVTVLEISRELKAIGVDIFFEEQNIHTLSSEGEVMLSVLASIAEDELRSMSGNQRWAFQKKFQRGELVINTKRFLGYDVDENGELIINPEEALIVRQIFALYLEGYGTHRIAKLLNEKGVATVTGAKWHDTTIRQMLSNEKYKGSVLLQKYFHDGVNGPKKLNQGELEQYLIEDNHEAIISKEDWQAVQDKLNSRRWQQGRNKTYKFTGLLKCQHCGSTLKRQVSYKKKIVWCCSKYIKEGKVACRGMRVPEVDIPNWEITSPITVLERDRNGEKYYSYSGQESEDQRSSSGQEENQGSRILSSVHRPRRTAIKL

SEQ ID NO: 19628 - protein, 558 aa, synthetic construct
MSENTIQIIKIAQGIPGRNHEYTEMVIRGDIMIEEKRYCIYLRKSRADADAEARGEGETLLRHEKTLLELSERMHIKVEKIYREIVSGDTIAARPVMQELLTDVESMTWTGVLVMEVERLARGDTIDQGIVARTFQITNTQIITPLKTYDPQNESDEEYFEFGLFMSRREYKTINRRLNRGRIQSVKEGKYIASVAPYGYIRVKLPNEKGYTLSPHPEQADVVRMIFDLYVNGLNGEEYGATKIARYLDSLGIKPMVADKWSPASIRDILQNEVYVNKIVWGKRKEVKTVENGVVKIMRPTAADYLCNNALHEGLVTQEIFDKAQYKRTHSPHSIKVNVKKPLQNPLAGLIYCDKCGSLMTRLGESKKTPYAFLKCPNRYCDNVSVPLFLVEKNLIAFLQDWIKNYQIEIESGANTSYESQLTLLQSSEQALDKEKQNLLKQLNNAYNLVEQGVYTADIFKSRNQILTSQIHDVDIRLSEIREKISEANEHYRMRTELVPRAYTLIQSYNQLSTAAEKNALLNQLVSKATILKTERNTRGKRDNSNFTLNVWPKLPHA

SEQ ID NO: 19629 - protein, 529 aa, synthetic construct
MATARKVTVIAPTINPMTHMPVRAALKRKVAGYARVSTDKDEQFTSYEAQVDYYTKFINQNPDWEFVKVYTDEGITGTSTKHREGFKQMITDALAGKIDLIVTKSVSRFARNTVDSLVTIRQLKDSGVECFFEKENIYTFDGKGELLLTIMSSLAQEESRSISENVKWGQRKRFEDGKVTLPYKHFLGYDRGEDKDSPPVVNEEQAVIVRRIYHLFMSGKTTWSIAKLLTAERIPTPAGKEQWRTSTIESILSNEKYKGSARLQKEFVVDFLTKKKKPNEGELPQFYIEESHEAIIPPDEWEIVQAELARRRYLRRKYSGNSVFSTRLVCHDCGGFYGPKVWNSTDKYRRVVWQCNDKFKGDEKCATPHIEEEALKARFMTVFNVLIKNKKELLRNCEVVRNLIAGTEEIDSRIDALYEELEVVSELARKCIDENARTAQDQTEFLSKYQGLEERFNTVKEEIDRLEAERVSREAKGQQFRIFINAVEKQNGELTEFSDRLWLAVIDIVTVMPDGRLVFRFRNGMELEG

SEQ ID NO: 19630 - protein, 437 aa, synthetic construct
MNRKVERVQFKLPPKPQLTKVAAYARVSSGKDTMLHSLSAQVSYYSEYIQSHPGWLYCGVYADEAFTGTKEDRAGFQEMLSECRAGKIDMVITKSISRFARNTVTLLATVRELRELGIDVYFEEQNIHTMSADGELMMTILASYAQEESRSNSENQKWRIKANFEEGKPWTGRMLGYRYKDGQLEVIPEEAEIVRRIFADYLSGMGYLLICRGLNGDGLTTLDGYPWRVGTLMKVLRNYDYTGNLLLQKTYRENHITKKRLLNRGEHPMYHALETHEPVIPLETFNAVQAEMARRAEKYGQGSDTNSFLPFSHKITCACCGGYFNRKTARGKKIWICRTYNTVGKSGCSGSKAVPEEALLSAAAEVLGLEEFDEAVFSETVEGITAEGNTLIFRFADGLEQTAVWADRSRSESWTPEMKEKARQQTAERRRNERTEK

SEQ ID NO: 19631 - protein, 477 aa, synthetic construct
MARRVGIYTRISRDDEGDALGVARQRQDCERLADLRSWQAVKVYEDNDVSAFMPNVVREEFELMLKDLRAGLIDGIVAYDLDRLARQPRDLERLIEIYDERPRLEFATVTNDVNIGTSDGRTMARVMVAFANKSSHDASRRIKRKHLQLAQQGKDSGGPAPYGWRKDDRTKVDPEAAKAIREAQREILAGVRIGTIRTRWQEQGLGNPREGTKRMAHHHVEHILTNPRLVGYRTYHGEILHGDDGRPVMGEWEPINTLEEWEAVCAAIAERKQKHPGKSLARKYLLSGIARCGLCKTKIRGQINQRWKPGSNAARFAYQCSVVNGGCGKVGRIGEPVDRLIAQLVLEEQRARAAVTDVPVDQRWPKEAELEQVNQDIAQLIEAERTKQITVATLLQLLPAKERARDELKLERARFYKEQKQAEAKGETANLTVDEFFGLPIERQQEIVLHSLSAVIIHPAGRGKRIFDPALIEPVWR

SEQ ID NO: 19632 - protein, 536 aa, synthetic construct
MRKAISYIRFSSKAQATGDSTKRQSRLITNWLKQHPDYYLDDSLRFQDLGISGFSGANAKTGAFGEILAAIQSGFIEAGSVLLVESLDRVSRQDIDLAGEQLRKILRAGVDVVTLVDNEHYTKESLKDALSMIKALLVMERAHEESVMKSHRLRAVWASKRDKALSDGTIMSKRCVAWLKVSDDRKTFEFVPDNVMAVQRVFQLRLEGLSHIKIARQMNIEGFATLNQYSPKAKNGWSQTSVTELLSNRAVIGVKVPSKSMLAKGTPDIPNYYPAIITPEQFYAVQQLKILSKGRRPSSDNPFATNLFKGVMRCGECGLIMIVSGATADGKRQGLYKCSNKGLGRCNSAGISRLQTDKALVQGLLYNTNRLDLQATSDITPLQEELSELVTRKEKLLKLAELADDVQSVAIRLKELNANITSVNAAIADHHQRLASSHTETLLHLDLSEKKHRVEAQIIIKRIIKSVVMNTAKRTCDITFHNGVKLNNYPLSYIIDGSRFGDMVSLMDDKEFTFTENSRAFTPPHIRPDWVSEYDE

SEQ ID NO: 19633 - protein, 533 aa, synthetic construct
MKIAIYSRKSKFTGKGDSIENQVQMCREYCNRLYDEAIEFIIYEDEGFSGGNTNRPKFQELIKDASSKKFDVLICYRLDRISRNVADFSATLELLQKHDIAFVSIKEQFDTSTPMGKAMVYIASVFAQLERETIAERVRDNMLELAKSGRWLGGQTPLGFKSEEMVYLDQDFKERKMYKLTPVSDEMETIKLIYDKYLELKSLSQVTKYLNQNSIKTKTGKDIWNKSGVQDILVNPVYVKANKNVIAYLNDLGMTVVGSPDSKHGILTYNKKRGRTTYRDIGEWVAAIARHEGIISSKDWLVVQKLLQENKEKAPRLGKTNNALLTGILKCAKCGSNMKVIHGKNKSGKVFYYKCTLKDSSGGTRCNNGNVRTDQVEKILKEKLKEYSLNKGLLRKQIEEYKQELVNSKSYEFKNIDNIKKDITSKKKQIENLVNQMSLSPVAAKYIIPQIESINKEIETCQKTLTDIETSTNLISQADLNLEMIFKCLDKMQIIDELDDEEKKLIFNVMLDRVLWDGDTGNLDIKFWGSKKK

SEQ ID NO: 19634 - protein, 544 aa, synthetic construct
MIAAVYSRKSTFTCKGESIENQVQICKEYANNNLKISSFIIYEDEGFSGGNTNRPRFQELLTDARKEKFNFLICYRLDRISRNVADFSNTLELLQKHNISFVSVKEQFDTSTPMGKAMVYIASVFAQLERETIAERVRDNMLELSKSGRWLGGQTPLGFNSKKVTYYNSEMKQKFMHKLSPIKKELDKVKLIYSKYMEFCSISLVLKYLLTNNIKGKNDGDFSSMSINDILRNPVYVKSDNSVFKYLKGLGITTCGIPNGNGIITYNKRNSKYMTRNTSEWIAAVAKHKGIIESTTWLEVQFQLDKNKRKSNPRQGTSKKSLLSGILKCALCGAPMRVSYGRPKKNGNERIYYYVCTMKAHSGKSRCANPNANGPKIEKAIAENIKGLSINKLLKELQCHKNESTSSIKNNFIEILKREIQDKNNQMNTLLQQLSNINVDDSPASKFILNKIENLAKTIKDLNLKLDKSKNIEEENVDKNIALDIIEKNLEDFNSYFSIIKDVSIKRHILENIIDKIYWNGTTGDIDVYLWGSEKTHKIHHSIF

SEQ ID NO: 19635 - protein, 535 aa, synthetic construct
MKAAIYSRKSKFTAKGESIENQIEMCKEYCNKNFDEEIEFIIYEDEGFSGGNVDRPQFQQMIKDAKNEKFDALVCYRLDRVSRNVADFSTTLELLQQHNISFISIKEQFDTSTPMGKAMVYIASVFAQLERETIAERVRDNMIELAKTGRWLGGPPPMGFKSEKVIYYDAEMKQKSMHKLSPIKEDLDFVKLIYKKYIELGSTHQVRKYFLQNNITSLKNKDLSSSVIHRVLRNPVYVRADDKVMEYLQSKNITIAGDADGKHGLLVYNKVAKNRKQKDKNEWIAAIAKHNGIIDSDEWLKIQSQLDTNSKITPALGKSNVALLTGLLKCKKCGRRMSIVYGSKKKDGTKHYYYACTLKKFSNVTRCNNKNANGTKLDAFVVSRLKELTADEGLLSKQLHDFKNEVAVTESEDKSKNIKKEISTNEDSINNLVKQLSKNQNSAAADYIMKEIERLDRKNKELKNKLAVLDLQLDNSQEKSLDIDLMLRTARQFNDIIDTSDIKLKKYLISTLVDSIYWDGDKQEADINIFGSKKN

SEQ ID NO: 19636 - protein, 543 aa, synthetic construct
MQVDGYSLDAQRDKLRKYAAYEDMVVAGEYSDEGFSGKNIQGRQEFQRMLNDIQDCKDGVSYVLVFKLSRFGRNAADVLNSLQLMQDFGVNLICVEDGIDSSKDAGKLMISVLSAVAEIERENIRTQTMAGREQKAREGKWNGGFAPYGYKLESGNLVIAEDEVEVIRVIYDRYIHTNEGVAGVAKYLNRNGFVKKLRQNNTIPGFSRNFVQDVLDNPVYMGKIAYGRRRTEKRQGTRNEMHVVEQSEFPVYDGQHEAIISEEDWYLAQEKRKINSFKREKVNNPDHAHILSGILKCPCCGKSMYGNIAKAHSKDKKTRYYYYCKNTVTPTGHECSFRLNIEQTEINKFVAKVISAMVSNPRFIEAIQAKIGTAVDTEDMEKQIAVLQGQLKQAFGTKSRLERQMDTLDINDAHYDRKILDLQRRYDEQYDTIEEIEVQIGELQSQIRSIQQEKISGDNIYRLLLAFDEVYHSATEAEQKEFMKAFIERIEMFPEKRKDGSWIKKIVFNFPVPVDGEEVKELPLETETTVETVVLLSHKKPDG

SEQ ID NO: 19637 - protein, 510 aa, synthetic construct
MSEVKAAKPKAFSYLRFSTPEQTKGDSFKRQTRMALEYAARNGLELDESLTFHDLGVSAYRGLNAEAGRLADFLEAVRVGLVPTGSYLLVEALDRLSRLTPRKAVRVLEDIVEAGVTVVTLNDGRAYTAENLDDDPVSLLVAIVYFMRANEESATKSRRLKSAWESKRNALDTKPLTAVVPAWIRLDQETGTLQLIPERADIIRRIFEMHQAGTGVALIAATLNREGVPCFGAGAHWHRTYIRKVLSNPAAMGTFIPHRLVYLEGKRTRVPLEPVPDYFPAVVSSDEFSSAQRQVETPARHRAGKVVNLLAGLAKCPKCGSTMTRVNKGSGTKAAKPKLVCTRAKAGAGCEYKAVTLEDVEDALVSSADYLSGSAPSGAGTLDADLAEAEQAIEVTRESIDNLVSVLAATPSQAVAARLSELETALEALNDKRDHLAAQVIAASGPLLVKRLDELEAALSAEPRDNAKANAMLRTMFGSITVDYETGTLEMHWKQGGVSSLTYAWPSAAR

SEQ ID NO: 19638 - protein, 551 aa, synthetic construct
MPTAYAYIRYSSKAQGEAGRDSVDRQMASIQAITKQQGIELRTENIFSDTGISGFDGSNKNKGKLKDLIDLIISQKIQDGDFVFVESIDRLSRQKMRLSKDLVYTILDRGVTLVTTIDGQMYSRAKDGMEQDIMLSVIAQRAHEESKTKSVRRKSAWNRAKKLADEEKEIFNGHNPPYGISFNKEESRFEIVEEEAQEIRDIFESLKYVGVSLTIKKVNEYSKRKWTNRNIKHLLDTKYVLGSYMAQRRDENKKKVFERYIENYYPQIVSFELFNEAVASMKNRAHRKHYGNQTVGSLNIFRHSIKCSNCNASMLFEKQTNPKGVVYPYFQCFTRKELKNGCDQPRFRFDLAFGVFLELVKFATTSSETINPNDWNNEITSVGSFHKTLFKLLTSTEKDKELEKKISHVKNLLLEQKNYQDNINKSFEAFTDGIIPAAFIKKASETEIKIEALERELAELNIESSTRNVSLLVHSYNDIIDLYKTEAGRLKINSFFTSNNIAFSFSFDQKTRMLRCKVYYKDIHVDVINKKFPLHNPLKEFGIDNLNQYFN

SEQ ID NO: 19639 - protein, 689 aa, synthetic construct
MKITAEHLARGAYVYVRQSTADQLVNNPESRRRQYGLAERARSLGWKDAIVIDEDLGRSGSGISRPGFEKLLAAICEGRVGAVLAIEASRLARNGRDWHTLIEFCGLVGTLIIDEDGIYEPRHPNDRLLLGMKGTMSELELSILRARSIEALKQKARRGELFLTVAIGYVKSGRNRIEKDPDLRIREAIDRVFRRFDELQSIRQVHLWLRSEGIMLPAVNYTRAADRAIVWKLPVYNTVHHILTNPIYAGAYAFGRTCSKVTIEAGRKRILRGIRRDRADWEVLLIDHHEGYLSWHDFERNQRLITDNATSKGLVPRGALRRGELLLGGLLRCGHCGRKLHVSYSGSNGNTGRYHCRGAQVNHGTDPCIGFGSLRVDQAVSAEVLQRLQPLGIEAAIKAIETSTVQAGEKRRHVELALEQARYDAAHARRQYDAVDPDNRLVAGELERRWNAALVAVRERQDELDALDRHKPEALGEEERRSLLRMGADLELAWHHANATATTRKRIIRAVIREIVVAIEDDHIKMLVHWQGGDHTALSVRKNKAGHHRWGAPPDIEELIRALARQLPDRAIASLLNRLGKTTGRQNGWTQSRVCTFRNQHDIAVYKKDERSERGEYTLQETAAKLGLRPMTVLRMIRAGDLKAEQYCKGTPWIIRHEDIEQLDIQHHSGRSEHSPLSQSQDQQIQLFQ

SEQ ID NO: 19640 - protein, 597 aa, synthetic construct
MPKIWPYIRFSSEEQKKGDSLRRQQELIERFAARPEIVAEGAEIDTSLNLNDLGVSGFTGKNVLQGRFKTFLDAVDSGVVKPGDYLAVEALNRVTRLDPMESLPILMGLMSKGIKIAITADSQIYKQGGDITQLYIALGELQRGYAESEEKGRRVRQAWDKKKERAFQTGEIATSRLPLWLRAVKTNEKGLIVRTVEEIPERVAIVKEIYRLSDSNIGAIATARLLTERGVPTFMRENPRKNPNYGDFWQPSYIKKILDSRAVLGHYQPMTWEKLPDNRRRRINHGPEIENYFPQIITPELFRRVQEKRRGRGKDGQGNKGKKFTNLFTKIAHCSKCGATASHVNKGSDPKKGGRYLVCYRARHGDCSYKAWRYDDLETTILKFLAEADIKSIISEKNKADELINKKYEIDAEINDIQEMLDAYKADFKRLKGRVSDLDREMAIENEQALKELKEKSKDIDQEIFKALEQKKADIEKDIIDLRGLSNTEDANTVFEVRSKINERLKIIIEDIKIDFQDRHIEIIFKNGTRRHLKNHLAVELRESTEADQKRQDDYDDFYDSLTDEQKAELNQYSIPAEIANDPKRLIEYLAQFNVAE

SEQ ID NO: 19641 - protein, 611 aa, synthetic construct
MNVHLKVQPHHLERSAYLYIRQSSMRQVIDNTESARRQYALRGRAIALGWREEQIIVIDNDQGESGASAVWREGFQRLVSDVGMGHAGIVMGLEVSRLARNNADWQRLLEICALADTLILDEDGVYDPASFNDRLLLGLKGTMSEAELHVIKARLRGGILNKARRGEFRCPLPTGLVYDHSGNVALEPDMQVRETIVHFFETFSRVGSASQTVKAFRQEGILFPSRLHDSQTVFRPLTTSTAMRVLHNPRYAGAYAYGRRRYRRTIDGKRIVREQDNDDWTACIPDAHPGYISWEQHQENLRILKSNICHRWNAGVASPPREGPALLQGRAVCGQCGRHFRMRYAARRGRQEAWYVCDRARSDRGEPLCQAIAAPPVDEAIGMLIAEQMTPAAIELAIEVRKEIETRHEEADRLRCRAIERAQTEADLAQRRFMLVDPNNRLVADTLEGEWNEKLRILANAREERERARQHEFILDKAVHERLVAMTADFKKLWTNPETPNRERKRLLAHIIEDVTLLKLPKRGTTKAHIRFKGGKTETLVTMSPKSPSQQIKTNPDIIALIDNLLDNHIFSEIAEILNDQGSHSGNAYATTRHEPVAVVGRWLRKCYRGI

SEQ ID NO: 19642 - protein, 592 aa, synthetic construct
MPKIWPYIRFSSEEQKKGDSLRRQQDLIDKFAVRPEIVLEGAIIDTSLDLNDLGVSGYTGKNLLQGRFKTFLDAVDSGIVKPGDYLAVEALNRVTRLNPRASLPILLGLLEKGVKIAITDSSLVYTNTGDITQLYIAIGELQRGYSESQEKGRRVREAWDSKKKRALLTGEIATSRLPLWLRAVKTTVKGMVVRTVEEIPERVAVVKEIYRLSDSNVGAIATARILTEKKIPTFTREDGRKNPNYGDFWQPSYIKKILDSRAVMGHYQPMTWEKLPDNGRRRINHGPEIENYFPAIVEPELFTRIQEKRKGRAIDGQGNKGKKFSNLFTKIAHCSKCGATASHVNKGPNPSKGGRYLVCYRARHGDCQYNAWRYDEIETAILKFLAEADIKSIIKNESHAEDLINKKYLLDAEISDIQEMIDAFKIDFIRLKGKVSDLERELVIENEHAIEKLKAKAETLQQEIFEAFEQQKADIEKDIQVLRNLPATESESRVFEIRAKINERLKLIIDDVKIDFQQRYIEIIFKNGNRRYLSERTTINMAPPTQEEREEMEMWAEVYASMSEEEQRQYMEHTIPGEIANDPLKLLKYFDS

SEQ ID NO: 19643 - protein, 546 aa, synthetic construct
MTKKCYPYVRFSSTRQEDGSTRARQNELIDAFVAKHGLEVDRHLEDAGTSSYRGLNATDGVLGGFLRQVRLGEIEKGSYLLIENFDRLSRDKIVRSNQIFSDLLMAGIRIVVLDTNKIYESDNLNLGDWVNALVEFGRANAESQRKSDFSSKAWRENRDKMRSGEIVTKKVPTWLKVENDAFVIDIEKVERINTLFKLSLSSGLQEATKKYNELFNEKLAIHQTQYLLSNRKLIGEHSPQKIHYDENGNLKRKDEGEPIPNYYPAVVDEKLFYQVQEVIKSRKPFSGRYSNQRYNVFRDLIYCKWCGGTIRYMNKGERDYFICTNSMTGKCDLNSHFGQQSIRGKKLFSMFFAFTDNLNISALLEENTKADELKTELSKLVAQKDKLIPRIADFKEDVKRMILEGESIPSTYNEIITDFESTRTNLETEIEIKFKELNQIYTSEQSFEGLKENDVAEIIYDRTEAAVEKRIKYNNELKKIIKHIRVDFLNTVLEIEFFNDTLRFVDESGYTLEHPKVFDGVDYVGEIGNYDKELVSPADDLPPLKV

SEQ ID NO: 19644 - protein, 561 aa, synthetic construct
MLLVTFCFYGAGMKTAYSYVRFSTPEQAKGDSLRRQIDKARAFAAAHDLALDESLKDEGISAYRGSNKEKGSLGAFLAKVEAGEIQKGSYLIVESLDRLSREQVHIALRLFLTLIEHGIVLATLSDNKIYSDASIAQSPTELIVSIALMMRSHDESAIKSDRVSQAWEKKRRLAESDKVAMTKICPAWLAKVGQRYVAIPERATVVQNIFAWAIEGLGTRSIAKRLNQMAVQSWTAKKDKRSIWHDSYIKKILENPAVFGEYTPRSKRAGGSDETASETIEDYFPVVVDRETFYKARAVVSSRATSNVRAPAGKHRNVLSGLVKCSICGGGMHYIDKGKKGGRPFLRCGKSLLDGGCQHTEKYAYEVLQSHAILSTSGTEGLNDDEHATRNSSLREQLTDVEDRIEKIADAIERAGLSDILERRVQKLEKQRKILKSDINRNQLMSQKVSYAARYRHGRQEVGELARRLLQEPEDIQLRTRAANAVRALFKEILVSPDGVEYIRVGGGGFSEKPMPANSTVLKTIAQCLGEDTMPPTTGRKIQLGARFFTDEEIEAADDQD

SEQ ID NO: 19645 - protein, 695 aa, synthetic construct
MKSELVKPTHLARRAVVYVRQSTPHQVISNQESLRLQYALRERARELGWHEADIDVIDADLGISGASTTGRNGFKELVGRVGLSEIGLILSIDVTRLVRNCSDWYPLLDICGLRGCLIADRDGVYDPGSANGRLLLGLKGTISELELHTIRSRLTAGLLAKAERGELALMLPVGLVRDASGVVVKDPDLGVQERLELVFRTFLKFRTVAKVMRVLNDRDLPLPRRDRFGELRWARATVSAVARILKNPAYAGAFVYGRTRFRAAGRDGGSEAKTPKDIKDWRIIVKDRYPHYIDWSTYEKIRDIVRDNRAEYMRAKTRGAPRDGELLLHGIAWCGRCGYKMYVRYKGGGEYACNHLHSHSGLPDCQRVRAAQIDAAVADAFLAALAPGELDALARARQAQQQVNKALRAGAERELERKRYAAALAERQFNRVDPDNRLVASELERRWEAALSELRAAEDAVAQRASTEPAKRSGFSKDLNNKVVALFDSLPQIWANDATTDAHRKALLRCLVEKVVLDRGERDVALARIVWRGGAVTDLHVKMKVNSVAKLTRGEELRARLLELALTGVPDDQIAEILTREGHHSPNCEDKVLPITVQRLRLAAGIKAKAQRNRWTHEPTLLSAVQLAARLDIPVNWIYVQIRRKRLLIDQQSTGAYLFQNSPAIVNAVRDLRNRTINHLDLRIIQPHQEGHQHA

SEQ ID NO: 19646 - protein, 624 aa, synthetic construct
MIKTFIYSRVSSQEQLSGGGLDRQETDVREYVTRNGLDQYEIVAMVDRGISGYDGSNMRDGELGKWYKDAITGMYWGSHLVLEAFDRFSRRDPMLAMEDFTVLVNKGGIKVHIVKFNTFINGDNLPMLSMMMNLAHSESKQKSDRISKGWQRRRRMALDNGTAITARTPYWIDVRDNEYRLNNSSIAVVEAFAMYKQGLSCGLIAKKLNELKHYFPYMWTKTAVQHIVDGLNTSGIIDAPRAIKTIKAFYKSGFSVEDIAKKMNAEFQFMKEWNAPAVHKLLQNKSVTGLVEIQKRKLIQEFDSDGKPLELRTKSEGEKYFESIYPQIISIDDFELIQKLLESNRKVDTKTGKGQTTGGTVTQNEDGELVKQFILSSLCRCYKCGGAMFNNIVRSKRKNGKVDTYSYLRCLNERDAHCDVKALNYPVIERAIIEHVKGLNFDTMFKGTNNSELELLKTREVELLRDIATYEDAIAARKAAGKNTSPVLVTSLVDAQDDLEALQKKIRAISGVTVNAEELTSLNESVFDVAEYELRNMVELELQKIIKRITFNCTEKNIYFITIQYNTGTVLQHGLKVDKKKGVIETYELHEGNKGYVSNGEVITPALIEAAESKNIGIFEGKVM

SEQ ID NO: 19647 - protein, 496 aa, synthetic construct
MKTAYLYIRVSTDEQKRKGYSLPEQEDRLLKYCKFNNIEVKGIYREDYSAKNFNRPGWKELFSEIKKESSGEHKNILFIKWDRFSRNVEYAYDMIGKLRKYKTTAVAIDQPIDFSVPESTVMLAVYLAVPEAENTRKAQNTSNGIRRAKLMGRYPNKAPIGFINVTLVDGKKVIVPKEPEAEIIKWVFNQVAQNDHKISKIRKIAIDKGLICSRSHFFRVLRNPIYCGLISVKLDSNEEQMIKGIHEPLISESLFYRVQSVVNTKRKTTSKRDDLRAIFFLRGFLTCSVCNRKLGGSFSKGRSKKYPYYHCYNRCKTRINASFLNDCYQNKLQQLVLSDSVIELFKNILEDQNIKTQKASYLHAKKLIERKIKKEKLILSRGRKLFIAGVLKIDDYNELKEENQINIKNLKREECDIIFKLEAIDKKNQIEDKALVEIFQKFSGFDTSDKKHIVNLIPPVNIDYKTGSLSLDLNETFSKILSKKSHRKTNKKNEFH

SEQ ID NO: 19648 - protein, 608 aa, synthetic construct
MLMKKNFSSKIADLYIRVSTDEQADKGYSQRDQAERLQAYCAKYDIAVDNVFFEDHSAKNFDRPEWSKYLKNLKKRNKRDREPRLVLFTKWDRFSRNVGEAYHMISVLEGLEVETQAIEQPLDLKIPENKIVLAIYLSTPEVENDRRALNVFYGMRRARKEGRIMGIPPYGYINRCTEDGAKYIGVRHPEADNIVWAFEEIAKGELPSEHIRLLMNKREGKDLTRNAFMVAVRNPVYTGKVFIPEFENEEAHFVKGKHLPLITEELFEKVQIVLDGKGRKSKSEHGENRVLQNENFPLRGVLICPRCGKTLTASTSQGNTKRYNYYHCNSKCGFRHNSDIVNNKFVETLREFEILPEYRDTLKIVVLKNYKKHCGNVDDERKAVVEEMENVNQKLSKARNLFLSDRLDEDDYNEVKVECKKRSDELDESLKSLTKASKDQDVPGKLSLAIESIANIAQRYNDSCVEDKRKIASSLYYHKLEFDGKNFRTPKSNAFLNLIRLSKRGLGDKKNRHQSCKNSDDDEVSAKGFEPLTVCLEGRCSIQLSYAPLEVDSRLVISTLKKVGAAGFEPATSWSQTRRDDRTTLRPEYIRERRVRDSNPCDTFASTV

SEQ ID NO: 19649 - protein, 523 aa, synthetic construct
MIADLYIRVSTDEQADKGYSQRDQEERLRLHCDRLAITIDRVIFEDHSAKSFDRPEWKNYLQSFKRSRGYREERLILFTKWDRFSRNTSEAYQMIGHLKKNNILPQAIEQPLDLSIPENKVLLAIYLSTPEVENDRRALNVTNGMRRAIKEGRLMGIAPYGYVNKCTEDGRKYVAVKQPEASNIIWAFEQVAKGHLPTAKVRVEMNKREGKNISSNAFMVALRNVTYCGKIYVRAYKNEEEDIVPGKHEALISEELFLKVQHVLKKKGTKDLRLPGGRIINEERYPLRGLLLCPNCGKNLTASSSKGHTKHYYYYHCTTACGFRHHSDKVNKLFKEELSKYDFPTGILEILKKIIVKNTKSTSENFDGERSTLKSRISELNDRISKARDMYLSDKIDEEDFRDIKNRYKGELDDLEYKLSLLVKSEQKEGVEDKISKALKIVGNISERYINASPIDKRAIVSLIYPEKIIFDGSDFQTSKINSFVDSIFLIRKELSKQKKGDLNSKNLNPRLVSSTGFKPVTF

SEQ ID NO: 19650 - protein, 512 aa, synthetic construct
MLADYLEKIRTKTNVLVLKAVIYARYSSDMQRSESIAAQIRFIREFAKNNNIIIVSEYIDEAQSAKRDDREAFQQMMKDSKSAEWQIVLVHKLDRFARNRFDSATYRIHLRKNRKYLISAVEQFDDSPESAMLEAVIEAMSEYYSKNLAREVMKGLTENALKGKNCGGTPPLGYDLDEHKFYKINAFEAQGVKLIFKLFLDGKTYSEIISILNAAGYRTKCNRLFSRNSLYEILRNEKYKGIFVYNKTQSRDEITGKRSGHRYKSEDEVIRINGVVPQLISPEDWDVAQSILDNRKKAYGNNAKETYLLSGKIKCGKCGGSYVGRRVFNSCGVKYIYYACNEKRNPNFKCDNSSVRRDWIEDIVVKKVKEFVREFNGKYFEDIQSEYIKEVTDCKQKEIMALRSKLNSIDADIQRLVDAISKCSLESLINRLELLEQQKKEIQADIDKFEIPDNNVSIEQIKKLLSKAEQMLEEESTPLKELINLVVKKIVVNESDIQIYMNCFDKTMTHKR

SEQ ID NO: 19651 - protein, 525 aa, synthetic construct
MQTAESRDKYHQLRVAAYCRVSTAQEEQQNSYQVQIAYYTDLINRKKEWTLAGIFADEGISGTQTKKRTEFNRMIRMCRNKKIDLVITKSISRFARNTVDCLEYVRQLKDLGIGVIFEKENINTLTMTSEFMIALYGSFAQAESESISKNVSWGKGKAYREGKVQFQYKYLLGYKKGADGKPEIVPEEAETVRLIYTLFLDGYSMSRIKKLLENKGILTSQGNKVWNESLIRSILKNEKYAGDALLQKTFTSDCITHKIVKNHGERPMYLVTDHHEPIIDRDTYNRVQQELARRSSKRKISDKTTTEQGKYSSKYALTELLICGKCGTPYRRTTWTSRRKKLIVWRCISRLEHGKRYCPDSPTIKEEQLHKAIIRAINNYYSCGNDVEKILKANISNVLECHGLEEIAAIEKRLKKIDKARSDLISLIATGGCDEDKLDSEFEKLYEEEQSLSERLAMLKSKNQTSAETQAKLDKIIDMIEHEKFELETFDNVLIRKLIECVKVLSKTEILVIFKGGYEVRTEIE

SEQ ID NO: 19652 - protein, 508 aa, synthetic construct
MTTVTIIQPTISEEQNHKLRCAAYCRVSSNSEDQLNSFMAQTRYYEKAFEKSDREQLVDIYADEGITGTREDKRDEFQRMISDCRKGKIDRIYTKSISRFARNTKDCLKNIRELKSLGITVFFEKENIDTAKLTDEMMITIMGGLAQEESVSISKNLKWSYQKRFEKGIVNVFSAPFGFKLNNGALIIDKIQAQIVEEIFDMFLNGIGYQRISEICQSKYKVYKDKFSYYGIRYILSNEKYIGDSVYQKTFTTNNLPYRKIQNNGQLNKYCIQNTHEAIISIEIFEKAQKLIESRKHKNIVSESPFRGKLICANCGTKYKRKDSRNKIYWVCRKHDNLAELCMNKRVEEKFIKQSFIRLYNKLLFNYKQILVPLQTSLQDLKLKKFNGKTQVMDIHKEIAKLREQTHVLARLKTKGFLDEAKYIEQTTELTAKINKLQAELKKLTRLDDEDETLDQIEMLIDFFERRDKPITEFEESAFESIVEKIVVIDQHELEFHLIGGIKFKENI

SEQ ID NO: 19653 - protein, 514 aa, synthetic construct
MPTVTVIQPTITEEQNTKIRCAAYCRVSSDSEDQLNSFMAQTRYYSQFFENSETEELIDLYADEGITGTREDKRDEFQRMIKDCRKGRIDRIYTKSISRFARNTKDCLKNVRELKSLGITVFFEKENIDTANMTDEMMITIMGGLAQEESTSISQNMRWSIKKRMENGTMKMCNSVFGYELVNGELILNQDEARIVRKIFDWYLNGYGSEKIAQMLNEMGIGKRGRSCHWTGPTVRVMLKNEKYIGDQLFQKRFTTTVLPRKNLPNRGELPQYYYTGCHEAVISKDVFDRVQELIRLRGENKRNESRGNILSKKIKCGECGTTFRMKNCRGKIYWVCRLHTDEIEKCSVKPINQDNIHSAFIRLCNKLWYNYKQILVPFQTALHDLKLRKLSSKTQVMDIHKQTAKLREQTHVLARLKTKGFLDEVKYIEQTTELTAKINKLQAELKKLTRSDDEDETIDQIEMLIDFFEKQSNPITEFDESTFEGIVEKIVVINQHELEFHLIGGLKFNEKIK

SEQ ID NO: 19654 - protein, 495 aa, synthetic construct
MKSAYIYVRVSTDEQKRKGYSLPEQEDRLLKHCDHNDIKVKGIYREDFSAKNFNRPEWKKLIAMVKKKSSHEENNILFIKWDRFSRNIQYAYEMIGILRKHNTAVMAIDQPIDLTIPESSVMLAVYLSVPEAENTRRALNTTNGIRRAKQMGRYPNKAPLGFINLTGLDGKKFIAPTQPEAGIIRWVFQQLAKNIYKIAEVRNMAYAKGFRCSSSNFSKLIRNPVYCGLISIKLDSLERQMIKGIHDPLISEALFYEVQDIINTKRKINSKTDELKATFFLKEFLVCPVCARKLTGSFSQGSTKKYPYYHCPRKCKTRINAFKLNDSYKHQLQQFSLSNKVTELFNCIVEDSNTITQKAEYLQVRKIIIRQLEEQEATLSKARKLFVSDILKYDDYSDLKKECKANLDCLKKELDDIVIKLKSIDKQRQSGNYPFVNIFQGYSNFDIADKKSLAILIPPGNLNLQTGDVSLDLNNALSKILSQTDKPFHKNEFYR

SEQ ID NO: 19655 - protein, 500 aa, synthetic construct
MKAVAYCRYSSDNQREESIEAQARAIKEYAEKNNIEIIKIYADEAKSATTDDRPQFLQMIKDSEMNIFQAVIVHKLDRFARNRYDSAFYKRLLKKNGVRLISVLEQLDDSPESIILESVLEGMAEYYSRNLAREVMKGLKENAFQARFNGGIPPFGYDIINGHYVINEKEAEAVRLIFKMYNDGYGYRHIIDELNLHGYKTKKGNTFSKNSLHDILKNEKYIGKYIFNKGTKYKHNICKEDVIIIDNAIPAIIDKDLFEEVQKKMEKAKRTQAAHNVKRIYLLSGLIECGICGASMTGCLGKQKYTYYRCNNKQRTKQCDNKDINQDMIENYILSELQEKIFNDDIIPQIAKSLNKENQEIISDRQNMQKTLLKRKEEIDKSISTIVDAIAAGHFHPSLDAKLTELEQQKNEVEIRLRELELKPDVSIITEDMITAYLIKDKDILTKGDRKKIKAMLPTYIKKITVYHDKVEAILKISINQKVCTWMVAASGVEPPTLRV

SEQ ID NO: 19656 - protein, 508 aa, synthetic construct
MKKAIAYMRFSSPGQMSGDSLNRQRRLIAEWLKVNSDYYLDTITYEDLGLSAFKGKHAQSGAFSEFLDAIEHGYILPGTTLLVESLDRLSREKVGEAIERLKLILNHGIDVITLCDNTVYNIDSLNDPYSLIKAILIAQRANEESEIKSSRVKLSWKKKRQDALESGTIMTASCPRWLSLDDKRTAFVPDPDRVKTIELIFKLRMERRSLNAIAKYLNDHAVKNFSGKESAWGPSVIEKLLANKALIGICVPSYRARGKGISEIAGYYPRVISDDLFYAVQEIRLAPFGISNSSKNPMLINLLRTVMKCEACGNTMIVHAVSGSLHGYYVCPMRRLHRCDRPSIKRDLVDYNIINELLFNCSKIQPVENKKDANETLELKIIELQMKINNLIAALSVAPEVTAIAEKIRVLDKELRRVSVSLKTLKSKAVSSLGDFHAIDLTSKNGRELCRTLAYKTFEKIIINTDNKTCDIYFMNGIVFKHYPLMKTISAQQAISTLKYMVDGEVYF

SEQ ID NO: 19657 - protein, 506 aa, synthetic construct
MRTVITYLRFSSAIQGAEGADSTRRQNDLFKQWLKKNSDAQVVASFSDEGLSGYKGKHLTGQFGDMLARIESGEFPEGTVLLVEAIDRIGRLEHLETEALMNRIIAHGIEIHTLQDGLIYTRDALSDDLGISIIQRVKSYVAHQESKQKSFRVSQKWKQRAKLALAGEQRLTKMVPGWIDPDTFKCNEHAETVRLIFKLLLDGESLHNIARHLQANNISSFSRRKDANGFSVHSVRTILRSETTRGTLPASQRNDRPAIPNYYEAAIDAATFNKAQEILDKNRKGRTPASDNPLTINIFKGLFRCQCGASVHPTGTKNKYQGVYRCNNHLDGRCDVPPLKRKPFDKWMIDNFLGMIDVGNDGESERKIAALQHEVEIVTARIKKATALLLEMDDIDELKIQLKELNQKRTELQTTIDNMRRKASLTDKELPQLKDIDLTTKAGRVECQLILSKHLKGLTLGKDSVTVTLQNDTEITIPTNPLPLNDGTSIFEIAEKELLEIDAYQL

SEQ ID NO: 19658 - protein, 507 aa, synthetic construct
MKRVISYIRFSSERQAKGDSLRRQSKMVNDWLKAHPEYYLDQDLSFRDLGVSGFTGKHLKGGLGDFLTAIEKGLVKAGDTLLIESLDRLSRQAVDRASELLRNILRSGVDIVTLSDGEHYTSESLKDPLALIKSILIMQRAHEESLRKSERIQAAWDAKKEAAKAGIKVSRRCPAWLRLNDDRKSFSVIPEKVETVKRCFQLRLEGKSIWEIVRTLNAEGHRSMNQYKPGKFGQTSVQDLLKNRSVIGYFTPKGCEEIAGYFPPIIPETDFYKVQQLSYSRYGRKPASDKPLSVNLFKGVIRCSECGHALIITGFSDTRNGIYRCPLRNENRCSAKGLSRKQTDGTLLALLSRLDRFDSDMTNVIDTLKLHREHISNNIEKLVQLSLEIEDLSAITIKLKQLKGELSQVDADIEKETQRLKSIDAGCLSDCDLTTKAGRIEAQLIIKSAVKEVVLNTAKRRCKVTFHNGRIIDLPITENPSEDVTEAIQSLSEVTEKGLIDVDEVII

SEQ ID NO: 19659 - protein, 507 aa, synthetic construct
MKRAISYIRFSSEKQSRGDSLRRQSKMVNDWLKAHPEYYLDQDLSFRDLGVSGFTGKHLKGGLGDFLTAIEKGLVKAGDTLLIESLDRLSRQDIDIASELLRRILRAGVDVVTLSDGEHYTSESLKDPLALIKSILIMQRAHEESLRKSERIQAAWDAKKEAAKAGIKVSKRCPAWLKLNDDRKSFSVIPEKVETVKRCFQLRLEGKSIWEIVRTLNDEGHQTLNQYKAGKFGQTSVQDLLKNRSVIGYFTPKGCCEIAGYYPSIIPESDFYKVQQLSHSRHGRKPVSAKPLSVNLFKGVIRCSECGHALIITGFSDTRNGIYRCPLRNENRCSAKGLSRKQTDGTLLALLSRLDRFDSDTTNTIDMLRLHREHISSNIEKLVQLSLEIEDLSAITSKLKQLKGELSQVDADIEKETQRLKSIDVGCLSDCDLTTKAGRIEAQLIIKSAVKEVVLNTAKRRCKVTFHNSKSITLPITENPSDNVTEAIQSLSEVTERGLIDVDEVII

SEQ ID NO: 19660 - protein, 559 aa, synthetic construct
MKTKLYSYIRFSSMRQSDGSSYERQIRMAREIAAKYDLELVNDYQDLGVSAFKGANSKTGALSRFLDAIGRSVPVGSWLFIENLDRLSRADIVSAQELFLSIIRRGITIVTGMDNKIYSLDTVTANPMDLMFSILLFIRGNEESQTKRNRTNSSALIKIKSHQENPQNPAVAIEEVGKNMWWTDTTSGYVLPHPVYFPVVQEIVELRKNGRSTAEILDHLNETYAPPPAVSNKKHSKWSRAMVERLFHTRALIGIKEVSVDGVNYELKDYYPRVIDDPTFYHLKKNIGARAWNFGDKEEVKPIPLLSGIGLLKCDHCGCAMVKVKGTNKRSDQYRYTCDATRSRRLDCEHPNWSFRGDQLEKAVLQLLADKIWIAEDKANPVPALKVQVDEISRKIDNLIALSAMTGATKELADQITTLNSERETLYNQIKMAEEEMYSVDSQGWEKLAEFDLEDVYNEERLKVRFKIKQALKRIGCSRIDRNKNLFVLEYIDGKTQRVVIENSRGTRKGRIFIDLKTINDRQILESNGLVLHPCLDMLTDKNWKPEEEIPGPLQEFGI

SEQ ID NO: 19661 - protein, 614 aa, synthetic construct
MHHVYKARDFTGMVQNHKGQNLYSYIRWSSEKQGQGTSHARQVSQARQFALEHGLNFIEVLDSGVSAYRGANAAQGALGAFIAAVEGGAIPSDSWLYVENLDRLSRQAITNSQELFLKLLRLGLTIVTGIDGRIYTTETVNTNPTDLMLSILLFSRAHEESKTKSDRTNKNVLALIDRHHQGLPVNIKAAGKHPFWIDDSGAQYESVRLHATYAPAAKKAVELFLQGWGSYRVCNYLNDHYQCPPALKYKNKHGTIRAEGWSITALRKMRDNPSLFGQRVLSIQNKTYTLNNYYPPLISESDFINLKSIKENNKITCNKQYNTISLLSGLNILRCAKCRGPMSFFTHRNKIRYVCETGKAQKGCVPWSMDGTIAERLLVFPLLKSFIDLKLKGMSNSDQYQHKITELNETLSNINTQISNFEAVIGAGINLDSTIANLRNLQSQRETITLELKKVTEIAALKTSREQTVEQIVEFLFDNLTEQIINDIKHPNRQELRETIRNLFANVYLDKQDDKTYTIAFESQDNSFVVYSGDPNIAPTAVAEPSFPSTLFEPSAQDLNEIERLRATIDPATLNKLGGLTFKINELEEKLWSKMQPILSRFTPVLNKELKARK

SEQ ID NO: 19662 - protein, 491 aa, synthetic construct
MTKAYSYIRFSTKGQIEGRSLQRQLETAREYAEENGLELQSLSFQDLGVSGFKGRNSEQGALSQFIEAVKEGTIPEGSWLLLESFDRMSRQPVEKSMRLLMELVELGITVVTLMDKQVYRRGQLDMTKLIISLVIMSRAHEESAAKSKRLADVWHAKQAVAHLKPLGTHLPAWLEYNEDKTKIQINYEKAVIVRYIFELSANGYGRSALIRKLNSQGIAPIGSRAKRWHVSYVTKLLNNTAVLGEYIPHVTDKLGQRVPTGEVIENYYPPIIEKDLWLRAKAAAQSRKIRGTGAIRRGHTRNILSGMVSCECGSSMQFVNKGSSDKGGYYLVCSTARHGAGCQYIGHRYYSIQWVVLIALQKLLHTFANKADNHEKEMLLEGELVELDRKLNNLINDLEENGASKYISSAIRKTEQRVDIVKNELLMLQSSKAVENDEVDLQEITLRLNENFERLRLHQYLKRHIANIVVYKNKERLERLCCVIQTRNQTS

SEQ ID NO: 19663 - protein, 547 aa, synthetic construct
MKLLVTYIRWSTKEQDSGDSLRRQTNLIDAFYSKHKNDYYLLPAHRYVDKGKSGFHQQHKNQGSDFRRMFENVMSGAIPEGSLIVVENFDRFSRADIDTAIDDVRQILRKGVSILTLGDGELYDKSALTDPVKLIKHIIIAERAHQESLVKQKRIAQVWNHKTQLARELKKPMGKQAPGWLELSDDGSHYIVDEDKASLVNIIYDKRLSGMSMFAICKWLNEQGYPTINQRKVRISKTKKPDGNWSALSVKHILTSRSVLGYLPAKISTEDRKTVLREEIEGFYPQIVTDSKFYAVQQLLEETGKGKTSSGDHWLYVNILKGLIRCKCGLVMTPTGIRKPVYQGTYRCNGNKESRCNYGTVSRKLLDTQLCSRLFSKLSQLHDEATDTAKLDELQRRLNTVDSELEKLTETLIQLPNITQIQEALRVKQEEKDELIVQLSREKARVKSVSSLDLSGLDMESVEGRTEAQIIIKRLVKEIVVSGNEKLVDIYLHNGNMIRGFPLDGKDDHTLTLEEATDEMQSLDDMLIFGEPVTRIYPAGDMEEVDA

SEQ ID NO: 19664 - protein, 570 aa, synthetic construct
MRVSSEQQLSGDGLDRQESMLIRYFDDNASCYDFDPNYELIVDRGVSAFKGHHQRESAGLGGFFKRIRDGEVEKGSVLCVESLDRFSRENPFKCVEYISILDSYQIELHDVDKKLKIGRKYPNSLSFAVMIAERSYEESRLKSDRIQKGWDKRRKIAKEKGQYMIKNCPKWIDVVNNKYVLNEHHLIIREIFDLYRSGIGSYTIAVMLNRDNKTIDGMKWNSTKICHVLRNRRCKGEYTSNRIIRNFEDDTVTSTFEILNIYPRIVTDDEFYEVSTRLEKFNYTGRIRHDLKRTVFNGLLKCELCGSALGVSSTSGYTYIKCDNARAKGGCTGVLMAYMPFEKGILSHIKDIDISKVINMDSTISNIDILKTEVVELESYIQSFIIGIENLKQQGRFPTFDMLDGKAQAEERLQDVKKTLAAEKDTFNVSNLEFSSDIHKLENIIERSKLELELRKVIKRIAIKADKTYITADISYYNDDNIKHVLLIHKKKTTIEVMGEIVQQDGWRTYSFSEGGSLVFRVKSNGEIWTLSAAKNKSISEIQKYMTMMVGRESIDFDFYINEDFIEWIE

SEQ ID NO: 19665 - protein, 547 aa, synthetic construct
MKLLVTYIRWSTREQDSGDSLRRQTNLIDAFYSKHKNDYYLLPAHRYVDKGKSGFHQQHKAQGSDFRRMFENVMSGAIPEGSLIVVENFDRFSRADIDTAIDDVRQILRKGVSILTLGDGELYDKSALTDPVKLIKHIIIAERAHQESLVKQKRIAQVWNHKTQLARELKKPMGKQAPGWLELSEDGSHYIVDEDKASLVNIIYDKRLSGMSMFAICKWLNEQGYPTINQRKVRISKTKKPDGNWSALSVKHILTSRSVLGYLPAKVSSEDRKTVLREEIEGFYPQIVTDSKFYAVQQLLEETGKGKTSSGEHWLYVNILKGLIRCKCGLVMTPTGIRKPVYQGTYRCNGNKESRCSYGTVSRKLLDTQLCSRLFSKLSQLHDEATDTAKLDELQRRLNTVDSELEKLTETLIQLPNITQIQEALRAKQEEKDELIVQLSREKARVKSVSSLDLSGLDMESVEGRTEAQIIIKRLVKEIVVSGNERLVDIYLHNGNMIRGFQIDGKDDHTLTLEEATDEMQSLDDMLIFGEPVTRIYPAGDMEEVDA

SEQ ID NO: 19666 - protein, 547 aa, synthetic construct
MKLLVPYIRWSTKEQDSGDSLRRQTNLIDAFYAKHKDDYYLLPAHRYVDKGKSGFHQQHKNQGSDFRRMFENVMSGVIPEGSLIVVENFDRFSRADIDTAIDDVRQILRKGVSILTLGDGELYDKSALTDPVKLIKHIIIAERAHQESLVKQKRIAQVWNHKTQLARELKKPMGKQAPGWLELSEDGSHYIVDEDKASLVNIIYDKRLSGMSMFAICKWLNEQGYPTINQRKVRISKTKKPDGNWSALSVKHILTSRSVLGYLPAKISTEDRKTVLREEIEGFYPQIVTDSKFYAVQQLLEETGKGKTSSGDHWLYVNILKGLIRCKCGLVMTPTGIRKPVYQGTYRCNGNKESRCSYGTVSRKLLDTQLCSRLFSKLSQLHDEATDTARLDELQRRLNTVDSELEKLTETLIQLPNITQIQEALRVKQEEKDELIVQLSREKARVKSVSSLDLSGLDMESVEGRTEAQIIIKRLVKEIVVSGNEKLVDIYLHNGNMIRGFPLDGKDDHTLTLEEATDEMQSLDDMLIFGEPVTRIYPAGDMEEVDA

SEQ ID NO: 19667 - protein, 509 aa, synthetic construct
MSKPRAYSYLRFSTPEQLKGDSYRRQTTMALEYATRKGLALDQDLTFEDLGVSAFRGTNAEAGRLAEFLEAVRAGLVPRGSYLLVEALDRLSRLSPRKAVRVLEDIVEEGITVVTLNDGREYTSANLDDDPTSLLIAIVLFMRANEESATKSRRLSAAWEGKRQRVEDRPLTAITPAWVSLNEASGKLELVPERAAIVQRIFDMYAAGIGYALIAETFNREGIPCFGRARHWHRTYIRKILVNDAVIGIFTPHRIVHEGGKKIRLPLEKVPGYFPLVISEDLFTKAQSQLNGNAGPAPKHRGAVISNLIAGLARCPICGSTMTRVMKGAGPKSGKPKLVCTKAKAGAGCQYHTVPLDSVETAVISNASYVTGTVPSGRDGLDSDLDAAEVRIEATQDEIENLLRALAVTPSTAIAERIKDLEVSLEALRTERDGLADQLMAANGPLLAKRVEELRQALEAAPLDRAKANAALRVLLSSVTVDYDSGKLLFQWKHGGETEVIYSMPREVR

SEQ ID NO: 19668 - protein, 452 aa, synthetic construct
MKAAIYIRVSTQEQVENYSIQAQTEKLTALCRSKDWDVYDTFIDGGYSGSNMNRPALNEMLSKLHEIDAVVVYRLDRLSRSQKDTITLIEEYFLKNNVEFVSLSETLDTSSPFGRAMIGILSVFAQLERETIRDRMVMGKIKRIEAGLPLTTAKGRTFGYDVIDTKLYINEEETKQLRLIYDIFEEEQSITFLQKRLKKLGFKVRTYNRYNNWLTNDLYCGYVSYKDKVHVKGIHEPIISEEQFYRVQEIFSRMGKNPNMNRDSASLLNNLVVCGKCGLGFVHRRKDTVSRGKKYHYRYYSCKTYKHTHELEKCGNKIWRADKLEELIIDRVNNYSFASRNVDKEDELDSLNEKLKIEHTKKKRLFDLYISGSYEVSELDAMMSDIDAQINYYEAQIEANEELKKNKKIQENLADLATVDFNSLEFREKQLYLKSLINKIYIDDEQVTIEWL

SEQ ID NO: 19669 - protein, 643 aa, synthetic construct
MAGIRMENKIYEVGMYCRLSKDDGTDNESASIATQKSILTDYVKKQGWHLAKTYVDDGYSGTNFQRPSFQNMIKDIESGLINCVITKDLSRLGRNYLDCGLYLEVFFPEHNVRYIAVNDGVDTLNKSAMDITPFRNILNEMYSADVSVKIKSAYRARFQQGKFMGTTAPYGYVKDPADHNHLLIDDKVAHVVREIFDLALAGNGIAKIRKHINKQHILRPAAYAAEQGATGYERYFEENEENRYIWSENSVRGILRSPIYAGNLAGYKRIAANMKSKKRPSKLPEEWEVIPDTHEGIVTQEEFDTVQQLITSRRLPENKGGFENIFAGVIKCADCGYAMRAMSANRRKRPDIIDCVQYSCNNYGRYGNIMCTAHSIEARDLFNAVLTDINRFADMAVNDEKAVRAIEKRLTETDQSKAKALEKEQRKLNKRLAELDRLFSSLYEDKVMERITERNFEMMSGKYQKEQLEIEARLKEVTETLSDSYEKTQGVRDFLSLIRNYQGIKELDATIINALIDKILVSEREKLTDGMVRQEIKIYYKFIGFVGELHITPTKRWTALKPKNCTVCGVEYVPRSGISKYCPACAKKIQREKSNESKRRSRERNRQACIELSAKNDRLIWSREPVGRSVREIKIRRWTLFAM

SEQ ID NO: 19670 - protein, 547 aa, synthetic construct
MNRSGRKCVLYPCVSTEMQVDGFSLDGQKNSLKRFADREEMEIVDIHEDPGKSIKGRPAFKQMLCDIENGLDIDYILVYKLPRFGRNAADILNSLEHVQSFGVNLICIEEEIDSSQTSGKLLISVLSAVAKIERENIIEQTMNGRKEKARQGGWDGGSAPYGYYLKDKQLYIQEDEAEAVRIIFDKYVNGNMGFYKIANYLNLQGIQKIKCANGALAGWSTHFVRMIIDNPVYSGKIAFGRRTREKVKGTKNEYIITDDQHDAIICEELWNQAHEKREIAGIKSPSKIGRDRAHLLSGILKCPKYGGPMYTNKHAWTNKDSTYKEIYYYMFSKARIARGKNCDYKSMLKKTDIEPLVIEAIRELIKNQDFVTEIKSRIGKEIDTSTLNREPSNYESKLREVELNKTCLENEIDSLPEDTRFRERKLHDMTFRLDGLYDIIVELEEKIEDVKLRRKAVEQDAITPENIYTLLANFNNVYDKISDEEKKSLISSLIKEIEIFPCDKAELPLKSILFNFPAYKDGGDVCGFLWDKSTHVSTCLERIIMMS

SEQ ID NO: 19671 - protein, 526 aa, synthetic construct
MTRTVRNVTTIPATISRFTSTPINEQRKRRTAAYARVSTDSEEQATSYEAQVDYYTSYIKSRDDWEFVDVYTDDGISATNTKHREGFKRMIADALDGKIDLIVTKSVSRFARNTVDSLTTVRQLKEKGIEIYFEKENIWTLDSKGELLITIMSSLAQEESRSISENVTWGQRKRFADGKVTVPFRRFLGYDKGEDGNLVLNEKEAIIVKRIYGMFLQGMTPYGIAKELTKDGILTPGKKEKWSAGTVKSILMNEKYKGDALLQKSYTVDFLTKKKKVNEGEIPQYYVENNHEAIIDPAVFDMVQRELEARQAGKNRHSGTHIFAGKIKCGECGSWYGPKVWHSNSKYRRTIWQCNHKFDGDEKCKTSHLDEDTIKDIFIKATNELLANKDEIIANFETIKATLFDTKDLENKKTELQNELEIAAEMIQDIINQNAHTALDQEEYKRRYESLVEKFDTTKANLELTTEQIKDKITRHKNLEIFLDELQKQDGLISEFDPLLWNSLVDYLTVYEKDKIQVSFKNGIKI

SEQ ID NO: 19672 - protein, 515 aa, synthetic construct
MKTAIYLRKSRADLEAEARGEGETLAKHRSTLLKIAKEMNLNVLSVREEIVSGESLVKRPEMLALLEEIEDNKYDVVLCMDMDRLGRGGMKEQGIILETFKRSNTKIMTPRKTYDLNDEWDEEYSEFEAFMARKELKIITRRMQRGRVASVEAGNYLGTHAPFGYDIHRLNKRERTLTINSEEASVVRMIFDWYANEDMGANAIRSKLNDLGYKSKLGNEWNPYSILDILKNNVYIGKVTWQKRKEVKQPDAVKRSCTRQDKSDWIIADGKHEPIIPESLFEQVQEKLNSRYHVPYNTNGIKNPLAGIIKCSKCGYSMVQRYPKNRKETMDCKHRGCENKSSYTELIEKRLLEALKEWYINYKADFEKHKQDDKLKETQVIQMNEAALRKLEKELVDVQKQKNNLHDLLERGVYTVDMFLERSNVVSNRITEITSTMENLKKEIKTEIKKEKVKKDTIPQVENVLDLYFKTDNPKKKNSLLKSVLEKAVYKKEKWQRLDDFELVLYPKLPQDGDI

SEQ ID NO: 19673 - protein, 552 aa, synthetic construct
MARKKSKLNDNNLAIAYYRYSSHSQNEASIEQQRELAHEWADAHGLKIVREYEDAAISGTKEDRPGFQLMLSEVAKIRPNTLIAWKTDRLGRDKYVLAMAKKTIRDAGCEIHLLAENIPTDTAEGILIEGLMEALAEYYSRNLSVHIQRGMDFNAEHANFNGHKVFGFKTEKVDKKRKYVIDPDTAPFVQLMFAKYAEGEPMQSICDEFNEAGLRTSRGNPFGVKTMHRMLKNRAYIGEYRHGEFVVPGGMPALVDGETFDRAQKRLAENKRKGSQRARGMDEDGAPRYWLTGKLYCGECGETMQGVSGTSKTGRTYYYYYCSAQRKKLCTKKKVKKDWIEDLVTDVLRYIIDDSENLMSLAVDAAVYYKEHYKETGYLEGLEAKRKEVEKGIANLMKAIEGGAFSDTLIERLNQLEAQKASLNDAIQAENVKVSLCEDEHSIKAYFEKFLHADFDNPETRDKILEYFVDKIYLYDEKLVVTSWYSEDKTEITWDMLKGADGDPFVKGEAAEFDCFPLGSTIYKVNDMLIPKWICKISFFCYCKGTSFDEKA

SEQ ID NO: 19674 - protein, 648 aa, synthetic construct
MTSTAPSGSEPAGYAYIRHSTKRQGGDDKDSVSRQKTSIRALAKQYGLEIPDQNFYYENGVSAFSGKNRTHGKLKELIDQIDGMRIRKGDYVFVESIDRLTRQRLLQAKELVNGLLEKGIILVTTLDNQKYQKATLENGIDDLTQDILLSVISKRAWDESNTKSIRRKSAWNKAKEAAEKDLKPFNAKRPPYGIQFNELAGKFELDPVKSKEVIAVFESLKMQGVTNTIKLINQTSVHKWTSQRVKDLFITKYPIGYLYSQKKIDGQMVFDKYIENYYPQIISFQLFEEARLAMQGRKGSKSIGRVAADNSNIFRHTAVCDICNESMYFSNNSNGKAKYINLNCRNNFESTNKCSNRFRFDLAVYVLFEIVRRAEIINKLSSNYTPKPNEKSPLDDFYDEFGVIQSKGIVQPQRSDFSQNNKYVWDFLYNPQKHISQSIYLAEKFSKIMQGNSEQKKFHKENVDLLNEKAQMQQRIESLNKKVNSLVLADADIPDVIVMQLVNAKKRITAIDEEIAQLTVQQATKATVKIETLSEFESLFKTDEGRLKIITFLNSSGLSFNFNYDKKSRILTTTLYQEFDPLEEPEPINHIWTDRKFKRAYRHRDKMRLREIVHRKELTTVETYYETNFAPMRPYGYENLGEFLMNQK

SEQ ID NO: 19675 - protein, 541 aa, synthetic construct
MQTSQGLVYSYLRFSDPRQAAGNSADRQAEYAKSWAAARGLTLDESLSLRDEGLSAFHQRHIKQGALGVFLQAVDEGRIPAGSVLVVEGLDRLSRAEPIQAQAQLAQIINAGITVVTASDGREYNRERLKAQPMDLVYSLLVMIRAHEESDTKSKRVKASIKRLCDGWVAGHYRGLIRNGSDPRWVRLVDGHWELIPERVEVVRFAIDKYREGHGADRAHAMMQERGFDTSYLGISPQQIYRLIKLVALKGAKQISVDGENFLLKDYYPRLLTDAEFDELQLLRGQRSRRRGKGAIPGVVTGIGITYCGYCGTPMTAQNVMHKVRSDGTLMDGHRRIMCMSYMNKGGCDVGGSCSVAPVERAVMSFCSDQMNLLRLQQPVGPSGDLQQGVMISRKHVVDLEAQLGRITEALALGEGDGVLPITFLRKARDLEEQLTAAKAKLHQEERELAGIASRQRPADARVWLDLAAGVEAQEVEARDKVRQLMIDTFDRIVIYMRGVVPEGRKAWYIDVLLISKAGQRRWLRVERKSGKWAAGVDRPD

SEQ ID NO: 19676 - protein, 539 aa, synthetic construct
MAKNGARVYSYLRFSDPRQATGSSADRQLQYAQNWAASKGLILDNTLSLRDEGLSAYHERHVKQGALGVFLEAIENGRIAHGSVLVVEGLDRLSRAEPIQAQAQLAQIINAGITVVTASDGREYNRAGLKAQPMDLVYSLLVMIRAHEESDTKSKRVKAAIRRQCEGWKAGTFRGLIRNGKDPQWLRWTGEAWELISERVAAVQRALELYRQGMGAGRAAKIMHQEGFILSDWGIAGQQIYRLIKLPALRGVKRLSLDGEEYELEDYYPRILSEAEWGELQHLAGQRLRRRGHGEIPGIVTGIGLAICGYCGTALVGQNLMSRRRADGTLADGHRRLHCVSYSKNGGCSAGGSCSVVPIERALLNFCSDQFNLQRLLQDGDDGRGLQHQLIAARAEFDKLSNQLAKVTDALLADDTGAAPLAFVRKARELEQLQNAADQKVKDLEHQVSAFSSIERPAHAERWAELAAQVDAGDYAAREQVRQLVMDTFERIVIYMRGVDAIDRTSRTIDVQLFSRTGQLRVLQINRRTGAWVASEDWD

SEQ ID NO: 19677 - protein, 615 aa, synthetic construct
MLQAKTPKAYSYIRFSTPEQQFGDSERRQTELSQKYAEAHGLTLDENLKYRDLGVSAFDKSNIRNGELGTFLRAIDSGAVEPGSYLLVESLDRLSRAKVTDALEVFMSIINRGIRLVTLMDGREYSKERINEQFTDLIISIVVMSRAHEESQTKSKRLKEAWKAKRGRIGDAKLTEMAPAWLKLNDERTAYSLVPDRVELIQRMFQWSKDGIGSETIARRLNQQGLPTWGTRKADQWHASYIKKVLDNRAVLGEFQPHVLVNGKRVPEGDPAPDYFPRIVSDEDFVLAKTARQSRRTNSAGRKGQTFSNVFSGILRCGYCNGSMVYVNKGHNGPRARLLVCARAKAGKGCHYVPWEYPQFERSVLTYCKGLDFDAFLQTRDTVKSELAALSARIAVLESSITDNEQKQANILEAIESGAKFQQFEARMVELEQNRMKFNAELDETRQKYNLRANAKIDVTAVRASIDGVLHRISELEGDELYDMRARLSQHIKRLIVRIAMYPGGYIESPFFVEKLRAHLLSRRIDTNAADEYITSRLKLTPNVNERFFTMISRSDAVRMIRPDLDNPEILHLQQGEGGQGPAAHAEAIGAMLEKLTEVARKSSDSTEVLPDAGC

SEQ ID NO: 19678 - protein, 543 aa, synthetic construct
MGKNGARVYSYLRFSDPRQATGSSADRQLAYASAWASKHGMELDATLTLRDEGLSAYHETHVKQGALGAFLRAVDEGRIPAGSVLIVEGLDRLSRAEPLLAQAQLGQIVNAGITVVTASDGREYNREGLKAEPMNLVYSLLVMIRAHEESDTKSKRVKAAVRRQCEGWVTGSYRGRIVSGKDPQWLAWDGDSWQFIPERVEAVRFALDAYRSGIGAARLVRLMHEKGMVLSDWGIAAQQVYRLVRLPALRGAKRISIDGEDFMLEDYYPRLLSDEEFSELETLVGQRYRRRGKDEIVGIVTGIGITRCGYCGTALVAQNLMQRVKSDGSLEDGHRRLHCVSYSKNGGCNGGSCSSVPIERAVLAYCSDQMNLQRLLEPSSAGEDLRPRLVEAKKGVAEIERQLERVTDALLADDTGAAPMAFVRKARELEEDLERRRSAVRALEQELVTKSASTPAAGASKWAELAERAKSMTDVEAREQARQLVMDTFETLVVYMRGVMPTPKGRHIDLMMRSRAGQTRWLRVDRRSGVWRESGDSSRRLEG

SEQ ID NO: 19679 - protein, 557 aa, synthetic construct
MSRKPMATTAGVQTRAALYLRVSTGRQAVNDLSIPDQRRQLEAYCESKGWETTAEYVEPGNTATDDRRPSFQSMIEAALTKPPAFDVIVVHSFSRFFRDQFQFEFYVRKLAKNGVRLVSITQELGDDPMSVMMRQIMTLFDEYQSRENAKHTLRAMKENARQGFWNGARPPIGYRVVAAEQRGVKIKKTLEIDPLQAETVRTIYRWALTGDGAQGPMGLKTIATKLNEQNIRTRDGGRWGVGTVHQILTRSTYMGEHRFNTRDHKTRTPKPESEHAIMAVPPIVSKADHDAVRARLASRNPKWTPPRVSTGPNLLTGICFCGFCGGAMTLRTGKGQAGGQYRYYACSTRARMGEAGCTGLAVPMHKLDDAIINHLETRLLDPDRLAALMEQLLDRREEWADQRRGHIAEMRRRATEAEAKLNRLYEAIENGLLAPDDASLKDRVAELSGTRDQARADVERISASVERLAPTITPDALARFATAARRKLRDRTSGYRRDHLRALTQRVEVISKTEARIIGSRTELLRALASSDGGSYAAAGGVLGFKPKWRTRRDSNS

SEQ ID NO: 19680 - protein, 582 aa, synthetic construct
MTSPSPAAYAYIRHSTKRQGAEDKDSVTRQKESIRVLAEQYKVQIPDENFFYENGVSAYNGKNRTHGKLKELIDQIDSLRIRPGDIVFVESIDRLSRQRLLQAKELVNGILEKGIVLVTTIDNQRYEKASDKNGIDDLSQDILLSVISKRSHEESKTKSVRRLSAWAKAKKDAVEKSIPFNKKRPPFGIQYNELTQKFEPHPEQAEELNRIFESLRLQGVTATIKEINKTSSVKWTQNRVKDIFEKKYPLGYMYSQVKKDGKMQFDKYIENYYPQIISFELFEQARQAMQGRKVNRRAGRSSQDNSNIFRHTAMCGICGESMFFMNNFGSQTKRYFYMSCRSNFEQNNKCKNRFRYDFGVSVLFHIIASSFFWNMLSKRPALFEAVKKSTFYSEGDFGTKVETADDMTSYAKVGEHFIRFLEGNTDNKSQNKERIEKEILLSKKKMTLENLEKSVETIQDGAIPASILKMLMNAEEEVSRLKEELEELTVNSIDTKTTLHVKTVDEFVELFKKEHGRLQIINFLASNGITFFFTYNKDTKTLNTKVAIDGEVVSTYNTLYEINALEKYGIGNIAEEFKLPDA

SEQ ID NO: 19681 - protein, 583 aa, synthetic construct
MGKVFSYIRFSSERQSAGDSYARQVKAAKKFCDEYELELADPREYLFFDAGRSAFKGKHLDDTGELARFLSFVEDGTIPPGSYLVVESLDRLSREKVRDALPRFLDLLAKGINVYTSTDRRLYTKDYNEIDLIISIISMSRAHEESALKGGRVSSAWRSKQKEARETGKPLGKLRPLWLDVTPDGYVLNPANVAVVRRIFDLSTKGHGSRIIAATLNQEGVASFSAGRKNFSGLWGFSTVRHILGSRAVLGEYQPHIFIDGKRTPDGEPIKGYFPAVLTEDEFYLAHAARSSRKTHTITKTTTNFNVLAGILYCYKCGALIHLQGQRGRKYYKCSKTTKGMCDAGIISAPRTEAVFKEILTKVDSLSLVQDSSGSLQKSLQILEGRIAELKSKQLEAEASHAEFPSRITARLLHELEANIGTLEAERTTLTEQLTADKVMSKENFFEKLDLVSFEGRVAANNLIKRLGLHIFASKHGRTDETYWVSKSNAVPTPFSEEAVNLLFYLMHKGSNIRFEAMYDEYVDLQVIQGELTEVGAILAKTESWDELPPELLAELKARDDQRKPYSFIQSDFLNKPPLVRVF

SEQ ID NO: 19682 - protein, 533 aa, synthetic construct
MPYAVGYARFSSTKQGKGSSLSRQQELISEWIENNKGYQIYPKKFEDLGRSASKGDHLKHGFGKLLEAIEQGEIKEGDVILVEAIDRIGRLPEMQMISLIDQIVSAKVQIITLQDGCTYGPIIKSEQIWSLVGKVQQAYMYSASLSERVKASYKRREALAMNGVIPKRRTPIWLNSDGTVKPDIAEAMKGAFEDALSGIGERRILKRLIQSNTAFETINPSTIRRWLTNRIAIGYWKDYKIYPSIVSDELFYQVQKRFNDEYKPPTAPRTHFLSGLIKCGDCGANMQVKINKNSPFTMRCTTRCVYGDLRCKNSKSFPVPVLLHVCYDTATGAVEKAMQNIELSSSQKKLIVIDGQLRDVSEKISNIVQSLEKYGPLPELDRKIASLSEQRNKLEREKLLITNDTVENVSKYDTAWDYQYELIADHPMRLNALLQSSGYQIDCYSGGLMLANTSGNDFSECVYEGYNRKIQAYKISAQGNVHHITNRDGSLTKERLERFKTMLARQRTGDTTTFKAIETSAAELEMYEFYNTI

SEQ ID NO: 19683 - protein, 543 aa, synthetic construct
MTEEKQRFAVTYQRFSSGRQIGNSSLDRQTDTQKAWLRQNPNVTVIDNFVDKAMSGWSGKHLKEGSLGQLMKAIEDGIIQPGTLILVEHFSRLTRQNIDNAEELVKRIWKAGITLVTVRDNTEYPPEAVNNMSLRIRLIVEMEQAFKESEWRSAKVKASYTRREKLAKEEGKAPRIRKPFWLNPDGTLNHLHQAVKDMFSWYLEGLGQQRIVVRLREKYPDTAIQKINPSTVMRWIQSEIVRGYWRGNRVYEPAVDDQLFFDVQAIHKSRLYKNVKPDRQWPLSGLMQCGVCGRGMSIQKSGKSNPVVRCSSKQRDHSCDRKTTFPYFIVHMYMMTHVLQHAIRLHSDKSSNKGLQIELGKVERKLATTRKKLNDEKEFYNKASNEGQNTTMILQLMNETYQKVAELEEQEKSLKASLKQNNHSVSPESRDLVLTPETFNLEMHKLGFKIVVGEQELSTIGFDKPVSKMVYVGYCRKERAYKYADGSSDFIKVWPSSLVTDELLNMQMLKNYINSSSGLRYIWDNLYEDDLEENLAKKLKEKR

SEQ ID NO: 19684 - protein, 678 aa, synthetic construct
MRTTPKIYNYARVSTTKQTKGVGLETQQQRSVLENLSQEHNLPIHDENFVDQGLSAYHGKHKDGAFGVVLSRIESGEIASGSILVVFSLDRLSRETVNVAMEQFLSIINRGVRVYTHIDCKMFDSESQNQTADLIGSLITMQRANEESETKSKRIIAAQKIALKRWKDTGKPQGALGRSPFWIDQPTNTLNINAEGVKKAVEMKLAGYGDLKIKQYLDANFEYKQTRTKGTVKQSNTWDYTAISQLWANRSLIGEKNFHIEGVSHVFENYYPPIIDEATFRKLKMCKSEKRGRNTSSGKIPLLKGIARCGICGGAMVFVDKGDNRVNYVCNLAMKGEHDREVYNVNMLDLLTLEICKDAYLAESDKANNTFVENEKIKIETELVEEREVLDELVARFKAKKSNTILDLIGDSENQIDVLEAKLDAINNADVVLNADELVSLPEIFTDDVRTDYLHPERYTIRNNLYRFISSITLNRVVEHCSDAKIKSANCIDITWHFKNGQKRRLAMLPYQYLKADDGRKSLYLPFVYMYGSKSNIKVDDGGQFLSSIFEKLHAFDLTKCLYPSRGCYQWSKLSLECGKTYWAPLDKAMFMEKGMEVIADTVRDNGGTNKVDGVTTNYLSLMFNYPSSEEFSYDYPDSTFVELACKFGFVADRDFSLFLQDNNFNRELYSSLDFLMS

SEQ ID NO: 19685 - protein, 529 aa, synthetic construct
MRKVYSYMRFSRPEQAKGTSIERQSNFAEQYALEHGLELDKSLTMMDKGLSAFHGVHKTKGAFGQFLAAVTAGKVPSGSVLVVESLDRLSREDPLIAQAALTDLILSGITVVTAADNQVYSREEIQQNPFKLIMSLVVMIRANEESETKQRRSNAFLKSALNQYQANGKIRRLGSDPSWLDFNKDNDTYSFNERVEVIRRILNLYNQGIGSLKIARQLTEENIPTLSGKRSAWGQTTVANIVKSHALYGMKRINVQGVEYDLEDFYPALITKSKWLALQQHRTKRSKSMHGRGEVVHLITGHGKGFTTCGYCGGGLGAQTQKQYKRSGEYSRTVTRLHCLTHKETSSCCSSVFLEPIESAVLFAACIGVEPQSLVPTVNNVNYSALIDEVENKVKHIVEQVTAGAPWDLFKDAHDKLKLEKQKLIKERDSQKPDVNQSDVQKWVNKLVELADKARANDKEARLKCRTLINSICKSIVIKLRGHDLKSEPVVTITFVTDEQFEFKVGKNGAVQFVDNGMAVNRRLKPLLA

SEQ ID NO: 19686 - protein, 559 aa, synthetic construct
MSKEKIKVYLYTRVSTSIQIEGYSLEAQKSRMKAFAIYNDYEIVGEYEDAGKSGKSIEGRIQFNRMMEDIKSGKDGVSFVLVFKLSRFARNAADVLSTLQIMQDYGVNLICVEDGIDSSKDAGKLMISVLSAVAEIERENIRIQTMEGRIQKAREGKWNGGFAPYGYKLEDGKLFINEEEAVAIRTIFDQYVNTTIGANGISKYLENHGIRKIPRQNGKNPLFDAGLIRKILKNPVYNGKIAFGRRTLEKVHGTRNEYKQVEQDEYLISEGIHEAIVSDEVWQAAQVKLKSQAKKYEHVNKGKDTRTHLLSGIVKCPICGVGMFGNKCIKKKKDGTKYKDFYYYGCNHRQMIRGHKCTFSKQIREELLDDAVAEVIVKIVSNPKFASMMQEKINMKVDTSEIEKEIDNYQKELRKSHSTKFKLIEEIDNLDVEDKHYKRRKQDLDDRLYRMYDKIDELESSLIDAKAKKQTIEAEKLTGDNIYKVLIYFDKLYKVMNDVERRQLISALISEIQVYEEKQSNGQWLKSITFKLPIIEENLNIDLDNDEQVECVSLLEKRS

SEQ ID NO: 19687 - protein, 533 aa, synthetic construct
MIYSTDQKGGETMAKITKIEKRQQINRVKKMRVAAYARVSTESAEQLLSLEVQKEHYENYIKANPYWEYAGLYFDEGISGTKIEKRESLLKLLDDCEKGKIDRVITKSISRFARNTVDCLEMVRKLTGLGVAIYFEKENIDTEHMSSELMLSILSSIAESESRSISENSKWSLKRRFENGTYVISYPPYGYENVDGKMVVVPSEAEIVKEIFRMAISGLGSYLIANELNKRGIATKKKSKWHSSTVQAILKNEKYTGDVIFQKTYTDENFNRHQNRGEKVRYMMKNHHEPIISHEDFELVKTVVGQRRKEKNIDGSDNKYQKRYALSGKVYCGECGSKVKRCMRYAQSGDYATWTCVRHIEDKKSCNMKYIREEHIKAAYVQMMNKLIAGKNTMLKPFVDTLRGGNNKNRLRHILELDEKIEKLNEQAQVLTKLLSSGYIELDVFYAENNNISLELDELEKEKTSLSSIVSGDLNHLNEAQKLLRFINKSDCIKVFIDDTFSEFVEKITIEDRLKFTFHLKCGLNLTEEVIVK

SEQ ID NO: 19688 - protein, 506 aa, synthetic construct
MRCHNVKPNIKEVAIYLRKSRDESDGKEDVLAKHESLLLEYAKNHNLKYKIYKEIGSSEYIDSRPKMVRLLSDVSQKLYDAVLVVDLDRLSRGDLEEMGRISRVFRDSKTIVITPTKTYDFNNEDQALINNFEMVFANHEFRMIRKRMIRGKQQGTKAGKWTNGRPPFPYVYNRLTKELDVDPDKVKVYELMKKMFLEDMKATYEIAWKLNELGFKTNRNSYWYENTVRRILKNEVHLGKVVYGKTSGSGSKKKLNASGVQIKDRSEWIIAEGSHQPLKTEEEHQRILAILESRRYTPKGTRTNVQVLSKLIYCGKCNRVMSFTGKTSGKKYVKTCLTTDRFGYRCHNRSLNVEVIYAQLFLDLERYEKQLLSHEPKEKQGDSSTLQLALQNKHEELERLEKGIERIKDLFIDEIIDKSEMKKRIEKQQQLMQTKKEEIRSIEQSLAVIGNVRTDDDRLHAIREFKKAWNTKGISKRELNTLAKQLIDRVEYIREGNNVQINIKFL

SEQ ID NO: 19689 - protein, 475 aa, synthetic construct
MYVRVSTDKDEQVSSVENQVDICRYWIEKNGYEWDQNAVYFDDGISGTAWLERHAMQLILQKVRKNELDTVVFKSIHRLARDLKDALEIKEILLGHGVRLVTIEEGYDSYYEGNNDMKFEIYAMFAAQLPKTLSTSISAALSAKVRRGEHTGTIPFGYDRIDKKLIINEEEALLVKEMFDWYEDGRGYRMIANNLNKKGCRTRFGNLWSEASVKTIVTNSLYTGEHVMHKYKTVKVDGKKKTVKNPKEKWLVFENHHDAIISKEQWERINPVSGVKDKKTKSDYRNEFRGIVWCAHCGKRVRAIYAGVRSKYERVYMKCSTYKAYGTCINHIPVRYEDFRNLILERLKQKQEYIETRLVAQIKDKLQEKIAKSKKTIKQLGSKKEKLLELYMDSFIDKETFVNRNRKLEDEMTAQELQLLKLKDKDIQNRETKDIQDAFMLLQEEQDLHKAFQKLIKKIVFYQDGKLDIEYTFDY

SEQ ID NO: 19690 - protein, 515 aa, synthetic construct
MKTAIYLRKSRADLEAEARGEGETLAKHRTTLLKIAKEMNLNVLSVREEIVSGESLVKRPEMLALLEEIEDNKYDVVLCMDMDRLGRGGMKEQGIILETFKRSNTKIMTPRKTYDLNDEWDEEYSEFEAFMARKELKIITRRMQRGRVASVEAGNYLGTHAPFGYDIHRLNKRERTLTINSEEASVVRMIFDWYANEDMGANAIRSKLNDLGYKSKLGNEWNPYSILDILKNNVYIGKVTWQKRKEVKQPDAVKRSCARQDKSDWIIADGKHEPIIPESLFEQVQEKLNSRYHVPYNTNGIKNPLAGIIKCSKCGYSMVQRYPKNRKETMDCKHRGCENKSSYTELIEKRLLEALKEWYINYKADFEKHKQDNKLKETQVIQMNKAALRKLEKELVDVQKQKNNLHDLLERGVYTVDMFLERSNVVSDRITEITSTMENLKKEIKTEIKKEKVKKDTIPQVEHVLDLYFKTDDPKKKNSLLKSVLEKAVYKKEKWQRLDDFELVLYPKLPQDGDI

SEQ ID NO: 19691 - protein, 517 aa, synthetic construct
MKTAIYLRKSRADMEAEQRGEGETLAKHRTALLKVAKEKSLNIIAVHEEIVSGESLVHRPEMLKLLQDVEDKKYDAVLCMDMDRLGRGGMKEQGIILETFKRSNTKIVTPRKIYDLNDEWDEEYSEFEAFMARKELKIITRRMQRGRIASVESGNYLGTTPPYGYLIKELKDGRTLEPHPDQSKIVKLIFEWYTHDDPEIRIGASMIANKINALGHKTATGKTWGNWTVLGIIKNPVYSGKVTWKKKEIKKSITPGKVKDTRTRDESEWIIVDGKHDAIISEELFEKAQSILKGRYHVPYQLTNGVRSALAGIIKCAKCGASMVYRPYTTQKPALKCYNQTRCHNKSSNYELVERRILEGIAEWLEVYKANFEMNSPQEETSEMNQINVYRQMLKNLEKELAETEKQKENLFDFLERKIYTEDVFLSRSKTLAVKTEKLQQDIDTIKESIDNELQREQAQDNIIPQVERVLDLYDKTDDPKKKNSLLKSVLEKAVYNKEKHQYKDDFSLTLYPKLPK

SEQ ID NO: 19692 - protein, 586 aa, synthetic construct
MNDVQVIKANRNENCIRGRKVEILRVAAYCRVSTDSEDQLNSYKSQVMYYTDLIKKKPEWSLADIYADEAITGTQVTKREDFQRMINDCMNGDIDMVITKSISRFARNTLDTLKYVRMLKEKGIAVFFEDENINTLTMDGELLLVVLSSVAQQEVENISSNVKKGLKMKMQRGELVGFQGCLGYDYHKDTKSISVNEKEAEIVRYIFNRYIEGAGCTVIANELENLGYKTKYGSSRWVQSTVIGIIKNEKYKGDLLLGKTFTVDPISKRRLENFGEEDKFYIRDHHEAIISEEIFEEAQKILAKRNVNRGVHQEGQKRNKFSRKYAFSCMIKCGFCGGTLSRRNWHSSSAYTKTIWHCVTATKHGKKNCPHCKGIPEEVIENAFVKSYQLLCSDQHEVVSEFLQKVEGILKDEASLKRLPKIEKEMTDLQRRKEKLLDLRLDNNIDRDIYDKKNQELSEQLKKLQAEQLQLVELSKNQESTKTRIREFRKNLNSGELLESFDRVVFESVVERIIIGGYNDEGVEDPLKITFVYKTGIHSNLNAKDFKPKRKNAAAVHTDAELCSYASVEDNKLCLHSSSDTCGNCS

SEQ ID NO: 19693 - protein, 515 aa, synthetic construct
MKTAIYLRKSRADLESEARGEGETLAKHRTTLLKIAKEMNLNVLAVHEEIVSGESLVKRPEMLALLEEIEDNKYDVVLCMDMDRLGRGGMKEQGIILETFKRSNTKIMTPRKTYDLNDEWDEEYSEFEAFMARKELKIITRRMQRGRVASVEAGNYLGTHAPFGYDIHRLNKRERTLTINPEEASVVRMIFDWYAHEDMGANAIRSKLNDLGYKSKLGNDWNPYSILDILKNNVYIGKVTWQKRKEVKRPDAMKRSCARQDKSDWIVADGKHEPIIPESLFEQVQEKLNSRYHVPYNTNGIKNPLAGIIKCSKCGYSMVQRYPKNRKETMDCKHRGCENKSSYTELIEKRLLEALKEWYINYKADFEKHKQDDKLKETQVIQMNEAALRKLEKELVDVQKQKNNLHDLLERGVYTVDMFLERSNVVSDRITEITSTMENLKKEIKTEIKKEKVKKDTIPQVEHVLDLYFKTDDPKKKNSLLKSVLEKAVYKKEKWQRLDDFELVLYPKLPQDGDI

SEQ ID NO: 19694 - protein, 484 aa, synthetic construct
MYVRVSTDKDEQVASIQNQIDICRYWIEKNGFEWDEDAVYKDEAVSGTEWFKRQAIQLILAKARKRELDTVIFKSIHRLARDLRDALEIKSILLGHGVRLVTIEEGYDSYYEGNNDMKFEMYAMFAAQYPKTMSVSISAAMNAKVRRGEYNGGRVPYGYRVVDQKYVIDDEESENVKELFDLYNQGLGYLKVALYMNDKGLRFIDGKLWRDYHIRHIINNPFYVGDYIAQKYTKVKVDGRRKQTVNPKEKWVVYKNHHPAIIERDLWDKIHSFEKKEKNRTKRRVSVDNELRGLVYCAHCGQPMKAEAVKKTQRDGVIKYVYMRCSKYRRTGGRECVKHVPLYYNQVRKLIVEKLKEKEQDLDEQISGGHKNKNKQKISKVNKEIKEWERKKEKLLDLYLDGQNISKEVFTQRDKKIDKIIREKNMELLKLNSLEEQIKEDNATKKAFDLLKNSENLYECFNTLIKRIDITQNGGLDIYYRFEE

SEQ ID NO: 19695 - protein, 485 aa, synthetic construct
MSKKVAIYTRVSTTNQAEEGYSIDEQIDKLKMYCEAMDWKVSEIYTDAGFSGSKLTRPAMEKMITDIGLKKFDTVIVYKLDRLSRSVRDTLYLVKDVFTKNQIDFISLSESIDTSSAMGSLFLTILSAINEFERENIKERMTMGKIGRAKSGKSMMWAKTAFGYSHNQETGILEINPLEASIVEQIFNEYLKGTSITKLRDKLNEDGHIAKELPWSYRTIRQTLDNPVYCGYIKYKNNTFEGLHKPIISHETYLKVQKELEARQQQTYEKNNNPRPFQAKYLLSGIARCGYCGAPLRIVLGHRRKDGSRTMKYQCVNRFPRKTKGVTTYNDNKKCDSGAYDMQWIEDIVLKTLNGFQKSDKKLRKILNIKEETKVDTSGFQKQLKSINNKIQKNSDLYLNDFITMDDLKKRTEMLQGEKKLIQARINEVDKPSTSEIFDLVKSELGETPISKISYEDKKKIVNNLISKVDVTADNIDIIFKFQLA

SEQ ID NO: 19696 - protein, 588 aa, synthetic construct
MAEIIKIEAKKSPLPNRKKVAAYARVSMETQRLHHSLAAQISFYSDLIQKNPEWDYAGVYADEGISGTSVEKRPEFMRMMKDCKAGKIDLILTKSISRFARNTVDLLKVVRQLKDLNIEVRFEKEKINSLSDDGELMLTLLASFAQEETISISNNVKWTIRKRMSEGNPNTRNSVYGYRWKDDTLIVVPEEAKIVRRIFQNFLDGKSRLETEREFAEEGITTRKGNRWTDSNIKVVLTNVTYTGNLLCQKEFVEDPITKKRKKNRGELPQYFIANTHEAIIDKETFDYVQEEMARRRALGPRANKSLNIYCFTGKIKCELCGKSYMRNVRNNRAKHSNLGDKVISWVCGSSKKKYSTCSAKAIPDRILKTCCAKVLGLEDFDDVVFNEQIDKITVPKQGVLIFHFKDGHSVTETWENNAKKESWDDAARKRASEYRRTHAMKRSDVTCFSTKIRCEHCGCNFRAQTQNCSTSPSGKRRYWRCAEHNGCDTRGLRDDLLRSLTAEVLGLDAFDDAIFLSKIDHISVLSREDLIFHFYDGKEIARKLIQPTHEGHKWTEEQHAKFKASIKECYASERHKPIRKEKLWPNK

SEQ ID NO: 19697 - protein, 527 aa, synthetic construct
MAKQVTTIPASIKPFSKTPLTTSRKRRVAAYARVSTDSDEQFTSYEAQVDYYTNYIKARNDWQFAGVYTDEGITGTNTKKREGFKCMVKDALDGKIDLIVTKSVSRFARNTVDSLTTIRKLKEHGTECFFEKENIWTFDSKGELLITIMSSLAQEESRSISENCTWGQRKRFADGKVTVPFKRFLGYDRGKDGNLVVNPKQAKIVKRIYAMYLQGKTYHLIAKALTEDGIPSPAGKPRWNPSNIKSILTNEKYKGDALLQKSFTTNFLTKEHKINEGEIPQYYVSGNHEAIIEPEVWELVQREMERRKNEKGRHSGVRLFSGKVYCGECGTRLGSKVWHSNDKYKQVIWQCNRHCKKNSPCKNGMHLSDEELKAAVLSATNKLIENKDEILNSFQEIVGGVYDTHTLEGEKAKLESEMDVCAKMIEDLIRQNAAIPQDQSEYQAKYEDLERFYNEKKAALAKVDGKFKKMQATKVDIKFCLKQLQKQDRLLQTFDEQSFCALVDHITVFSKEDIRITFRNGSEIKAL

SEQ ID NO: 19698 - protein, 416 aa, synthetic construct
MEICKLPPKPAQLRLTRVAAYVRVSRESERLTHSFSAQVSYYNKLITNTPGWEYAGVYSDYATTGTSTTGRGEFNQMIEQALAGSIDIILTKSISRFARNTVDLLTTVRALKAAGVSVRFERENIDTANAEGEVLLTLLASFAQAESESISANAKWGIRKKYKDGLLHSRHPYGYHYHHGQLDIIEEEAVIVRRVFSEFLEGISPEKTCKQMNQEGLRSRGGGKFSASVTRDWLENPTYIGTAILQQYFSAHAGDNTPTLNRGELDKYIVEDSHPPIIERSVFDAVQAELARRRATGGRGLTPTGGSSALTHRITCTICGRNYHRRTRRLAHSTYKYWWCESATKGKGNPCHAHQLREENLHTIIKRLLGLHAWDDQQVVDRIERIEVCPNWLLTIHLSSGNTATVDYLTGEEVTA

SEQ ID NO: 19699 - protein, 557 aa, synthetic construct
MLQSNKITALYCRLSQEDMQAGESGSIQHQKMILQRYADEHHFLNTKFFVDDGFSGVSFEREGLQAMLQEVEAGRVATVITKDLSRLGRNYLKTGELIEIVFPENGVRYIAINDGVDTAREDNEFTPLRNWFNEFYARDTSKKIRAVKQAQAQKGERVNGEYPYGYIPDPNNRHHLIPDPETAPIVKQVFAMFVSGVRMCEIQKWLAENKVLTIGALRYQRTGQARYQRAMIAPYTWPDKTLYDILARQEYLGHTITAKTHKVSYKSKKTRKNEEEQRYFFPNTHEPLVDEETFELAQKRIATRHRPTKAAEIDIFSGLLFCAGCRHKMYYQQGVNIEPRKFSYSCGAWRNRARTGSECTSHYIRKNVLLDLVLEDMRRVLRYVKEHEQDFICKATEYGDMEARKALAQQQKELFKAQARMTELDTLFRKLYEDNALGRLTDERFVFLTSGYVDEKKSLAARIDELQQQIATVTERKRDISRFIQIVGKYSDIQELTYENVHEFIDRILIHELDRETNTLKIEIHYSFVGQVDTEQEPTQVVNHDRRNMVDVKSIAI

SEQ ID NO: 19700 - protein, 548 aa, synthetic construct
MEKKKKVAIYARVSTVEQAEEGYSIDEQERLLREYCDKHDLEVYKSYSDRGISGKDIKHRPELKEMLKDSEENKFDMVLVWKINRLSRKLADVLKMVELFDKNNVTFKSYSEPFETNTPAGKMQFQMMALIGEFERGTIAQNVKMGMLARAREGKWCGNRVLGYDIVPVEGSLNKKRKETKLVINEKEAETVKLIFNEYSNGNGYKAITNKLNKLGYKTKKGNNFSVGSIKDILTNPVYIGKIRYNVRQDWSEKRRKNINPNPIIVDGLHDAIISEELWDKVQKILESKKGKPARIYDGEYPLTGILRCPVCGAGMVIMRTTNKLKDGTKKRITYYACGNWKNKGTAVCNSNAIRVDKANEYVFGKIGKLLSNEKMVKSIIENINNTRRNNIEPNKKKLEKIDKELSKLKSRKTKILEAYEDDLITKEELVGRKSELDKNISALEEERQKLLIIVTDENQLEISYYVIQEILQSFGKIMSNCTSREKQKMLLHMLVSEITIGKDREIDSIKLKINGDIIEYMNKEEGESKKTTPSSFMFTKGCLEINI

SEQ ID NO: 19701 - protein, 529 aa, synthetic construct
MTKAAFYGRFSSNNQREESAEAQLRASSDFADRNNYEIVAKYIDRAKSGTSSRKRAEFLRMIKDAEKGLFQVIIVHKLDRFSRDKYDSAFYKRKLKQCGVKLISVTEQLDDSPESVILESVIEGMAEYYSKNLARETMKGLKENAYKCKHTGGMPPLGYDVNSEKKYIINEREAESVRLIFEMYITGYSQSDMVNELNERGFKTKLGTIFKTNSIHSILTNEKYTGVYVYNKSAKKNAFGKRNSHAYKDESEIIRIEGGMPQIISKETFEKAQEVLKARKRAPGANKAKESYLLAGLIRCGCCGKHYQGNRRKAKNKPIYVSYRCSYRRLTSSKVCDNKEIRKEYIEEYVLSELERKIFNDKAIPHLVEGINKNLQKKNKFEEEKKDVIIREIEEIEAQINNIVTAIASGFMQEEFKVKMNELKNRKSELEFKLLELKSDEITQVVTERDVRILLNNFSSYVMSRNIPECKKFIQSLVKEVVIYKEHIEVTFNVSFSLLKNNHGLEVKSKIRRYNLYEKYSNSFYIKVS

SEQ ID NO: 19702 - protein, 502 aa, synthetic construct
MTNKTCIYLRKSRADEELEKTLGEGETLYKHRNALLKFAKEKKLNIVEIKEEIVSGESLFFRPQMLELLKEVEANKYDGVLVMDMQRLGRGDMKDQGIILETFKNSNTKIITPQKTYDLNNDFDEEYTEFEAFMSRKELKMINRRMQGGRVRSIEEGNYIATNPPFGYDISFIKKSRTLKINEHESKAVKLIFKLYIKGNGASFIANELNNLGYKTKLGNNFSSSSVLTIIKNPVYAGKIAWKRKDIKKSRTPGKIKDTRLRDKSEWIISDGKHEAIIDMETWNLAEEILKGRYHIPYQLANAPVNPFAGLITCGVCGKKMVMRKARGINRLMCIYKCGNKSTRFDNVESDCLDALKEYLVNYSAEIKNSTKKEDVDVYSNQISMLKKELSLLNNQKLKLFDLLERNIYDETTFLERSKNINDRIFSINNSLCNLEKLLKKKSISSYEEDIKFFKSVLDAYNETEDVSKRNTLLKSILYKIEYTKTEKGKDYEIKLFPKLRK

SEQ ID NO: 19703 - protein, 549 aa, synthetic construct
MKSKLKSSLNIESPKIAIYMRVSTSKQADNQSLDTQENTINSYIASRHDWINPICYKYIESHSASIKPKVSNTLKESSFDSLKRPKLRELFLDATIGKFDYVLCASHDRLTRNTNEGIILKHLFSRLNITLIYCRPGETISSENEALNKFFENLLVNIAALESNITGGRVTLANKHKIQNNFWAGGPPPFGYNLVSQPSNKRNSFLEINFEEARIVKKIFELYNLGCSYTEILTRLNRDFTLPPKRLWTHNTLKEILRNPVYTGFLVWNKRGGARKPNRHSPNDFVKSNLVEKNIIIPENEFLETQKLRNILSKDSKFLSTDFLLRDFLYCNKCNKKLLAKNYGNNKRFYYCSSHNNIEINKKCRSIKASKIESIILSNINDLINSSLQSEVQIEKFYDKYIENFNAELLDNKKSLEITINQLKSSTDLLELCVNEINISKDNLTVDYEDLSSNSTEFSFINALSEFQVITQTEIKSLKARKEYLTYKINSSPKSFDDFKSNLNKSFKLFKYDEEKQKLISSPRSFRLFLFKVVKKIILSDHEITIIFK

SEQ ID NO: 19704 - protein, 537 aa, synthetic construct
MKKAAIYTRKSKFTEKGDSIESQIKLCSKYLDNINIKDYCIYTDEGFSGKNTDRPEFQRMLSDAKAKKFDVIICYKFDRISRNVSDFSNLINKLNELNISFISVVEQFDTNSAIGRAMMYLCTVFSQLERETISQRITDNMYSLATKGYWLGGETPTGFRSEKKFFNSNNKPKMYSSLVPIKEELDLVKLIFNKYLEFNSISKIEKYLLSNNIKTKRNKDWSKASISLILRNPAYVKADEETFKYIESTGSKVYGNPDGKHGLLIYKKNKGRKGAKHDISEWIYAVSEHEGIIDSDIWVAIQKQIKKNAILAPALGTSNIALLTGLIRCAKCNSPMRVAYGKRNPKTNKKNYYYVCTLKTKSGKTRCDSKNLPGLDLDNLILDKLKEMSLDKNTLLKELNKYKDTIESNFHNDVLKNIQNNISKNNSMIDNLLNNVALSTDSEVTAILLDKISKLKDENKLLTQKIDDLKSELEAQETLLNDCNSLITKLKYFSKFIDNSSIEEQKQLVSSVIEKVIADGDTGSIEIKFRPLLDFKI

SEQ ID NO: 19705 - protein, 503 aa, synthetic construct
MKRIAIYSRKSVFIEGSISIETQINMCKEYMINKFPDATFEIFEDEGFSGGNTNRPAFQKMLKLAELKEIDIVVCYKIDRIARNTLDFLNILEIFKKNNVELVSITEGFDPNTQMGKVMLTLLASFAEMERTNIQQRVKDSMFSLAQKGNWTGGAPPLGFKVKESGGIEIYNKNLILDVFNMKFKKYKNTEIIEYIESKYNHKFVNTTLASMLRKPIYTKSSKEVSTYLKTKGYKILREENNSNSYYTYKNNNQDYAIVNNDVDGLIEPYVWISINKAMDDNSNGETNRFSEKFWLTKSLRCKYCGKTYCGQTKNVKSKYTNKDGVSKEYIGTYEYYMCRDMLRGRLKTCENTKRIKRSYLEKKIEELIYILKDKSFFEKSYYKREVDNPAKELKELESNMKKLDKTINNLTDKIALLSNDAAMILIDKIETLVKEKKALKDKMISLELKSLDNLEGKEEFIYENILEFNTNLSVDQKRNIAINIFKEIVYDYKTDKFEVFFN

SEQ ID NO: 19706 - protein, 515 aa, synthetic construct
MKTAIYLRKSRADLEAEARGEGETLAKHRSTLLKIAKEMNLNVLAVREEIVSGESLVKRPEMLALLEEIEDNKYDVVLCMDMDRLGRGGMKEQGIILETFKRSNTKIMTPRKTYDLNDEWDEEYSEFEAFMARKELKIITRRMQRGRVASVEAGNYLGTHAPYGYDIHRLNKRERTLTINSEEASVVRRIFDWYANEDMGASAIRNKLNDLGYKSKLGNDWNPYSILDILKNNVYIGKVTWQKRKEVKRPDAVKRSCARQDKSDWIIADGKHEPIIPESLFEQAQEKLNSRYHVPYNTNGIKNPLAGIIKCSKCGYSMVQRYPKNRKETMDCKHRGCENKSSYTELIEKRLLEALKEWYINYKADFEKHKQGDKLKETQVIQMNEAALRKLEKELVDVQKQKNNLHDLLERGVYTVDIFLERSKAVSDRINEITSTMENLKKEIKTEVRKEKVKKDTIPQVEHVLDLYFKTDDPKKKNSLLKSVLEKAVYKKEKWQRLDDFELVLYPKLPQDGDI

SEQ ID NO: 19707 - protein, 530 aa, synthetic construct
MNKYDQARLEDVVQPGKRIVFYARYSTEKQEYDMQKHSVETFLQRYGCEIYKEYVDRATSAIKVPFEKREDLQNLIRDAEKGKFDVVITYKNDRIARRIEEHQLFREKMRALNIHVVVSSSSELYTVGEVVSQAVKDGLTRIEAALIQDRTKDTFHSKTKRGTWLGGKAPYGYTYRVIEENDGGRKTRKEYFKDEEDQQKAVMEIFRLFEIGYGFQQIANEIHSRKLDESMKWTKEKIRYIITNPFYCGFISMNRYDNGVLNDQSQWVEGTPKNMTPLFKREYWEYIMRLFEERKKRKVHSRDYSTPFLLRGILNCDQCKELMLAKNQQSGGEKYKGKKKKEQRRIYECKKCDFKLQANMIHERFRKDYLPYVLEQVTQRKKEQVESAIEERLKKEMQSLKGSKKKLDEEIAKLNQQIEALNVEMKSYYDKETIDKKVLEFMSIIMSHRTNKIHELHTVKNKKVGLQERIDRIAKTMQQKKYLPPQYLIREFAKENVDTQKLRAFLLQFFKCIHVERDGNLVLSINEHLM

SEQ ID NO: 19708 - protein, 576 aa, synthetic construct
MKKVEIIKANRSLSDRNKNNMRSILRVAAYCRVSTDSDDQLNSYNSQVSYYTDLIRKNNEWDFVDIYADEGITGTQISKRTNFQRLINDCMNGEIDMVITKSISRFARNTLDTLKYVRMLKEKNIAVYFEDEKINTLTMDGELLLVVLSSVAQQEVENISANVKKGLKMKMSRGELVGFQGCLGYDYNVDDKSISINREEAEIVRYIFNRYIEGAGGRLIGNELEQLGYKTKRGSSTWHESTILGIIKNEKYKGDVLLGKTFTLDPISKRRLENYGEEDQFYLREHHEPIVSEEIFDKAQAIRLKRSIPRGSHEVEGFKRQKYSRKYAFSCMLECAFCGGTLTRRSWHSGTNHSKVVWQCVVSTKRGKKYCEHSKGIPEKVIEDAFVESYKKLCGNNKEVLEEFLMRLSNTLNESNVEKEFLEIEKQIDVLDKKRKKLIDMRLEEIIDKESYEEKYDDLTVEIKKLSKKKQTLKASLINENTIKARLKEFRKTLERNEVLEKFDRYVFESIVDKVIVGTTNEDGTVDPYKITFVYKTGFDDKQDGNKFRNNKTLKACSKDKNDNKKECSHAKDDTC

SEQ ID NO: 19709 - protein, 516 aa, synthetic construct
MYRPESLDVCIYLRKSRKDVEEERRAIEEGSSYNALERHRKRLFAIAKAENHNIIDIFEEVASGESIQERPQMQQLLRKLEGNEIDGVLVIDLDRLGRGDMLDAGMIDRAFRYSSTKIITPTDVYDPDDESWELVFGIKSLISRQELKSITKRLQNGRIDSVKEGKHIGKKPPYGYLKDENLRLYPDPEKAWIVKKIFELMCDGKGRQMIAAELDRLGIDPPVTKRGAWDSSTITSIIKNEVYTGVIVWGKFKHKKRNGKYTRHKNPQEKWIMYENAHEPIISKELFDAANEAHSSRHKPAVITSKKLTNPLAGILKCKLCGYTMLIQTRKDRPHNYLRCNNPACKGKQKQSVFNLVEEKLLYSLQQIVDEYQAQKVEEVEIDDSKLISFKEKAIISKEKELKELQTQKGNSHDLLEQGIYTVEIFLERQKNLVERITSIENDIEVLQKEIEMEQVKEHNKTEFIPALKTVIESYHKTTNVELKNQLLKTILSTVTYYRHPDWKTNEFEIQVYFKI

SEQ ID NO: 19710 - protein, 487 aa, synthetic construct
MKYAVYVRVSTDHDDQVSSVENQIDICRYWVERNGFEWDVNSVYFDEGISGTAWLERHAMQLILERARKKEIETVIFKSIHRLARDLKDALEIKEILLGHGIRLVTIEEGYDSLYEGRNDMKFEMYAMFASQLPKTLSVSISAALTAKVRRGEHIGGRAPYGYDVIDKKLVINENEASVVRRIYDLYENGFGYVKIATKLNDEGKKTKAGGYWRHSAVQKIIRSAVYKGDFIMNQHTKVKVAGRKKYMRNPKEKWNIFKNHHPAIIDPERWDVINDPNRDNSKKRRAALKNELRGLVYCAHCGSTMRAMRSGMITLKDGTNTEFVYMKCSRYKDSGTRECVKHEPLSYDNLREFVIQKLKQKEFDLEMESDLQNKDLYEEKLGKLKKEIRQITSKKERLVDLYMDELIDKSTFVERERKLDAVIREKETELLELSDIEEQEKKKKEVKATFGLIARSNDLYEAFKLLISRIEVTKDGVVSIFYRFEY

SEQ ID NO: 19711 - protein, 477 aa, synthetic construct
MRCAIYARVSTEEQAVEGYSISAQKKKLTAYCETQDWDVVGYYVDEGISAKNTNRPELIRMIDHIKKGLIDCVLVYRLDRLTRSVLDLYNLLDVFEKYDCKFKSATEVYDTTTAIGRLFITIIAALAQWERENIGERVRVGQQEKVRQGKYTSGRKPYGYNADHKEGVLTVIEEEAKIVRSVFNDYLKGHSAQRICKKLNTIGTPGRDYWNEKAILYILENPLYVGTLRWRKETEHYFEIPNSVPAIIEKELFDNVQRLREARRESHPRSAYGSYIFSGIIKCPRCGRSLVGNYVTSKKKDGTITKYKQYFCRGRKLNVCSMGSMSERKLEKAIIPYILSLHIHATDDDVSTGQNTIEDDIIQIKNELKVIEKRRKKWQYAWANEHLKDEEFTELMQEESDREKVLTEELYKLKPAENKKLKNNELKEILNDMKLNWNNLNDEEKKMLLQIILKRIVVERSDEWQAYKLKIVEMEFN

SEQ ID NO: 19712 - protein, 505 aa, synthetic construct
MDRICIYLRKSRADEELEKTIGEGETLSKHRKALLKFAKEKKLNIVEIKEEIVSADSIFFRPKMVELLKEVESKQYTGVLVMDIQRLGRGDTEDQGIITRIFKESHTKIITPQKTYDLDDDLDEDYFEFESFMGRKEYKMIKKRMQGGRVRSVEDGNYIATNAPYGYDIHWINKSRTLKANSKESEIVKLIFKLYIEGNGAGTIAKHLNDLGYKTKFGNNFSNSSIIFILKNPIYIGKITWKKKDIRKSKDPNKVKDTKTRDKSEWIISDGKHDAIIQESTFEKAQEILNNKYHIPYKLANPPANPLAGLVICSKCNGKMVMRKYGKKLPHLICTNTKCNNKSARFDYIEKSLLEGLEEYLKNYKVNVKSNSKESNLKPYEQQLDALNKELIVLNEQKLKLFDFLEREIYTEEVFLERSKNLDERINTTTLAINKIKKILDNEKKKNNKNDIVKFEKILEGYKKTKDIQKKNELIKSLIFKIEYKKEQHQRNDDFDIRLFPKLLR

SEQ ID NO: 19713 - protein, 537 aa, synthetic construct
MKQQIYNTALYLRLSRDDELQGESSSITTQRSMLRLYAKEHHLNVIDEYIDDGWSGTNFERPSFQRMIEDIEAGKINCVVTKDLSRLGRNYIMTGQYTELYFPSHNVRYIAIDDGVDSEKGESEIAPFKNIINEWVARDTSRKVKSAFKTKFAEGAHYGAYAPLGYKKHPDIKGKLLVDDETKWIVEKIFSLAYQGYGSAKITKVLREEKVPTASWLNFTRYGTFAHIFEGKPESKRYEWTIAHVKAILKSEVYIGNSVHNMQSTVSFKSKKKVRKPESEWFRVENTHEPIIDKEVFYRVQEQIKSRRRQTKEKATPIFAGLVKCADCGWSMRFATNTANKTPYSYYACSYYGQFGKGTCSMHYIRYDVLYQAVLKRLQYWAKAVQQDEEKVLNKIQKAGNAERIREKKKKASAFKKAENRQNEIDRLFAKMYEDRACEKITERNFVMLSSKYQKEQIELEQQITNLREELSKMEQDMIGAEKWIELIKEYSVPKELTAPLLNAMIEKILIHEAITNEDNERIQEIEIYYRFIGKVD

SEQ ID NO: 19714 - protein, 502 aa, synthetic construct
MNKICIYLRKSRADEELEKTLGEGETLSKHRKALLKFAKEKKLNIVEIKEEIVSGESLFFRPKMLELLKEVENKQYTGVLVMDMQRLGRGNMQDQGIILETFKKSNTKIITPMKTYDLSDDFDEEYTEFEAFMSRKELKMINRRMQGGRVRSVEDGNYIATNPPLGYDIHWIKKSRTLKINAHECEIIKLIFKLYTEGNGAGSIAEHLNNLGYKTKFNNNFSRSSVLFILKNPIYIGKVTWKKKEIKKSKNPNKTKDTRTRDKSEWIVVDGKHEPIISIKMWNKAQEILNNKYHIPYQLVNGPANPLAGIVICSKCKFKMVMRKLKGIDRLLCRNNKCDNISNRYDSTEKAIVQALERYLNEYRINISNKNKTSNIKPYERQVNILEKELAALNEQKLKLFDFLERGIYDENTFLERSKNIEKRITKTSSGIEKINDIINKEKKVVKEEDVIKFQKLLDGYKNTDDIKLKNELMKKLVNKVEYTKDKRGETFGIDIFPKLKP

SEQ ID NO: 19715 - protein, 543 aa, synthetic construct
MSQKITYQRLEDILKKGSRIALYARYSTNKQDEHAQIHSVRNFLSDYGCELLDDNIYIDPKTSAVKISMDQRKDLQKLIKDVKENRFDCIVSYKNDRIARNTKEHNEFRTEMQRLGMPVVLSSTREIYTAGEIVPLTIKDALTQIEPALIAERTRDTFSSKIENGEWTGGQAPYGYIYDKETERFEIVDKKVEVVQEIFRLFKLGYGLQQIANKLTTDKRDIEQKWYKDKIKYIITNPFYAGHMTMNRYVKGKLQLKIEKWTWSKKQENIPAIMSRDEWEYCFYLYVERRKSQTVRKSSTPFWLRDILHCNECQQPFKTNNQKTKSKRKNGDEVEYGKILYECRICNLKLEAEKIHDKFKEDVGRVLKNLLENHRESLIQQTQLQIKKEHEEIANVQKELTNKRIKLIENIDVLDKRISQLYKDITTGKGLKANHTEDVLGKEDEQGDWNSKLVEILLTGRSQKHNDLEAIKQQQQLLEEKQERLNIAMNALKNQYQDELLNFSFDPENVQSMRNFLLQFVQAVYVSKDMRLDYKIYENLINE

SEQ ID NO: 19716 - protein, 521 aa, synthetic construct
MKKITKIEGNTANSFIKPKTRVVAYCRVSTGSDEQLVSLQAQKAHYESYIKANPEWEYAGLYYDEGISGTKKENRSDLLRMLSDCETGRIDLIITKSISRFARNTTDCLEMVRKLIDLGVHIYFEKENINTSSMESELMLSILSGLAESESISISENTKWAIQRRFQNGTFKISYPPYGYQNIDGQMIINPKQAEIVKYIFAEVLSGKGTQKVANDLNQKGIPSKRGGRWTATTIRGILTNEKYTGDVILQKTYTDSHFNRHTNYGEKNMYLVENHHEAIISPEDFEAVDAILNQRAKEKGIEKRNSKYLNRYSFSSKIICSECGSTFKRRIHSSGTRKYIAWCCSKHISNITECSMQFIRDEDIKTAFVTMMNKLIFGQKFILRPLFHGLRNQNNAASFRRIEELETKIENNMEQSQVLTGLMAKGYLEPALFNKEKNALEAERERLLAEKDQLTRSVNGNFAKVDEVDRLLKFATKSKMLTAYEDELFEDYVERIIVFSREEVGFELKCGITLKERLVN

SEQ ID NO: 19717 - protein, 588 aa, synthetic construct
MNTKVKLIKASNTGARNRNALHLDLKRVAAYCRVSTDSKDQLESYKSQVDYYTNLIKNNKNWTLAGIYADEATTGTTAIKRADFMRLISDCQNGDIDMIITKSISRFARNTLDTLKYVRLLKENNVGVVFEEENIDTLTMDGELLLTILSSVAQQEVENTSAHVKKGLKMKMEKGELIGFQGCLGYDYDPTTKTISINEEEAKIVRYIFKRYLEGNGGSVIGRELEEQGYLTPRGKTKWSDTTVLGIIKNEKYIGDILMGKTFTVDPITKRRLANFGESDKYHIENHHEPIISKEDFEKAQEIRLRRAQNRNTIANKDRKREKLSRQYAFSSMLECGFCGEILSRRTWHTSSIYKKINWQCVKSTKKGKKYCPHSKGIQEAAIEKAFVESYRQLCHADSTIIDDFLKIVEEEINDNTLVKDLKKLENQLNRIISQERKLVDLHLEDSIDEEVYAKKYKKLTKQKEELLDEKKTLELTIKDEDSIKERLKQFKKVLENREIIEEFNRTVFESIVDKVVVGRIDKDGTVHPYDLTFYFKTGVKDSQDSNNFKDKRKNAKDNDINKLCSYKNDEDKKLCPQSKDNALRDYS

SEQ ID NO: 19718 - protein, 558 aa, synthetic construct
MTKLYSYIRFSSTRQADSSSFERQKRTAKEIAEKYGLELVTSYQDLGVSAFKGANSKTGALSRFMEEIGRSVPVGSWLVVENLDRLSRQSIIEAQELFLSIIRRGITIVTGMDGKVYSKESVNANPLDLLLSVMMFARANEESQTKRNRTNSSALLKIKAHQQNPQSPAVAIEEIGKNMWWTDTTSGRVLPHPVYFPVLQKIVQLRQEGHSAGAILDYLNEHHEPPAPTSNKKHGKWSRAMVSRLFATKALIGVKTVNVDGVEYELRDYYPRVLSDSEFYFLRKNIIKKAWDYSHDKEKVIPLLSGIGVLRCVHCGATMVKQTAANGKREQYRYCCDGRKSGRTDCPYPNWGFRAVTLEGAVLQLLADKIWIAEDKTNPIPEIQVKIDEISRKIDNLINLSAMMGATKELANQITDLNSQREALHEEIRLFEREMYSVDSQGWDKLAQFDLSDVQNEERLKVRMKIKGALHEIECSRIDSKKNLFVLVYLDGLRQRLVIENNRGLKKGQIFVDLKTINDRQILESAGMVLHPCIEMIIDSDWKAPEEIPGLLSEEFGI

SEQ ID NO: 19719 - protein, 502 aa, synthetic construct
MENQPKRALIVTRLSRVTEATTSPERQMEICQVLCDDRGYEVVGHAEDLDVSGSVDPFDRRRRPNIARWLANEAEPFDVIVVYRVDRLTRSLRHLQKLVHWAEDNDKLVVSATEPHFDMTTPFAPVLIALIGTVAQMELEAIRERNSSAARHNIRAGRWRGGQPPWGYVSSNASGEWRLVPCPEQVELINEVAARVLGGEPLQRIAHDLTSRGIPTPKGRTEWNVTPLKRSLTSEAMLGYVMSGDKPLRNDDGSPIIRAEPILSREVFDRVKVELESRSRRGEPTKRSSSLLLRVLYCGVCQLPAYQFNGGSHSKSPRYRCSSTGKSTKCENLTVRMDLADQAFTENLLDMFGDSERLERIWDTGSDHSAELADINEVLEDLTGLLGTGPYKAGTPQRIALDARIAALATRQTALSAEAVRPSGWVWKPTGEMFAEWWDNQDTESRNVWLRSMNIKVTYNNSSGAVTWGLDWGDLKKFEEQLKFGKSAQQAVRQVTGAYPAP

SEQ ID NO: 19720 - protein, 495 aa, synthetic construct
MSHLAQRAEGERWAKSRGYEVVGAFEDLGVSAGRTTPFERPDLGKWLAPERLHEWDVLVFSKIDRAFRSTSDCVDFARWAEGNRKIIAFSGDGLVLDYLNPKSDSLDQMMSELFIYIGSFFAQLELNRFKTRATDRISHLRMTDRVSHGVPPLGFRTVPHPSGQGKALERDPEGYALLHEMKDKLLYENYSITALVKWLHDPRCLANKEIDPSTKRSRPTHVTNCSCRQTNAASARGGDKWWSATTVRRVLTSERTQGIRMSGGNPVLDSQGMPVRLAKPTFTDDEWIQIQQVLNRRSESGKARQMTPNPLAGIGYCVCGYALCLHRRKSSAGTLHTYVRCGQGCRGAWKLADVDELLDGAFLASYGDEEMTRSVFVPGEDRSEELAGIERSITRLRWESDNDLVDDEQLYQTRMGSLLTRKRDIGQIVVPARWERRGTGKTYRELWADPETDRRQVMRDARIRLVLHFVPKGSDAPFVRRAEFQDLWHSEQGSS

SEQ ID NO: 19721 - protein, 532 aa, synthetic construct
MKQQLRAVVGSRVSHLDDDKATTRKVSHKAQTEEGERWAMSQGYEVVGTFEDLGVSAGKTTPFERPDLGKWLAPERLHEWDVLVFSKIDRAFRSTNDCVEFARWIKENRKILAFSGDGVVLDYLHPKNESLDQMMSEFFIYVGSFFAAIELNRFRTRATDRLSYLRMTDRVSHGVPPLGFRTVPHPSGQGKALERDPEGYTLLHEIKDKLLHEHYSMTALVKWLHDPRCLANKETDPTTGRSRPVHLANCACRQTNAASARGGDKWWTATTLRRVLTSERTQGIRMSGGKPVLDSQGTPIRMAEPTFTEDEWEQIQQALNQRSKSGRARYMTVNPFAGIVYCVCGYAVSQHRRKSSSGKEHTYVRCGQGCRGAWKLADVLEQLDFHFLAGYGDQEMTRLVFVPGEDRSDELVGIDRSIARLRWESDNDLVDDEDLYQTRMASLLSRKRELGQIVVPARWERQGTGRTYQELWADPETDRRQVMRDARIRLVLHFIPKGSDAPFVTQSHFVDMWNPSEEAKALSGNGIGGMST

SEQ ID NO: 19722 - protein, 536 aa, synthetic construct
MIAAIYSRKSKFTGKGDSVENQVQMCKEYGEKILGITEFVIYEDEGFSGSNTNRPKFIELMADVKKKKFDVLICYRLDRISRNVADFSSSLELLQSNNIAFVSIKEQFDTSTPMGKAMIYIASVFAELERDTIAERIRDNMLELAKSGRWLGGQTPLGFDSKKTISLDEEYKERTTYMLSPIDDELKLVKLIYEKYLEFNSLRKVNQYLLENNFKTKFGSDWNAKSISDLLQSPTYVNANQEVFDFLIEKGIDCIGKPNNKSGILSYNKKKGPNVHREKTEWIAAIAKHSGIIDADKWLKIQQTLIINKKNSPRLGKTHTTLLSGLLRCGKCGSPMTVIHGSKDKEGNKRFYYGCSLKVYSKGTRCDNSNVRSDEIESIVIDKLKNVTKDNGLLLEELKSVKNQVNDKCNYADELNLLKASLKSNEEAINNLVKQLAKKQSSIASNYIFDEIEKREKEINDTKAKLKALSENKSKGSEIDINVDLLIYNLKNFYSTIDYADIENKKYLISTLIDKISWNGSTGEVDIKLWGSPKKK

SEQ ID NO: 19723 - protein, 519 aa, synthetic construct
MKVAIYSRKSRITNTGDSIENQINLCKDYCKDKIVDEIFIYEDEGFSGKNIERPEFKRMLEDARCHKFNFIICYRLDRISRNLYDFTNIINELDTLNIQFVSIKEQFDTSSPMGKAMMYIASIFAQLERETTAQRVSDNMLLLAKSGQWLGGQTPLGYKSQCKTFYDNNKINKKTYVLSPIESEITTIRLIYDLYEKKRSLNKVKDFLNENLIPAKSSINWTAKRIQIILRSPVYVKSSPKVLDYLSANNINVFGNSNGNGILIYNKTKNITQKRDRSEWVASISDHHGIIGSSKWLQVQSLLDTNARTPPAKGRSNRALLVGILKCANCNGNMYIKHGHILANSNVRILYYVCENKSKSKGKLCNNGNVRVDEIETALIEDINKTLIDTSKLIESLFNTIKLKDYSLYSLNINKEIQYKNMKIQNLLDELSLSPELSKHIKPKIIELETSINDLKDKQLSRKMHLKNNYLLNLFSKEKLNLSMFKDYITLEEKKYILRGLIESIYFDEENHSLEINYK

SEQ ID NO: 19724 - protein, 588 aa, synthetic construct
MTTIADDPAASLIDPPKTMAAAVSYLRVSTREQAEKGGTDEGFSIPAQREATRRKAEQLGAGIVEEFVDAGASAKSSDRPELMRMIQYVKANKVAYCIVHKVDRLARNRADDVSIHLALQQCGVMLVSASENIDETPSGMLLHGIMSTIAEFYSRNLATEVAKGMTQKAIGGGTNGRAPIGYLNVRRRDELGREVRTIELDPERAPMIEWAFKAYASGNWSVSQLHDELTSRGLRSLPTPKRPAKPLAVSTIHRLLTNPYYKGDVIYRGTRYKGSHPALIPAEVWYQVQSVLTAHRCAVEATQVHGHYLKGTIHCGQCGSRLIVSNAKNRHGNVYCYFVCSGRHSKRTDCTRQAMLIEDVEKLIEDYYTRVQITPAQPDALSGMLHHEFDRLMAAETEELERLTTNRDRLEGEQDRLMQAHYADAIPLSVLKREQDRIVAELDQVTRRIDAHFGDYADARAHLDDALGLLANCADIYTRCDDTNRRLCNQAFFTKVFIDEDNELRVEHNRPFEMLLDPQVNANALTWAADANKARTSTNVSVGKGSSLVRGVELRGIEPLTFSMRTRRATNCAIAPRRPRGRRCPPRG

SEQ ID NO: 19725 - protein, 561 aa, synthetic construct
MKNKKIKCDIYTRVSTTMQVDGYSLDAQKEKLKRYAEFQNMEIVNEYSDEGKSGKSVEGRPEFQRMLDNIENGTDEVQFVLVFKLSRFGRNAADVLNSLQRMQDFGVNLICVEDGIDSSKDSGKLMISVLSAVAEIERENILVQTMEGRKQKAREGKWNGGFAPYGYELVNGELQIAEDEAEIIRLIYDKFIHTNMGISAIAAWLNQHGYKKKKRQNNTLDAFASSFIKGVLDNPVYCGKLAYGRRKNEKVSGTRNEYRIVKQENYMLHDGIHEGIISETDWELAHQKREKTGVKYEKTHSLDHEHILSGILRCPLCGSGMYGNVNRKKKKDGTLYKDYFYYACKHRRLVDGHKCGYRKQWSEEKINNAVEEVIRKLVKNPKFEEAILNKIGSRIDTEEIEKEIEGLEKQHRQLTGAKARLGQQMDSLDIMDKFYEKKYQDMETRLYRLYDEIEGVENSIEEVKNRLLNIRQQKISEENVYQFLLYFDKLYDKFTDLEKKEFLNSFVEQVDIYEQEQPDGRFLKHIKFRFPVYFGDRETQELCWDNESTVETVVLMSKVQK

SEQ ID NO: 19726 - protein, 473 aa, synthetic construct
MAKKIPAVRSAAVYARISADVEGKSLGVQRQLEDCRKLAAERGWVVGREYVDNDVSAYSGKSRAGYEAMCTDLAAGVRDAVIVYNLDRLHRRPVELEEFVALCEAAGVNQVATVTADIDLGNDDGLFMARIFAAFAAKESGRKSARMRRKYEQKAAQGLPHGPNRPFGYEEDKITIREAEADVVRELVTRVIAGESLNSLTVWLNESGAKPVRGARWASTAVRGIVSSPRIAGLRAYKGEVVGDAAWPAIISVAERDQVLAALAVRAWNRKRSPRKYLLSGLCRCGRCQARMFSAARLEAGAHKRRYVCSSSPDHGGCGRMTVVAEPLEKLITDAVLTRLDSKALADALAGKARANPDTAALSAQVEAAQARLDELTGLYSSGAISAREWIMARDPITDTIARLRREIAETVDTGPLAELAGQGSVLRGQWDDLGLDRCHAIIRTVIDHVVIKPGQPGARGLDMNRIDPVWRI

SEQ ID NO: 19727 - protein, 546 aa, synthetic construct
MQMERKKVGIWIRVSTEFQVKDESPEHHEQRAQYYIKSKDWEAVEVYRLDAISGKTVMDHPETQRMLRDVRTGRISGLVFSKLARLARNTKELLELADIFKTQKADLISLAEQIDTSTPAGTLFFTIISAMAQWEREEISARVSASVPIRAEMGKCTGGAGAFGYKWDNKQFVLDENEAPVRKLMYEIFLECRRKRTTANRLNELGHRTRKGAKFTDTTVDRLLRDTTAKGIRLANYTKSTGENKSWELKPEDQWVEVPCPAIVDEEVWESCNAILEKQRNSRNKNGRFSYSLLGGIVKCSCGKPMYVHGSRSRKYKCSSCKNDINQEALYGFFQENLNQYIEGIKPEIFIAELSTEIHNKADLLNTTMKNRDALLKRMDELVDLKLNDGMSSEHYKARYYPLDEQVKQLNRSIPELQAEIDYMRIQMNSSDYVLNGVKSLYTDWSELEFSQKRGITETITQHIIVGKDTIDIALAYLPTTLKTSQHNLMDLLTQETQKKMSFNIVVRLNREPVVLKSLIINAIPRLENGSNSICNDYASEKLCGV

SEQ ID NO: 19728 - protein, 514 aa, synthetic construct
MVIPARKRVGSTAAKEKIKKLRVAAYCRVSTETEEQNSSYEVQVAHYTEFIKKNTEWEFAGIFADDGISGTNTKKRDEFNRMIAACMDGNIDMVITKSISRFARNTLDCLQYIRQLKDKNISVYFEKENINTMDAKGEVLLTIMASLAQQESQSLSQNVKLGLQYRYQQGKVQVNHKRFMGYTKDEDGNLIIVPEEVEIIKRIYREYLEGQSLVRIGRGLEKDGILTAAGKPRWRPESVKKILQNEKYIGDALLQKTVTVDFLTKKRVKNEGHLPQYYVENSHEAIIPKELFLQVQEEIHRRSNIYTGEGKNKRIYSSKYALSAITFCGDCGDIYRRTYWNIHGRKEFVWRCVTRIEQGPEVCKNRTVKEDELYGAVMTAINKLLAGGNNMIKTLEENIHAVIGETTEYQISEINNLLEEKQKELIKLANKGQDYEHLADEIDELRDKRQLLLVEDASLSGENERINELIEFIRKNKFRTLEYDDKLVRKIIQSVTVYEDHFVIAFKSGIEMEI

SEQ ID NO: 19729 - protein, 521 aa, synthetic construct
MMKKITKIDELPQGQLPNTKLRVAAYARVSTDSDEQLESLKAQREHYERYIKSNPEWVFAGLYYDEGISGTKMEKRTELLRMIRDCKQGRIDFIITKSISRFARNTVDCLELVRKLIDIGVYIYFEKENLNTGDMESELMLSILSGFAAEESASISQNSTWSIQKRFQNGSYVGTPPYGYTNTDGEMVIVPEEAEIIKRIFTECLSGKGGGTIARGLNKDKIPARRGNHWSAGTVIDMLRNEKYMGDVLLQKTYTDSNYNRHSNTGEKDQYYYKDNHEPIISREDFAKAQDLIDERAKMKCKGVKKNVYLNRYALSGKIVCGECGRNFRRKTNYSAGRSYIAWSCIGHIEDKESCSMLFLRDGEIKATLTTMMNKLAFSHKLILEPLFKSISQIDEESDRERMDAIDKRMEQLMEERNTLITLMAKGFLEPALFNQERNVLDSEIKNLTTEKTNLVTNSTSGVLRANDIKDLINYVSADNFNGDYTEELFEEFVENIIVNSRDELTFNLKCGLSLKEKVVR

SEQ ID NO: 19730 - protein, 632 aa, synthetic construct
MPQLYSYIRWSSDRQEKGTTKNRQVAAAKAYAEEAGLEMVEILEPGTSAYRGKNRAGKLGDFIDAVKNNAIPSDSWLYCENLDRLSRDQVDEALRLFLELIGLGLTIVTGMDRKVYNRESIRQNPTDLMISILMFIRGNEESETKSNRTIGNVVALVERHKAGLPVNIKSVGRHPFWIDDSGSQYEAVKEHPVYWSIAREAIDMFLDGNGIYTVKRHLDKNYPNGLKGKEWDYQVLKKMRDNRALIGERTINAGGATYKLDNYYPWLCKDEAEYLTLAERKQQNNFKAKKDKVEEIKLLSGLQVLRCSKCGGTMHSFMNHGSARYICTNGVHLQKNCSGWSISAQLVEHCTIISLLIGYMNKRLKDGIDTTVIEEDLSRKETLITDLESRITNMAQAIAIAPNVSALAVQLNAFDMERKKTVLEVDKLKERLYSLKGKGSLEVDINEFMILIQWAVFTNMQDTDRNKIRKVISSIIESVIVDKTDGCITIKIKYHFKDEWLVFGGTDRKPHWAFKVEFSSVDNVSNRDEGFLTTSNLPLFNKAVEQLDKIEQSYLDLFNTANEMLEVVGYSEISGASFWPNTGKYDRVDIVYEGNTYSIALNGRVPKDIATALESTGLTRKEFIERYRIDQI

SEQ ID NO: 19731 - protein, 514 aa, synthetic construct
MKLLTGLNVIIYLRKSRADQEAEARGEGETLAKHRRVLLEFAKHHKIKILHIFEELLSGDRIVDRPEMQKVLHAVADKTYNGNHIDGVLIMDIDRLGRGNKIDQGIIEDTFKESGVLIITPRKVYDSQDEYDEEAMENETFFSRKEFKRINRRLQNGRKDSVNDGKHIAKKPPYGYERGSDLKLRPDPDTAKIVRMIFNWTADDRLGHKAIAGRLTDMGVKTPSGKKIWPRSAIARILKNEVYLGTVIWGKTRIVKSPYGGYQQIPTLDRDKWTIKENAHEPLVTRELFERANEVGASRPLPVPKDKRLTNPLAGLIFCSECGFKMRRQPNPKYEAFLICTTRGCKNKQAQFQLVEGKLLNSLRLILLEIEVSLEESKDTSEVERALLLQTIKNYEKDISETKNQISRVHDLLEKNVYSIEQYLERNDELAKRIEKLQQDIGNVKIQLSVLDERADKMRTTIPEIANVLAEYGEISNPESRNQMLKGIIDKITYTRKPEWKDPHQFELDVHLKI

SEQ ID NO: 19732 - protein, 551 aa, synthetic construct
MKSFQKNLRKDGINEDSRAALYLRVSTGRQAENDLSIPDQRRHAREYCAARGWTVVNEFVDAGMSGMDDKRPELQRLLDLAKDGDAPFDVVVVHSFSRLMRDHFQLEFYVRQLRRHGIRLVSITQELGEDPMSVMVRQVFALFDEYQSKENAKHVLRAMKENARQGFWNGAAAPYGYAIVAAEQRGAKTKKRLAIDPVEAEIVRQMFRLVSEGDGTGGPMGVKAATCWLNDHGHRTRGGARWGIGQLHKLLTSTTYKGDYLFNRKVWKTKEDKPETEQILVPVEPIIEPALFDAVQRRLASRNPKAMPPRVVTGPILLTGLATCATCGGGMTLRTGKSGRYRYYTCAAAAQKGKSSCSGRSIPMDKLDGLVTDRLRETLFTPDRVRAILGSLLERQASRSDDHATRITALQNKAAETESRLSRLYQAIETGLADMTDPTLKERLATLKTDRDSAKAAIERAYSELRPETRLTEEKIDAFAALMRENIANGPVPFRRAYLRAVIDQVEVDDEEIRIHGRKSELERLVMTNSVITAAVPSFVRKWRTRLDSNQ

SEQ ID NO: 19733 - protein, 516 aa, synthetic construct
MYRPESLDVCIYLRKSRKDVEEERRAIEEGSSYNALERHRKRLFAIAKAENHNIIDMFEEVASGESIQERPQMQQLLRKLEGNEIDGVLVIDLDRLGRGDMLDAGMIDRAFRYSSTKIITPTDVYDPDDESWELVFGIKSLISRQELKSITKRLQNGRIDSVKEGKHIGKKPPYGYLKDENLRLYPDPEKAWIVKKIFELMCDGKGRQMIAAELDRLGIDPPVTKRGAWDSSTITSIIKNEVYTGVIVWGKFKHKKRNGKYTRHKNPQEKWIMYENAHEPIISKELFDAANEAHSSRHKPAVVSSKELTNPLAGILKCKLCGYTMLIQTRKDRPHNYLRCNNPACKGKQKQSVFNLVEEKLLYSLQQVIDEYQAQKIEEVEIDDSKLISFKEKAILSKEKELKELQVQKGSLHDFLEQGIYTVEIFLERQKNLVERSTSIENDIEVLQKEIEMEQVKEHNKTEFIPALKTVIESYHKTTNIELKNQLLKTILSTVTYYRHPDWKTNEFEIQVYFKI

SEQ ID NO: 19734 - protein, 530 aa, synthetic construct
MNKYDQARLEDVVQPGKRIVFYARYSTEKQEYDMQKHSVETFLQRYGCGIYKEYVDRAISAIKVPFEKREDLQNLIRDAEKGKFDVVITYKNDRIARRIEEHQLFREKMRELNIHVVVSSSSELYTVGEVVSQAVKDGLTRIEAALIQDRTKDTFRSKTKRGTWLGGKAPYGYTYRVIEENDGGRKTRKEYFKDEEDQQEAVMEIFRLFEIGYGFQQIANEIHSRKLDENMKWTKEKIRYIITNPFYCGFISMNRYDNGVLNDQSQWVEGTPKNMTPLFKREYWEYIMRLFEERKKRKVHSRDYSTPFLLRGILNCDQCKELMLAKNQQSGGEKYKGKKKKEQRRIYECKKCDFKLQANMIHERFRKDYLPYVLEQVTQRKKEQVESAIEERLKTEMQSLKGSMKKLDEEIAKLNQQIEALNVEMKSYYDKETIDKKVLEFMSIIMSHRTNKIHELYTVKDKKVGLQERIDRIAKTMQQKKYLPPQHLIHEFAKENVDTQKLRAFLLQFFKCIHVERDGNLVLSINEHLM

SEQ ID NO: 19735 - protein, 490 aa, synthetic construct
MESLESYAVYVRVSTDRDEQVSSVENQIDICRNWLERNGFTWDEKLVFKDEGISGTLFVERPAIQLLLQKAKAKEIDMVIFKSISRLARDLKDSLEIREVFLAHNVRIISVEEGYDSVKAGKNDMAFELWSLFSAQYSRTLSSSITAALAVKVRRGEHIGKVPYGYNRENQKLVIKEEEAKAVRRMYSWYIDGWGYKKITNELNRLGVKSKTKKNWQMTSVQRILRNPIYKGTFILNQYTSVKVGGRKKQIRNPKEKWFIFPKHHPAIVDEETWERANQKNIISSKTKITPWNEFRDLAKCAVCGSNMVIVQSHLRKKNGERTEWKYLKCSQYRRAGKHGCVNHVPIQYSEFRQFIIELLIKKGEFITLNLQSNVEQEQKEKIKQLQQFVNTNEQKKKSLLDLYLEKLIDKKEFEKKRNDLDAEIMKVNRELFVLQNDDVIQTDIKTIKEAFEQLRKQGEDLFHVFKTLIRQIVVHQNGKVDIVYIFEKA

SEQ ID NO: 19736 - protein, 536 aa, synthetic construct
MKTAVIYARVSTAEQAEEGYSIDAQIETVTRKCEQEGRQVLFKYIDRGVSGKAIKKRLSLQQLLKDAKEKKFDEVWVWKTNRLARNHLDLLKIVDELDKANVGFKSCSESFDTSTATGKLLLNVLASIGEFERETIIENVKMGMKQRAKQGKWNGGQVLGYKSINMDKNEGKTRLEVVEEEAFIVREIFQLYSEGKGLKSLTNHINKLGYRSKRGNLFSINAVKEILMNPIYIGKIRYNRKENWSEKRRAGINPNPIISNGEHKAIIPIELWERVQKLYAQRSHKPTRVYSGTFPLTGLLKCPACGSSMVAGRVKRRLKNGSFTIHRYYQCGAWRNKGTAACSSNGVKADLVEEFVFNKIRDSLFNEEILEDIVKNMNEKRKNVIKPLEDQLRQMNKYINELENKKNKIFELYEEGIIDKESLTSRLNIISEDIENNIKNKGLLQEKLKLNNSESIEYELVKKLMKNFNGIINNAEHERKKTILNLVIERINVNKDRQVDSIILHFDGKSRDYILGDKEDESLIGDSSSFNFSIIL

SEQ ID NO: 19737 - protein, 493 aa, synthetic construct
MKCAVYIRVSTDKEEQKQSLTNQRDLFIKYISERGWDIHEFYEDVETGTTDKREQLQRLITDAKEKKFDVILAKELSRLARNGGLSYQIRDLAEQKGIHIITLENAINTLEGNNNMFGLFAWMYEQESQNVSNRVKSALKTRAEKGLFKGSIPPYGYSLINRKLFIKQDGTADTVRRIFTSYLSGNGFDKIAKDLYNDGIPTPSQINGKLNANDKWQGSTIRLILTNPNYTGDLVQGRSTTKSVTSKVREFLNKEQYIIVPNTHEAIISKEDFEAVQLLIESRKRTRPQSEAHLFTNTLYCHECGKGMHFKNTRKGYVCGSFNRHGKKACTPHFIKESELTLLVLNEFESLSSVLKNDSFIPMLESKLKAKKQKINHDISKYTKEIEALKKSKTRTISLLVEEIITKDDYNAFTLDTNKQIEALSLKIKNLMSIIEISNDQLAIAEMKKQLDSVTLFNELTPTILHRLIDKIEIKACGTPRIHYRFSVPLFTI

SEQ ID NO: 19738 - protein, 524 aa, synthetic construct
MTIKEGVPSMKTAIYLRKSRADLEAEARGEGETLAKHRTTLLKIAKEMNLNVLSVREEIVSGESLVKRPEMLALLEEIEDNKYDVVLCMDMDRLGRGGMKEQGIILETFKRSNTKIMTPRKTYDLNDEWDEEYSEFEAFMARKELKIITRRMQRGRVASVEAGNYLGTHAPFGYDIHRLNKRERTLTINPEEASVVRMIFDWYAHEDMGANAIRSKLNDLGYKSKLGNEWNPYSILDILKNNVYIGKVTWQKRKEVKRPDAVKRSCARQDKSDWIIADGKHEPIIPESLFEQVQEKLNSRYHIPYNTNGIKNPLAGIIKCSKCGYSMVQRYPKNRKETMDCKHRGCENKSSYTELIEKRLLEALKEWYINYKADFEKHKQDDKLKETQVIQINEAALRKLEKELVDVQKQKSNLHDLLERGVYTVDMFLERSNVVSDRITEITSTMENLKKEIKTEIKKEKVKKDTIPQVEHVLDLYFKTDDPKKKNNLLKSVLEKAVYKKEKWQRLDDFELVLYPKLPQDGDI

SEQ ID NO: 19739 - protein, 515 aa, synthetic construct
MKTAIYLRKSRADLEAEARGEGETLAKHRTTLLKIAKEMNLNILSVREEIVSGESLVKRPEMLALLEEIEDNKYDVVLCMDMDRLGRGGMKEQGIILETFKRSNTKIMTPRKTYDLNDEWDEEYSEFEAFMARKELKIITRRMQRGRVASVEAGNYLGTHAPFGYDIHRLNKRERTLTINSEEASVVRMIFDWYANEDMGANAIRSKLNDLGYKSKLGNEWNPYSILDILKNNVYIGKVTWQKRKEVKRPDAVKRSCARQDKSDWIIADGKHEPIIPESLFEQVQEKLNSRYHVPYNTNGIKNPLAGIIKCSKCGYSMVQRYPKNRKETMDCKHRGCENKSSYTELIEKRLLEALKEWYINYKADFEKHKQDDKLKETQVIQMNEAALRKLEKELVDVQKQKNNLHDLLERGVYTVDMFLERSNVVSDRITEITSTMENLKKEIKTEIKKEKVKKDTIPQVEHVLDLYFKTDDPKKKNNLLKSVLEKAVYKKEKWQRLDDFELVLYPKLPQDGDI

SEQ ID NO: 19740 - protein, 611 aa, synthetic construct
MKKAYSYIRYSSPQQAKGDSFRRQLAATQSFCEKNGYELDTELSVYQELGISGFKGDQENLKRFIDDCEKGNVKKGSLLIVENLDRLSRQKINIAMRQFLHLLEYVDIYTLQDNKKYSHADDDATGDNQLLDIMTSLIIMSRAYEESATKQKRLKESWTERRKNIHTKKLTSIVPHWLELSEDKTTFNIKKDRVEIIKFIYEKCIEGVGVSQLLRLLNDNLEQFPVPSKKGKLWARTSLSRILTDKSVLGEYQPHIGTHKGIGDNKRKPIGEIIPDYYPQIIDEDIYLKAQIARKSRYVGKGKIGKDIFSNLFRNLIKCAYCNGAMEYVNKGNNPSRGGKYLTCSNSKRGGKCSHSKHYKYSALELMLLHLTTENGLMPKPEVPTSLNLKLIKLQELHDKTNSKLNILLEDDFTVPAIKNKINELSREIEQYSSEIEIIEDQLLTYRPDYKYDDLFNDVILENDKLKLYSNRINFNSYLIKQIDEIHILYKYCPFLVFTMKDKTIHRVIIDDKYGFGGCSISSGHYSYKRINEKDNSIDEITWSVLGLFSSLVLKILEDNNENLPLDAEMKKLTKSISKFIIDKDESQIYQILQDIQIAEEYFEQQKSLSM

SEQ ID NO: 19741 - protein, 517 aa, synthetic construct
MQRPNELDVFIYLRKSRKDIEEERKAVGDNKIHDTLSRHRDTLMAVVKKENHNVVGIFEEVISGESIYERPEMQKLLRLIEEMECDAVLVMDMDRLGRGDMYDQGTLDRAFRYSGTKIITPTEIYDPEDESWELIFSIKSLLSRQELKSITKRLQGGRHTSAAAGKSISKIPPYGYKRTENLKLEPNPETDWVVKKMYEMMRDGHGRQAIAAELDKLGVHPPDKKSDFWSPSSITAIIKNEVYMGHIIWGKFKSAKRNGKRIRKKMPQDKWTITENAHPPIVSPELWETANNAHTGRWRPSTVETKSLSNPLAGILKCQVCGYTMWYQPRKDRPNHMIRCPNPKCKGVQKGAILSLVEERIIQGLEEIVGHFDIQESMIEKKEESSAITIKEKAKENKEKELEKLYLRKDNIHTYRETGEYTMEVFMERSQKVVNLIKQTQYEISILEEEIERAKFHEQNVNQYIPTVKKVLDVYKETDDIEKKNRLLKTVLEKVTYLREKEWTKKDQFKIELYPKI

SEQ ID NO: 19742 - protein, 534 aa, synthetic construct
MTRRIPETFQGSHSEEEWEPWLGYIRVSTWKEEKISPELQKAAITAWAQRTRRRITDWITDLDMTGRNFKRKIMSGIERVERGEARGIVVWKYNRFGRTRDGVPINLKRLEDVGGQLASATEEVDARTATGRLHRGILFEFAAYESDVRGEQWRETHDHRRYKLHLPATGRPRFGYIWHPRRLPDGKGGFTLQDEKYIADPDTGPVMADRYRQYLDGEPFYALLNEMNSSGWRTTRGGLWTVQTLIRYMDSGFCAGLLRIHNPECKCSTSMKGNCPNTVFLPGAQEELIDLEIWQRYQDRRQQMKKTPPRARTALYPLTNLVRCAGCRGTTPIQSAIRIVNGSPTSIKGHNYMCGRRATTSKHGCEGVYAARAEVEKLVHEWVLSKAAVDIDAAPSAPAQRAPAGDRRATAARERARLEGEAAKQKKALANLRADRAMNPDDYGPGEYEDAVARIRQQQAATMAALERVSVVELAPRQTDYEPVIVGLAEEWELLNAVEMNGMLKQLLRRVALVRKGKGFGVELHPMWEPDPWA

SEQ ID NO: 19743 - protein, 533 aa, synthetic construct
MKRAVIYARYSTDLQNDKSVEDQFGLCRDFAARLGADVVKQFSDRAKSGASMFGRPGLADMMTAAERGDFEILITESTDRVSRDIADLAHVHKVLKFRNIEMQCVNGGLMDTVQIGMYGIVGQMQREEGARKVKRGMTGVVRDGRNPGGKAYGYRPVIGQKGELEIVEEEAEVIRRIFDMYAAGSSPRSIAATLNAAGIPAPRGKQWNASTINGNGQRGNGILRNPLYVGKIVWNRVHMVKDPSTGRRISRVNADGAVETTDAPHLRIIDEKLFEAVKDRKDSRGGAHAKHVQKNKRLLSGLLKCSECDGSLVISSADRSGPRVVCSTHKESRSCSNNARYYVEKIERDVIDRLRTMFADTSIIDAYVEEYRAESKRIAMDRRNSRGAKETALVDVQAQITRIIEQVSKGTIDEDDVLAILPGLKAERSRLKAELAVEEPLTNVIEIKPKAVIKFREDIESLAEILKDRQAEPTPEMAKAFREVISGVVVYPRAPGETYEYEIKGLLSGIAGPELSAVVVVAEEGFEPPTQGL

SEQ ID NO: 19744 - protein, 547 aa, synthetic construct
MALRAQDLLDLGIESILNYLRRSRADEEQERRTGEDVLQAQKELMDRVLEPLGIPYDQRSEVGSGDKISTRPVFQTVIKDLQSGKFQAIAVKEISRMGRGSYTDMGVIYDLITDKRIFIITPYKTFDPNNPSDLRQIRFELFMSREEFETTRERLFGGRVNRAMEGKWVSGEAPFGFDYNPATKKLDINEQQAEQIRAIFDLYVNGVPDGADGKRRDVSFRALATYLSRHTVICTPKGKKNWHPTYLKGVLQNERFIGILKFRTTKRVNGKIETRPEEEHIIVHDAMPRIIDQETWDKAQAKINDTAHKPRTKMDFSPCELAGLCVCYKCGGRMVRQYSVQKYEKQTGDVVEYHKEFLWCTRPGCTFVKYRSVEEDLLDVLRYFKDLSADRLREELVANLAQDGQQNNFIPDVNEYIEQRAKELKNRMNFIFEKYESGRYTDEMFDERKAEIDKGLAELSELEKKYNSEKPESKEYKIDVDVVRTNLNSLLDAYAEAEDKSDRNRIMRSVFEHVTIELIERGRGRIPSKYNIYPVFKKGLTDSVILV

SEQ ID NO: 19745 - protein, 454 aa, synthetic construct
MIILTKAAIYIRVSTQEQVENYSIEVQRERIRAFCTAKNWEVYDEYIDGGYSGSNLERPAIKKLLNDLKNIDVVVVYKLDRLSRSQRDTLELIEEHFLKNSVDFVSITETLDTSTPFGKAMIGILSVFAQLERETIAERMRMGHLKRAEKGLRGNGGDYDPAGYTRQDGNLIIKKDEADHIKRAFDLYEQYYSITKVQEVLKEESYPIWRFRRYRDILSNTLYIGRVTFSGKEYEGKHEPIISSEQFKRVQTLLKRHKGHNAHKAKQSLLSGLITCSCCGENYVSYSTGKSKAAESKRYYYYICRAKRFPAEYEERCMNKTWSRKKLEEVIISELKNLTEEKKQTNKKEKKINYEKLIKDIDKKMERLLDLFMNTTNISKGLLEQQMEKLNLEKEKLLNKQQRSEEESLSREVTLTTIDDAFEKLDFKEKQIIINNFIEQIYINQNNVKIIWRF

SEQ ID NO: 19746 - protein, 532 aa, synthetic construct
MRRAIIYARYSTDLQNDKSVEDQIALCREYASRCGLAVIAEHHDRAKSGASIFGRTGLAQVMRLAEENAFDVLIAEAPDRISRDMADLAGIHKTFEFRGIEMNCVNGGRLDTIQIGMYGVIGQMQREEGAKKVRRGMRGVVASGRNAGGKAYGYKPVLGKAGELEIVQEEASTVRRVFEMYAGGAAPRTIASCLNREGVRPPRGTHWNASTINGSKERGHGILQNPIYSGRIVWNRVRMVKDPTTGKRVSRTNPESEWLVNDVPRLRIIDQELFERVAARKASRGGEVGRKAPRAKRVLSGLLRCGACGGGMTIIGRDRSGPRIQCSTFRESGSCSNGARYYVEKIEQQVVDVLRHQFSDTRIIDEYVRAYRDERRQIESEARRNRTGIEKALADVLSRRGKLIDKMSRDLISDEEAEPLLHAMRNEKARLEEELRLAGEETNVIELHPQAVTRFKENIENLAAILADGETPDSDIVSSFRELVAAVVVSPRERGDPYEIQIKGYLSTLLGADLSAMTMVAEEGFEPPTQGL

SEQ ID NO: 19747 - protein, 508 aa, synthetic construct
MKKAIAYMRFSSPGQMSGDSLNRQRRLIAEWLKVNSDYYLDTITYEDLGLSAFKGKHAQSGAFSEFLDAIEHGYILPGTTLLVESLDRLSREKVGEAIERLKLILNHGIDVITLCDNTVYNIDSLNEPYSLIKAILIAQRANEESEIKSSRVKLSWKKKRQDALESGTIMTASCPRWLSLDDKRTAFVPDPDRVKTIELIFKLRMERRSLNAIAKYLNDHAVKNFSGKESAWGPSVIEKLLANKALIGICVPSYRARGKGISEIAGYYPRVISDDLFYAVQEIRLAPFGISNSSKNPMLINLLRTVMKCEACGNTMIVHAVSGSLHGYYVCPMRRLHRCDRPSIKRDLVDYNIINELLFNCSKIQPVENKKDANETLELKIIELQMKINNLIVALSVAPEVTAIAEKIRLLDKELRRASVSLKTLKSKGVNSFSDSYAIDLTSKNGRELCRTLAYKTFEKIIINTDNKTCDIYFMNGIVFKHYPLMKVISAQQAISALKYMVDGEIYF

SEQ ID NO: 19748 - protein, 559 aa, synthetic construct
MKTKLYSYIRFSSMRQSDGSSYERQIRMAREIAAKYDLELVNDYQDLGVSAFKGANSKTGALSRFLDAIGRSVPVGSWLFIENLDRLSRADIVSAQELFLSIIRRGITIVTGMDNKIYSLDTVTANPMDLMFSILLFIRGNEESQTKRNRTNSSALIKIKSHQENPQNPAVAIEEVGKNMWWTDTTSGYVLPHPVYFPVVQEIVELRKNGRSTAEILDHLNETYAPPPAVSNKKHSKWSRAMVERLFHTRALIGIKEVSVDGVNYELKDYYPRVIDDATFYHLKKNIGARAWNFGDKEEVKPIPLLSGIGLLKCDHCGCAMVKVKGTNKRSDQYRYTCDATRSRRLDCEHPNWSFRGDQLEKAVLQLLADKIWIAEDKANPVPALKVQVDEISRKIDNLIALSAMTGATKELADQITTLNSERETLYNQIKMAEEEMYSVDSQGWEKLAEFDLEDVYNEERLKVRFKIKQALKRIGCSRIDRNKNLFVLEYIDGKTQRVVIENSRGTRKGQIFVDLKTINDRQILESNGLVLHPCLDMLTDKNWKPEEEIPGPLQEFGI

SEQ ID NO: 19749 - protein, 559 aa, synthetic construct
MKTKLYSYIRFSSMRQNDGSSYERQIRMAREIAVKYDLELVNDYQDLGVSAFKGANSKTGALSRFLDAIGRSVPVGSWLFIENLDRLSRADIVSAQELFLSIIRRGITIVTGMDNKIYSLDTVTANPMDLMFSILLFIRGNEESQTKRNRTNSSALIKIKAHQENPQNPAVAIEEIGKNMWWTDTTSGYVLPHPVFFPIVQEVVELRRNGRSTAEILDHLNATYTPPPAASHKRHSNWSRAMIERLFHTRALIGIKEISVDGVKYELKDYYPRVLDDAEFYHLKKSIGVRACNFGDKEEVKPIPLLSGVGLLKCEHCGSAMVKVKGTNRRPNQYRYSCDAMRSSRIECVHTNWSFRGDQLEKAVLQLLADKIWIAEDKANPVPALKVQIDEISRKIDNLITLSAMTGATKELADQITTLNSERETLYNQIKMAEEEMYSVDSQGWEKLVEFDLEDVYNEDRIKVRFKIKQALKRIGCSRIDKYKNLFVLEYIDGKTQRVVIENSRGPRKGRIFVDLKTINDRQILESNGLVLHPCLDMLTDKNWKPEEEIPGPLQEFGI

SEQ ID NO: 19750 - protein, 507 aa, synthetic construct
MKRVISYIRFSSERQAKGDSLRRQSKMVNDWLKAHPEYYLDQDLSFRDLGVSGFTGKHLKGGLGDFLTAIEKGLVKAGDTLLIESLDRLSRQDVDQASELLRNILRSGVDVVTLSDGEHYTRESLKDPLALIKSILIMQRAHEESLRKAERIQAAWNRKKELISEGIKVSRRCPAWLRLNDDRKSFSVIPEKVETVKRCFQLRLEGKSIWEIVRTLNDEGHQTLNQYKAGKFGQTSVQDLLKNRSVIGYFTPKGCCEIAGYYPSIIPESDFYKVQQLSYARGGRKPASDKPLSVNLFKGVIRCSECGHALIITGFSDTRNGIYRCPLRNENRCNAKGLSRKQTDGTLLALLSRIDRFDSDMTNTIDTLKLHREHISSNIEKLVQLSLEIEDLSAITSKLKQLKGELSQVDADIEKETQRLKSIDVGCLSDCDLTTKAGRIEAQLIIKSAVKEVVLNTAKRRCKVTFHNGKVIDLPITEDPSEDVTEAIQSLSEVTERGLIDVDEVII

SEQ ID NO: 19751 - protein, 474 aa, synthetic construct
MAAIIYSRISSLRQTVGHGIGRQESMALAYCERIGLAVADNVSDVCSGFHAKQMGGALGMLVKAIEDGSLTSSDCLVVESLDRLGRENTYDALERFMKIVRSGVDVHEVSTGIVYSKASPHLLHIAFAVMERAHNESLMKSQRAKANHARRREQARTEFVTTVTPGWIDVVNDVPVLNEYHKTVQLIFKMYLNGQSFKSIAMDLNNQEIELIPRRSGKGSRLSGWTDSSIRQILVSKAVCGYYPTDHEIIPDYYPACISEMDFQRVEDIRTRKAVSKQKSGIITFLSGICKCSCGLNMISYTTHWQTKNEKKTRRGLRCSARGLNSCSLAVVDTTTIEELFLKHLPDNTKLSSMFKVYYRKADALRARARALRKQQDNLIELVEAGSSSAKERFFELQQECSNLESEAQHFEDYKIGNIKIDSLTPDGIRKTNVGLAAAGVVCELHENHMVIKVKGDEVARTAYPDFTRTPKKD

SEQ ID NO: 19752 - protein, 556 aa, synthetic construct
MITKTAYCYCRVSSSRQNDENGGFGMTRQQATLMDYISLFGENEELGYALSPDQVVFLRAEGVSGFTGKNIEKGSVLLNFIEDIKSKKIKNSVLLIENIDRFSRFNVNESTELFLSIVNNGCDIHECDGGVIHHRKSDTNLISAGLTRARAESYRKSKLSIKNWDKRFKNTIKDRSVLSNHSPSWLNTDGGVYTIIESEAVVYRKIFEMFNNGYGQAAIRTYLNDNGMTINGRTIGTWMIHKVLNDDRLWGRLRTKSDLRKEHDGLLIYPVVVEREIFNTASLILSSKGKSIKINKRANNIFTGLMICGVCKNGHLLVNHDKRGSYLRCSNSLSSNTRCIARGFKYGIVEQALIKFIKNIDTKILDSNDDNILELDILGKELKYYLDYMNQVQQDFDSVDIPDPNDRKLLKNLQSKVRDLEDEILKIKSFENSEADFEAVGAAISPELLDPFNVDLRKDFNIKLRKIIQQIEAFRYDKSNILIIIKYYAVANQQWLLIDSKTGDMKSHTYIDEEYIVIEGIDQKIVRFDVKMKQYTLDGNQISVEELISELKIISQ

SEQ ID NO: 19753 - protein, 558 aa, synthetic construct
MSKEKIKVYLYTRVSTSIQIEGYSLEAQKSRMKAFAIYNDYEIVGEYEDAGKSGKSIEGRIQFNRMMEDIKSGKDGVSFVLVFKLSRFARNAADVLSTLQIMQDYGVNLICVEDGIDSSKDAGKLMISVLSAVAEIERENIRIQTMEGRIQKAREGKWNGGFAPYGYKLEDGKLFINEEEAVAIRTIFDQYVNTTIGANGISKYLENHGIRKIPRQNGKNPLFDAGLIRKILKNPVYNGKIAFGRRTLEKVHGTRNEYKQVEQDEYLISEGIHEAIVSDEVWQAAQVKLKSQAKKYEHVNKGKDTRTHLLSGIVKCPICGVGMFGNKCIKKKKDGTKYKDFYYYGCKHRQMIRGHKCTFSKQIREELLDDAVAEVIVKIVSNPKFASMMQEKINMKVDTSEIEKEIDNYQKELRKSHSTKFKLIEEIDNLDVEDKHYKKRKQDLDDRLYRMYDKIDELESSLIDAKAKKQTIEAEKLTGDNIYKVLIYFDKLYKVMNDVERRQLITALISEIQVYEEKQPNGQWLKSITFKLPIIDDDLNISLDNDEQVECVALLVKA

SEQ ID NO: 19754 - protein, 571 aa, synthetic construct
MGRLPKAYSYIRFSTPKQAQGDSYRRQIQQAIDYCAKHNLELDEKAIEDFGVSGFRGSNWTDGALGRFIEAVKSGAIAKGSYLLVESMDRLSRQTVLKAFSQFIEILNAGIAVVTLSDGEIFRATDDGNNFDFAKLIISIVYMARANDESEMKSRRSRAAWSNGRKEARESNKVMTNSRLPTWLTREGERIVPIPERAAIVNEMFEMAKSGCGYEQIAKAFLEKGYKTFGKEADWRPAGIQAVIKSQAVIGVFQPHVIENGERVPDGEPILGYYPTIVSPALFEEVQHLIGTRSKHSGSYRKGTYSNLFSGVLRCQCGELLRYHNKGKAGNPRNYLVCPKQNITGCNLPNMLYDKVAPQLLQAVSLLSAVMRQRGAASEKTLALKDELAILQRKLELEAKKRNKAAQSMLELDDDAVFRELFTQCKANCQALEVQIHQLEDDIMGRELSEKTLGKMIVPDDLKNTEQRQRFNSQLKAAVKEISIISTGDSVAAVFKDLDGQFMLEQAFKPKLAGSSIRDISGEELLRTTAEEPYIDADWVKAEINEFESIHHKSDSEFDDDFDDLSSEASK

SEQ ID NO: 19755 - protein, 559 aa, synthetic construct
MSKEKIKVYLYTRVSTSIQIEGYSLEAQKSRMKAFAIYNDYEIVGEYEDAGKSGKSIEGRIQFNRMMEDIKSGKDGVSFVLVFKLSRFARNAADVLSTLQIMQDYGVNLICVEDGIDSSKDAGKLMISVLSAVAEIERENIRIQTMEDRIQKAREGKWNGGFAPYGYKLEDGKLFINEEEAVAIRTIFDQYVNTTIGANGISKYLENHGIRKIPRQNGKNPLFDAGLIRKILKNPVYNGKIAFGRRTLEKVHGTRNEYKQVEQDEYLISEGIHEAIVSDEVWQAAQVKLKSQAKKYEHVNKGKDTRTHLLSGIVKCPICGVGMFGNKCIKKKKDGTKYKDFYYYGCKHRQMIRGHKCTFSKQIREELLDDAVAEVIVKIVSNPKFASMMQEKINMKVDTSEIEKEIDNYQKELRKSHSTKFKLIEEIDNLDVEDKHYKRRKQDLDDRLYRMYDKIDELESSLIDAKAKKQTIEAEKLTGDNIYKVLIYFDKLYKVMNDVERRQLISALISEIQVYEEKQSNGQWLKSITFKLPIIEENLNIGLDNDEQVECVSLLEKRS

SEQ ID NO: 19756 - protein, 428 aa, synthetic construct
MSTDQDEQLSSYENQVSYYRDYILKHEDYELVDIYADEGISATNTKKREAFNRLIQDCRAGKVDRILVKSISRFARNTLDCIKYVRELKELGIGVTFEKENIDSLDSKGEVLLTILSSLAQDESRSISENATWGIRKKFERGEVRVNTTKFMGYDKDENGKLVINPEQAEVVKHIYQQFLKGYSPESIAKELNTNGIKGWSGKANWYPSSILKMLQNEKYKGDALLQKTYTVDFLTKKRTENDGQVNQYYVTNNHEAIIDTEMWDTVQEELARRKDFREKHKLKTYIMQSDDNPFTTKVFCAECGSAFGRKNWTTSRGKRKVWQCNNRYKVKGQIGCQNNHIDEEMLEKAFMKAVELLQEHRADVVVKWQKLEKGTNLLHKHYAKQMYQLLDLEKFDGTIMNKVLDHISISEVGQIIVIFLEGTEVEL

SEQ ID NO: 19757 - protein, 413 aa, synthetic construct
MAVRLIKTKSNRKKQRVCAYTRVSTTNSSQLDSLENQKAYFETFYVNREDVDFLGVYYDKGISGSKEKRPSFQAMLEACRQGQIDLIHTKSISRFARNTMTVLEVSRELKALGVGIYFEEQNINTLSNEGEGMLSVLASLAEEELQSMSDNQRWAFQRKFQRGEMVINTKRFMGYDVDDKGELVINEAEAQIVRRIFQLYLDGMGMHRIAKLLNQENVPTVTDAKWHDTTVRNILKNEKYKGTVLLQKYFHVGINWPKRLNQGQVEQYLIEDNHEPIVSKEVWQAVQDKLASKTWKQGVNKHYRFTSMLKCEYCGSTLKRQVTYKKQIVWCCSKYIKEGKASCRGMRVPEKAIEEWKLRTPVTVIERNEYGQKHYSYSSQESAADGHPSASNQNKSGSLLSGVHRPRRTAIKL

SEQ ID NO: 19758 - protein, 402 aa, synthetic construct
MKQIKTIQAQKVTTIKRLKVAAYTRVSHTSLLQSLSNQVSHYSQMIQANPKWDYVGVYSDSAISGRSQAHRRDFQQLLEDCRKGKIDIILTKSISRFGRNTVELLETVRELKRLGISVRFEKEKIDTLTAEGELLLTLLASMAQEESQSISQNIRWRVKKRFEEGKPYIPQDIFGYRWNGEEYVIEPHEASIVRQVFEWYMEGLSAPKIAKKLDDRGERTRLGNRFTKRIIYNMFDQEAYCGRLILQKTFRDHFGSRSIPNDGQMAKYIVENAHEAIVTPEYFQQVNQEKKRRARRRVSKHDALAKLQGKVYCEHCGLDMILTLETKSNQEKRVRYYCRTRDAKGVEACLGRTVTEEQLFQAFGERINTEDIHHISFNSVTNEAKATYRNGEEKHVIIQKGR

SEQ ID NO: 19759 - protein, 521 aa, synthetic construct
MKKVITIEPAKQVTHKVDLPSFTKRRVAGYARVSTDHEDQTTSYEAQMTYYTDYINSRSDWEFVKMYSDEGISGTNTKKRLGFQEMVEDALVGKVDLILTKSVSRFARNTVDSLSTVRKLKEAGVEIYFEKENIWTFDSKGELLITIMSSLAQEESRSISENVTWGRRRQLAEGQVTFSYSQVLGFKKSDTGGFEIDQEEAKIVRYIFHQVLLGNNPNKIARELTAQGIPTPQGKRKWSYGTVKRMLRNEKYKGDALLQKSFTTDFLTKSTKPNEGELPQYYVENNHEAIIKREVFDLVQVELDKLEKKRQTNNIFTGRLFCGDCGSAFGSKVWHSTSKYKRTIYQCNAKYKGEHKCQTPHVTEEEIKGWFLSAMNQLLSNREEIVANTELLIDLAKDTSPLENKIDDLEQQLETIRQDIEDLVDRNARKAQNQDLYQEQYDTLVTAYQERQKELQEATSSLEEQKSKQLSLDGFIQQLKQQEDLITDFNQELWQTSVERLDIKEGKKISLTFKNGVRIDL

SEQ ID NO: 19760 - protein, 501 aa, synthetic construct
MKPNIKDVAIYLRKSRDDSDGQEDVLAKHESLLLEYAKSHNLKYKIYKEIGSSEYIDWRPEMVRLLTDVEQDLYDAVLVVDLDRLSRGDLEEMGRISRVFRNSKTLVLTPSKTYDFNNEDQALINNFEMVFANHEFRMINKRMIRGKKQGAKAGRWTNGTPPFPYVYNRLTRELDVDPDKVKVYDLMKKMFLEDMKATYEIAWKLNELGFKTNRDGYWYENTVRRILINEVHLGKVVFGKTSGSGSKKRPNANGVQIKDRSEWIIAEGSHLSLKTEEEHQLILAILESRRFTPKGTRTNVQVLSKLIYCGKCKRVMSFTGKASGKRYVKTCLTTDRFGNRCRNRSLNVEVIYAQLFLDLEEYEQQLLNHEPKERQGDSSTLKLALHNKQEELERLEKGINRIKDLFIDEVIDKSEMKKRIEKQQQSIQTKKVEIRFIEQSLAVIENVRTDDDRLHAIKEFKKAWNTEGISKKELNILAKQLIDRIEYIREGNNINMKIQLL

SEQ ID NO: 19761 - protein, 464 aa, synthetic construct
MDKKAAIYIRVSTQEQATEGYSIQAQTDRLTKYVEAKDFILYKKYIDAGYSASKLERPAMQELIQDVQSKKVDVVIVYKLDRLSRSQKDTMYLIEDIFRPNDVELISMQESFDTSTAFGSATVGMLSVFAQLERKSISERMITGRVERAKKGFYHTGGQDRPPAGYQFNSDNHLIINEYEAAAIKDLFRLYNDGLGKSSISEYLKKNYPGKNKWLPSSIDRMLKNSLYIGKVKFSGVEYDGIHEPIIDEVTFYKTQKEIARRKQSNTKRYNYVALLGGLCECGICGAKMANRRAVGRKGKVYRYYRCYSKKGSPKHMMKTDGCSSKAQQQFIIDEAVINNLKNIDVEAELKRRSAPQTNTSLISSQIESIDKQINKLIDLFQVDSMPLDVISEKIDKLNKEKQSMEKLLERKNRLDKTELQHRFDVLKSFDWDNSSIESKRVVIEMLVQKVIIHDNSIEIILVE

SEQ ID NO: 19762 - protein, 462 aa, synthetic construct
MKCAIYRRVSTDMQAEKGSSLEAQKERLNAFAVSQGWEAANDYVDEGYSAKDMNRPALQRMLSDMRDKQFDIILVYKLDRLCRSVRDLNDMIKEFEICNVKFKSSTESLDTTTATGRMMINIIGTLAQWEREQTAERVSMIMNERSKKGLWNGGPMPYGYILKNDKVSIIEGEAKLVNFCFNKAITHGAQAIARTLNEQGYRTRDGHKWIMRSILRMLHNPLYKGYVTYESDGKVQLTKAKIKGFEPIISEDLFDKVQYIIKKRTISPTRVKSDSIFPFSGILVCPKCNGKMSGTTITAKGVQYKYYRCSKVVHGICDQQLINEKIIDSEFSKTLIMISENLKIAPVSNDMDKNSVEKQLKAIEGQQARTKELYIEGELKRHEYNDKIRILNDKKETLILSLEHANNKISQEEILHIINEMKKSWRVFPDEAKAKIVRGIFDEIHFKQESKRELRITDYKFI

SEQ ID NO: 19763 - protein, 525 aa, synthetic construct
MGKVRIIPAHQQKGNSVQPQKNRLPFEQLRVAAYCRVSTDYDEQASSYETQVAHYKELIQKEPTWEFAGIYADDGISGTNTKKREQFNQMIAACKAGKIDLIVTKSISRFARNTIDCLKYIRDLKAINVAIFFEKENINTMDAKGEVLITIMASLAQQESESLSQNVKMGIQYRYQQGKVFVNHNHFLGYTKDAQGNLVIEPEEAKVIKRIFYSYLNGMSMKQIADSLKADGILTGGKTKNWQSSGVSKILKNEKYMGDALLQKTYTVDFLSKKRVKNNGIMPQYYVENDHPAIIPKPVFMQVQQLIKQRQNGITTKNGKHRRLNGKYCFSQIVFCGKCGDIFQRNMWYRPEKVAVWRCASRIKRSKTGRRCMIRNVKEPLLKEATVEAFNQLIEGHKLAGKQIKASIMKVIKNSKGPTLDQLDKQLEEVQMQLIQAANQHQNCDALTQQIMDLRKQRAKVQSREAKQQAKLHSIDEINKLIEFHKYGLVDFDEGLVRRLVEKITIFKRYMEFKFKDGEVIRINK

SEQ ID NO: 19764 - protein, 553 aa, synthetic construct
MSTITKIQGYQRDVKQLRVAAYCRVSTDNIEQLESLENQRSHYQKYINNHPNWELAKIYYDEGISGTKLTKRNALKELLTDCRNHRIDLVVTKSISRLSRNTTDCLEIVRELQQLNIPIIFEKEHINTGEMASELFLSIFSSLAQDESHSTAGNLRWAIRQRFASGKFHVSSAPYGYSIKDGNLVINHTEAKTVRQVFQRFLSGISASQIAKKLNQKQVPTKRGGQWRSNTVINILRNINYTGDMLCQKTYRDDQYHRHFNQGEITQYLIEDHHPSLINHRSYHRAQVLIKEAAQKHHIEVGSHKYQQHYLFSGKITCGYCGTVFKRQTRPHKICWACQQHLKSAQQCPVKAVSEKSLEAAFCNIINKLVYSEKFLLRPLLEGLKEEANANSDGQLISLTKQIKTNDHKAETLTELMHASLLDKAIYVNQTAKLEQDTYQCREKIKQLNGQNTDSANNFEDVRALLRWCQQGQMLTEFDGTLFQEFVRQVVVNSSNEATFNLKCGLSLPEKLNKAATIEKHFYRDIIKQRYNDPIKQAEYLYSIIESEGDLIG

SEQ ID NO: 19765 - protein, 515 aa, synthetic construct
MKTAIYLRKSRADLEAEARGEGETLAKHRTTLLKIAKEMNLNVLAVREEIVSGESLVKRPEMLALLEEIEDNKYDVVLCMDMDRLGRGGMKEQGIILETFKRSNTKIMTPRKTYDLNDEWDEEYSEFEAFMARKELKIITRRMQRGRVASVEAGNYLGTHAPFGYNIHRLNKRERTLTINSEEASVVRMIFDWYANEDMGANAIRSKLNGLGYKSKLGNEWNPYSILDILKNNVYIGKVTWQKRKEVKRPDAVKRSFARQDKSDWIIADGKHEPIIPESLFEQVQEKLNSRYHVPYNTNGIKNPLAGIIKCSKCGYSMVQRYPKNRKETMDCKHRGCENKSSYTELIEKRLLEALKEWYINYKADFEKHKQDDKLKETQVIQMNEAALRKLEKELVDVQKQKNNLHDLLERGVYTVDMFLERSNVISDRITEITSTMENLKKEIKTEIKKEKVKKDTIPQVEHVLDLYFKTDDPKKKNSLLKSVLEKAVYKKEKWQRLDDFELVLYPKLPQDGDI

SEQ ID NO: 19766 - protein, 530 aa, synthetic construct
MNKYDQARLEDVVQPGKRIVFYARYSTEKQEYDMQKHSVETFLQRYGCGIYKEYVDRAISAIKVPFEKREDLQNLIRDAEKGKFDVVITYKNDRIARRIEEHQLFREKMRELNIHVVVSSSSELYTVGEVVSQAVKDGLTRIEAALIQDRTKDTFRSKTKRGTWLGGKAPYGYTYRVIEENDGGRKTRKEYFKDEENQQEAVMEIFRLFEIGYGFQQIANEIHSRKLDENMKWTKEKIRYIITNPFYCGFISMNRYDNGVLNDQSQWVEGTPKNMTPLFKREYWEYIMRLFEERKKRKVHSRDYSTPFLLRGILNCDQCKELMLAKNQQSGGEKYKGKKKKEQRRIYECKKCDFKLQANMIHERFRKDYLPYVLEQVTQRKKEQVESAIEERLKTEMQSLKGSMKKLDEEIAKLNQQIEALNVEMKSYYDKETIDKKVLEFMSIIMSHRTNKIHELYTVKDKKVGLQERIDRIAKTMQQKKYLPPQHLIREFAKENVDTQKLRAFLLQFFKCIHVARDGNLVLSINEHLM

SEQ ID NO: 19767 - protein, 515 aa, synthetic construct
MKTAIYLRKSRADLEAEARGEGETLAKHRSTLLKIAKEMNLNVLAVREEIVSGESLVKRPEMLALLEEIEDNKYDVVLCMDMDRLGRGGMKEQGIILETFKRSNTKIMTPRKTYDLNDEWDEEYSEFEAFMARKELKIITRRMQRGRIASVESGNYLGTHAPFGYDIHRLNKRERTLTINPEEASVVRMIFDWYANEDMGASAIRSKLNDLGYKSKLGNEWNPYSILDILKNNVYIGKVTWQKRKEVKRPDAVKRSCARQDKSDWIIADGKHDPIIPESLFEQVQEKLNSRYHVPYNTNGIKNPLAGIIKCSKCGYSMVQRYPKNRKETMDCKHRGCENKSSYTELIEKRLLAALKEWYINYKADFEKHKQDDKLKETQVIQMNEAALRKLEKELVDVQKQKNNLHDLLERGVYTVDMFLERSNVVSDRVTEITSTMENLKKEIKTEIKKEKVKKDTIPQVEHVLDLYFKTDDPKKKNSLLKSVLEKAVYKKEKWQRLDDFELVLYPRLPQDGDI

SEQ ID NO: 19768 - protein, 468 aa, synthetic construct
MKCVIYRRVSTDMQVEEGISLDMQRLRLEQYAKSQGWVVVNDYCDEGYSAKNTERPAFQKMIKDMKKRQFDIILVYRLDRFTRSVSDLHSILKTMDEHNVKFKSSTEIFDTTTATGRMFITLVATLAQWERETTAERVRDSMQKKAELGLRNGAKAPMGYNLNKGKLYINTTEAEIVKYIFEMYKTKGIISIVKSLNSRGVKTKQGKLFNYDAVRYIINNPIYIGKIRWGDDVLTDIAQEDFESFIDKNTWYTIQQVQSNRKIGKVRLQNFFVFSNVLRCSRCGKHFLGNKQVRAHNRIVMGYRCSSRHHKGMCDMPQIPEDVIEKEFLNLLEDIIIDLDDTVDQPVELSNLQEQHNRIQDKKSRLKFLFIEGDISQNEYKKEMLIITQEEITIQKQLATTEDTVSSIEIKELLNRLKDEWPHLNNESKKAAVNSFVSSISVEVVKPARAGKNPIAPVIEIKDLQWKY

SEQ ID NO: 19769 - protein, 519 aa, synthetic construct
MKKITKIDTVAQVKPAKLKVAAYARVSTSSEEQLLSLENQKLHYEQRILANSNWEFVEMYFDEGISGTKIDKRNGLKRLLQDCETGKVDFILTKSISRFSRNALDCLEIVRRLIDLNIFIEFEKENINTQTMDGELMLSILSSLAESESRSLSQNTKWSIEKRFQNGTYKIGYPPFGYDWLDGAMVINKEQAVVVKDIFADILKGTSTGDIAEKLNQQGVTTKRRKTWHGTTIRGIIKNEKYIGDALFGKTFTDDSFKRKVNRGDKNQYFMEGHHSAIIDKETFEQAQQMLVQNAKSKNIVQEDDKYQNRYSFSGILKCGECGGTFKRRIQTKNKNEKYVAWACTTHLKDKHSCSMKFIKDEQIKLAFITMMNKLVFSHQILLKPLLADVRSTTYTVDNTQIVVLDDELEKLKQQQDNLVQFVANGYIDRPTFVKEQNQLTKQMDDLENKRKMLTVAISKGFDNLESLEELVKFTKQDQMLTSFEDTHFVIFVDEVVILSRTELVFKLKCGLKLKERLV

SEQ ID NO: 19770 - protein, 520 aa, synthetic construct
MKNKSVTMIPATKRVGTLKVDAEEKPKLRVAAYCRVSTDSDEQASSYEVQVEHYANFINSNSEWELAGIYADDGISGTSTKNREEFNRLIQDCMENKVDRIITKSISRFARNTLDCLKYIRQLKEKNIPVFFEKENIDTMDSKGEIMLTIMASLAQQESQSLSQNVKLGLQYRYQQGEITINHNRFLGYTKDEDGHLIIEPTEAEVVKRIFKEYLEGSSLIQIARNLEADRILTGAGNKNWAGTTVKGILVNEKYMGDALLAKTHTVDFLTKKRVKNNGIVPQYYVENSHEPIIPKTLFLQVQEEITRRANLKNKKGSITYSSKYALSGITYCGKCGEIYRRLHWNNRGKKSIVWRCYSRLDKTKDCDARTILEEDLKQVVVDGINRVFGDEGRIKDILNSNIQKMLKVDNTLEVETIDSQLQVLQQQLLEQSSKNQDVVSIGNQIIQLKEKKQSILLSKAESNSSKQRMAEMMEFIEQDGKDRLEYDEVFVRRLVEQVMVYDENITIKFKSGIEIEVQN

SEQ ID NO: 19771 - protein, 515 aa, synthetic construct
MKTAIYLRKSRADLEAEARGEGETLAKHRTTLLKIAKEMNLNVLSVREEIVSGESLVKRPEMLALLEEIEDNKYDVVLCMDMDRLGRGGMKEQGIILETFKRSNTKIMTPRKTYDLNDEWDEEYSEFEAFMARKELKIITRRMQRGRVASVEAGNYLGTHAPFGYDIHRLNKRERTLTINSEEASVVRMIFDWYANEDMGANAIRSKLNDLGYKSKLGNEWNPYSILDILKNNVYIGKVTWQKRKEVKQPDAVKRSCARQDKSDWIIADGKHEPIIPESLFEQVQEKLNSRYHVPYNTNGIKNPLAGIIKCSKCGYSMVQRYPKNRKETMDCKHRGCENKSSYTELIEKRLLEALKEWYINYKADFEKHKQDDKLKETQVIQMNETALRKLEKELVDVQKQKNNLHDLLERGVYTVDMFLERSNVISDRITEITSTMENLKKEIKTEIKKEKVKKDTIPQVEHVLDLYFKTDDPKKKNSLLKSVLEKAVYKKEKWQRLDDFELVLYPKLPQDGDI

SEQ ID NO: 19772 - protein, 464 aa, synthetic construct
MDKKAAIYIRVSTQEQATEGYSIQAQTDRLTKYVEAKDFILYKKYIDAGYSASKLERPAMQELIQDVQSKKVDVVIVYKLDRLSRSQKDTMYLIEDIFRPNDVELISMQESFDTSTAFGSATVGMLSVFAQLERKSISERMITGRVERAKKGFYHTGGQDRPPAGYQFNSDNQLIINEYEAAAIKDLFRLYNDGLGKSSISEYLKKNYPGKNKWLPSSIDRMLKNSLYIGKVKFSGAEYDGIHEPIIDEVTFYKTQKEIARRKQTNTKRYNYVALLGGLCECGICGAKMANRRAVGRKGKVYRYYRCYSKKGSPKHMMKTDGCSSKAQQQFIIDEAVINNLKNIDVEAELKRRSAPQTNTSLISSQIESIDKQINKLIDLFQVDSMPLDVISEKIDKLNKEKQSMEKLLERKNRLDKTELQHRFDVLKSFDWDNSSIESKRVVIEMLVQKVIIHDNSIEIILVE

SEQ ID NO: 19773 - protein, 525 aa, synthetic construct
MGKVRIIPAHQQKGNSVHHQRNSQPFEKLRVAAYCRVSTDYDEQASSYETQVAHYKELIQKEPTWEFAGIYADDGISGTNTKKREQFNKMIAACKAGKIDLIVTKSISRFARNTIDCLKYIRDLKAINVAIFFEKENINTMDAKGEVLITIMASLAQQESESLSQNVKMGIQYRYQQGKVFVNHNHFLGYTKDTQGNLVIEPEEAKVIKRIFYSYLNGMTMKQIADALKADGILTGGKTKNWRSSSIAKILKNEKYMGDALLQKTYTVDFLNKKRVKNEGIMPQYYVENDHPAIIPKSVFMQVQQIIKQRRNGITTKNGKHRRLNGKYCFSQKLFCGKCGDILQRNMWYRPEKVAVWRCASRIKRSKTGRRCMIRNIKEPLLKEATIEAFNQLIEGHELANKQIKANIMKVIENSKGPTLDQIDQQLEEVQMKLIQAANQHQDCDALTQQIMDLRKQREKVQSRETNQQVKLHSINEINELVEFHKYGLVDFDEQLVRRLVEKITIFQRYIEFTFKDGEVIRVNM

SEQ ID NO: 19774 - protein, 553 aa, synthetic construct
MSTITKIQSYHRDAKQLRVAAYCRVSTDNVEQLESLENQREHYQKYISNQPNWQLAKIYYDEGISGTKLTKRDALKELLADCHNHRIDLVITKSISRLSRNTSDCLRIVRELQQLNTPIIFEKEHINTGAMASELFLSILSSIAQDESHSTAGNLRWSIRQRFASGEFRVSSAPYGYSIEDGNLVIDSVEAGVVQEIFQQFLSGMSASQIARKLNHSHVATKRGGQWRSNTVINILRNCNYTGDMLCQKTYRDDQYHRHFNQGELTQYLIEDHHPSLVNHETFNRVQGLLTEAVQKRHIETGSHKYQQHYLFSGKITCGNCGTIFKRQTRPNKIYWACQKHLKSTKQCPIKAISETSLETAFCNMMNKLIYSRKFLLQPLLENLRVQANSDTNGQLSLLVAQIKANDHKAETLTELMQSGFLDKAIYVNQTAKLEQDTCQCREKIKQFNSNNTDSANNFENVRALLHWCQQGQKLSSFNKAPFQDFVQQIVVNGPNNVVFKLKCGLRLTEKLTKAAGLDENFYRGVIRQRFNEPIRQAEYLYSIIESEGDLIG

SEQ ID NO: 19775 - protein, 515 aa, synthetic construct
MKTAIYLRKSRADLEAEARGEGETLAKHRTTLLKIAKEMNLNVLSVREEIVSGESLVKRPEMLALLEEIEDNKYDVVLCMDMDRLGRGGMKEQGIILETFKRSNTKIMTPRKTYDLNDEWDEEYSEFEAFMARKELKIITRRMQRGRVASVEAGNYLGTHAPFGYDIHRLNKRERTLTINSEEASVVRMIFDWYANEDMGANAIRSKLNDLGYKSKLGNEWNPYSILDILKNNVYIGKVTWQKRKEVKQPDAVKRSCARQDKSDWIIADGKHEPIIPESLFEQVQEKLNSRYHVPYNTNGIKNPLAGIIKCAKCGYSMVQRYPKNRKETMDCKHHGCENKSSYTELIEKRLLEALKEWYINYKADFEKHKQDNKSKETQVIQMNEAALRKLDKELVDVQKQKNNLHDLLERGVYTVDMFLERSNVISNRITEITSTMENLKKKIKTEIKKEKVKKDTIPQVEHVLDLYFKTDDPNKKNSLLKSVLEKAVYKKENWQRLDDFELVLYPKLPQDGDI

SEQ ID NO: 19776 - protein, 522 aa, synthetic construct
MNHSKRKVAIYIRVSTEEQANEGFSLGAQEDYLKQYANTKGYEVYDIYVDDGYSGKDYNRPEIQRLFKDLYQEKFTGILVKSVDRISRRVSDVTKLIDDVLAPRKCCVLVSDNNLDSSTTGGTAFIQLLATFAEYERSMIVQRVKSGMSKRAELGYWNGGHVLGYDVKNKELKINKEEAEIIRKVFDLRAEGKGYKSIAIILNQQGFKTKRGRLFSIGTIKTILENPLYIGYCRWGRYKNWNVERRKGKTDEYKFVKGRHEPIVSEELWKRVQGVNYAHKKSISKNRNFNGEFVLSGILRCPSCGAGMVMSKIKKRDKSGYHLYYMCQAFHSKGKLACKSNLIRKEDIEEKVLQCINKIILIPSIVDKTFERIQEKKERGIERIKNDLSYINEELKRKKQFIQKLNKDYFDEKIRVETYTELSEPLREEIVELEREKSKLDRKIESSEIPITKEMVIKALENFTNLYENATYEQKKSLLRAIIKKIEVQPNRKEIKGITYWFDCDNGQDDALLVSKEGRTVS

SEQ ID NO: 19777 - protein, 502 aa, synthetic construct
MKKVAIYSRKSVLVEGSVSIETQINMCKDYINNKFPNAKFKVFEDEGFSGGNTNRPAFQKMLRMAQLNEIDIVVCYKVDRIARNTLDFLKILELFKENNVELISISEGFDPNTQMGKVMLTLLASFAEMERTNIQQRVKDNLLSIAKKGKWTGGSPPTGFKNGLNGGLEWNKQDMILDVFNMKYEKEKNSNIIKYIKEKYNHNFLGGTLATTLRKPIYVKSSPSVSLYLKTKGYIVQGDEDNIHSYLTYTDKETKYAIVSDIVGLIEPSIWISINKDMDKNISREGNRFSEKFWLTKTVRCKYCGQTFCGQTKTTKTKHYNKHGEEKIYISTYSYYSCRDAVRGKLKTCTNTKRVKQEILEFKVSELIHLLKDKKTFNSSYFSNKIDNSSKIDTIKKQIKSIDKTINNLTDKIALLSNEASLIFISKLEELVKEKSILKDNLLQLELQELNSNTKKDSSLVYNNILAFNDDLSVDDKRKIAMSLFKEIIYDPETDSLDVTFM

SEQ ID NO: 19778 - protein, 492 aa, synthetic construct
MKCAIYIRVSTKFEEQQSSLANPKLLFENYVLERGWTIYEIYTHIESGTNDRNRPAFKRMLNDAQEKKFDVIMAKELSRLARNSELAHKTKRIAEENNIHILTLDNAINTIKGDLELFGLRSWLYEQESERTSQRIKHTFKTKANSGLVTGGTPPYGYYLKDNKLYVRNDHTPNIVKRIFKEYILGRGFDSIAMRLYNEGEPTPAMVANKRNAKDKWHGSTIRLILQNEAYIGNLVQSKETKLSVTSSKRIANPKDKIIRVLETHEPIIDKDTFYLVQNIIKERKHKKYHQKTHLFTNIMFCNDCKKGMHFKKNRKGYVCGSFNKHGKKACSDHIIREEALSKKILNDINYFISRINDDKIFYDIESTISKCILDNKANLKSLEDEKNSLLKQKNEALVYLINKTITNENYKLFISAIDSKIEKLTLKESKLKSFNKELNFENLLNEIKTLRNEILDLNKLTPDVLHRFVKRIEIKENGDAIIYYRFSHLPF

SEQ ID NO: 19779 - protein, 656 aa, synthetic construct
MLILKGDERLTTEQIMGLIGKINAIIYVRVSTTDQAEKGYSLESQIERCKERALTKFKYKESELIALVEPGGMGDDPNRPALNHALYLLEKGLGKKFIVLHPDRLTRDNTLQGIVSRKIWGMGVDIEFIEFEVDPTNPESMLMYNIQGSIAQYNKAKINANSKRGRVAKAKKGEFPSFKRLFGYKFNKETDLPEYDEEERQVLLEMKDMLLNRDMSSNEIAKELSKRGVPAPDGDTWYQATVSRILKNEDYTGDFYYGKSKVVQINGEAKQVPTPEEEWILIKIPPIWDHETRDQILNKLKENYKGRSRKTRDYLLKGKAKCGRCGSACGSGFTSKTKSGVYKYYSCRRKNAKAYQNGKKIIDCPGKNWRVDIVDDVFWKWFKKLLKNPTDFLEQFLSETSNEKKIEELQHKVNNLTKQIEEIDSEVSNYVILFGKGKINEDMFDKLTQPLEQKKEYIETELEIINSQINANKDVEDKNQKLKEYVSSFSEMVDKDLSMDEKRKFIDFFIEKVTLFDDDHMEIVWKGDGLNNNDDKVSLYNEGGAMKLNNSHKRLNYGQEQGFKFYVTSKVNIPKPESNHRYAWEEYENKIDEIKKLHFDKLMTVGQISEELGIPDWIILNLLEAKKWTSLVTLNYVGGEGRVISRNYMTYILTNS

SEQ ID NO: 19780 - protein, 534 aa, synthetic construct
MKTAAIYARRSKVVETGDSIENQIQLCTNYLKNIGINNTIIYSDEGFSGKNTERPGFVRLMNDAKQKKFDTLVCYKVDRLSRNIGDFSNLINELEKNEISFISVIEQFDTRAAMGKAMMYICSVFSQLERETISQRVCDNMYSLATNGYWLGGEFPFGFSSSRKNFTDSSGKNRSYSELIPIEKEINLVKLIFNKYIELGSLSQVEKYLLQNNIKTRRGKDWSKASIKNIISNPVYVKANDKTIEYFKSQGIKTYGEPDDIHGILIYKKRKGKSGKIRNPDEWIYAVSTHEGIIDSDSWLEVQKIAEINKYKAPALGSSHKALLSGIIRCAQCGSSMRVSYGVPNKLTKKRKHYYMCTLKHNSGKVRCASKNVDGPEVDKLVINKLKELSLDKSYLVQRLKDYKESFATSSENILSKNIQNEISKNKEQIDNLVNNITLTEDPQLVQILLDKLTKLKSKSVELTNSLNKLNDELAKQDILINNCDNIIQKLKNLSALIDDLDVPQKRTLLSSVIDKVFVNGDTGAVKIKFKSFN

SEQ ID NO: 19781 - protein, 537 aa, synthetic construct
MKKAAIYTRKSKFTEKGDSIESQIKLCSKYLDNINIKDYCIYTDEGFSGKNTDRPEFQRMLSDAKAKKFDVIICYKFDRISRNVSDFSNLINNLNELNISFISVVEQFDTNSAIGRAMMYLCTVFSQLERETISQRITDNMYSLATKGYWLGGETPTGFRSEKKFFNSNNKQKMYSSLVPIKEELDLVKLIFNKYLEFNSISKIEKYLLSNNIKTKRNKDWSKASISLILRNPAYVKADEETFKYIESTGSKVYGNPDGKHGLLIYKKNKGRKGAKHDISEWIYAVSEHEGIIDSDIWVAIQKQIKKNAILAPALGTSNIALLTGLIRCAKCNSPMRVAYGKRNPKTNKKNYYYVCTLKTKSGKTRCDSKNLPGLDLDNLILDKLKEMSLDKNTLLKELNKYKDTIESNFHNDVLKNIQNNISKNNSMIDNLLNNVALSTDSEVTAILLEKISKLKDENKLLTQKIDDLKAELETQETLLNDCNSLITKLKYFSKFIDNSSIEEQKQLVSSVIEKVIADGDTGSIEIKFRPLLDFKI

SEQ ID NO: 19782 - protein, 549 aa, synthetic construct
MKNKLKSSLNIESPKIAIYMRVSTSKQTDNQSLDTQEKTINSYIASRHDWINPICYKYIESHSASIKPKVSNTLKESSFDSLKRPKLRELFLDATIGKFDYVLCASHDRLTRNTNEGIILKHLFSRLNITLIYCRPGETISSENEALNKFFENLLVNIAALESNITGGRVTLANKHKIQNNFWAGGPPPFGYNLVSQPNNKRNSFLEINFEEARIVKKIFELYNLGCSYNEILTGLNRDFTLPPKRIWTHNTLKEILRNPVYTGFLVWNKRGGARKPNRHSPNDFVKSNLVEKNIIIPENEFLETQKLRNILSKDSKFLSTDFLLRDFLYCNKCNKKLLAKNYGNNKRFYYCSSHNNIEINKKCRSIKASKIESIILSNINDLINSSLQSEVQIEKFYDKYIENFNAELLDNKKSLEITINQLKSSTDLLELCVNEINISKDNLTVDYEDLSSSSTEFSFINALLEFQVVTQTEIKSLKARKEYLTYKINSSPKSFDDFKSNLNKSFKLFKYDEEKQKLISSPRSFRLFLFKVVKKIILSDHEITIIFK

SEQ ID NO: 19783 - protein, 490 aa, synthetic construct
MKSIAIYIRKSVKGDDNSISLEAQTEVIKHYFKNENKFIIYKDDGFSGGNTNRPAFQKLMHDATQNKFEAVACYKLDRIARNTLDFLTTFNTLKEYGIDLICVEDKYDPSTPAGRLMMTLLASLAEMERENIKQRVTDSMLNLARSGRWTGGTPPFGYKIITIDGGKYLELEDKNNILYIFDEFINGKGILKLSNEFNCDKKKISRILHNITYLKSSTEASKYLKQTLKYEIVGTPNGCGYLPYGKNKVINGKKIKNVDGLKIAAISKHKAIIELETFIKAQEKLKTFEGRKAPRISNKSFLAQMVQCNCGSNMLIVLGHKKKDGTRKLYFSCPNKCGNTFGDVKEIEEDTLLSLKDVNFFEKINQNKPTINNKDNSRIKASLSKELENKKKILDGLVQKLALIDSNLANILIDKMETLNENIKELQNKIDLLEKEEISLSYNKEDLNLKENTRKHFIKEFENMDMQEKQTSIRKIINKITWTGENIIIS

SEQ ID NO: 19784 - protein, 569 aa, synthetic construct
MKKIGIYSRKSKFTGKGDSIENQIEMCKEYTLKNLGNDVEFIIYEDEGFSGGTINRPEFKRLIKDIKDKKIDVLVCYRLDRISRNVSDFSSTLEILQSNNCSFISIREQFDTTSPMGRAMIYIASVFAQLERETIAERIKDNMIELAKNGRWTGGKVPLGFESKKIKFKDADGNTREKPQLVINPEEMEFVKFLYNKYLELGSLHKLEVFITENQIKSKNNIMYEKSSLKLILQNPVYVKANNDVINYLKENDWTVYGEADEIHSLLTYNKTEQVKKDGKYTKANKSKNDRFASVSSIEGFLEPELWLNVQKQFDKNRNKFPRLGKTHNALLVGKLKCGECKENMLIQHGKTSKVTGEKLFYYVCSLKRKSHKKLCNNKNAKAAEVESLVLLSLRRLGLEKKSFLDSLKNKYNTQNTNNIKIERISLEKTLLSKKNQIDTLVDKLSLADGIEEILLNKIKELKKECEDLNIKLNDLDVKVENLKVEKLNLELIEEALNMCINIQDLSREEQKKLIDILIDKIYWYGDGGIEIKFVGTDDSSKSQNFSLSEYELQHVDKLQFCSQSMTCI

SEQ ID NO: 19785 - protein, 542 aa, synthetic construct
MIKNNKEIKNIFMYCRTSTDLQIDNFSIPSQIDKITAYCKLYGYNICGKYIDEGKSGTTIKNRTNFVQMIKDMKSKSNPIQAILVYNISRLSRSLSDIAYIIKLLEEYDITLISIDDNINTSDIYGRSIAYMLGTFAELSRYNIVSTCRSGMEQRAKEGLWNGGKIFGYVSNVDKELEIVPEQEKIIKEIFNLYVNKNWGYKKIACYLNTCNYKTLKNGTWSIQSIKQIIDNPIYAGFIRWGQYVDWAKKGRKGKNENYELFQGQHQPIIDMDTWTKAQAMRKINKDKFNKIYEGDFILTGLLRCPVCGASMISHRTKKKNKPNEFYRYYQCSNFFNKGVTVCTSNLVNADTAEKYVLDRISEIINSQEIINSLISKLNNRTTKDITPLEKQLKELEKSLAKINIKRNEHMENHFNDFISSDDLNANLKYLREKEDKITTQINIIKNEISQLANFQCIDSKKVIDILKNFNNVFINATIEQKKSLLRSIIDSISVNEGKTTKDRIINKIKLHFEPVDVQAQKINKKFATTYDTVHRIINKKL

SEQ ID NO: 19786 - protein, 452 aa, synthetic construct
MKAAIYIRVSTQEQIENYSIQAQTEKLTALCRSKDWDVYDIFIDGGYSGSNMNRPALNEMLSKLHEIDAVVVYRLDRLSRSQRDTITLIEEYFLKNNVEFVSLSETLDTSSPFGRAMIGILSVFAQLERETIRDRMVMGKIKRIEAGLPLTTAKGRTFGYDVIDTKLYINEEEAKQLQMIYDIFEEEKSITTLQKRLKKLGFKVKSYSSYNNWLTNDLYCGYVSYADKVHTNGVHEPIISEEQFYRVQEIFSRMGKNPNMNRDSASLLNNLVVCGKCGLGYVHRRKDTVSRGKKYHYRYYSCKTYKHTHELEKCGNKIWRADKLEELIIDRVNNYSFASRNVDKEDELDSLNEKLKTEHAKKKRLFDLYISGSYEVSELDGMMADIDAQINYYEAQIEANEELKKNKKIQENLADLATVDFDSLEFREKQLYLKSLINKIYIDGEQVTIEWL

SEQ ID NO: 19787 - protein, 478 aa, synthetic construct
MRCAIYARVSTEEQAVEGYSISAQKKKLKAYCDAQDWDVVGYYVDEGISAKNTNRPELKRMIEHIEKGLIDCVLVHRLDRLTRSVLDLYTLLDVFEEYDCKFKSATEVYDTTTAIGRLFITIIAALAQWERENIGERVRVGQQEKVRQGKYTSPRKPYGYNADHKEGILTIIEEEAKVVRSIYNDYLKGHSATRISKRLNATKTAGRDYWNEKAVMYILENPLYIGTLRWRKETEHYFEVPNSVPAIIEEEMFNSVQILRESRQESHPRSQYGSYIFSGILKCPRCGRSLVGNYVVSKKKDGTKIKYKHYYCKGRKLNVCTMGNMSERKLEQAIIPHILSFYIDATDEDVKLENSNTENEIEQIKSELKIIEKRRKKWQYAWANDHLKDEEFTEFMQEENENEKVLTEELYKLKPAENKKLQNEELKNILKDIKLNWANLNDEEKKIFMQIILKKLVIERSDKLHAYKLEIVEMEFNY

SEQ ID NO: 19788 - protein, 493 aa, synthetic construct
MKGVVILAHAVYVRVSSDKDEQVSSVENQIDICRYWLENNGFEWDEDAVYFDDGISGTAWLERHAMQLILNKARKKELDTVIFKSIHRLARDLKDALEIKEILLGHGVRLITLEEGYDSHYEGKNDMKFEMYAMFAAQLPKTLSVSTTAALAAKVRRGGYTGGFVPYGYEIIDDKYAINEEEAALVREIFELYAQGFGYIKIANTINDKGMRTRKGAPWTYSTLCKMIKNPTYKGIYTMQKYTTVKVNGKKKKVINPKEKWVIFEDHHPAIISHELWDKVNDKDPNKFQKKRRISTTNELRGITFCAHCGTAMTKKNNVRVNKNGTIKEYSYMMCDWSRATARRECVKHVPIHYKDLRALVLDKLKEKESVLEKEFYSDENQLQVKLRKLNRDIKDLKFKKERLLDLYLEGERIDKDTFTVRNKKIEKELELKELEIRKANNIEVQMKEKQEVRDAFALLEESKDLHGVFQKLIKRIEVAQDGATDIYYRFVE

SEQ ID NO: 19789 - protein, 515 aa, synthetic construct
MKTAIYLRKSRADLEAEARGEGETLAKHRSTLLKIAKEMNLNVLAVHEEIVSGESLVKRPEMLALLEEIEDNKYDVVLCMDMDRLGRGGMKEQGIILETFKRSNTKIMTPRKTYDLNDEWDEEYSEFEAFMARKELKIITRRMQRGRVASVEAGNYLGTHAPFGYDIHRLNKRERTLTINSEEASVVRMIFDWYANEDMGASAIRNKLNDLGYKSKLGNDWNPYSILDILKNNIYIGKVTWQKRKEVKRPDAVKRSCARQDKSDWIIADGKHEPIIPESLFEQVQEKLNSRYHIPYNTNGIKNPLAGIIKCAKCGYSMVQRYPKNRKETMDCKHRGCENKSSYTELIEKRLLEALKEWYINYKADFEKHKQDDKLKETQVIQMNEAALRKLEKELVDVQKQKNNLHDLLERGVYTVDMFLERSNVISNRITEITSTMENLKKEIKTEIKKEKVKKDTIPQVEHVLDLYFKTDDPKKKNSLLKSVLEKAVYKKEKWQRLDDFELVLYPKLPQDGDI

SEQ ID NO: 19790 - protein, 501 aa, synthetic construct
MKPNIKEVAIYLRKSRDESDGKEDVLAKHESLLLEYVKNHNLKYEIYKEIGSSEYIDSRPKMVRLLNDVSQKLYDAVLVVDLDRLSRGDLEEMGRIGRIFKDSKTIVLTPTKTYDFNDEEQALINNFEMVFANHEFRMIKKRMLRGKLQGTKAGKWTNGRPPFPYVYNRLTKELDVDSDKVKVYEFMKKMFLEDMKATYEIAWKLNELGFKTNRNSYWYENTVRRLLINEVHLGKVVYGKTSGSGSKKKLNANGVQIKDRSEWIIAEGSHQQLKTEEEHQRILAILESRRYTPKGTRTNVQVLSKLIYCGKCNRVMSFTGKASGKKYVKTCLTTDHFGNRCHNRCLNVEVIYAQLFLDLEQYEQQLLNHEPKKKQGDSSTLQLALHNKLEELERLEKGVNRIKDLFIDEVIDKSEMKKRLEKQKQLMQTKKEEIRSIEQSLAVIENIRTDNDRLHAIREFKKAWNTEGISKRELNTLAKQLIDRIEYVREGNNVQINIKFL

SEQ ID NO: 19791 - protein, 558 aa, synthetic construct
MTKLYSYIRFSSTRQADSSSFERQKRTAKEIAEKYGLELVTSYQDLGVSAFKGANSKTGALSRFMEEIGRSVPVGSWLVVENLDRLSRQSIIEAQELFLSIIRRGITIVTGMDGKVYSKESVNANPLDLLLSVMMFARANEESQTKRNRTNSSALLKIKAHQQNPQSPAVAIEEIGKNMWWTDTTSGRVLPHPVYFPVLQKIVQLRQEGHSAGVILDYLNEHHEPPAPTSNKKHGKWSRAMVSRLFATKALIGVKTVNVDGVEYELRDYYPRVLSDSEFYFLRKNIIKKAWDYSHDKEKVIPLLSGIGVLRCVHCGATMVKQTAANGKREQYRYCCDGRKSGRTDCPYPNWGFRAVTLEGAVLQLLADKIWIAEDKTNPIPEIQVKIDEISRKIDNLINLSAMTGATKELANQITDLNSQREALHEEIRLFEREMYSVDSQGWDKLAQFDLSDVQNEERLKVRLKIKGALHEIECSRIDSKKNLFVLVYLDGLRQRLVIENNRGLKKGQIFVDLKTINDRQILESAGMVLHPCIEMIIDADWKAPEEIPGLLSEEFGI

SEQ ID NO: 19792 - protein, 668 aa, synthetic construct
MAYVRNKKKILKFWLKKKAALYVRVSTRYQVDKDSLPFQRKKLKEYCKFLGIEDFVIFEDDGYSAKNTDRPHFQEMMSRVRDGEFSHLIVWKVDRVSRNLLDFAAMYQELKDHKVTFISMNEQFDTSTAIGEAMLKIILIFAELERNMTSERVTGIMLDRAEQGLWNGARMPVGYRWNPEIKFPEPDPEETKIVQFIFDEYERVRSTTKIARYLNHNQIASKRGGQWTSKLIRDIIRNPFYIGTYRYNLRESGRGPLKPESEWIVRENNHPAIITKEQFDRCNAIMDENGTSRDTSELRARKYVHTFSGRLVCGKCGANMIASKDRARANGWRPSMYRCAQRSRMMDCDNSKTVNESYIGPFIFNYVANLARIQKNFKNIKTLEQLEKELLKGPEFENMKVSKESLRRTFDALAFQEVGKGAYLPDIDLSDGDDDYTAAEQLSILKRELDKCKTAIDRLTDLYLYDPDSMTKEEFAKKKRDLVNKIAGYEKQIEASQATGGKDDLADLEFIRKASAFLVAQRIVSKKHVDYIQMALDLDNEILKDFVDQVIDRIEILEGRVQSIRFVNGLVHEFTYSTPADLPVCQKCGGRIGSTCGCRTRTFDFAGKPYRRIKVGDPGDKFHGVAGAVCPECSAQAGRWHHWKCGIERCPICGEQLIACEHGPNGKD

SEQ ID NO: 19793 - protein, 550 aa, synthetic construct
MSRKKQVNQKITALYCRISLEDGGDNESMSISNQKLMLRDFAEKNGMFQYEYYVDDGYTGRNFNRPSFQRMIADIEAGKIGCVITKDLSRLGRNYIEAGSYIEIFFPKHNVRYIAITDGVDSLTRQEMDITPFKNILNDMYSRDISKKVLAGRMTRSRQGKFCGGQPPLGLMRDPEDKGHLIRDPETAPVIRKIYDMALDGWGCMRIAKQLMDDKVPITRVKSNTECDVNYYSWGSARISHILRNPFYKGAHLVCRTHQKGIRSNTYDIIPREDWEIIEDCHEAIISPEEWEQVQEIIDRRPTIMKGNSCPFYNLFHGIIYCATCGKSMQVRYEKVGRTGKNRFTGEQREPIDKAYYICQTYNRLGKNACTSHKIEARDLYNLVLKDIQELAKTALKDADAFYQRLSNRMERRYLLDASQTQKECQRLESRNREIDEMFLSLYTDKAKGILTEQRFMKLTATLEQEQEANQKRLRDLLLMMRHSDEQENEVRTFIKEIRRYAAIEELDEAVLNRLISKILVGEVKKIDGQKVQEVRIVYNFVGEIPEITA

SEQ ID NO: 19794 - protein, 480 aa, synthetic construct
MAARRRLAQVPDVPPRAVLYLRQSTYREESISLELQETAGRDYCARMGYTVVAVEADPGISGRTWARPAVQRVMAMVEGAEADVVVLWRWSRLSRSRKDWAVAADRVDVAGGRIESATEPNDPTAAGRFARGVMTELAAFESERISEQWKEVHANRVARGLPPGGRLPWGWTWSDGAVVPDPDKAPIIVEAYRRFLAGAGIRDLTRWLNGSGARPERAQEWDNQTITQCLDSPVHAGLVVYQGKTHPGAHEGLVDVATWEAYRREREHRAGEREVKRRYLLTGIATCPCGERMAGFTVNHAARKRAPFTGYRCRTLGKTDGHGSWSIVARALDEAVRTFLEEVAADVDNHAPKQASVQVDARLEAQRIAREITALDRQLGALTGHLASGLVPEAAYVVTRDEIMGRRAHLETGLAAAERYVVAIPTDPSAIARGLLAAWDTMPVESCRAALRALVRRVDVDYESRSGRVVPVWEAVPPTA

SEQ ID NO: 19795 - protein, 561 aa, synthetic construct
MKRPKAYSYVRFSTPRQAQGDSHRRQVQQAQEYCLTNNLDLDDKTIEDFGVSAFRGNNRTDGELGRFIDAVKAGSIEEGSYLLVESVDRLSRQTIEKALSQFLEILDAGIVIVTLSDKEVFRKGYVDFTKLIISIVYMARANDESEMKSLRSQAAWTNGRKEARENNKVMANSRLPSWLMLGEGKIVSIPDRVEVINEMFRMAHAGNGYQQIAKTLTERGYLTFGKGKVWRPAGIQSVVKSRALIGEFQPHIMRKGKRIPDGEPILGYYPAVISPSLFAEVQHLVDKRNHHSGSYRKGLYNNLFSGVIRCQCGELLRFQNKGNKAQARNYLVCPMQGVTGCQLPYLLYDKLEPQLLQAISKLSAVMKQRQPQTEKTSVLKDELSVLRNKLEAEVKKSKKAAQSMLDFDDDAVFRSLYEECKGNCQYIEDKILQIENEIMGLELSTRTIFQLLHPEDLSNTEQRQQFNSQLKSAVKIEFIYEHTELVAVIKDLKGELLLEQAFGLKLMNSIVHDYEGHIVVKTISNPPYIDPDWLEEERDMYAKGISVEFDECGDFSVESLK

SEQ ID NO: 19796 - protein, 487 aa, synthetic construct
MPLRALIYVRLSSFAGERDTSTSPERQEEACRNYAQAHGWTVVEVISDLDVSGSDKGLRLDRPGLRRVRERWADVDVLLFAKLDRIARNVADWNNLREEAEQQGVALVSIGESLDLTTPNGVFVANVLQSFAQLEAAVISSRTREAVAYMAREGRHRGGLPAFGWTAGPHPEQRGFRLVLHPERSVVLRAIVERVLAGESTWNIVDDLNRRGVESPEGKGWAPDTLRKLLRRPIVRGMQMHRRQLVRGDDGLPIRPHEPLVDDDTWHALQAELDRRSTTGGNNASVPYLLRGLVVCDLCGVRMNRQSQAGKPSVMVCGRRSRTGERCPGVAVGRVRLESLVADRFLAILGDMQVQEEESVESPRGNLREVEEALAGELQQMSTVEPGSDEDEILQEQRRALYRERQRLRALPSAPSVRIRRTGETFAEVWERSDVLERNELLASQVAEVRIKKGSRGRHGLDPNRVDIQWKAGLVEPAGAEEIVPVG

SEQ ID NO: 19797 - protein, 474 aa, synthetic construct
MASKASAYIRLSHAAGDGNLSRDGMEDDIRAACARIGAEVGPVHVDDGRSGAIRNRPEFLAWLDDAREGRVDVLATWHVDRLTREGLQAAAMILDVVEGKDTTTGRVVRPPVRFIDCHGLDSEDEFAFRIRFVLEAEGARKERERIRARNAALQQRLIAARRWYGGHVPFGYRVVPHPDGAGKALEIEPSEADALRAAAEMILSGASPGAAARWLNEQGVKPRRGKSWTRPSLIACLTGNAILGRITYRGAPVRGDDGYPVQAWPQIITPAEHAALRAILRAGEGSPIRKGGRPHARLLSGVLKCSGCSRPLRVSPPNYRCAAASDGFTCPRPVAISAERADQTVEQLFLGAYGRLPLVIRRVVAADNGLAEVEDAIAATLAELGQNPSAELFARLQSLHAERERRAALPTETRVEMVRTDRTLSDEWQVRDVPGRRSLLLDAIAAATVEPATGRRFDPKRIRIYWREGPADFD

SEQ ID NO: 19798 - protein, 531 aa, synthetic construct
MKPYYIYLRKSRTDREAELHGEGETLARHEKVLLEFARRNQMQISKVFREIVSGETIAARPQMQALLLDVEQGLCEGVLVMEIERLARGDTKDQGIVAEAFKYGNVKIVTPMKTYDPANEFDEEYFEFGLFMSRREYKTINRRIQRGRIASVKEGKFISSIAPYGYDKVPIENDKGYTLMINPKEAEVIRMIFNWYTAGIMQPDGTCRRLSTAAICHKLDLLHLKPQIKDHWSPSSIRDILKNPVYTGSIRWAYRKEMRILKNGMIERHRTTSNDYIQCKGLHEAIISQEIFDTAQTRMQSNRKSPTKCSNLLKNPLAGIIICGKCNTPMTRLAPNKKSNYAFIKCPNRDCDNISAPLDLLEKQLLAALDYWLQNCVLNLNHRNNPTYGGNELHFLKNSIDELKKEQTALDKQLDLTYSYLEREIYTEVEFQKRKSFISSQINALRSDLSTLQFEYEQLLCIPHSSSPEAIRQTKYSFVDIYWLLESVTGKNQLLKAVLEKVEYLKTERNKRGEKSRANFQLTIYPKIPKV

SEQ ID NO: 19799 - protein, 403 aa, synthetic construct
MNTKVKVIKASNTGARNRNALHLDLKRVAAYCRVSIDSKDQLESYKSQVDYYTNLIKNNKNWTLAGIYADEATTGTTATKRVDFMRLISDCQNGDIDMIITKSISRFARNTLDTLKYVRLLKENNVGVVFEEENIDTLTMDGELLLTILSSVTQQEVENTSAHVKKGLKMKMKKGELIGFQGCLGYYYDPTTKSISINEEEAKIVRYIFKRYLEGNGGSAIGRELEEQGYLTPRGKTKWSDTTVLGIIKNEKYIGDILMGKTFTVDPITKRRLANFGESDKYHIENHHEPIISREDFEKAQEIRLRRAQNRNTIANKDRKREKLSRQYAFSSMLECGFCGEILSRRTWHTSSIYKKINWQCVRSTKKGKKYCPHSKGIQEAAIEKAFVESYRQLCHADSTVYR

SEQ ID NO: 19800 - protein, 548 aa, synthetic construct
MQKIIYPYVRFSSEKQSAGHSHERQIEKIKEYASVNGYEVNDTLNLRDLGVSAFKGKNAEKGALAAFLKMIEDGTIPTDGTSYLCIEQFDRLSRQTVDEAYSLFRKILISNVNIITLMDEKVYTKKSLNEMVSIISSLLLMEQANVESDKKSKRVSAVFKKKLEKLRNGEKIQFAYMLPGWIDNIGTKQDPNFIINDQVKTVRMIIDMYLGGETMGHIARILNEKQIPQFARKKTKNAISSWNSGKISHLLVNRCLIGELKISKTGEVIKDYYPSVISKDEWDIIQSTKRTNATIKVAGRKTINIFQGRLFCADCGNKYYFETDDKTGKNGKKYIYHMLKCSGRRFHSCDSKSIKYDDLTNNNLFFFEKVLDQKTEDYYNKIKLEISQFENQIEELKKEQNELDLLLNNKSINFTAHAIANSKILDQIDILEKDIALNKQHIAFTMNTNMIDKFDKNDPVSVAKAKKFIKDNYAGILISSKYGTIISLMKSGQFIINPIPNRFDDSIPKASLQLFEIKEQIQNQDKKGLLDGKLKELLDAFNFLDRFE

SEQ ID NO: 19801 - protein, 405 aa, synthetic construct
MKVAIYARYSSDQQRDASIADQFRMCRLRAEKEGWTVVEEYSDHSISGASMIQRPGIQALVMDSTRGRFDMVLAEALDRISRDQEDIAGIYKRMRYADVKMFTLSEGEISELHVGLKGTMNALFLKDLADKTRRGQRGRVEAGKSGGGNAYGYDVVKKFDGNGEPIRGDRTINAAQAEVVRRIFRDYAAGKSAKAIAVALNKDGIPAPSGGDWGFSTINGNPKRGNGILNNEMYVGRIVWNRQRFVKDPDTGKRQARLNPEEDWVIQEVPELRILDDDLWNAVKARQKTNTVARDARGIADVRKVNYRRRPKYLFSGLTKCACCGGGYSAISKDLLGCSTARNKGTCNNRVNIRRDALEASILNGLRKHLMEPELFPEFCAAFTVEMNRLRMESGAGIDKAGGRS

SEQ ID NO: 19802 - protein, 697 aa, synthetic construct
MMHAKITVEHLARSALVYVRQSTMSQVLGNLESQKRQYQMAEAARDMGFAEVRVIDEDLGRSGSGQIARPGFQRLVAEVCAGTVGAVYCIEASRLARNGRDWHHLIDLCALTGALVVDPEGVYDPRLMNDRLLLGLKGTMSEYELSLLRQRGLAARDAKASRGELRFTLPPGFCWSEDDRIEMDPDERVQQAIRLIFAKFRELGSGRQVFLWLRAADIHLPVALRNGALRKIAWRKPAYHSVMQVLHNPIYAGAYAFGRTGNRTGVVDGQARKTSGHHRAIADWSVLIKDNHEGYLDWRAYEENRRMLEENAHMQKRAARKSGRGGQALLSGMARCARCGRMMRVFYKTGTDLSHRYQCRGDDGHVGAGLCIGAGGGGIDALVASQLLEAVSGQAVQAALLAGQQAAKAQETVRLAVEKELDEARYAAELAERRYEHVDPAKRHVARTLEARWNVALERVAAVEHKLAALGAELRAKPGVDPAVLMRLATDLPSVWNAVGTDARARQRLVRLLIEEVVIDIDAEENEFILLIHWIGGRHTEVRLARRKTGRFPPGRPLTAREVLRKLAGHWPDRELAVTLNRMRCRTEDGETWTTVRVAELRDKLAIPAYDPDAEVPKTLSVDATAKRLGVCVASVHKLIRSQTLPATQIMYSAPWKIPVDALETEAVRIGLQEIAVRRPRQALEKVADRSMPLPGF

SEQ ID NO: 19803 - protein, 539 aa, synthetic construct
MTWENKSGGALRAVVAARLSKTRDGTTGDVTQGSDGYDYAVSRGWNVVGEPADMDVSAIQTSPWARPELGYWLRHPEQYEVLVFRDIQRMARRKFDFPNLMQWADLNGVRLICLSLGGDTVDFSTSAGRMIGMAMAEQAVIEGETITRNILRARKFMRTVGRWGAGRTPYPYTTCPHPSGDGGFALELDPEVQPIAWEVVQRVLAGNSDGQDDNSRMAIARDFIKRDIPTPMARRLSKAKAAKRGRPTRWTSATITWILSNPALIGWGTHYGKIIRHTEGDLAGEPVVFCERPLLSRPAEGGGWEPDLDTWYALQERLAETSAPDRRRQKNVSLLLGVVHCGRCGYRLYKSKAAQGPSYRCVSGQRGLSTCTGLGILAEYVEDWVEEKFLSKVGHLSTVVVERTPGRDNRVALAEVDEVLADLRADRAAGLFKGERGTQEYRAMYAGLEAKREALSAGAYEAPVDITRETGISYRHEWEVSDMHARRELLLSAGVRVDVAPAPHRGHRDWESRLTFSMTGAEALHEQGHDDPGAEENWS

SEQ ID NO: 19804 - protein, 588 aa, synthetic construct
MTRHKLYSYVRWSSDRQAKGTSLERQTNKAKEFATLHNLELVELLDAGLSAYRGKNTTQGALGGFIQAVESGAIPQDSYLFVENLDRLSRQDILTANKLFSHLLELGLTVVTGMDGKIYTKASVTANPTDLMLSILLFSRANEESATKQKRVYGNIKALVERHKAGLPTTIKTAGSHVWWTDASGDKHTAVKPHPEYWEPARKAVELFLEGYSAHAVCDYLNEHYTAPPVRVTKATNTQENGGKWSYPLLRRMKTHRALIGERTIKTENTVYTLENYYPALCSPTEFALLQDLNENNKLTQGPTKTRITLLSGLGVLKCGHCGGAMTFMIGANSKIRYMCSNGKDKIGSCKSWSVSLDIVERTLVPALVRGYMEYATGGGAKGDDIKASIEATQAALQELETQIDNITTAITLGGNLAPLVERMGVLSKEKDSKLVELDRLARLSLLSESEGSAIEKITDFILQIRPAVLADVNHPLRLQLREAVRAVIESCTLTKRADRGLEIEYVIKGDPHRIRYTFKATTFGNYTEVTADLDEHGKPLAYPNTEEGLKLLQTRQQMEADLFKKVDQIQEEMKLPPIDGGQLWARR

SEQ ID NO: 19805 - protein, 574 aa, synthetic construct
MRKCFLYSRVSSDVQISGDGLGRQEDKLKQYLLQNALRLNLSVDDCEILVDSGVSGWKGSNMGDTAALGQLFRRVESGEIDGSVLIVESLDRFSRENPFRVAGYIAKLAEHSIDIIDVEQNLVIGTSNPWSSTIASIIANRAHEESTLKSKRIKAAWNSRRKKAEESGQYMIKNTPFWIDVLDDKYVANADASIVREIFDLYLQGYGSFTIAKKMNEAGKVIRNKRWSTPKICALLRNPRCNGDFISHSLERDYEKGTSNSVEHVIKGLYPKIVTDEEFALVLNRLNDGSKNKRVCNDRKVTILNGLLKCSICGGALTVRSAGAYRYVGCLKTIEKGGCYSKPIRYDALEKIVVNHIRNMDLGQVYESNDSQEVITKERIKTLMSHIEEYKAGITQLRERGKKPSFDMLTELQNSEDELELLKKELEQLSLSKIDLSEFAVSTELFDITQIALRTRLERTISSLLNKIKVYHTKDLSFSLIEMIYVNDVVKHVLVADKKGDVTGDVVIRRNGESTTYESCSVKIIKDEGGVFSLDCNISEVVLNDYLFLMNIVDFVDSEAKEFLNLHLNAVLAH

SEQ ID NO: 19806 - protein, 490 aa, synthetic construct
MRRAISYIRFSSERQLKGDSVRRQSKLVTDWLDKNPEFYLDSSLSFKDLGKSAFSGKHLKGGLGDFLTAIEKGLVKAGDTLLIESLDRLSRQDIDIASELLRRILRAGVDVVTLSDGEHYTRESLKDPLALIKSILIMQRAHEESLRKSERVQAAWNRKKELISEGIKVSRRCPAWLKLNDDRRTFTIIPDKVEVVKRAFDLRLQGLSFWAITRTLNDEGHLSLNQYTPKQKGWSDTAVKKLLRNRAVIGCFTPAGREEVQGYYPAIISESLFYRVQQLNTGQYGRASVSSNPLSVNLFRGIIKCSECGATIVLGGYALKRFGMYRCPNRSANRCSAKAISRKQTDATILYMLALCDRFETENTDTIDSLKLQREDLQRKISKMAELAIELDDMTIITEKLRDMKNALSKLNHDIEEETKRIKAITTGSLKDIDRTTKEGMVETQLLIKGVLKEIVIDAAKRRCKVTFHNGKVIPLQRPYSRFLKSLRGV

SEQ ID NO: 19807 - protein, 479 aa, synthetic construct
MNKVAIYVRVSTKGQAEEGYSIDEQIALLTSYCSIHKWKIHDTYVDAGISGATIERPELSRLSRDAQKKKFNTMIVYDLKRLGRSQRNNISFIEDVLEKNGIGFISLTENFDTSTPLGKAMVGILSAFGQLDRDTIRERMMMGKIGRAKSGKPMMTSTIAFGYTYDKVTSSLNINPAEAIVVKTIYNEYLSGRSLTKLRDYLNENDLLRNGKPWNYQGVSRVLRNPVYMGMVRFRGEVYQGNHDPIIDSETFEAVQKELKKRQLETYEFNKNTRPFRAKYMLSGIIKCGYCGSPMGVTLGTKRKDGTRNIRYQCVNRFPRNTKGITVYNNGQKCNSGFYEKDDIEIYVLGQVRLLQLNKAKLNKMFETPEIINVEEIENQINSLNNKMKRLNDLYLNDMISLDELKTQTYTFLKQKDLLENELNNNPAIHQEENRKQFQKLLGTKDITQLSYEEQSFAIKNLIDKVFVKPGIIDINWRI

SEQ ID NO: 19808 - protein, 554 aa, synthetic construct
MSKSVQVLEPVKKLNFTDESDMNIKRRVCAYCRVSTDSDEQMESYNAQVSEYTKKIKENPQWEFVQIYADAGSSGTNVKNRLSFNRMIKDCQDGKIDLVITKSISRFARNTVDCLNHVRMLRNIGVEVFFEKENIYSFDPKVELVLTMMSSIAQEESRNISENSKWGIRKRFRDGATVCNTTRLHGYDKDENGNLVINEEEAEVVRRIYREYLEGKGYSTIARGLEKDGIRTVTGGTRWHGSTVSKILSNEKYYGELLLQKTVTVDYLTHKRVKNNNLEPKYRVENNHEPIISKEIFDMVQAEKKKRFEVSSGKNNDRTKYTNKYAFSGKLFCDKCGRTLKRRKWNAGTKSEKIMWQCNNYIKGIENCDSKAVNDEVLKRTFVQLYNDMVEDKGSFLKTFMSNIEKVLKKDTNIKKINDIIEEIGVYEQDLKNLIQLQLRGKIDDKYYDEEYERIKNQIEILNDKKIEFEEENIKNEDYKQRLKNVAMILNAKENGLEEFDDDIFKALVNKVLVKSPEHFVFVLENGLEYEGQAYCTRQHSTHIENVAIIVKKD

SEQ ID NO: 19809 - protein, 561 aa, synthetic construct
MVHTVIDQEEKKLYDQYKNEFFSLVAQHKLDMSEEFCIYLRKSRADIEAEARGEGETFIRHLRNLLDLALRQKIYVAEIYKELVSGETIEARPVIQHVISEVEDERWQGVLVMEIERLARGDTIDQGTIAQTFKYSGTKIITPTKTYDPNNEFDEEYFEFGLYMSRREYKTINRRQQRGRVDSAKEGKYTGNINPYGYNRVKLVKTKGYTLEIVPEEARIVRLIYEWYTKGEPDQDGVYHRLGTGLIARKLNNLGIPSAKGGVWTVPTVRDILRNPVYNGKIKFKSRPLIKKKQNGKIIKSRPRAKKEDMILVDGLHPAIIDETTWNLAQEIMSKNPRKPVGLRLKISNPLAGLVVCGVCGRKMIRRPHKGRPATLMCQLPSCGNVSSFLDLVEQRILAGLKEWLKNYKAEWDKNVPVNNDAKNEVMELKIESKINQEKKLAELEQQLENAFDLVEQKVYDVDTFRIRSQQLKSKINDCKEALSKIEQEIALEKERTTARVRVIPQVEHVLDAYYKTDDPEIKNELLKSVLETSIYLKTKKARWNGSLDDFKVTLFPKLPQ

SEQ ID NO: 19810 - protein, 522 aa, synthetic construct
MVMKDDRAYVRVSTLKDSQKDSPEHQEAFIRERASRENITISKVYEDRDTATSIVAREDVQEMIADAKRGEIKSIWFASLSRFSRDALDAISLKRILVNALKIRVVSIEDGYDSAVKDDELLFGIKSVVNQNTSGDISQSSRRGIRQSAAKGNYIGSIPPYGYRKVVVDGRKTLEVIPEQAEIVKKIFELYLNGNGEKNIVNYLNGDNEKNTPIPSYRGGVWGLTSVQRILQNENYTGYTVYGRHTTEVSYNDLSDLMDRGKKLVMKPKSEWQKTPFQTHEAIISKEVFDRAQEIRLLRGGGTRGGRRSFVNVFSKFIFCAECGTAMVSMGSKTKNKNGKDYRYLMCSRRRRTGEIGCSNGKWLPYYEFRDELIKDILERVRESIRVLEEEGASEINSQLPESNTEKDKRKLEKRIEENRKLLFEVRRQHMLGEIDDAQYEFEKAQYEKEISESEHRLAIIEANELRSLDREKVIRETKQYLKELTEMTTYDDVEKTRMLLMHMVKRIEVNKDGEVDVDTYV

SEQ ID NO: 19811 - protein, 572 aa, synthetic construct
MAIGIYARVSTLQQTDNTSLDEQIRLCKEKAKELGYFESNIIIYREEGRSGEDIDTRVELTKLREDVASGRVSAIICTHPDRFSRDLTDKLIACREFEKNGAKLYFTDTQFNDSPEGQLFFNIMSAIASYELALIRKRTIRGRLSKVKNAKKIMPMRVAPFGYDKDENGQLVINDVERQYVQMIYEWYVFEKLTLREIGERLYGKIEPKRGESPNWNASSIRRILTSEIYIGKYYYNRRATEKKRGELTVGGNPKKTYKIRPEEEWLTVDVTPIVDEELWKLAQQQRIQNDTTKHVGNKKYEYLLKSLLKCGHCGRTYQATTYKGAKNKETGEIMKSRSYRCPNKNPRKYGPEVKKCEAPALNADLIEDFIWNQVLEIVTNPEKFVSRIKNKGNDSISGVREKLAVLEKQLLKKKQALEKAERSYFEAETLEDEKRYDNHRKIYKKEIAALEDEIVNYQSKIDSHRMEELTVDQIMSQVEKLRERISNSSEVPFELKRNIIEMLYDEIIITVKKPADGDTADGTELSITSVGLFDKWYQEEKNTGLCSQSQEVRQHRRGSGGFDLDRHDRAD

SEQ ID NO: 19812 - protein, 530 aa, synthetic construct
MRKADLYIRVSTDEQADKGYSQRDQEDRLRKYCDIKGIPVRDVYIEDHSAKSFKRPEWQKYLSNLRKTKNNKAGSIILFTKWDRFSRNAGDAYQMINQLRTHGVEPVAIEQPLDLTIPENKIMLAFYLASPEVENDRRALNVFHGMRRAKKEGRYMGTAPLGYVNKITEGKKKFIAQHDFEAPLLKWAFEQIVANNFNTEQIWKMVREKADGKGRFSKNNFWVAMRNPLYCGKIFIPPYKEEKGYFVKGQHEPLISEKTFADVQDILDGRKRVVKPKIVAIDNLPLRGFLKCPKCKRMLTGSASKGKMGRYYYYYHCSSACGTRFKAEPANEAFLKQLRYMSPKEGMVDVFIEAFIKDFNNKTKAQNTERANIIGEIDTLNKRYQNALLKNADGEMADDDFQEVKKLSKGKIEVLERRLNDLAVVGTEIKDLVASTLKKVANIDRRYENGDIEEKRLIVSSMFPDFLEFDGTRHRTPRLNSAIALIYQNNSKLQGKKNGTSLSFLDLSQDVTRLGLEPRTPTLKVLCSTN

SEQ ID NO: 19813 - protein, 536 aa, synthetic construct
MTRIIRAASYARYSSDNQREESIAAQDRAIEEYCKRKGYVLVKRYADEAKSATTDNRSDFQRIFEESMLGAFEVLVVHKLDRFARNRYDSAHYKRKLKLNGIRLESVLEQLDNSPESVILESVLEGMAEYYSKNLAREVRKGLNENAIKAVHNGGRPAYGLQVNPETRMYEIDEKRYRAVQMYFEGLDADFTRAEIARQINRAGFRTYTGDEFKITSFDTWAGNQKYKGDYVWNASSSKDDSGKRNSHLKKPSEEQIVIEGAIPAIVSKELWERVNAKLKKRQSNSDKARLKAKEVYLLSSLLFCSLCGSQISGESYTSRGRKYSYYKCSSKCENKGIPKELLEKIVIEKLIEICFSPEAVQQIVEKVKKLYKERQSEVADDATPLKEEIALLDGKINNWIDAIGDGVLDRNTLASKIKEANEKKAFLSSQLAQVEIIQKTPEIDDAAIVKVLNDKKTHLLSHNQKDQKAVIQEYVDSINVHFTSDKKLDMEIIVKFDMLGVPMVEARGLAPLYRRTTTKASTRVSFNLNFASLDS

SEQ ID NO: 19814 - protein, 534 aa, synthetic construct
MTVIKAAKAQKHTQEERRLKVCGYARVSTGSQAQATSYTAQVEYYTEKIESNPLWEFAGVYADEGISGTNVKHRDEFQMMISDCEDGNIDLILTKSITRFARNTVECIQTIRKLKEIGVGIYFEKENINTLSEKSELFITILASVAQGESENISSNNRWAIQKRFQDGTYIISTPAYGYGKDEDGNLVIIESEAETVRWIYESYLNGMGVYVIAKALNQKGIPTIRGAEKWQDGVIQDILKNPIYEGDMLQQRTYTETRFPFVRRVNNGQRNQYLIKDSHPPIVTHEEAEAVRNLMAYRVDVLHMNKSDYTKRYLFSGRIICGECGRTFRRQKIYIGKPYEKIIWTCSGHVEDKESCCMKAIREDVLHRAFTDMWNKLYTNQGTILEPLLKELTELVAARQDSEEIRQLDKEIKDISGQSQILNQVMRKGYMDSALFMESSSKLGWQLTECRRKKTLLTRKLRRTKEIVRTEQLIQLIAEQDGLMEEFDEQLFKMTAEKIVVSKEHDITFCLYNGLKLTERGGGQDAVAHANRL

SEQ ID NO: 19815 - protein, 544 aa, synthetic construct
MAETAKKISMIPAKVQYDRNVKLSEKKMKVAAYCRVSTELEEQDSSYEAQVEYYTSKISENENWKNAGIYADDGKSGTNTKKRADFNVMIQDALAGKIDMILTKSVSRFARNTVDSLVTIRKLKEKNVAVVFEKEGINTLEGTGEILITILSSLAQEESRNISENIRWGVVRKFEKGKVIVNCTKFMGYTKNEDGDLVIVPEEAEIVKLIFRLYLEGYSTGKIAKHLEEQGIKTATGQDKWHSTVIDKMLRNEKYMGDALLQKTYTVDFMTKKKVKNTGIVPQYYVEDDHEAIIPKELFYRVQEEMMRRASLCKAAVTRKKNQRSRYSSTYALTGMLICGKCGQEYRRVTWARNGKKKVVWRCSNRLTNGVKKCGESETLEENTLNRAVMEAIHRITSDDMEFMENFRQNIIHVIGNYSTAKESEEYEEKIKEKQEEMVALIAENAKTGSYTPEFDERYRTIAEEINALKEAQKTARNEKWMADSYEQRIQDIDHYLSTSTCQIQEFDNDLVRRLISTIKVESSEKLLIQFQSGIVMEQEIRYE

SEQ ID NO: 19816 - protein, 694 aa, synthetic construct
MRQGTQLTVTGYVRVSQVGMRRAPRFISPEVQREAIERWVRTHRARLTDVLVELDESGARGDRPKLGQALELIETGASQGLIVYRVARFSRSLADGVAIIKRVTANGGEFYSADDGFDTSTRSGRLMLHVLLSLAESDIEIVRDGFEVAHLKATARGAYQGAYTPLGYRLTRAAKLRPDPRTASIVTELFQRRARGESVASLCRWLEQQHVLTPKGNPGWKDGTLRYQFTRRVYLGEISWNGHVHEGAHPPLTDPDTWHDAQQPRQRSIDWSPRPSLLSGLVRCASCSMVMSPIRSTSRHPEIVNHYRCRAISAGGACPAPASITTQYLEPYVEIAILEVLRRRRRAPQAALEAAQHTLDRAERDLAKYRDSPRVLHVLGEMDFAAGLQIRADRARDARAHLAAVRARSRLHALPPTEHIEAHWADMPIRARHEIIRAVLDCVFVKPGRLDVEERVIVCPHGTAPTRLPRAGDNHSRARPYTPPKSLPTATAQRSAYLWSRTRIERELRQFLRGRNRWPSRDEFHAAGYRRLQTNVVLGDGEHYWALRTHTPIDNHDAVAPWTERRIRETLVLYLADKHSWPTFAQFSRDGMQSLRYALIETGGVRAWQNLFPHPAERRNDRRESGWDEGQIRTELTSLLAGRARFPTRREFADANQERLYSALIRHGGVSQWAREFELPTARPRDEPPSGRRP

SEQ ID NO: 19817 - protein, 452 aa, synthetic construct
MKAAIYIRVSTQEQIENYSIQAQTEKLTALCRSKDWDVYDIFIDGGYSGSNMNRPALNEMLSKLHEIDAVVVYRLDRLSRSQKDTITLIEEYFLKNNVEFVSLSETLDTSSPFGRAMIGILSVFAQLERETIRDRMVMGKIKRIEAGLPLTTAKGRTFGYDVIDTKLYINEEEAKQLRLIYDIFEEEQSITFLQKRLKKLGFKVRTYNRYNNWLTNDLYCGYVSYKDKVHVKGIHEPIISEEQFYRVQEIFSRMGKNPNMNKESASLLNNLVVCSKCGLGFVHRRKDTVSRGKKYHYRYYSCKTYKHTHELEKCGNKIWRADKLEELIIDRVNNYSFASRNVDKEDELDYLNEKLKIEHAKKKRLFDLYINGSYEVSELDSMMNDIDAQINYYESQIEANEELKKNKKIQENLADLATVDFDSLEFREKQLYLKSLINKIYIDGEQVTIEWL

SEQ ID NO: 19818 - protein, 529 aa, synthetic construct
MARTVTAIPATRALHTGTPLGQTIVRRVAGYARVSTDHDDQLTSYEAQVDYYTRYITEHAGWQLVQVYTDEGITGTSTKHRAGFQQMVTDALDGQIDLIITKSVSRFARNTVDSLTTVRALKDKGVEVYFEKEGIWTFDAKGELLITIMSSLAQEEARSISENVTWGHRKRFADGKVTIPYSRFLGYDKGEDGNLVINTEQAKLVRRIYNMYLGGMSIGAIARTLTDEPNTYTAAGNKTWHYQSVRSILTNEKYKGDALLQKSYVADFLTKKQVINQGEVPQYYVTASHEAIISPAVWDFVQAELAKGATNQRTQHRTRPFSSTLECGQCGHFFGSKTWHAGSKYEKVIWRCGHKYKGDTKCATGHIDDGRLKDMFVEAIRLRLGSPADATVNHAVLDALDTSDLEVEAAGLIAQIDQVAKKLESLIARNARVAQDQQAYEKIFNAAHQQHQTLLAEHAAVVAEIQNKHNRLAAYRYYQQETAKLGVDPLVFSPYLCVTLLDKGTVSTDGTVTFQFRDGSTQTVKINPR

SEQ ID NO: 19819 - protein, 496 aa, synthetic construct
MYGYNLKPCLTRRNTLKRMEQITPPPISTFPLVKVAAYARISMETERTPLSLSTQVSYYQQLIHDTPGWTFAGVFADSGISGTTTNRPQFQEMLALARKGAIDLILTKSISRFARNTVDLLETVRELKDLGVEVRFEKENISSTSADGELMLTLLASFAQAESEQISQNVKWRIWTGFEEGKANGFHLYGYTDSADGTDVQIVEDEAEVVRWIFAQYMDKVSCEKMAAQLITEGRVPHLADNKLPGEWVRHILKNPAYTGDLLLGRWSTPEGRPGRAVRNTGQLPQYLVENAIPAIIDRDTFTAVQTEITRRRELGARANWSIETVALTSKIKCVSCNCSFVRAKRNPRTQHNITTERWICTNRRSGRANSCGTRELSNTALKKVIAEVLGIDSFDDDVVAERLDHIDVEGKDRLTFHLTDGTTCVRIWDPQLKKNSWTPAKKAAWGELVRARWAEAKRLGLDNPRQAPTPPEALAKYRAVAAAEAARLRAERGER

SEQ ID NO: 19820 - protein, 433 aa, synthetic construct
MVMVESDPGISGRTFNRPAVKRVMEAVEARQVDVVILWKWSRMSRSRRDWAIAADRVDVAGGRIESATEDIDVSTSHGRLARGMMVEFAAFESERIGDQWKEAHSRRVSMGLPANGKPRFGYRRAGEGFEPDPETGPVLASLYRRYISGESFYSLIKYLNDNGHTTVPGYGSSGGAWSDRSLRRALDSGFGAGLLHTRDEYLPGIHEPVITADEWADYQAARQRRRTHRTSERSVYLLSGMVWCACGAKMNAGQFGWQRVPKFRCKAAAEKRAHPGGYVSAHVLDDAIRDWLRGKVDDATEVTTADAGLREKQKQAASNLAKLGASLTRTEQALTRLTVSFGEGVLDLDAYRAASNDLKAKRDGLRASINAAEADRRAAPVSVEAIRRLLDDWDILAVEQRREALRGIVRQVVVKPQRPKSTVTIVPIWDAGV

SEQ ID NO: 19821 - protein, 589 aa, synthetic construct
MENEFSPGGKPAPATAYSYLRLSSKRQANTEDSKTYRDGFRRQIALRDEYLARNPHLTLDTRLVLHDIGVSGYTGANVARGGGGKLAAFLAEVEAGRIARGSHLLVESLDRMSRQQVGRAQAVLLSLVNSGIVVVSLTDGQVYRESRDASQFIMSIMSLTRAHEESVVKATRLRQTWERKRQVALERPISGRCPAWLKVVDGTFVADDDRVEVVREILGHLADGIGRDRIARILNARGEKPWGHGTQWHGGTVQKLTDNRALIGEFQPHKLVYEERKGVMVAKRVPVGDPIPGYFPRVVDDELWTRARAVAVKRRLGKAPNAGGRQGTYVTNLFGEVAACRSCGKRMTYRDRGPRSFAVLRCSGERAGTCTNSYRFPYQDNENAILSWLIKVDFSGKAPGEAARLDEEMRRTIAKRDEMQSRGEAIVRDVGVSSRFAKAPLAEIEAELNVLEVRISELGAQALALKASGGAEERRMAVAHLIELHQDKAPVEQIFAARWRIRQIIRETVAEMWCHPEGYIDILTIDGEIHLFRDGYWWCAEEELWVPWAGAAFGGGYWATKKELARRRVWLEEAYRIREAKLGSKEESA

SEQ ID NO: 19822 - protein, 554 aa, synthetic construct
MMNGFNYDVIDTALARGFRAAIYCRLSKDDDLDGTSASIENQRDMLEKFCEKQGWEVVAVYQDDGFTGLNMERPDLKRMLKAIERKQVNLVITKDLSRLGRNYLQTGQLIEDFFPRNGVRYIAMNDGIDTMRDNNDIAPFKNILNEMYSKDISKKVHSSYVLKAQKGQFTGCIAPFGYKKDPEDKNHLLIDGETAPVVRLIFGYALDGHGPNYIRRRLEEEKHPCPTWWNRKRGHRNIRTKWEKKDPENGRYVWDFSVIKEILMNPVYTGAIASQKTEYRFKIGTIRDKKPEDWIVVEGTHEPLVDKKDFAIVQEKLKSRQRPGKSGEINLFAGLIKCGECGKALTIRTTHEKFPKRIFSCKTYNAYGKQHCTQHRVEFDTLYSLVLNKIRECAAAALTDSEAVAGRLTDTCHARQKDQREAMERTLAKDEERIEVLEKMVLRLYEDMVAGRITEENFNLLLEKTQKEQAELKAKAEEGQKRLADEIRLAVDARQWVESIQEYRDITELDASTLNRLMKEIVVHETIDSDKTRHISIEIHFNLKPIPEVEQVTS

SEQ ID NO: 19823 - protein, 582 aa, synthetic construct
MKTQINGKIAIYSRKSKFTGKGESIGNQIEECKKHIAYKYQITDMNQIVVYEDEGFSGKNTKRPQFQQMLKACRNHEISMIVCYRLDRISRNTIDFALLYQELERLDINFISVTENFDTTTPLGRAMLSISSAFAQLERDTIAERIRDNMLALAKTGRWLGGTTPLGYISTAKTSVDIEGKIRTAYRLKTDSDNFSLARLIFDKFLEFRSLTKVETYLLNYHYKTRNGKNFSRTGIRDILKNPAYAAADEDTLCYFNEIGTLIFNESSEFNGTHGLMVYNKSNQASEIPHKQHNYSEWIVAIGKHKPLLTGKEWLQVQELLEQNKSKSYRKPKDNTALLSGILICADCGSYMRPKANRSLDENGNKRFSYLCETKEKSHGQLCSMNRPDGNLLDKTVCDKIKEIAQGEDVDKFHEQLKYAKKQLLSKEVSNTTKIDHLQKVLHDTDRKIENLVIALSEADNTPAFSHINKQINNFHEEKLKIEKQIHTLNELLQNQNILLANFDVLIEKLSSFSDSFDMMSIEEKRTTLRILVDKVVWDGTHVHLYLVGQNNQKTKPQQAGCKRNPDASARTEKDVKRDFFI

SEQ ID NO: 19824 - protein, 556 aa, synthetic construct
MNIAAYCRVSTDKSDQLNSLEAQKKFFAEFTERNGHNLVRLYADEGISGTKIKNRKEFQKLMRDAKQGLFDMVVVKDISRFARNTVDFLQSIRALKALGIETTFLTANMTVLGNSEFVLTIFGALAQEESANTSKRVKFGKKMNAEKGRVPNIVYGYDKTIGDYFNLEINKEEARNVRQIYKWYIDEGYGAAKIANMLNEQGIKTKRNCAWSQNAICRILTNELYTGKIINGKEEVEDFLTGVRTTKEESEWLITDKPELRIIEPEIFDKAQEVLKSRHKAFKLNKERQSNKYIFSTLIKCKECGWSFRRTVRTYKNTYIRWVCSGHNGKGVDNCPNAVTIDEAELIQALDEYFKEILKDKKNIINRIVKEFNRIYKKKEDNEQYENELMTELAKLKKTREKYMDMYTDDLISREELNEKIGGMKKKIEKLENELKLVEYNLNKGDQLEEIVQHTFKNIEGITSVADMTNEQLKQIIQKIEVDKEGNVDIYLRIFGDLGLDDSVLISYDHTQGCDRKITSGSADTGGKGAKSVGYEQIRASHTRWTGYKGKIFTPA

SEQ ID NO: 19825 - protein, 579 aa, synthetic construct
MLAIYTRKSQENKDRNTSSLEEQQLFGIEMADKLGVPYEIYNEGIGSGALELKKRPEFVRMLQDINDKDSKIKAVYAYDSSRLYRNDDTKFQFLTVVKKKNIELYFKSGKFDWNNPQDKLLFNIISATDEFFVDLTSLKIQDKLRLKVSQGKVNGGVQPYGYTKDKEKNLVIHDEEAKIVRYIFKAINEGKTSVEIRNYLIDNEVPTRYNKMEGTKKYIHNGRDETRVSNKSDSTWTNGTILQILRNPIYKGERKWHDEIYPAPIIIPPVEWEKANKSFINRNKGSLRGKNTEHKYLLTPLLQCGCGKSLTGRSHKLENYYACASKRYKENTCEQKYIPIRVLDGFLTHLIYGKLYDTVKESFSGDYEEKRAELKKSLDTIEAEIGKVESNQDRIDDFLADGTYTKERHQRQFKRLNEQLTDLEIKKGNINESLNSLSGDKHIIENIQKNVVEPFYEHYIEPDELPYTVIDGKDPIKDKFQQIIRGEYAKKIPFEERQKNIRQYIKNIIVTINKEARVNEIEVHYRLPIEPELYLMDDKNIQIVNAKHRGTEYMNLKRVEKSRDVTLKAIEKRLQEYTL

SEQ ID NO: 19826 - protein, 565 aa, synthetic construct
MKPHAYIYARFSTKRQDRGESLSRQYELTQKMCEDNGWEVVETLTDKGQSAWRGNHLRVGELGRFKERIDHGDIPPGSYLVVENLDRLSRQDIKKARRWIEEVTDAGIRVAVASPAPGKIFDEVSLSGENIVDLLQYLLEAQRSNKEAERKSQFQQKAVEGFMNKARNGIVYSKRVPAWLKGEKNGSFEVDEIRAAVVRQIYEWCAAGQGIHLITKKLNASVEPWTVGHKSAPSWKVGYVRDILTGWQAEGEYHVRSGPNRVRTGEVITNYYPRVVPPELVAAARSAMENRRGATGPNHSEAKNLFAGRVKCGHCGDTMIRTVQRNTRGTQYEYLKCTRFNNGAECVNTTLYRYDNFERAALDQILHLALDHSHFVRSDETGPLLAHVAQLSKDVELLETERSNLMAFIRKHGEDDDTERDILLLRPKLAAARADLEKAREALERAKGHATPEEHLARVLEVKDAIASDDDEVRQDARRIVRDAVRSVVQVVTCRREYIEGRKTPNRQIQMTLAGGLLAFLFDNDGTLLQKVDKSSLPDEMLTGLKGTGAEQAIKDVKRRRTKAL

SEQ ID NO: 19827 - protein, 478 aa, synthetic construct
MKPMIGVYARISFDRDGEGAGVQRQQVDNRGLAAQRGWDVLREYTDNSMSAYKDDVVRPEFERLLADLESGEIDGFVAWKVDRITRQLRDLVRLMEIHKKQKFFIATVMDGEIDMSQVLMNALRFADAQQSSQTHSDRIRRKLLQNAIDGKPYGAPVRPYGYSQDRMTLDPVEATVVRKMGELFMNGYSYREIAWRLNETATLTRVGKPWYPDQIKKFLQRDRNAGYREVEGTRYPGQWEPIFSSDQWEAIQSMAKHRKAQTRQRPSNRRYLLTGMLHCGKCGGYLYGMTKSFSSGLVGTYQCRTQTETDRKGAGCGGCMVQSPPLDHFVRELICARLDTPLLSELIAASSVDQRSVRALLSEHEQLTIRAQQMIDDYADGTLDKPAYQRASARVAERLESVDREIQKHRRPKATLDLKPGDSVRAAWDANPDGWRRELIELLIERIEIMPATKRPAYSVDGNRFTLDPERVKIDWKM

SEQ ID NO: 19828 - protein, 563 aa, synthetic construct
MFNFAENQSKDVVVYPRVSSDDQQERETIQSQIEFANKYCELHGLNIIDWYKDDGVTGTIPLHERPEGNRLLEDAKAGKFKTVLIYNMKRLGRKARVTLDAIYQLEEYGVTIKSMTEPFDTSTPMGRFVITLLAGQAEFDRDTLLETFWHGANRVARLGQWLGGIVPFGYVVIDKFLQINHDPLPGKEELSEAGVVQLMYHLVGDEEWSTIKVADYFNSLKIPPSYVKDGRKIKKGKRKENTAGVWTPGRIGSMIKSTTYKGLHIYGKRSKKERELIEREVPAIVSEELWDKAQIALRNNQIEAFRNQTRDYLLRGLIKCGCCGLTYHGTSYTGAGRKPTAYYTCGGKTAYKGPLQGKCQSKNIPAKWIEDMVWEECVQFIQHPGDALEQMNAGMEIRKSKIGDYLSEKEIVQKSITDKQDERQGILSLYRQKMITAFDVEKQLQEIMTETAALESRLREIDVLIHAEDDLSKDFTSAEELLINLRSKLGNDPSFEIRRGIIKTLVQEIVITTIPSPSGGRPKASVNVRYSFKRAKGNNRTVVRADIWEAIIRVITVPAVLHG

SEQ ID NO: 19829 - protein, 601 aa, synthetic construct
MRATFYARVSSDSEEQKKSIISQVDFFQEYLQSHKYQPVESGVFCKRDGSVEATQGYYVDEGFSGAKSIKYRKAFQQMMRDAKARKFDIIFTKNISRFGRNVQEILKSIGDLKELGIGVYFEDVKINTLNGSDDLKITIFAGMAQEESRAKSDSVQFGKMRGYKKGIWGGREPYGYNLKEGKLVKNDDEEKIVREVYHLFLNESMGQRNIAKELNARNVPTKSGKTIWDQSLVSKMLKNSVYTGEIRLHRTQKTDINRNIIKKIPKEEQVVTHDESLRMIDDETFRLVQLEKEKRLEKFGDFKYKNIIVEDEDGNEMNKKQRNIERGLSRHSSKHLFSNLLKCGNCGGSLRRKVQKNHKNTFLYWFCRNNDQFGKHKCGYRNLQHEEKLIAFVKEEIIKYRNTPNKRKYYLQTILKTRYNAKDIEVMKQQLQIEIDEIKIDKKGILKQVNRESITQEEFDELNKEFNVQLYEAESKLNQLIYIDQEIEKLHLRFNQFTAFLNDLDVDNLTNGVLRKIINRIVATTIDEPVFSDDTSNFDKYTTLEIDWNFLDTTESAILTESFRKLRKSMITIPSHELPNEVIDQMAENVSREPNEEEILF

SEQ ID NO: 19830 - protein, 528 aa, synthetic construct
MLDNSNVAPGKNKTLRCAIYTRKSHEEGLEQEFNSLDAQRESAEHYIEAQRMRGWTALPDRYDDGGFSGGNMERPGLRRLLADIDAGKIDVIVVYKVDRLSRSLLDFMKMIDLFNEKGVSFVSVTQHFSTTDPTGRMFLGILITFAQYEREVIAERIRDKVAAAKRRGKYCGGVPILGYDVDRENKKLLVNPDEARTVQYIFRRFIQIGSAKKLGQELNEQGYRTKAWTTKKGRVREGSEWNTAHIYRLLNNRIYIGEIAHKDRSYPGEHEGIIDRATWDKVQAILEDNKPVKVSMARTKMVAPLKGVIRCGHCGCAMGPTYARKNGRHYTYYICQKDSKRTVSRCPLKRIPAGDIEQAVIEQLSAVFRTPTLVAKTYFAARDIEQAERERLFKQKAQLEMELSQAREQALELMKPGNDQPGKTEMLTTVNRQAVELSKQLTHVSERCRAYQGNSITEQDVSEAFQNVEGFWEDLFPVERNRLIRLLVDKVEIRETGIDMELRTNGLTTLIAELAGLACEVTERRASR

SEQ ID NO: 19831 - protein, 648 aa, synthetic construct
MLRPICYERVSSIQQIEGGGGLDDQRSALEGYLESNSDIFTKDRLFIQDRGVSAFKNSNISSESQLGIFLQDVQNRKYGEGDALIVMSLDRISRRSSWAEDTIRFIVNSGIEVHDISASTVLRKDDPHSKLIMELIQMRSHNESLMKSVRAKAAWDRKIMEAVKNGTVISNKMPMWLKNVDNKYQRIEEKVNLIRNCFEWYKHGLSTGEIIKKIGDPTLQMVTVSRWIRDRRLLGEHVRYNGEVVHNAYPKVIDEDLFITANRMMDRVMLEKRKPADDLLLEPAVVQEIFRLYESGIGTGAIVKHLSKGWSTVNVLRVLRDKGVVKQKIIDNLTFERVNQKLSQNGVANRIRKDITIAQDDYITNLFPKILKCGCCGGNIAIHYNHIRVKYIICRNREEKKICDAKSIQYLRVEKNILQLVKNIDFNKLMSEGVLESGSIIDGIREELATLRKEEQKYIDKIKKRKSEGKLTGIHLNEGLTEIQDRIEELDKEIIKSQDIKEIPKLDFNIEEVLDPLNVELRAKVRKELRLVLKSVKYRVVSKSIFVSLEYYTDVLAHVIVINNQRGGGEVQTEFAIEEHDGCRVYRTDSFVLSYKKGNEVPQFHTYEGVPINNFEYLKLRDLIEEVEGNGIVSSWMYKNYDFVFMNH

SEQ ID NO: 19832 - protein, 536 aa, synthetic construct
MGGDSIQRQIASATAWSERNGIPLSDVVYRDLGISAFKKVDRPGLRQLTESIRAGIIRQGDYILLERLDRLSRKDLDIAQEEIKSILRMGVNVVAIEDNLELTPESVNDAQALIRIIILAENAHRQSREKSERIKAAYASARQRARDGKAVKRRLPCWLEVKEDTYTFHPVYLPIVQRIIELRHAGRGYSSIAKTLNAEGLPGRIGKSGSGTSKGWTGGSVREIVTSRALYGFYQPHITVEKERDDGTTKRVLQPDGDPIVDHYPPVIGYREWLAIQPTVTAKNRVPAGGYNKTDRLSGVARCAVCGGRVALRIYRRPSKKEGVKEYRHWVCVAGYSSGTCPVTRAFPDLDLMIIKSIGHLEVVSTPVPSTCSTSAVDSIRATIDANKERAEQLKSLLVDPEGGDVGFVYNALSTLQARIKELEAELEQLEKVEVDGCGNTTQEDIDRLAGYVDDVELFNHELRKIISAIRVQHFGKKGFRGVIEQVNGRRVGFVLTAPENPKRGHAKERIEFFARGLGIPEPDVELFPWETEQDD

SEQ ID NO: 19833 - protein, 507 aa, synthetic construct
MKRAISYIRFSSEKQSRGDSLRRQSKMVNDWLKAHPEYYLDQDLSFRDLGVSGFTGKHLKGGLGDFLTAIEKGLVKAGDTLLIESLDRLSRQDVDQASELLRNILRSGVDVVTLSDGEHYTKESLKDPLALIKSILIMQRAHEESLRKAERIQAAWDAKKEAAKAGIKVSKRCPAWLRLNDDRKSFSVIPEKVETVKRCFQLRLEGKSIWEIVRTLNDEGHRSMNQYKPGKFGQTSVQDLLKNRSVIGYFTPKGCEEISGYYPAIIDETTFYKVQQLSHSRYGKRSVSDKPLSVNLFKGVIRCSECGHALIITGFSDTRSGIYRCPLRNENRCSAKGLSRKQTDGTLLTLLSRLDRFDSDTTNTIDTLKLHREHISSNIEKLVQLSLEIEDLNAITSKLKQLKGELSQVDADIEKETQRLKSIDVGCLSDCDLTTKAGRIEAQLIIKSAVKEVVLNAAKRRCKVTFHNSKSITLPITENPSEDVTEAIQSLSEVTERGLIDVDEVII

SEQ ID NO: 19834 - protein, 508 aa, synthetic construct
MKKAIAYMRFSSPGQMSGDSLNRQRRLIAEWLKVNSDYYLDTITYEDLGLSAFKGKHAQSGAFSEFLDAIEHGYILPGTTLLVESLDRLSREKVGEAIERLKLILNHGIDVITLCDNTVYNIDSLNEPYSLIKAILIAQRTNEESEIKSSRVKLSWKKKRQDALESGTIMTASCPRWLSLDDKRTAFVPDPDRVKTIELIFKLRMERRSLNAIAKYLNDHAVKNFSGKESAWGPSVIEKLLANKALIGICVPSYRARGKGISEIAGYYPRVISDDLFYAVQEIRLAPFGISNSSKNPMLINLLRTVMKCEACGNTMIVHAVSGSLHGYYVCPMRRLHRCDRPSIKRDLVDYNIINELLFNCSKIQPVENKKDANETLELKIIELQMKINNLIAALSVAPEVTAIAEKIRVLDKELRRASVSLKTLKSKAVSSLGDFHAIDLTSKNGRELCRTLAYKTFEKIIINTDNKTCDIYFMNGIVFKHYPLMKTISAQQAISTLKYMVDGEVYF

SEQ ID NO: 19835 - protein, 559 aa, synthetic construct
MKTKLYSYIRFSSMRQNDGSSYERQIRMAREIAVKYDLELVNDYQDLGVSAFKGANSKTGALSRFLDAIGRSVPVGSWLFIENLDRLSRADIVSAQELFLSIIRRGITIVTGMDNKIYSLDTVTANPMDLMFSILLFIRGNEESQTKRNRTNSSALIKIKAHQENPQNPAVAIEEIGKNMWWTDTTSGYVLPHPVFFPIVQEVVELRRNGRSTAEILDHLNATYTPPPAASHKRHSNWSRAMIERLFHTRALIGIKEISVDGVKYELKDYYPRVLDDAEFYHLKKSIGVRACNYGDKEEAKPIPLLSGVNLLKCEHCGSAMVKVKGTNKRPNQYRYSCDAMRSSRIACVHTNWSFRGDQLEKAVLQLLADKIWIAEDKANPVPALKVQVDEISRKIDNLIALSAMTGATKELADQITTLNSERETLYNQIKMAEEEMYSVDSQGWEKLAEFDLEDVYNEERLKVRFKIKQALKRIGCSRIDKYKNLFVLEYIDGKTQRVVIENSRGPRKGQIFVDLKTINDRQILESNGLVLHPCLDMLTDKDWKPEEEIPGPLQEFGI

SEQ ID NO: 19836 - protein, 472 aa, synthetic construct
MKRVISYIRFSSERQAKGDSLRRQSKMVTDWLKAHPEYYLDESLTFRDLGVSGFTGKHLKGGLGDFLTAIEKGLVKAGDTLLIESLDRLSRQDVDQASELLRNILRSGVDVVTLSDGEHYTRESLKDPLALIKSILIMQRAHEESLRKAERIQAAWNRKKELISEGIKISKRCPAWLKLNDDRKSFSVIPDKVETVKRCFQLRLEGKSIWEIVRTLNAEGHRSMNQYKPGKFGQTSVQDLLKNRSVIGYFTPKGCGEIAGYYPSVIDETTFYKVQQLSYSRYGRKPASDKPLSVNLFKGVIRCSECGHALIITGFSDTRSGIYRCPLRNENRCSAKGLSRKQTDGTLLTLLSRLDRFDSDMTNTIDTLKLHREHISSNIEKLVQLSLEIEDLNAITNKLKQLKNELSQVDADIEKETQRLKSIDTGSLSDCDLSTKAGRIEAQLIIKSAVKEVVLNTAKRRCKVTFHNGRAM

SEQ ID NO: 19837 - protein, 507 aa, synthetic construct
MKRVISYIRFSSEKQAKGDSLRRQSKMVTDWLKAHPEYYLDQDLSFRDLGVSGFTGKHLKGGLGDFLTAIEKGLVKAGDTLLIESLDRLSRQAVDRASELLRNILRSGVDVVTLSDGEHYTSESLKDPLALIKSILIMQRAHEESLRKSERIQAAWDAKKEAAKAGIKVSKRCPAWLKLNDDRKSFSVIPEKVETVKRCFQLRLEGKSIWEIVRTLNDEGHQSMSQYKPGSFGQSSVQDLLKNRSVIGYFTPKGREEIAGYFPPIIPETDFYKVQQLSYSRYGRKPASDKPLSVNLFKGVIRCSECGHALIITGFSDTRNGIYRCPLRNENRCSAKGLSRKQTDGTLLALLSRLDRFDSDTTNIIDMLRLHREHVSSNIEKLVQLSLEIEDLNAITSKLKQLKGELSQVDADIEKETQRLKSIDVGCLSDCDLTTKAGRIEAQLIIKSAVKEVVLNTAKRRCKVTFHNGKTITLSITENPSEDVTEAIQSLSEVTERGLIDVDVVEI

SEQ ID NO: 19838 - protein, 507 aa, synthetic construct
MKRVISYIRFSSEKQAKGDSLRRQSKMVTDWLKAHPEYYLDQDLSFRDLGVSGFTGKHLKGGLGDFLTAIEKGLVKAGDTLLIESLDRLSRQDIDIASELLRNILRSGVDVVTLSDGEHYTRESLRDPLALIKSILIMQRAHEESLRKAERIQAAWDAKKEAAKAGIKVSKRCPAWLKLNDDRKSFSVIPEKVETVKRCFQLRLEGKSIWEIVRTLNDEGHQSMSQYKPGKFGQTSVQDLLKNRSVIGYFTPKGCEEIAGYYPAIIDETTFYKVQQLSHSRYGRKPVSAKPLSVNLFKGVIRCSECGHALIITGFSDTRNGIYRCPLRNENRCSAKGLSRKQTDGTLLTLLSRLDRFDSDTTNTIDTLKLHREHISSNIEKLVQLSLEIEDLNAITNKLKQLKNELSQVDADIEKETQRLKSIDVGCLSDCDLTTKAGRIEAQLIIKSAVKEVVLNTAKRRCKVTFHNGKLIDLPITETPSDNVTEAIQSLSEVTERGLIDVDEVII

SEQ ID NO: 19839 - protein, 514 aa, synthetic construct
MKKVYSYIRFSSTKQAFGDSHRRQSKAIQDWLANHPDHILDESLSFEDLGRSAFHGDHLKEGGALRAFLEAVKQGLIPSDSVLLVESLDRVSRQSISHAQETIRGILEQGITVVTLSDGETYNRQSLDDSLALIRMIILQERSHNESVIKSDRIKKAWSHKRQQFEQDGTKITGNCPGWLKLNSDKKSFSLIPHHIETIHRIFDEKLSGKSLHAIARDLNLENIPTITNKRVDTGWTPTRVRDLLLKESLIGVSYGVSDYFPPAISKEKFHAVQMIRGQGKGKKPTSRQPSSIDILKGICKCAECGSTLRQRNTKKTPEGRYPRGYLECRNRQLGRCNSKAFNRSLIEDILIQKVFPTLQYLSLKSNGDNISVTTLKADITSLEKGINNLISLAEKGLGDLDTLAQRITNNRVELESKKKDLRQAEAILSLRSDNDIQDSDRKTVEGRIKLQLAIKSFVKEIIFDYDKQEITIRLLNGKSFSGISVAREDKDFDHSSMFEVLQKSLLDVDGVCL

SEQ ID NO: 19840 - protein, 547 aa, synthetic construct
MKLLATYIRWSTKEQDSGDSLRRQTNLIDAFYAKHKDDYYLLPAHRYVDKGKSGFHQQHKAQGSDFRRMFENVMSGVIPEGSLIVVENFDRFSRADIDTAIDDVRQILRKGVSILTLGDGELYDKSALTDPVKLIKHIIIAERAHQESLVKQKRIAQVWNHKTQLARELKKPMGKQAPGWLELSEDGSHYIVDEDKASLVNIIYDKRLSGMSMFAICKWLNEQGYPTINQRKVRISKTKKPDGNWSALSVKHILTSRSVLGYLPAKISTEDRKTVLREEIESFYPQIVTDSKFYAVQQLLEETGKGKTSSGEHWLYVNILKGLIRCKCGLVMTPTGIRKPVYQGTYRCNGNKESRCDYGTVSRKLLDTQLCSRLFSKLSQLHDEATDTAKLDELQRRLNTVDSELEKLTETLIQLPNITQIQEALRVKQGEKDELIVQLSREKARVKSVSSLNLSGLDMESVEGRTEAQIIIKRLVKEIVVSGNEKLVDIYLHNGNMIRGFPLDGKDDHTLTLEEATDEMQPLDDMLIFGEPVTRIYPAGDMEEVDA

SEQ ID NO: 19841 - protein, 507 aa, synthetic construct
MKRVISYIRFSSEKQAKGDSLRRQSKMVTDWLKAHPEYYLDQDLSFRDLGVSGFTGKHLKGGLGDFLTAIEKGLVKAGDTLLIESLDRLSRQAVDRASELLRNILRSGVDVVTLSDGEHYTRESLKDPLSLIKSILIMQRAHEESLRKSERIQAAWNRKKELISEGIKVSRRCPAWLRLNDDRKSFSVIPDKVETVKRCFQLRLEGKSIWEIVRTLNAEGHQTLNQYKAGSFGQTSVQDLLKNRSVIGYFTPKGCEEIAGYFPPIIPETDFYKVQQLSYSRYGRKPASDKPLSVNLFKGVIRCSECGHALIITGFSDTRSGIYRCPSRNENRCNAKGLSRKQTDGTLLALLSRLDRFDSDMTNTVDTLKLHREHISSNIEKLVQLSLEIEDLNAITSKLKQLKGELSQVDADIEKETQRLKSIDVGCLSDCDLTTKAGRIEAQLIIKSAVKEVVLNTAKRRCKVTFHNGRAITLPITENPSEDVTEAIQSLSEVTERGLIDVDEVII

SEQ ID NO: 19842 - protein, 449 aa, synthetic construct
MKQVIGYLRQSTMKQQSLAAQKQAIEAIAEKHHIQHINFYSDKQSGRKDNRSGYRQMTQLIQQGQCDILCCYRLNRLHRNLKNALKLIKLCQTYRVHILSVHDGYFDMDQAFDRFKLNIFISLAELESDNIGEQVRNGLQEKAKQGRLITTHAPFGYEYHNGTFIINQNESPTVKGVFNYYLKGHGYKKIAQLLEEDNTYINRQPYQVRNIIINPNYCGRVNNQYGQFDNMFPSIVSTSIYEQAQRLRSQKQTKQTPSDNQLKQKIKCPCCNATLTNMTVRKKNHTLRYYVCPKNMNASRFVCDFKGINAQTLEDKVLEVCRDFYQNQRIYTKIKSAIDKRIKRQRNIEKHHTLTQEQLIEKLAQGIIDAETFREQTQSLRQQPQRTTSINGHQIQHTIQNIIQKRFTLNILYPYIETIHITKDKNLIGIYFKNEPLNIVNQTMQSSIA

SEQ ID NO: 19843 - protein, 542 aa, synthetic construct
MQQLKTKRVGIYVRVSTEMQSTEGYSIDGQINQIKEYCDFHHFEVKDIYADRGISGKSMNRPELQRMLKDAKEGNIDCVMIYKTNRLARNTSDLLKIVEDLHKQNVEFFSLSERMEVNTSSGKLMLQILASFSEFERNNIVENVFMGQTRRAQEGYYQGNLPLGYDKIPNSKHELMINQHEANIVKYIFESYAKGHGYRKIANALNHKGYVTKKGKPFSISSITYILANPFYIGKIQFAKYKDWSEKRRKGLNDKPVIAEGKHSPIINQDLWDKVQMRKKQVSQKPQVHGKGTNLLTGIIHCPQCGAPMAASNTTNTLKDGTKKRIRYYSCSNFRNKGSKVCSANSVRADVIEDYVMKQILEIVKSDKVIQRVVARVNQENKVDGAALHHDIAYKQQQYDEVQTKLNNLIKTIEDNPDLTSVIRPSIQKYEKQLNDITNQINQLKNQQNEDKSLFDAKQISKLLQHIFQDIKHMEKSRLKALYLSVIDRINIRKDDNHKKQFYVTLKLNNEVIKQVFNDTPLDEVHLSTSSLFLPQTLYLTI

SEQ ID NO: 19844 - protein, 542 aa, synthetic construct
MQQLKTKRVGIYVRVSTEMQSTEGYSIDGQINQIKEYCDFHHFEVKDIYADRGISGKSMNRPELQRMLKDAKEGNIDCVMVYKTNRLARNTSDLLKIVEDLHKQNVEFFSLSERMEVNTSSGKLMLQILASFSEFERNNIVENVFMGQTRRAQEGYYQGNLPLGYDKIPDSKHELMINQHEANIVKYIFECYAKGHGYRKIANALNHKGYVTKKGKPFSISSITYILANPFYIGKIQFAKYKDWSEKRRKGLNDKPVIAEGKHSPIINQDLWDKVQMRKKQVSQKPQVHGKGTNLLTGIIHCPQCGAPMAASNTTNTLKDGTKKRIRYYSCSNFRNKGSKVCSANSVRADVIEDYVMKQILEIVKSDKVIQRVVTHVNQENQVDGAALHHDIAYKQQQYDEVQIKINNLIKTIEDNPDLTSVIRPSIQKYEKQLNDITNQINQLKNQQNEDKTLFDAKEISKLLQHIFHDIKHIEKSRLKALYLSVIDRIDIKKDGNHKKQFYVTLKLNNEIIKQLFNNKQLDEVHLSTSSLFLPQTLYLTI

SEQ ID NO: 19845 - protein, 449 aa, synthetic construct
MKQVIGYLRQSTMKQQSLAAQKQAIEAIAEKHHIQHINFYSDKQSGRKDNRSGYRQITQLIQQGQCDILCCYRLNRLHRNLKNALKLIKLCQTYHVHILSVHDGYFDMDQAFDRLKLNIFISLAELESDNIGEQVRNGLQEKAKQGRLITTHAPFGYEYHNGTFIINQNESPTVKAVFNYYIKGHGYKKIAQLLEEDNTYINRQPYQVRNIIINPNYCGRVNNQYGQFDNMFPSIVSTSIYEQAQRLRLQKQTKQTPSDNQLKQKIKCPCCNATLTNMTIRKKNHTLRYYVCPKNMNASRFVCDFKGINAQTLEDKVLEVCRDFYQNQRIYTKIKSAIDKRIKRQRNIEKHHTLTQEQLIEKLAQGIIDAETFREQTQSLRQQPQRTTSINGHQIQHIIQNIIQKRFTLNILYPYIETIHITKDKNLIGIYFKNEPLNIVNQTMQSSIA

SEQ ID NO: 19846 - protein, 542 aa, synthetic construct
MQQLKTKRVDIYVRVSTEMQSTEGYSIDGQINQIKEYCDFHHFEVKDIYADRGISGKSMNRPELQRMLKDAKEGNIDCVMVYKTNRLARNTSDLLKIVEDLHKQNVEFFSLSERMEVNTSSGKLMLQILASFSEFERNNIVENVFMGQTRRAQEGYYQGNLPLGYDKIPDSKHELMINQHEANIVKYIFECYAKGHGYRKIANALNHKGYVTKKGKPFSISSITYILANPFYIGKIQFAKYKDWSEKRRKGLNDKPVIAEGKHSPIINQDLWDKVQMRKKQVSQKPQVHGKGTNLLTGIIHCPQCGAPMAASNTTNTLKDGTKKRIRYYSCSNFRNKGSKVCSANSVRADVIEDYVMKQILEIVKSDKVIQRVVTHVNQENQVDGAALHHDIAYKQQQYDEVQIKINNLIKTIEDNPDLTSVIRPSIQKYEKQLNDITNQINQLKNQQNEDKTLFDAKEISKLLQHIFHDIKHIEKSRLKALYLSVIDRIDIKKDGNHKKQFYVTLKLNNEIIKQLFNNKQLDEVHLSTSSLFLPQTLYLTI

SEQ ID NO: 19847 - protein, 481 aa, synthetic construct
MITTNKVAIYVRVSTTNQVEEGYSIDEQKDKLSSYCDIKDWNVYKVYTDGGFSGSNTDRPALESLIKDAKKRKFDTVLVYKLDRLSRSQKDTLHLIEDVFIKNGIEFLSLQENFDTSTPFGKAMIGLLSVFAQLEREQIKERMQLGKLGRAKSGKSMMWAKTSYGYDYHRETGTITINPAQALTIKFIFESYLRGRSITKLRDDLNEKYPKHVPWSYRAVRTILDNPVYCGFNQYKGEIYPGNHEPIISKEEYDKTQSELKIRQRTAAENVNPRPFQAKYILSGIAQCGYCGAPLKIMLGVKRKDGSRLKKYECHQRHPRTLRGVTTYNDNKKCDSGFYYKDKLEASVLKEISNLQDDADYLDKIFSGDNAETIDRERYKKQIEELSKKLSRLNDLYIDDRITLEELQSKSAEFISMRGTLETELENDPALRKNKRKADMRKLLNAEKVFSMDYENQKVLVRRLINKVKVTAEDIVINWKI

SEQ ID NO: 19848 - protein, 595 aa, synthetic construct
MNTKVKLIKASNTGARNRNALHLDLKRVAAYCRVSTDSKDQLESYKSQVDYYTNLIKNNKNWTLAGIYADEATTGTTTTKRADFMRLISDCQNGDIDMIITKSISRFARNTLDTLKYVRLLKENNVGVVFEEENIDTLTMDGELLLTILSSVAQQEVENTSAHVKKGLKMKMEKGELIGFQGCLGYDYDPITKSISINEEEAKIVRYIFKRYLEGNGGSVIGRELEEKGYLTPRGKTNWSDTTVLGVIKNEKYIGDILMGKTFTVDPITKRRLANFGESDKYHIENHHEPIISKEDFEKAQEIRLRRAQNRNTIANKDRKREKLSRQYAFSSMLECGFCGEILSRRTWHTSSIYKKINWQCVKSTKKGKKYCSHSKGIQEAAIEKAFVESYRQLCHADSTVIDDFLKIVEEEINDNTLVKDLKKIENQLNRIISQERKLVDLHLEDSIDEEVYAKKYKKLTKQKEELLDEKKTLELTIKDEDSIKERLKQFKKVLENKEIIEEFNRTVFESIVDKVVVGRIDKDGTVHPYDLTFYFKTGVKDSQDSNNFKDKRKNAKDNDINKLCSYKNDEDKKLCSQSKDNTRRVRSVANQGVR

SEQ ID NO: 19849 - protein, 457 aa, synthetic construct
MRVACYDRTSVYEEAKISNDAQYDAVKEYILEKYEQIPQRFSDKGESGGKADRPAFRQLRAWVCASEEEGVIYVWRYDRLARQAQIALEFIELCQQHQVQVCSISEPLPASFSHASMNKLFVQLLFTFAEQQRNVIIENVRAGLAYKKQQRQYLSSAVPYGYRLVNGEIQQEAHEAKVVRHIFQLYLTKKYGYKKLCQRLTQQKFFFRERPFQPYHIYSILKNPLYYGEIKGGSLGKYLGTFEPILSKATFLQVQEIRQSRCTAKKDTYPYLLRQKIKCPFCGRHLSSKYQWNTKKTKTLHYYHCTDRSCQGIFLRAERVESEVLEKIQAFFQHEGVYQALITQLTQQLAEKRKDEKHKVIQQKKQEAQWLKAFEEGNCSLEELKQQLQALQKPRSTSSFLSLQQCEAKVKEWLQLKDLSSRQLLCDHVCRIEVTKEKTVCGIYFRQLTQNILEGNE

SEQ ID NO: 19850 - protein, 457 aa, synthetic construct
MRVACYDRTSVYEEAKISNDAQYDAVKEYVLEEYEQIPQRFSDKGESGGQADRPAFRQLRAWVCASEEEGVIYVWRYDRLARQAKIALEFIELCQQHQVQVYSISEPLPASFSHASTNKLFVQLLFTFAEQQRNVIIENVRAGLAYKKQQRQYLSSAVPYGYRLVNGKIQQEAHEAKVVCRIFQLYLTKKYGYKKLCQRLTQQKIFFRERPFQPYHIYSILKNPLYYGEIKGGSLGKYLGTFEPILSKATFLQAQEIRQSRCTAKKDTYPYLLRQKIKCPFCGRHLSSKYQWNTKKTKTLHYYHCTDRSCQGIFLRAERVESEVLEKIQAFFQHEGVYQALIAQLTQQLAEKRKDEKHKVIQQKKQEAQWLKAFEEGNCSLEELKQQLQALQKPRSTSSFLSLQQCEAKVKEWLQLKDLSSRQLLCDHVCRIEVTKEKTVCGIYFRQLTQNILEGNE

SEQ ID NO: 19851 - protein, 545 aa, synthetic construct
METTPAKRVALYIRVSTQEQALEGHSIQAQEQNGRQFAERMGYEVVEVYADEGISGKSTKNRFAYQRMMNDARNHRFDLLVIWKLTRLGRNMLDVLQTVEELLRYDVGLHSISEQFDVTTSTGKLMLQLLGSFGEFERNQIAENVQMSMQSLVKDKKRYAGGRRLGYVSGIDTNGQKQLVIEPEEAKIVRLIYAKYLGGAGYRAIANFLNRQGYQTVKKNAFSTTAVKDILRNKIYAGYLEYARYINWETKRRKGKNPKPILVKGTHEPIISEEDYQKVQERFALEGKQPKWNHTGENVLTGLLRCPECGAPMAASNVTNTLKDGTKKRIRYYSCSVFRNKGASVCHANSIRAEQAETFVADRLKEIIQLPEVLPRLVAALNEEIARQSQPLEQELVVLLERKEELKTKIEKWEAALEDSPELFPMLKDRLDELTEKRRQLHIRENEILGIFQQQGEPIQVKDVQRILTSLDRFLAQSEKKQVKALYRTFIEKITFDPNHKEILEITMKFTPAVVQQLNEQYQIAVSKTKDTAIFVLKTPFTLTI

SEQ ID NO: 19852 - protein, 573 aa, synthetic construct
MAKIKLPDKPRVAIYTRVSTLHQIDKDSLPMQRQDLINYARLILNTEDYVVYEDAGYSGKNTDRPKFQEMMQQVRLGMFTHILVWKIDRISRNLLDFATMYSELKQLGVVFVSKNEQFDTSSAMGEAMLKIILIFAELERNMTSERVTAAMLSRAVNGQWNGGRVPLGYDYDPETKTFTINESEAAVVKIIHDKYEQERSLVSLARYLNGHGYRTRTGCTYSPSTLLIILRNVFYCGDYRYNVLKDGDRQKRKKESEWITVKDHHPAIISREQKDEIARILKENRRLECERRGIYSKKKNVHVFGGLVICGNCGHAMTSTIRPADQDGIRWSVYVCPTKRRSEYLCKGRATSEVVLGEFVFNYILNMLNVQKNFDSINSVEDMEKMLLSGSTFRDVDGIERAGLDDLYNMLASGLTEKAPFDSSVEVRKKPVVSDIELENLNTEKTKIERAAERLQSLYLYSDDSISQKDYIIQREKLMSQLAEVNEQIGMVMSNADEKDVSDEEFVHAASKFILTQKLEGRTYIYYKRLATTVSREVLRSFVMSIIENITIYDGRVQTIVFKNGLSHTFILK

SEQ ID NO: 19853 - protein, 452 aa, synthetic construct
MKAAIYIRVSTQEQIENYSIQAQTEKLTALCRSKDWDVYDIFIDGGYSGSNMNRPALNEMLSKLHEIDAVVVYRLDRLSRSQRDTITLIEEYFLKNNVEFVSLSETLDTSSPFGRAMIGILSVFAQLERETIRDRMVMGKIKRIEAGLPLTTAKGRTFGYDVIDTKLYINEEEAKQLRLIYDIFEEEQSITFLQKRLKKLGFKVRTYNRYNNWLTNDLYCGYVSYKDKVHVKGIHEPIISEEQFYRVQEIFSRMGKNPNMNKESASLLNNLVVCSKCGLSFVHRRKDTVSRGKKYHYRYYSCKTYKHAHELEKCGNKIWRADKLEELIIDRVNNYSFASRNVDKEDELDSLNEKLKTEHVKKKRLFDLYISGSYEVSELDAMMADIDAQINYYEAQIEANEELKKNKKIQENLADLATVDFNSLEFREKQLYLKSLINKIYIDDEQVTIEWL

SEQ ID NO: 19854 - protein, 560 aa, synthetic construct
MSKEKIKVYLYTRVSTSIQIEGYSLEAQKSRMKAFAIYNDYEIVGEYEDAGKSGKSIEGRIQFNRMMEDIKSGKDGVSFVLVFKLSRFARNAADVLSTLQIMQDYGVNLICVEDGIDSSKDAGKLMISVLSAVAEIERENIRIQTMEGRIQKAREGKWNGGFAPYGYKLEDGKLFINEEEAIAIRTIFDQYVNTTIGANGISKYLENHGIRKIPRQNGKNPLFDAGLIRKILKNPVYNGKIAFGRRTLEKVHGTRNEYKQVEQDEYLISEGIHEAIVSDEVWQAAQVKLKSQAKKYEHVNKGKDTRTHLLSGIVKCPICGVGMFGNKCIKKKKDGTKYKDFYYYGCKHRQMIRGHKCTFRKQIREELLDDAVAEVIVKIVSNPKFASMMQEKINMKVDTSEIETEIDNYQKELRKCHSTKFKLIEEIDNLDVEDKHYKRRKQDLDDRLYRMYDKIDELESSLIDAKAKKQTIEAEKLTGDNIYKVLIYFDKLYKVMNDVERRQLITALISEIQVYEEKQPNGQWLKSITFKLPIIEENLNIGLDNDEHVECVVLLQRSKE

SEQ ID NO: 19855 - protein, 539 aa, synthetic construct
MSRTKKYVAGLYCRLSKDDGNSVESMSIWSQKVMLKQFAESNSIAIYDYYVDDGYSGTNFERPSFKKMITDIENGKINCVITKDLSRLGRNYLQSGAYIEMYFPQKNIRYIAITDGIDTLNSNQNDIMPFKNILNEMYAKDTSKKVKSAIQSRMREGTYIGSKAPFGYLKDPNNKRRLIIDEKTKPIIELIYKLCLEGKGTQLISQELMKRKIPRPSAFVENAEKLYGLTEENKYQWSHRMVLNVLRDPVYCGNMARNKRPTLSFKNSKRMYIPKSDYIYAKDTHEGIVSEEIWEQVQTMVDKRKCNNKKGLYYDNIFQGLVRCPKCGYALTPKTDYRLKKKELIDFVHFSCSTYKKYGVNACSSHRIEARDLYNIVLEDIQYHGNMALSAKEDFVEKIIEKIEVEKIDEGKELSNKLELKKNQLAELDRSYEQLYEDRLEGNITERNFNLMNVSISKKQDKLIEEIKVLEGDIEVSFETEDNYKKFMDNISKYAKIKSLNRYILNQIIDKIYVYDKEEIDGQISQKVEIHYKFIGKLN

SEQ ID NO: 19856 - protein, 520 aa, synthetic construct
MKNVTRIDQVDLSIFKKLRVAAYCRVSTDSDEQELSLDTQRNHYESYIKANSEWEYAGIYYDDGISGTKTAKRNGLLRLVEDCEKGLIDLVVTKSISRFSRNTTDCLALVRKLLNYDVYIIFEKENIHTGSMESELMLAILASMAESESRSISENEKWSIKKKFQNGTYVISYPPYGYANVDGEMVIVPEQAEVVKEIFAGCLAGKSTHIIAKELNEKSVPTKKGGKWTGGTINGILTNEKYIGDALFQKTITDAAFKRKRNYGEEEQYYCEDHHEAIIDRDTFEKAKEAIRQRGLEKGNCSEDTSKYQNRYVMSGKIKCGECGRSFKRRYHYTSNGRSYNAWCCGGHLEDSKSCSMKYIRDDDMKRVFLTMMNKLRFRNDLVLKPLLIAITTDNSKKNIHSIEEIEKEMAANEEQRKQLNTLLTRGYLERPVFAEAHNKLIIEYEHLIAKRDLLYRMDDAGYSMEQKLKELVEFLNGAEPFTEWDDSLFERFVEKVRVLSRDEIEFELKFGLKLKERID

SEQ ID NO: 19857 - protein, 524 aa, synthetic construct
MAGAKNVTVIPARKRVGNNATADNKPKLKVAAYCRVSTDSEEQATSYDAQVEHYTEFIRKNPEWEFAGIYADDGISGTNTKKREEFNRMIEDTMAGKIDMIITKSISRFARNTLDCLKYIRQLKEKNVPVFFEKENINTMDSKGEVLLTIMASLAQQESESLSKNVKMGLQFRYQNGEVQVNHNWFLGYTKDENGHLIIDEEQAIIVRRIFREYLQGASLKSIADGLMEDGIPTATGNKKWRGDGIRKILTNEKYMGDALLQKTYTVDVLTKKRVSNNGIVPQYYVENNHEAIIPRQLFMQVQEELLRRAHLKTEGGKTKRVYSSKYALSSIVYCGECGDLFRRVAWKARGTSYNKWRCASRIEKGPKEGCDADAISETEIQNAVVRAINKTLGGRVQFLVQLQHNIEDVLNGDSTATLEYIDQRMAELQEKLVMCVNKNAEYDVIANEIDALREKKAAVVTKDAEQEMLRKRINEMREFLQTQTNRITEYDEQMVRRLIEKITVFDDKLIFEFKSGMTLELKR

SEQ ID NO: 19858 - protein, 452 aa, synthetic construct
MKAAIYIRVSTQEQIENYSIQAQTEKLTALCRSKDWETYDIFIDGGYSGSNMNRPALNEMLSKLHEIDAVVVYRLDRLSRSQRDTITLIEEYFLKNNVEFVSLSETLDTSSPFGRAMIGILSVFAQLERETIRDRMVMGKIKRIEAGLPLTTAKGRTFGYDVIDTKLYINEEEAKQLQMIYDIFEEEKSITTLQKRLKKLGFKVKSYSSYNNWLTNDLYCGYVSYADKVHTKGVHEPIISEEQFYRVQEIFSRMGKNPNMNRDSASLLNNLVVCGKCGLGYVHRRKDTVSRGKKYHYRYYSCKTYKHTHELEKCGNKIWRADKLEELIIDRVNNYSFASRNVDKEDELDSLNEKLKTEHAKKKRLFDLYISGSYEVSELDVMMADIDAQINYYEAQIEANEELKKNKKIQENLADLATVDFDSLEFREKQLYLKSLINKIYIDGEQVTIEWL

SEQ ID NO: 19859 - protein, 548 aa, synthetic construct
MIQTNSNHFSFKAAIYCRLSKDDEQKGESASIQNQKELLENYVKSRGWSIYDVYIDDGYTGLNTNRPSFQRLIRDIENKKVDIVITKDLSRLGRNYLQTGYYTENFFPKNNVRYIALNDGVDTFQENNEIVPFKNVLNEFYSRDVSKKMKSAYMTRARQGKFIGCLAPIGYRKDNEDPHKLVIDDETSWIVEKIFDLAFSGYGVQAIRRRLFEEKIPTPTWWNRKKGLRNKKTKLEMTVDGGEYWWDCTTLKEIIENPVYIGHIASQKVNYKFKVGWLSDKPKEEWIIVENTHEPIISEDIYNIANEKLKSRRRPFKNGEESIFAGIVKCPDCGKSLNLGRNKSKKREKLLTCNTYRRYGKSLCSQHRIYYDTLYEIVLKDIRKNAEIALKDEKEIIKALEKSREIDNEEEQKFIMDKIYEDQIRVEDLTKKIERLYDDWLDNKISESNFQKILEKSQKEQDYLNQRIEDNQKLIVKEDLEDINVKKWIELIKKHRDIKKLDKETLNELISKIYVHEKEVVNGEITQTIDIYYNFIGNTDTLHVFYNL

SEQ ID NO: 19860 - protein, 545 aa, synthetic construct
METTPAKRVALYIRVSTQEQALEGHSIQAQEQNGRQFAERMGYEVVEVYADEGISGKSTKNRFAYQRMMNDARNHRFDLLVIWKLTRLGRNMLDVLQTVEELLRYDVGLHSISEQFDVTTSTGKLMLQLLGSFGEFERNQIAENVQMSMQSLVKDKKRYAGGRRLGYVSGIDTNGQKQLVIEPEEAKIVRLIYAKYLGGAGYRAIANFLNRQGYQTVKKNAFSTTAVKDILCNKIYAGYLEYARYINWETKRRKGKNPKPILVKGTHEPIISEEDYQKVQERLALEGKQPKWNHTGENVLTGLLRCPECGAPMAASNVTNTLKDGTKKRIRYYSCSVFRNKGASVCHANSIRAEQAETFVADRLKEIVQLPEVLPRLVAALNEEIVRQSQPLEQELVVLLERKEELKTKIKKWEAALEDSPELFPMLKDRLDELTEKRRQLHIRENEILGIFQQQGEPIQVKDVQRILTSLDRFLTQSEKKQVKALYRTFIEKITFDPKQKEILEITMKFTPAVVQQLNEQYQIAVSKTKDTAIFVLKTPFTLTI

SEQ ID NO: 19861 - protein, 452 aa, synthetic construct
MKAAIYIRVSTQEQIENYSIQAQTEKLTALCRSKDWDVYDIFIDGGYSGSNMNRPALNEMLSKLHEIDAVVVYRLDRLSRSQRDTITLIEEYFLKNNVEFVSLSETLDTSSPFGRAMIGILSVFAQLERETIRDRMVMGKIKRIEAGLPLTTAKGRTFGYDVIDTKLYINEEEAKQLQMIYDIFEEEKSITTLQKRLKKLGFKVKSYSSYNNWLTNDLYCGYVSYADKVHTKGVHEPIISEEQFYRVQEIFSRMGKNPNMNRDSASLLNNLVVCGKCGLGYVHRRKDTVSRGKKYHYRYYSCKTYKHTHELEKCGNKIWRADKLEELIIDRVNNYSFASRNVDKEDELDSLNEKLKTEHTKKKRLFDLYISGSYEVSELDAMMSDIDAQINYYEAQIEANEELKKNKQIQENLADLATVDFDSLEFREKQLYLKSLINKIYIDGEQVTIEWL

SEQ ID NO: 19862 - protein, 560 aa, synthetic construct
MSANQNQASMSPRVRVIPAQGRTDRNKEHYDGRKKRIAAYARVSTLEEHQSSSYELQVAYYTEYIQKNPAWEFYKVFADEGISGTSIKNRTGFQEMIQAAKDGKIDYIITKSISRFARNTLDCISTVRLLKNLPKPCGVFFEKENIDTLDGKSELLLALLASTAEEESKNISMNTIWGVQKRFSQGHIHCPTVYFMGYDTDEDGNIVINEEQARIVKRIFKEYLEGKGTLSIAKGLMKDGILTARGNAVWTSYSVYLILKNEKYMGHCLAQKTVTIDYLSHKRVINRNHQPQYYIKNCLPAIISEDDWNAVQRELKRRKSMLINPKGKYAMNYSNVSPFSNKLFCGNCGRPVTRRRITSRRKGEKYYYSAWHCKLASQKIKTDEKCGSKYVSEDELEKAIMKMLYDLKENNEDLMQDANQAIYECSLTQVEEERLEELKKQIEAVTDKISELASRESSGSSSIYDATLRHLIYEQEILQMECEGLEKNRQDSIYLKKHLEELLECLDEIEGPAGAFRGDIFKRVVESGTLNENYEIAFKLKCGISRTAFASNRKKINSKK

SEQ ID NO: 19863 - protein, 545 aa, synthetic construct
MQNGVYSRAIRRDESSRGYEMPVLANHTSLARTFTDAEIDASKPKKLRVAAYCRVSTADEMQQHSLENQTIHYTNSIRTNPDYQFAGVFLDRGKTGTSTVNRYGFNKMIRHALEGKIDLILCKSVSRFSRNVVDTLNIVRLLKENGVRVRFEKEGIDTGSMQNAFMLTLLSAVSEDESRNISENLNWSLAKRFERGEPIFVRMLGYTKKGREKWIVVEEEAKIVREAFEECLKGSSAAKIARMFIEKGYKKANGRTDWSSLAVRDILRNERYVGDVLCQKTYTRDYLSHKRLPNEGQRSKYLLRNNHEAIVSREVFEEVQRIVSIGSEKTKRGEKKTYPLSERVICGECGGNLHRYISRGVVRWRCDNRKKSRLLCEMSGVKEEDIVELASKALCEKYQLNKNGNGTHMIIKLMKELQSAAASIDFEQSRLRLDLERALLEESEAVLSLSDMSTPKEKRIAIEKMISEKEKWWRLLEADELYRKEAIEILESLKSKSQPEKELKECLNDIRFLRAWVVRIKAISPILFSIEWVSGDKTQVRKGEN

SEQ ID NO: 19864 - protein, 531 aa, synthetic construct
MSHPKEVKIVRKVTKIVGNNALITMQPKLRVAAYCRVSTDSDEQLVSLEAQRTHYEAYIKANPNWEFSGIYYDEGISGTKKEKRTELLRLLADCENKRIDFIVTKSISRFARNTTDCLEIVRRLNEIGVSIYFEKENINTQSMDSELMLTILSSLAENESVSISQNNKWSIKRKFQNGTYKLSSPPYGYDYADGQLHVNAEQAEVVRRIFSEALSGSGTKKIANGLNAEGIPPQRGELWTSTSIRGILGNEKYTGDAIFQKTYTDKYFNKRYNNGEKDQYYIQNHHEAIISREDFEAVNEALLQRAKEKGIEIGTAKYQNRYLFSSRIKCSECGNTFKRRVHHGVPNKYIAWCCSKHLNDISACSMKFIREDSIHQAFITMINKLIFGRKWVVKPIIDSLKAASPADNRRRLKELEAKLEENAERRCALSNLAGKQYLDSAVFSSWQKELINDAVKLKDERDNLIHFEQDVMTKMSEVAKLMRYVSKPENELDSFNEELFKTFVEEIDVISQTEIAFKLKCGLTLKERLVR

SEQ ID NO: 19865 - protein, 522 aa, synthetic construct
MESKSVTVIPARKRVGNSKNPEQKRKLRVAAYCRVSTDTEEQASSYEVQIEHYTGFIKSNAEWEFAGIFADDGISGTNTKKREEFNRMIEECMAGNIDMVITKSISRFARNTLDCLKYIRQLKEKNIPVYFEKENINTMDSKGEVLLTIMASLAQQESQSLSQNVKLGIQYRYQQGQLHVNHSRFLGYTKDEKGQLVIVPEEAEIIKRIYREYLEGSSMLQISRGLEADGILTGAGNPSWHTSTVNKILRNEKYIGDALLQKTYTVDFLTKKRVLNTGIVPQYYVENNHEPIIPREIFMQVQEELIRRRCVHQSKNGTKRSYSNNHPFAQMVFCGNCGEVFRRVHWNNRGKKSIVWRCVSRLENTGLFCDASTLPEEVLKEKTVEAINIIIEGKDGYIATLQKNIETVLSEEFDQNTDGIDKRLEELQNQLLQLASTKTAYDDVVNEIYQLRDLKQDALNRNAARQAKRQRSAELAAFLEEQCSEPIEFDEKLNKRLIEKITAYDDRLVVEFKSGLEIEVSL

SEQ ID NO: 19866 - protein, 442 aa, synthetic construct
MTRIIRKITPKAPKAPIKKRVAAYARVSSGKDAMLQSLSAQISYYSEFIQKRYDWEYAGVYADEAATGTKDNRKEFQRLLSDCRSGKIDMVITKSISRFARNTLTVLETVRELKGISVDVYFEKENIHSISGDGELMLTILSSFAQAESLSVSENCKWRIRKRFAEGELVNLRFMYGYRIEKGRVEVNQKQAKIVRMIFNDYISGLGCTAIANKLRRMGIQSLRGGIWNSDIVAQIIKNEKYIGNALLQKKHVSNHLTKKLIANKGVLPKYYAEGTHPPIIDAATFQLAREIMAKNWILNEGKKAAGTYPFTSKIKCGKCGKNYKRKTTHGQAFWNCSTHIKYGKEVCHTKRIPESILCLVAANALGIEEFDEVTFNRQIEEIQIPDANLLLFVFNDGRTDLREWQSKSRSESWNEEAREKARMRQIEYLEGRKGECVRHVQ

SEQ ID NO: 19867 - protein, 529 aa, synthetic construct
MRTARAVRMIPATAKLHEPVANNAIGQKRVAAYARVSTDNDEQLSSYEAQVDYYTRHIKSNPEWDFVEVYADEGISATTTKRRDGFNRMIADALDGKIDLIITKSISRFARNTVDTLTAVRQLKEKGVEVRFEKENICTMDSKGELLITIMSSLAQEESRSLSENVTWGQRKRFADGKVSLPYKQFLGYEKGDDGLPKIVKKEAEVVRLIYKLYIEGKTMAGIARHLIEKGIPTPGGKKKWQSSTVMSILKNEKYKGDAILQKTFTVDFLTKKKKVNEGEVPQYYVENSHPAIITPEAFDLVQSEIKKRREAKGYKTGGSCFSGKIICGECGSFYGSKVWHSTTKYRRTIWQCNHKFKNDRRCKTPHLYEDKIKEVFVEAFNEIINNKDEFLQCYEDMTKALTDTSTLDREIAKSQEELEIVAELLRKCVQENANSVLNQEEYQQRYSDLYQRYDNEQKRIAEINDKRREHNGKRESIMEFICRLEQSKTLLTEFDEGLWNATVEAIKVHSENNVSLIFKDGTELELNI

SEQ ID NO: 19868 - protein, 530 aa, synthetic construct
MKMITKLEAKQPDNSLRKIRVAAYVRVSTDSDEQLLSLEVQKEHYENYIKSNPCWEYAGLYFDEGISGTKIDKRESLKQLLKDCENGQIDRIITKSISRLARNTVDCLEIVRKLTGLGIYLYFEKENIDTEHMSSELMLSILSSIAQSESKSISENNTWSIQKRFENGTFVIPCPAYGYKNENKKMIIVPEQAKVVKEIFNMALSGMGGKAIARVLTDKKIPTKKGGNWTSTTVNAVLTNKTYTGDVIFQKTFTDDSFNRHKNCGEKKQYVIENHHEAIISHETFNNVHELRQKRKLKLNITSGSNKYLARYVFSGKLYCGNCHSRLKKHDRHKKDGAYTVWCCTKHIREIKCCPMKAVKEEYVKLAFLQMLNKFKATSAQILAPFIKSLRNVNSKDGLNKVIELEEKKLKLQEQEQVLSKLFAGGYIEMDSYYLESNQLKTEMDTCLKEKLQLSNSLNGNLTHLNEAQKLQRFVSVTEVFSEFKDEDFMDFVDDVVVKSRTEFIFHLKCGLELEEEVKETWHTSHMVTE

SEQ ID NO: 19869 - protein, 525 aa, synthetic construct
MNANVTIIPPRKIAGNTVDKHEDKPRLRVVAYCRVSTDSEEQATSYDTQVQHYTDYISRNPLWEFAGIYADDGISGTSTKKRVGFNDMIHDCMSGKVDMVITKSISRFARNTIDCLKFVRQLKDKNIPIIFEKENINTMEASGELLLTIMASLAQQESASLSQNVKLGLKFRYQEGKVQINHNWFLGYTKDDEGNLVILEQEAKVVRRIYREYLEGLSLRDIAEGLEKDGIKNGAGHLKWHLSNIKTILQNEKYIGDALLQKTITTDFINHVRIKNDGTEPQYYVKDSHASIIPRDIFFKVQEEMVRRANMFSGEENKKRRVYSSKYALSSLCVCSKCGDVYRRIAWNNRGVRSVVWRCCTRWENGPSACDAPTVKEEELQSATVKAINKVFSIPDEVLGTLNNNIREIIAGNNLSELETVDKRIADKQAILLTLLKAKKDYTKIADEIDELKGKKQQLLIEKAGQEDAKRRIREMEDFLKSECHDISEYDEKLVRKYIKKIKVYEDRFSVTFKSEISVDIERAS

SEQ ID NO: 19870 - protein, 475 aa, synthetic construct
MEINKLKAALYVRVSTTEQANEGYSIQAQTERLINYAKAKDYFIIKTYTDPGFSGAKLDRPALQEMMKDIENNQIDIVLVYKLDRLSRSQKNTLFLIEDVFLRNNVDFVSMQESFDTTSAFGRAMIGILSVFAQLERDTITERMGMGRTERAKEGYFHGGGSARIPVGYDYIDGLLQVNEYEAEIVRSIFELYNSGKGVNSISNEIRDKFPSKRKFGVSLIRSILTNNLYVGLIKFNDGVYEGKHEPIISKDIFDKAQNEFKRRTTGKLKLFTSKYLLTGITYCGHCGARVKGTGSSKLKDGTRLSYYSCYSRAGSPSHMVKDLNCPSKINRTEILDEYVISQMKEITKTDISIEIDSEFTDDSDTDNTVIQNEIKSIEDRINKLLELYQFGNVPLDVLNSKINSLNSEKSKLNEIINESATEIIDDTIDKVEIFNNLKKVDWNTITHEETKTIISKSIEKITIFNEKIEIEWKF

SEQ ID NO: 19871 - protein, 455 aa, synthetic construct
MIVVYRVDRIVRRLFDLADLIRWCQEHRVALVSATEAFLDLTAPFGDIVALLVAKVAEMELAAISERNRSAAQHNLRAGKYRGGPAPWGYVPVHTDEGWKLAHDPDQVVVIHEVVERVLAGEPLRSVAHDLTERGVLTPRDRFAQLRGREVKGYAWHPGGLKRALTSPTLLGRVVISDTTSGAQDRTEALLVGDDGAPVVRADPIITRDVFDRVGAELAGRENRKEPTKRSTSLLLGVIFCDVCGKPAYKLKGGTGRKPRYRCASAQYKNPCSNRSIPLEWAEDELERRILKNLGSFERRQRVWFPGEDHSSELQEVNDLLADLTDQIGVGQFKRGTPQRARLDQRIAALTTRQAELSASPTEPAGWRYEPTGELFSEWWEASDTEARNVWLRQMGFRVVWRSHSEGTRTVVDEFKLDGDLSMDLDADWLFGPIADVVGALSDPANIEAYNALPE

SEQ ID NO: 19872 - protein, 459 aa, synthetic construct
MSTTHFYSHYPTIEYKTCALYVRCSKEEQAKFGDTIEAQIEDLKAFAKLHHLKIYAIYVDEGHTARKKYNKRKEFMRMLQDVELHKFEYIIFTKLDRWFRNIADFYKIQEILDNNGVTWLTALERYEMETTNGKLNVNIRLSVAQDEADRDSDRIKDVFRLKVKKGEAITGSLPIGLMVGEDGKVAIDPDTVQIAYDMFDYFEAHNSKRGTLLYLIDKYNRYFCYETIARALRNPLYKGEYRGNPDYCPKIIDPARFDRIQVLGKRNVKVRKNNRYYVFSGLAQCKECGHALVANTTVQKRYNREYTQYRCNYYSNSHLCTHSHGMNEKAIEKYLLDNIKPELEKYVTAYEVKQNAPTKKADPSKIKTKMQRLKELYVNELIDLDDYRIEYEQYKQELDKLTSTAAPEAKDLSAIRSFLDLDLQSIYDSLTPQEKRTLWSSIIDKIIISDSGDIEIVFL

SEQ ID NO: 19873 - protein, 465 aa, synthetic construct
MTNYRKLRVATYTRVSTLEQAEEGYSIQEQQDKLEKYCELKDWTITHRYSDPGFSGSNIKRPGIRELIAAAKQGDFDLVLVYKLDRLSRSQKDTLYLIEDVFQANQVDFVSLSENFDTSTPFGKAMIGILSVFAQLEREQIKERMTMGKIGRAKSGKAMGWSNVPFGYNLVGDVYEVDEFQATIVKRIFSEYLSGDSPITIAKRLNDEGHLGKGTRWSWKTVRDILMNIVYTGYISFKGELYPGMHKPIIDMETYKNAQTQLEIRRVNADNPRPFRAKYMLSGLLKCYYCGSTLRIGVSINQRTKARSYRYNCPSSHPRKKSTYKQKATCPSKLVRKGEIEKQVIEEIEKLPKNFKHKKAPTVDVDAVKKQIKAIKSKQSKLMDLYLIDGIDMEELNRRNGEFNKQIEALNKNLSAVPTEPDVAEALSQAKNISELSYDEQKKLVRLLISEIEVANDSIKIHWRF

SEQ ID NO: 19874 - protein, 676 aa, synthetic construct
MRTVIYARFSSHLQNSRSIEDQISVCRERCEREGWTILDIFTDYAISGAAGISESQRPGLAAMLARVEAGGIDQVLAESTDRIARHQGDSFAIRERLSFARARLFTLSDGEVNDISGTFKGLMDAQFRKELGAKIKRGQKGTVAAGRSPAGLAYGYRTANKIDATGRPVRGLREVDPDQSAIVQRIFRMFVDGQSARTIAGILNREGVPGPRGSIWRSSTISGDGPRGNGILRNELYIGRLVHNRTSKVVNPATRKVAIRVNPSTEWIVEEVPHLRIIDQKDWDATRNRFDHTAQKPLHRRVRPRRMLSGLGQCGVCGGSWIVVSDERWGCKTNRSDASCTNSATISTKRYEERVLAGLKTKMLDPDIVAIFVKEYHEEYARRAAETRRDTARLQRIMDDADRKVARLVEAIASGGGEFAEVKDALAKARIDREQAREELAQIEALPVVALHPAVAADYRREVEQLHQSLKDPEAKQATIPALRALIDRIVLTPAAIRGVEIEIHGRLAAILGLATGQELPENMYSSDQFALPAPSLPILIDDAGAFPAWRVLDQQGNSRHCRLALIRTRKILPMASVDFDIPHELGQAEARRRIEQGLPKLEAHIPGGGQVQSEWPADDRLMLTIIAMGQTVKADMNIADRAITGTVAIPMMLSMMAGPISEFVKTSAEKMLAKA

SEQ ID NO: 19875 - protein, 632 aa, synthetic construct
MTVPLRAALYLRVSTARQAEHDVSIPDQRKQGEAYCLSRGLELVDTFVEAGASATNDRRPEFQRMIEAGTSKPAPFDVVVVHSFSRFFRDHFELEFYVRKLAKNGVKLLSITQEMGDDPMHVMMRQIMALFDEYQSKENAKHVLRALKENARQGFWNGSLPPIGYRVVDAEQRGAKMKKKLEIDPIHADTVRLAFKLALEGDGTSGPMGVKSITKHLNERRIFTRDGGRWGIGTVHRMLTRPTYFGRHEFNKRGKSKELKPAEEVIAVEVPAIIDQPTFDAVQAHLKARNPKVAHPQVVGGPTLLTGLIHCGKCGGAMTIRTGKGGRYRYYTCSMKARQGASACEGMTVAMERLDDLVANYLADRLLDPDRLEDVLAEVLDRRQERSERRREHIAELNRRSAETELRLKRLYDAIESGVADLDDPALKDRIVALKATRDQARADAERASALLLNSAQQAITPATLRKFASTARRRIRTEGGGYRRDHLRALAQRVEVDRGEVRIMGSKSNLLRVLAANGVATAANGVPIVVPKWRSGRDSNPRYGFAVYSLSRRAPSTTRPPLRMSPCLEHAPLMRFSASRKRLRGAVGWGTLMPHDDRASARRASGAGFARPRSCRASWRSAARRLDRGAR

SEQ ID NO: 19876 - protein, 610 aa, synthetic construct
MTNAALAPSETGAVQPALRAALYLRVSSPRSAESDLSIPDQRRQTSSYCHSNGWEVAAEFVEPGVSGTDDRRPAFQEMIDAALERPSPFDVIVVHSFSRFFRDQFQFEFYLRKLAKNGVQLVSITQILGDDPMSEMMRKIMTLFDEYQSKENGKHTLRAMNENARQGFWNGARPPIGYRAVAAEQRGAKIKKKLEIDPLHAETVRRIFRLALEGADGRGPIGVMAIACWLNENNIRTRYGGRWGKGMVHQVLTRTTYIGEHRFNTYDVKKGRAKPETEHAIMEVPPIITVAEFEAVQRSLKARSPKMMPPRAVGGSTLLTGICFCACCGGAMTLRTGTSRSGQEYRYYTCATKATKGKTGCPGVSLPMDRLNEAVIEHLEKRLLDPARLEVLMDQLIARRDEWVTERRQHVAEMERRATEVETKLSRLYEAIENGLVDMGDPSLKARIAELTTIRDQARGDAERAVAHIERISPEITVESLHAFALVAKRKLRHDDGSYARNHIRAVAQRVEVHSKTDVRICGTRTELLRTLTAVSGVEAAVLGTRAFGPKWCPWPDSNQHALRRSILSRMRLPISPQGQRRGAARRGWSAVQAPIVGRQGQSCLAMQMK

SEQ ID NO: 19877 - protein, 529 aa, synthetic construct
MMKIPVWSYARVSTLNQVDGFGIQRQVNTINQFIQYLVLDHRLPYVLDTDNITQMVAEGRSAFKGKNWNPKTKLGQYRKMVMDGVVPDSVLIVENIDRLTRLDPFQAVEIISGLINRGTTILEIETGMTYSRYIPESITVLTMQINRANGESKRKSVMMKKSHQNRYGNVSKVRPRWFDVVEVDGIKQYRTNNTAKAIQRMYNDYVNGIGAAQIVRTYGDTDNGKPWTLVTVLRALSDKRVADDARYPSIIDKALYERVQAMKLSPSKGNTHQKYMLNLFAGMSRCPLCGQAIITKRNSHGGLFTVCLGKRTDKTCTARSIAYNALERPLLNAIVGLDFSEVYGQEESNVLTLRDQWIQNERDIAAFRERLTKASRHEKFAILDELEVMNREQDELTIRLKSVDAPKDITLTYDDDKLDMNVEYRIELNNRMKKLIQRIDIVREDVSKTNYKIFCSIKYWTELLTHLVIIDVDVQRIGRGGTNQLTTTLRSVSSLDLEGNIKGNPDMEALEYWQSVVSKATQKAIESLT

SEQ ID NO: 19878 - protein, 558 aa, synthetic construct
MTKLYSYIRFSSMRQSDGSSYERQIRMAKEIADRYNLELVNDYQDLGVSAFKGANSKTGALSRFLDEIGRSIPVGSWLFIENLDRLSRQDIISAQELFLSIIRRGITIVTGMDNKIYSIETVTANPMDLMFSILLFIRGNEESQTKRNRTNSSALLKIKAHQQNPQSPAVAIEEIGKNMWWTDTTSGRVLPHPVYFPVLQKIVQLRQEGHSAGAILDYLNEHHEPPAPTSNKKHGKWSRAMVSRLFATKALIGVKTVNVDGVEYELRDYYPRVLSDSEFYFLRKNIIKKAWDYSHDKEKVIPLLSGIGVLRCVHCGATMVKQTAANGKREQYRYCCDGRKSGRTDCPYPNWGFRAVTLEGAVLQLLADKIWIAEDKTNPIPEIQVKIDEISRKIDNLINLSAMMGATKELANQITDLNSQREALHEEIRLFEREMYSVDSQGWDKLAQFDLSDAQNEERLKVRMKIKGALHEIECSRIDSKKNLFVLVYLDGLRQRLVIENNRGLKKGQIFVDLKTINDRQILESAGMVLHPCIEMIIDADWKAPEEIPGLLSEEFGI

SEQ ID NO: 19879 - protein, 539 aa, synthetic construct
MLRQATQNLITALYPRLSHEDELQGESNSISNQKRILETYAKQNGFTNLRWYTDDGYSGANFQRPGFQAMLADIEAGKVGTVIVKDMSRLGRNYLQVGFYTEMLFPQKGVRFIAVNDNVDSANGGMDNDFTPLRNLFNEWLVRDTSKKIKAVKRAKGMSGKPVTSKPVYGYLMDEDENYIVDEETAPVVQQIYQLCLAGNGPTKIARMLTEQQIPTPGTLEYRRTGSTRRYHPGYECKWATNTVVHILENREYTGCLVNFKTEKPSYKTKHSVENPIEKQAIFENHHEPIIDTETWERVQELRKQRKRPNRYDEVGLFSGMLFCADCGHVMYQQRYQNKNRKQDCYICGSYKKRTRDCTAHFIRTDLLTAGVLSNLRQVTEYAARHESRFVKLLIQQNEIGGKRKTAAATKQLEQAQERIAEVSRIIKRLYEDNVNGKISDERFMELSADYEQEQRELKDRTAALQAELDKSQAATVNAEKFMGIVRKHLAFEELTPTLLREMIEKIVVHECSYDENGTRRQDIEIYYSFVGKIDLPEA

SEQ ID NO: 19880 - protein, 516 aa, synthetic construct
MARKKKVSPGNRLVAYYRYSGGSQQTEQSIEGQRRDCEAYARQHGLTIVHEYIDRHISGRGVESRLAFQQMIADSSKHLFDLVICWKTDRFARNRYDSAVYKKKLRDNGVRILYAAESSVEGPEGIILEGLMESLAEYYSAELAQKMRRGMRESALKGKAINPNRPLGLTTDEHKRFIIDEKNAPTIRFIFEHYAAGESSASIVDQLNAAGLRTSKGNSFNKCSIPRIIQNEAYHGVYICKAYDVRIDGAIPAIIDDDLWKRAQKMLTLNKQHRAPHSSHADYLLSGKLFCGCCHSLMRGISGHNCRNDVYYYYACGNKADGGTCKKKNIPKDVAENLVVNAICENILRPDTLEDLADAIAAAQQADVNQPDSERAMLEQNLADVHRKINNIIESIENGTASSRLSARLADLEQQESTLNYQLESLKEIHPPVLDRERILFLLEQFLISPNERTEDYNRRIIDTFVNHIEITDTEMLIYFNLSEASASEKQKNSQSNSCSTGNHLVRVARIELTAS

SEQ ID NO: 19881 - protein, 542 aa, synthetic construct
MAERVYCLYRVSTNKQVDHDENNQADIPMQRKACHDFAAKMGWVIVGEEQETGVSGYKVSADDRDKLQLIKKYAEQGKFDILLVFMFDRLGRKSDETPFVVEWFTKKGVRVWSVQEGEQRFESHTDRLTNYIRFWQADGESQKTSMRTKTALGQMVEEGRFRGGNAPYGYRLEKSGILNKRKHEVYMLVIDEDEARVVRMMFDLCISSGYGRWRLANFLNDHRIKNRKGQNWHDASVGGILHNPLYKGILRSGETYAGPFEALQIIAPDQFDLAQKLMLERTNERKERRTVPLNTTGQSLLSGNIFCGHCGGRLVLTTNGTTTRLADGTPVHKKRIRYVCYNKTRRRQECTGQTGYTMHILDGIVTEVLHQVFDKMQGASNDMIVGSAVQKQMAMIRSELQRARAENTKANKEYESLKAEVLKAIQGKSALPQDVLTEMLEDTRQKVLSTSERITTLTAELNDGNSKIEEMKAEFNRIVSWSKIFDESPMEVKKMICGYIIKKVSVFRDYRIKIEFNINVEQFLNGIDSIDECATYELPMAQ

SEQ ID NO: 19882 - protein, 543 aa, synthetic construct
MSPRKKLADQQERYSGTAVIYARYSSHNQRDVSIEQQVKQCQEFAQQNSFQIIEIYADRAISGKTDKRPNFQRMMRDAEKKKFKYVIAWKSNRMGRNMLQAMMNEAKLNDLGIRVLYAEEDFDDTAAGRFALRSMMNVNQFYSENMAEDIKRGLYDNAAKCKIANGGLPLGYKKGDDLRYALDPPNDEIVREIFSRTACGDSFADIAADLNARGIKTSRGKAWGKNSFHALLTNERYTGVYIYGDIRIEGGVPQIVDKGLFFRVQEVLKTKKNPQGRHRINGDYLLTGKLFCGHCKSPMAGISGTGKNGKLHHYYICQKRRMEKSCDKANIRRDKIEHEVAVAIRNYIMRDDVLEWIADSAMTFAKEYRNQTCIGSLETQLAENKQATKNLLTAIEHGIITSTTKDRLLELEREQAILVSRLDEEQASLLHYSRDDIISAMSLYKNGNIEDKAFQAKLFDTFLIAVYLYDDHLKIEFSVTGKKTFVNLPLDTSVIDNIESFAAEECSFSLSLGPPKKCPLWIPSAEMPMVSGFSGGFHLKFHS

SEQ ID NO: 19883 - protein, 573 aa, synthetic construct
MNIVIYARYSSHSQTEQSIEGQLQTCYEYAKNNGHTVVDEYIDRAQSGTTDSRVEFQRMIADSDKHTFEGVLVYQLDRFARNRYDSAINKARLKKNGVRVLSARENISEDASGILVEGVLESMAEYYSAELSQKIRRGMNINAEKCLSNGSNPGLGYRIDEERRFHVDPETSPIVREIFERYTSGETVTDIIKDLNARQIRTSIGKDFNKNSLHRLLRNRRYIGYYIYKDTETPDGMPRIIEDELFQRAQHILDRNKQAPARSRGKMEYLLTTKLFCGYCRELMTGYGGTGKAGKSYFYYACNNYKRHKCKKKVVSKQAIEDRVVLECRKLLTDSNIERIAQSVAAACDADFDSSTVKRLKASLQEADTAIENLWKALESGQSVEMITGRIEKRQQEKADLQAQIAIEMNRQVVFTVPQISAFLHSLKKGNINDEHNRKGIINIFLRAFYLWDDKFTMILNGGDRPIEMNGSLLDEIEADNAAFMGSSLVADAPPRKAACRFIAGGFTFYDNTLYNTFLFNSFANKSPMAAAVCSESLSSACPYCPKVSMLRECPTSDFMVPSGRYFAMETNV

SEQ ID NO: 19884 - protein, 540 aa, synthetic construct
MTETVPKITIIPANPEVKGRAVKRQLRVAAYCRVSTDDKEQLTSYEAQKTFYTDKIMQNPDWTMAGIFADEGITGTSAAKRPEFLRMIRLCRQRKIDLILVKSISRFARNTVDCLNYIRALKDLGIAVIFEKENINTMDSESEMLITMMGAFAQAESESISHNVRWGIRQAMREGRATVQYKNLYGYGKDEEGNPYVIPEEAEVVRRIYKGFLQGQSIRQIKGWLDAEGIAPRKGKEWSLSTIENILKSEKYCGDVLLQKTFISDCISRKVIKNVGQLPMYLIQDHHEGIVRRETYQAAQAEFARRSSRRSPNKRAAATGLSSYTSRYALSDRLVCGECGTLYRRCTWVRKGGKKIVWRCSSRLDYGSKYCKDSPTMEEGPLQQAILRALNSVMGPKEVLIERIGNAIRQEMTPKMDDFQTLTEIDRSLEELQGRFQALLEEVQECGGDVMSYQEEFTAINEQMTTLQTRRVQLLEAQQADLAITGRLQEAESLLAGTPSEITEWDEALVRQTVETVKVLSAHEILVCLKDGTEIRETVL

SEQ ID NO: 19885 - protein, 533 aa, synthetic construct
MGEKPMVEGSLAKKQPRVIVIEADKELRPKKLRVAAYARVSSDSTDQLNSFMAQVRYYTTYITSKEEWVFVDLYADEGITGTSAEKRTEFQRLIADCKRGLIDKVLCKSISRFARNTTDCLETIRLLKGLGVGVCFEEQNIDTAQMSGELLTAVFAAISQKESESISGNMRWSYRRRMESGKFITCKAPFGYRLEQGKLEIDETEAEIVRQIFSRYLEGQSADEIAAWVNTLNVQTRDHGGNWYATTILYILRNERYAGNALLQKKWTTETLPHAKKRNHGEKQQYYLKDSHPPIVPKEVFDAAQELLVCRSQKIQPACGQTERRVLAGKLFCGCCGSLFRRVERRGSTYWTCRTHFRNKENCPITQISEQEIQSAFLRIYHRLRMDGIPVLEQLAANCRRIREQKYLWRVDIVELNKQIGNLMDRNHMLAEMQKHGLLNSDFFISQTNEIARKLREAQAQKERLLSADQDQTLEQTRELIEALSSMPEFLPEFDEAIFSDLVERIIVESNTILCFRLKNGLELRETIERTVR

SEQ ID NO: 19886 - protein, 570 aa, synthetic construct
MFLTLEQYIESIQAINTSGEKDKKIEALLEYYEKYNKRIKAAPGMFYAVIYARYSSHGQREESIEGQVREALEYAARNNMIVIGVYIDKALTGKTDTRDGFQRMIKDAAKKKWQYVICWKLDRFARNRYDSARYKAKLKEYNIRVVSAREYIPDGPEGILLEGALESQAEFYSASLRENVKRGMTDNALECISNGGNIPFGFKTEKKRYVLDTEKAPVVKRIYQMYNTGSTIQELVKYLDGLGIRSTKGNKITINGINSILRNPKYMGVYKYKDTYVEGAIPQIVEKELFEAVQKKLNDRASKKRLKKNDVEFLLTTKLYCGKCGMGMTGMSGTGKLGAKYYYYSCVGRRRDHNCDKDNVGKDWIENIVISETVNTVLNDDVIKRIADGVIDFQRREQNNQVLSGLKNRLVEVEKSIENIIRAIEQGIITPSTKSRMETLEAEKVAIEHGITEESLKNPIVTREQVIFFLEKFKGGDIADQEYRRKLVDTFVNSVYVYDDHILISYNFTSSGDRTKLEEISKGYEKAEETANTSRFSHFFMGSPLLPNGPPKRHSPIGGCLFLAASRIPC

SEQ ID NO: 19887 - protein, 558 aa, synthetic construct
MTTAVIYLRVSTKEQATRGNEAEGFSIPAQRQACERKAQELGAAVEREFVDAGESAKSADRPELQRMLTYLAEHPTTYVIVHKIDRLARNRADDVQINLAIQAAGSTLVSVTENIDATPSGVLMHGIMSSIAEFYSRNLANEVMKGAKQKALNGGTPTIAPIGYLNVRETVDGREVRTVRVDAERAPHIVWAFDQYATGDWTLSGLAAALDARGLSQRPTAKRPVRPLPTNKLYKVLRNRYYLGYVTWQGIEYPGIHQPLIEVATFEQVQHVLAAHRQSGERSYRRRHHLAGALHCARCESKLMYAISTGKQGTKYAYWFCGGRHNAKNGCGLPYMAENRVDAAIVSLWRKTQMPASTLATIRASLAEDLAAFTVHSDREQTLVQRRIDDIKRERLKWADLAMDGAVPRDIARDKQTALANRLGQLEHQRASLEATTVDHVATIDKALDLVGRCGIAYETAPESIRRDFNQAWFERILLDVEDGGTVVHTAERTDIFEILATATVGDDAKPGRQDVLNMRTHSTVKGSMVVSLVELRGLEPLTPTLPVWCATSCAIAP

SEQ ID NO: 19888 - protein, 541 aa, synthetic construct
MNEMKKKRIGAYIRVSTERQVEGYSVDGQITQIEQFCQFNGYDLVDIYADRGISGKSMNRPALQRMLQDAKNGKLDCVIVYKINRLARNTSNLLTIVEELHRQNVEFFSLSERMEVKNSTGKLLLNILASFSEFERNTILDNIYTGQHQRALEGYYQGNLPLGYNNIPDNKKELIINQHEANIVKYIFESYAKGHGYRKIANALNHKGYVTKKGNPFSISAVTYILSNPFYIGKIQFAKYKDWNDKRRKGLNDKPVIAEGKHTPIISQSLWDKVQARKKQVSEKPQVHGKGTNILTGLISCPQCSAPMSASNTTNTLKNGTKKRIRYYSCSNFRNKGSKVCSANSVRADVIEKYVMDQILEIVKSNKVLKQVVERVNQENQVDVAALNHDIAYKQQQFDEINTKLKNLIQTIEDNPDLASTLKPTIHQYETQLNDITNQMNQLKQQQNQEKPSYDTKQIAALLQRIFQNIESMDKSQLKALYLTVIDRIDIRKDENHKKQFYVTLKLNNEIIKQLFNDTPLDEVLLSTSSLFFPQTLFLQI

SEQ ID NO: 19889 - protein, 449 aa, synthetic construct
MKQAMGYLRQSTSKQQSLPAQKQAIKTLAEKHNIQHITFYSDKQSGRTDKRNGYQQITELIQQGQCDVLCCYRLNRLHRNLKNALKLMKLCQKYHVHILSVHDGYFDMDKAFDRLKLNIFISLAELESDNIGEQVSNGIKEKARQGKLITTHAPFGYHYKRGTFTINKNESPTVIAVFNYYLQGNGYKKITQFLEEDNKLLNRKPYQVRNIIMNPNYCGRVINKYGQYDNMFPSIVSTNMYEQAQALRSQKQIKRTPSDNQLKQKIKCPYCGSKLTNMTIRKGTHSLRYYVCPRNMNESRFVCDFKGINAQELETSVLTTCQDFFQNQQLYSKINQTIQKQLKNQRDIETKNTLNHEQLIEKLAKGKIDAETFREQTQLLRQQSKPISSINAFQIKRTFQNVIKQRFTLNMLYPYIDEIHITKKKILVGIYFKNEPLNIINQTTQSSIA

SEQ ID NO: 19890 - protein, 510 aa, synthetic construct
MSYFIYARKSRKDADLEALGIDVLERHITTLLELAKTLSLPIGAIYREVVSGDSIDSRPVMSQVMAEVESCMWDGCLVMDVDRLARGDTIDQGRVQRAFFYSNTKIVTPNKTYDPANEYDNEYFEFSLFMSRREYATIKRRMQRGRERSSSDGYYVGNIPPYGWRRVIAPDGKHFSLAPDPTESPVLDLMYDLCGNKQYGYQKACTHMAEMGILSRSGRPFTPSTLKGIISNPANIGKVRWGHRKTVRTVKDGKISRSRPHSSDYILADAVWPPRISADLFRRANQPKGSCSAPVRDDRPIQNIFAGLVRCSQCGRLMVRKKAHTKTPYDILICQYTECPTVGIRIDELELALLEWLRNYIDKYELTDALPEDAENVAAKEAIVKNFEKEHETLLKQRESLFDFLEQGIYTKEIFIERSNALERRVKECMEHIISAQNDLHATLALQANRKNFVPRCKNLLGEWGRLTIPEKNSALKVLIEKIMFTKTKRNKKGQDRSDFEIDVFPKVPK

SEQ ID NO: 19891 - protein, 448 aa, synthetic construct
MERMIQKVTPPARKKAPKLKRVAAYARVSSGREAPLHSLSAQISQYSGMIQKTPGWQYAGVYADEALTGTKDSRGEFQRLLADCRAGKIDMIITKSVSRFARNTVTTLRTIRELRLMGVDVFFEEQNIHTMGEDGELLLTLLAAYAEEEARSVSENQKWRIKSNYEQGLPWSITMYGYRQVNGRLEVVPEETEIIRLAADLYLEGYGRYKLEDAFAAVNIKGRHGANMGGNSIVDLICNEKIVGDMLLQKTFVVDPITKEVRKNNGEKPQYFVEGSHEGILDQETYEKVLAERARRASAYKPRSGSYERNRFPFSGKIHCGKCGKSFTRKVLNGNTPYEKRGWLCRTFNQKGKAHCDAKQIPEEILKRVSAEAMGLPEFDEAAFAAKVEEIQVPENGVLVFVFYDGHTVTKTWDNPSRRHSWNPENRQRARELALRQAAERRLAKCQQ

SEQ ID NO: 19892 - protein, 497 aa, synthetic construct
MRYAIYLRKSRADDTSEPLEVTLQRHRQMLEKYMQQHDIAVQDEDVFEEVVSGDSLYARPQMLRLLEAVEAGTYTGVLCVDIQRLGRGSMQDQGMILDAFKWSDTKIITPTRTYDLSNDMDETYTEFESFMGRQEYKMIKKRLRRGLNATIENGGYIANAPYGYDKTKIGKTPSLKINEAEAKFIHMIFDLYQSGMGTATIATTIDRLGARPRRGEHFARSTVLKILKNDVYRGKIVWNRKTCVRPGQRGNEHHLTIYNAPEKWTVVDGLHPAIIDNEQFEAVQRILAGHYHPPANTGKRINPLAGLVLCGNCGRPLQRIAIQSAGGPLLGCQVPGCIVSSKLEYVEQAVLLEIQKEFDKLCANAEQKQQESQIDYAAMAKSIDAEISTAHQQLGRLYDLVEQGVYTIGVFNERRGALFSRISALEDERKNLVPPQQLDLEKMRANIEAVFDAYPTADFNTKNQLLKSIIDKIVYNKQKGVQPKGFTLEVFLHCLYL

SEQ ID NO: 19893 - protein, 643 aa, synthetic construct
MAGIRTGNQIYEVGIYCRLSKDDGTENESASIATQKSILTDYVKKQGWHLAKTYVDDGYSGTNFQRPSFQNMIKDIENGRINCVITKDLSRLGRNYLDCGLYLEVFFPEHNVRYIAVNDGVDTLNKSAMDITPFRNILNEMYSADVSVKIKSAYRARFQQGKFMGTYAPYGYIKDPADHNHLLIDDKVAHVVREIFDLALAGNGLGKIRKHINSQHVLRPAAYAAEQGATGYERYFEDNEENRYIWSENSLRNILRSPIYAGNLAGYKRIAANMKSKKRPSKLPEEWEVIPDTHEGIVTQEEFDTVQQLMTSRRREKNKGDFENIFSGVIKCADCGYALRAMSANRRKRPDIIDCVQYTCNNYGRYGNVMCTAHAIEARDLFNAVLADINRFADMAVNDERAVRAIEKRLTETDQSKAKAMEKEQKKLNKRLAELDRLFSSLYEDKVMERITERNFEMMSGKYQKEQLEIKARLKEVTETLNESYEKSQGIRDFLSLIRNYQGLKELDATVVNALIDKILVSEREKSADGTVKQEIKIYYKFIGFVGELHITPTKRWTALPAKHCTVCGVEYVPGSGISKYCPACAKKIQREKSNESKRRSREQKRMACIELSAKNDRLIWHSEKGGSSARATRTRWSMFTAM

SEQ ID NO: 19894 - protein, 514 aa, synthetic construct
MRRKKVKGGNRLVAYYRYSGGSGQTEQSIEGQRRDCENYAKLHGLTIVHEYIDRHISGKTDDRAAFQQMMNDGDKGAFDMVICWKTDRFARNRYDSAVYKKRLRDNGIEILYAAESNVEGAEGIIIEGLMEALAEYYSAELAEKMRRGMRESALKGQAINRCRSLGLTTDENKKYVIDEKTAPTVRFIFEHYAAGESSTSIVDQLNAKGLRTSQGNLFNKCSIPRIIQNEMYRGVYTSKAYNVRIEGAIPAIIDDDLWKRAQAMMKTNRQLKAKYEPKAEYLLSGKLFCAKCGCTMKGVSGHSGGNGEVYRYYACSNPQCRKRNIPKDDLEGKVIRSICDHLLQPETMELLAETMVEVQKADMEKPNAERDVLEQELRDVRRRSKNIMDAIETGSANHQLVARLDDLTQQENTLTYQLSTMEAEKPLLFTKEQYLFLLQQFYAQPTEQDDAYKRRLINTFVTNIEVSDSELLIYFNISEETENKNKNAPQLNFDKSSSTEKRLVRVARIELTAS

SEQ ID NO: 19895 - protein, 556 aa, synthetic construct
MYTAIYVRVSTGMQAVEGHSLESQVELCMQKAKELSILEHSVKVFREEGASGEDIERPAMNELRELISAGQVRQIIITHPDRLSRDLTDKLFLCREFESRDAHLIFVDTEYQSTPEGQLFFNLMSVIAQYELSLIKKRTVRGRLKAVEKDKKIMPMRVAPFGYDWVDGQLNVNQKEAEYVKQVYHWYLNENMTIRQIGNRLFKMGVRPKRSVNGNWGGSSISRMLSSEIYIGKYYYNRRKVKKLKGQKSRFGNPKKTYTIREKNDWIMVEIEPIISEEVYEQARQRRIKNFTRSGNVHFNYLLRSFIRCGHCGRKWGGTTYTGRKDKKTGKRVKYTCYRCLNLFPRVYGISQPCPSRSIRAEVLEEFIWDMVMEALSNPEDYMQRLEGQVEEVIDELLFTAGMIQSQIVEKRKEMDKLKIMFRRDVITEDELATDSYKLIREINELQSQLELYEGQVKTHREQHYSHEANLKIVEQINDFISSKGAELAFEDKRFIIETLIDEIVLKAEDGGFNISVVGSLSELTGGQDGGSKSDIPLTLNKKLSLPTRRKGSING

SEQ ID NO: 19896 - protein, 552 aa, synthetic construct
MRNLAIESDLKPKKAVIYCRVSSAAQTKRGDGLGSQETRCREFAGYRGYDVVEVFSDDLSGSLIDRPGMKSMLAFLKKHRNDPHAVLIDDISRLARGVKAHIELRAAISMAGGVLESPTLEFGDDADSELQEYILATVSQHQRRKNAEQTLNRMRSRLLNGYWVFWKPVGYRYEKSKGEGKVLVRDEPLASIMQEALEGFASGRFQTKVEVKRFLESQPHFPKCLPNGEIRHQRVEDFLTQPLYAGYLHAPNWNIGIREARHESLISFSAYNRIQDRLKEVAYAPSRKDLSDDFPLRGFVKCADCEKPLTSCWSKSKTGAKHPYYMCFNKGCESYRKSIRRDDIEGAFSALLKTLRPAPALFSLVRAMLQDGWDQRLSQVDQVRAGIKQNVGKIEKQIDGLLDRIVEASNPKVISAYEKRLAALENEKLALEEQRRDAGKPKHTFEEMFELAMNFLSNPCKLWESDRLEHKRTVLRLTFSDRLAYCRKAGFSNPEFSLPFRALSAFGGGQNEMAHPTGFEPVAFAFGGRRSIQLSYGCITGRNCLRSAYVKF

SEQ ID NO: 19897 - protein, 540 aa, synthetic construct
MDSMKGKNGSSKAVIYCRVSDTKQTTRGTGLHSQETRCREYASFRGHDVVQVFADDASGGLINRPGMQAMLSFLRQNRRQPHVVIIDDISRLARGIQAHLELRAAISKAGGILESPTLEFGEDSDSQLIENLLASVSQHQRQKNGEQTLNRMRARALNGYWVFHAPVGYKYERVSGQGKVLLPDEPCASILREALEGYACERFSTQAEVKRFLEAQPEFPKTPRGEVTNQRVNDFLTQPLYAGYLELPKWDVSFRPAKHEGLISLETFKTIQNRLNGTARVPARKDISQDFPLRGFVLCGCCGTPLTANWSKGKAAHYPYYLCRQKDCAAKGKSIRRELVEEEFEALLKALRPSAELFEWASSLFRDLWEQRAKTMKEQGKSVKAELSQIERKIAQLMDRLMEADSESVIRAYEKRIGDLETDRMIIRERIEKCGTPLATYEETFEHSMTFLANPWKIWENGSIEHRQTVLKLAFADQLAYDRESGFRTPEISLPFKMLEDICSGNLEMAHPRGFEPLASAFGAGLMAFPNCATEYARAR

SEQ ID NO: 19898 - protein, 557 aa, synthetic construct
MYITSSNKLFCFSFKYIRVFKYNKGFYNNTHAMQAVYLYIRVSTDEQAVKGYSQRSQLDRLVHYCKDHNLIVTKTIFEDYSAKTFNRPEWNKLFAELKLTKNQSSLILFTYWDRFSRNIMDAYKMLERLQNMKVSIQAIEQQIDFSIPESKIMLAMYWATSEVENDKRSRNVRLGMQKARLEGRWINKAPLGYRNKITSDGKKYIALYEPEAYIIREAFTAIVRQNKYCLTEIYKDALSNGLHCSRSAFYRLVRNPIYCGKIKIPAFEDKAERIVEGAHERLIPVVLFDQVQRIIKGADLNHSKKLTSKRIVNENLIFRGVLQCPNCGNTLTGSGSQGHTKKYYYYHCVGLCSYRVRADLINLSFLSFLKNNRVVEPFLELANSISKEIYGEEHHDYIQKKEEIKKEMEKLIDRGFNAQKLFSNGNIDYDDYILIRSRCQESLKDNTDKLRQQALKIVAEKHTEKGTDYIINHLGEFYENSDTITKQRIIRLFFSEKVKVIEGNIEKMLSESVKTIFGLTASASKIKEIHGQQTEQEIVEFFKELYFLGYEQNLKNI

SEQ ID NO: 19899 - protein, 544 aa, synthetic construct
MAETAKKISMIPAKVQYDRNVKLSEKKMKVAAYCRVSTELEEQDSSYEAQVEYYTSKISENENWKNAGIYADDGKSGTNTKKRADFNAMIQDALAGKIDMILTKSVSRFARNTVDSLVTIRKLKEKNVAVVFEKEGINTLEGTGEILITILSSLAQEESRNISENIRWGVVRKFEKGKVIVNCTKFMGYTKNEDGDLVIVPEEAEIVKLIFRLYLEGYSTGKIAKHLEEQGIKTATGQDKWHSTVIDKMLRNEKYMGDALLQKTYTVDFMTKKKVKNTGIVPQYYVEDDHEAIIPKELFYRVQEEMMRRASLCKAAVTRKKNQRSRYSSTYALTGMLICGKCGQEYRRVTWARNGKKKVVWRCSNRLTNGVKKCGESETLEENALNRAVMETIHRITSDDMEFMENFRQNIIHVIGNYSTAKESEEYEEKIKEKQEEMVALIAENAKTGSYTPEFDERYRTIAEEINALKEAQKTARNEKWMADSYEQRIQDIDHYLSTSTCQIQEFDNDLVRRLISTIKVESSEKLLIQFQSGIVMEQEIRSE

SEQ ID NO: 19900 - protein, 538 aa, synthetic construct
MAKKVTVIKAAKAQKHTQEERRLKVCGYARVSTGSQAQATSYTAQVEYYTEKIESNPLWELAGVYADEGISGTNVKHRDEFQMMISDCEDGNIDLILTKSITRFARNTVECIQTIRKLKEIGVGIYFEKENINTLSEKSELFITILASVAQGESENISSNNRWAIQKRFQDGTYIISTPAYGYGKDEDGNLVIIESEAETVRWIYESYLNGMGVYVIAKALNQKGIPTIRGAEKWQDGVIQDILKNPIYEGDMLQQRTYTETRFPFVRRVNNGQRNQYLIKDSHPPIVTHEEAEAVRNLMAYRVDVLHMNKSDYTKRYLFSGRIICGECGRTFRRQKIYIGKPYEKIIWTCSGHVEDKESCCMKAIREDVLHRAFTDMWNKLYTNQGTILEPLLKELTELVAARQDSEEIRQLDKEIKDISEQSQILNQVMRKGYMDSALFMESSNKLGWQLTECRRKKTLLTRKLRRTKEIVRTEQLIQLIAEQDGLREEFDEQLFKMTAEKIVVSKEHDITFCLHNGLKLTERGGGQDAVAHANRL

SEQ ID NO: 19901 - protein, 588 aa, synthetic construct
MRIVNKIEAKTPQMPRRKRVAAYARVSMESKRLQHSLSAQVSFYSSLIQSNPAWEYVGVYADNGITGTKAEAREEFNRMIADCEAGKIDIVLTKSISRFARNTVDLLNTVRRLKELGVSVQFEKERIDSLTEDGELMLTLLASFAQEEIRSLSDNVKWGTRKRFEKGIPNGRFQIYGYRWEGDHLVVHEEEAKIVRLIYDNYMNGLSAETTEKQLAEMGVKSYKGQHFGNTSIRQILGNITYTGNLLFQKEYVQDPISKKSKINRGELPQYFVENTHEAIIPMEVYQAVQTEKARRRELGALANWSINTSCFTSKIKCGRCGKSYQRSNRKGRKDPNANYTIWICGTRRKTGNAHCRNKDIPEPMLKEACAAVLGLDTFDEIIFSEQIDRIEIPAPNEMIFYFKDGHIVPHHWESTMRKDCWTDERRAAKGRYVQEHQLGPNNSCFTSRIRCDSCGENYRRQRSRHKDGSFDSVWRCASGGKCNSPSIKEEVLKNLCADAMGLESFDETAFREQIACIHIVAPFQLSIRFFDGHTFEAAWENKRKMPKHTEQRKQHMREVMIQKWREKCGESNDYTGDDKPVHGNADQ

SEQ ID NO: 19902 - protein, 553 aa, synthetic construct
MNYEYGPRHGVTKAVIYCRVSSKAQVRRGDGLGSQETRCRQYAESRAYSIEQVFTDDLTGQRIDRPGVNALLTFLRKNRNDPHVVIIDELSRFARKVPVHFELREEIRQAGGILECPSMEFKDDADSEFNEYIQASAAQYQARKNAEQTLNRMKARCFNGYWVFQPPIGYRYEKQSGHGKLLVRDEPNASIIQEALEGYASGRFDTQAEVKRFLESQPEFPKDLPNGQIRNQRVKDILVRSVYAGYLEVPNWDIPLRQARHVGLISLETHQKIQDRLTGGARVPARKDINADFPLRGFVLCGDCHKPLTACWSKSKTGKRHPYYLCYNRECESHRKSIPRDRLETDFEKLLRKLGPTESVFKMARAMFKQAWNIRLGQAEERQKAIGRDIVKADRQIEQLVDRIVDSESATAVKAYEQRLAKLEKQKLVLSEKLKKGTGPKRTFEEMFELAMGFLSNPWNLWTSEHLADKRTVLKLAFSDRLAYQRNEGFRTPQVSVPFEFFRNFTGKCEMAHPTGFEPVTSAFGGQRSIQLSYGCFAQLVPYQSGACASNPN

SEQ ID NO: 19903 - protein, 430 aa, synthetic construct
MQIEPVVFENKSIAKKKNVCAYARVSMNDDGMLHSLNNQILFYKEEILSHPDWNFVGVFHDKPTTGTKEDRPEFSKMLKLCEEGKIDMIITKTISRFARNTVTTLKWSRELRQRGIDIYFESENIHTISSNGELFLSLYAAIAQAESLSVSENCKWRIQKAFQEGILTPIKILGYDFENGSLKVNEKEALIVKEIFNLYLDGKGTNYIANELNQRGIKTKLGCEFTPKAIHVILINEKYCGNALLQKWYSKDHLTKEKVANNGEKDAYFVEESHQAIIDKETFEKVQIEMSKRAMKYAHECKCREYPFTKKLKCGICGKSYRRKIVHGKPVLICTTYDRKGKSMCPSKRIPEEILMKVSANILGIDEFDTDIFNDMVSFITVYNGNRLIFNFEDGTKQETYWKDKSRSESWTDEMREKARERQYAKCSNN

SEQ ID NO: 19904 - protein, 517 aa, synthetic construct
MPSVQIIKATKNHTAILENKTRKLKVAAYARVSTEKDEQENSYETQIRYFTDLIRSNPNYIFVDMYADEGLTGTMLKNRDSFNQMISDALEGKIDIIYVKSVSRFARNTVDSLCICRELKNKGVNVIFEKENLELLSASGELMLTIFASLAQEESRSISENVKWTIHKNYEKGIYHMPYSSFLGYKKGDNGKMVIDEEQAVIVRKIYKMFLYGYSINSIAKELTETGVLTPRGKNEWSQSTIRSILTNEKYCGDARLQKKFTANFLDHKAVKNEGQVASYYVTDDHEGIVSHEVYETVQEMIKNSTEKKNCGDMYSRKLYCECGKLYGRKVHHSNDKYRTTIYRCNDEYSRDHIKCARLKEKQIQETYIQAVNELIQTDNIVSDIFEIAQLFKPTETIDDEISVLIDKRNIIEHEIQNLVEESSKATDINKYRSRYDNLVKEYENASLKVAKVIEEKDKRKAKYQNILRYANHLKELTEPIKQFDDELWFSLLDKATVKEKSIIYQFKDGREVEIEL

SEQ ID NO: 19905 - protein, 506 aa, synthetic construct
MIAKWLLDHQDYELSKLNYSDLGKSGFHGEHVKEGGNFGKLLKAVMDGYIERGDVVLVEAIDRTGRLPALQMLSDVIAPILRAGVSIITLDDNTTYTEASVGGPHLFMLVAKIQAAHEYSRTLSRRVEDSYKKRRKDAKEKGVAPKRMTPVWLNSDGKVREDVAPWIKTAFELYVSGVGKSTIAKRLRESGVERLAKTSGPSVEGWLRNKAVIGKWETLIGTPEHTVIDDVYPPIIEPSLFYKAQVHAEKMRTQRPVKTAKHFLVGLVRCSECGKNYVMQNLHGKPHSMRCRTRQSQNNCANSYVVPKPVLDAIYRYTSVTAAIEAVKQQQLGVNEKEIVTREAELLTITKRVEGFVEAVKEAGPMPELLTALKQARIDRENAENALVILRSTVVTPSANQWREMGKVWSLEAEDAQRLAAMLRMVGYHMTVSLGGIITSSHSNTVYQYMGVDRMKDMYKMTVDGKLQLIHKAHIDDYPYHEPFQAVEGEVAWHEADYDNLRLQYQ

SEQ ID NO: 19906 - protein, 595 aa, synthetic construct
MHDFDQRPMAYSYIRMSSKRQIKGDSLRRQLELSKKYAEDHNLHLDESSMVADKGVSAWTGANLTEGAFGQFLAAAKAGHIKPGSYLLVESLDRLSRQQVRTALLPFMELINADITIVTLADNQVYSKATVDANFTQLIISLTIMARAHEESETKSKRLRAVAKNRLENAAKGVGRFSPMHVGWVDSERVGNDRWTFKLNDHANAVRRIFALADSGLGQVTITKRLNDEGVPTFRGKGLWFPANVGRIMRDETVVGTYQPTHVVEEVRQPFGQPIKDYYPAVVSEELFWRVQRGIKVGFAKGRHKGNRIANLFSGLITCAHCGSILRLRTGTPHKYLYCDNLYRAGNCASGGGLYRYDRLEDIVFRKISELDPDQEAGGKADAQTRELLLQNIKSNEDEILKHERAYKNYMASLALVDDDDAMRREITAEMKVARTKIEQTKALVSEQKEELANIDTKRKEIASIAERMNLERLGWSTGSAEEVFDSRARVAKMIKRFLTTMTINFDDKILMVALAGGLRAYKFNYDGEIVDRYDIAPLLNRPITPVMYNDGDGSTRLITGGALKPEHFTTDISANDFDLREDRLKIIRSMSQPK

SEQ ID NO: 19907 - protein, 573 aa, synthetic construct
MAYAKLKQTNPRVAIYVRVSTLHQVDKDSLPMQKQDLLAYAKLMLGTEDCVIFEDAGYSGKNTDRPKFQEMMSQIRAGGFTHLLVWKIDRISRNLLDFATMYNELKDLGVIFVSKNEQFDTSTAMGEAMLKIILVFAELERNMTSERVTATMISRANNGQWNGGRIPYGYDYDYDTHDFTPSETEAPIVQLIHDLYEKERSLVRESRILNSKGYRTRAGNEWNPVSLHIILHNIFYCGDYRYNVLKEGDRQKVKDESEWITIEEHHPPIITREQKQRVITMLDANSRINKKKNNYKSGKYTHIFSGLCFCGNCGCPMGAAPASLRADGWRYSKYSCPTRRKNAYTCTGKSTSDPIVGEFAMNYILNMLNAQRNFENVSSPDDLQAILLTGNTFSYIDSIEPDGVLDLYDILASGKVQGAVFGKGANIKPKDGEDSEIASLRAEKQKTERALDRLRNLYLYSEDAMSEKEYIIQRTTLTEKLDEINDEIGMMQSDEWQQSVSDEMFIAKASEFIISQKLTDRNYINYKRLAQSVDAEVLRNFLTSIIDSIIVTDGMVQRITFKNGLSHSFIFKQ

SEQ ID NO: 19908 - protein, 609 aa, synthetic construct
MTKNVLFYARYSTDRQHEVSIETQIELGKAFVARQGWKLVECYSDAAISGTSYQLRPGIQSLMTHVKRERIDVVLCVTVDRLSRDIEHSAKILKQLRYCDADIWTVHAGTPVTDLEMALRAALSHELVEQIRYRTREGMKMSVRKGKASTCLAYGYMLCQQRDANGDRIKGLREIDPAKAETVRRIFTLYADGMSPRDIAQLLNKELVPGSRGLKWRDTAIRGHVSRGTGILNNESYIGRMVWNKRNYRKNPETERRTARVNDASEWVLTDVPEMRIVSDDLWQRVKDRQKEIGELFDFGGNNRLNATQRPEYLLSRMLECAECGGPYAISGKDRYSCTNRKKRLPIDDLDGACCGNSKTITRHELEERVLNCLPVAFFSMDIFDRISEKMVAYEVSKLKSLPSRKDQLTAELAGIKSKQASLMQLIQDRHADGRPRLAILDDQLDELEVTREKLVLELTHSQAPAEDFQEKIAKLKAQFNPANTEISIRKLIFLARNNADEHAKQRLMPIVRDLIQTVVIGKTPGHQPASLQVHGSIANIMASMEVLDLMEQQFITAAQNDLMARIASGEIDTEQKRKKLLDAYAEELRRKYPEWANLQVSVVAGAGF

SEQ ID NO: 19909 - protein, 553 aa, synthetic construct
MQTIPIDLSALTPEERQQFADNPSVLSSDCEAVCCLYMRYSSDRQTEQSIEGQLRELIAYCKHHSYRVAAIYVDRAISAHASMDKRPSFQQMLSDSARSSWKTVLVYKLDRFARNREDSAIARMRLRKNGCNVESAKEGISKNPEGVILEALLEGMAEYYSLELSQKITRGMRESAIKGNCLGGQIPLGYKIENKKYVIDPLTAPLVKEAFSRYGDGETAASICADFNARGYRTASGAEFNKSSFKNIFRNEKYIGVYKYKEMRREGIIPRIIADDVWIAVQSRLKVNEAAPARGKAKVPYLLAGKLFCGHCGAPMTGECGRGKSGKMYNYYSCATRKHHNSCNKKPVPKDWLEDVVAQDALDVLTDEIIEFVAEVAAQQSEEDIQKNTQIPVIRKKISEIENKIRNLTKALECASVAPDAIVERLSELEAQKKGLSTQLSDEERGVIPLTKESVVVYLKAVREKAVPLETQKAMLIEMLVNSVTVYDDEPGFLKFVTAYRLTQIPTRTYRVQISAKEPCSDFRTQPAPLDANPNTITVVGMVFIQTKRHALP

SEQ ID NO: 19910 - protein, 459 aa, synthetic construct
MSTTHFYSHYPTIEYKTCALYVRCSKEEQAKFGDTIEAQIEDLKAFAKLHHLKIHAIYVDEGHTARKKYNKRKEFMRMLQDVELHKFEYIIFTKLDRWFRNIADFYKIQEILDNNGVTWLTALERYEMETTNGKLNVNIRLSVAQDEADRDSDRIKDVFRLKVKKGEAITGSLPIGLTVGENGNVDIDPDTVQIAYDMFDYFETHNSKRGTLLYLIDKYDRYFCYETIARALRNPLYKGEYRGNPDYCPKIIDPARFDRIQVLGKRNVKVRKNNRYYVFSGLAQCKECGHALVANTTVQKRYNREYTQYRCNYYSNSHLCTHSHGMNEKAIEKYLLDNIKPELEKYVTAYEVKQNAPTKKADPSKIKTKMQRLKELYVNELIDLDDYRIEYEQYKQELDKLTSTAAPEVKDLSAIRSFLALDLQSIYDSLTPQEKRTLWSSIIDKIIISDGGDIEIVFL

SEQ ID NO: 19911 - protein, 551 aa, synthetic construct
MKPKAYSYIRMSTDIQLRGDSLRRQTEASRKYADEHGLELIEDFKLEDIGVSAFHGRNANQGALGRFLTLCEEGSIKPGSYLIVESLDRISRQNPRSATTLFLQILEAGIDIVTLTDRHVYRADNADFMDIIVSVLIMSRAHEESRTKSLRVGAAWENKRQNIPIKKLTRVAPVWLTLSEDRTYFELVPERVAVVRSMFDEADLGKGSLQISRRLNSEGVPTFAPSKGWYESYVSKVLTSRAVIGEFQPHRYIDGKRVPHGDPIQDYFPAVVAREQFERIQIGRAVRRVRGAGRKGINNVNLFQGVAQCGYCDGRMMVVNKGQGPKGGVYFRCDRARRGADCNASSWPLEHFEAAFLWFVDELDIRAIAEGADAEAMRKEAEGRIAVVLADIDKEKRVRESAFELIGENLSVAAYVKDKIGQSTLKIDALEKELRDLRMRTNSAGSSTSRSLDEMKEIIQNFGKWHTADSDARIKVANWVKHNIKELLVYSDGLDEPTTGGPRPRQLSVSLISGEFRTVQISGSDPTVAAYSVYANDDVWKITEGRVCKST

SEQ ID NO: 19912 - protein, 507 aa, synthetic construct
MKRVISYIRFSSERQAKGDSLRRQSKMVTDWLKAHPEYYLDQDLSFRDLGVSGFTGKHLKGGLGDFLTAIEKGLVKAGDTLLIESLDRLSRQDIDIASELLRRILRAGVDVVTLSDGEHYTKESLKDPLALIKSILIMQRAHEESLRKAERIQAAWDAKKEAAKAGIKVSKRCPAWLKLNDDRKSFSVIPEKVETVKRCFQLRLEGKSIWEIVRTLNDEGRQTLNQHKAGSFGQSSVQDLLKNRSVIGYFTPKGCEEIAGYYPAIIDETTFYKVQQLSYARYGRKPASDKPLSVNLFKGVIRCSECGHALIITGFSDTRSGIYRCPLRNENRCSAKGLSRKQTDGTLLALLSRLDRFDSDTTNIIDTLKLHREHISSNIEKLVQLSLEIEDLNAITNKLKQLKNELSQVDADIEKETQRLKSIDVGCLSDCDLTTKAGRIEAQLIIKSAVKEVVLNTAKRRCKVTFHNGKVIDLPITENPSEDVTEAIQSLSEVTERGLIDVDEVII

SEQ ID NO: 19913 - protein, 703 aa, synthetic construct
MNVHLKVQSHHLERGAYLYIRQSSMRQVVENVESARRQYALRGRAVALGWRDEQIIVIDNDQGESGASAAWREGFQRLVSDVGMGHAGIVMGLEVSRLARNNADWQRLLEICALADTLILDEDGVYDPASFNDRLLLGLKGTMSEAELHVIKARLRGGILNKVRRGEFHCPLPTGLVYDHSGNVVLDPDMQVRETIVHFFDTFARVGSASQTVKAFRQEGLSFPSRLHNNETVFRPLTASTAVRVLHNPRYAGVYAYGRRQFRRTIDGKKTVRPRGNDDWLACIPNAHPGYISWEQHQENLKVLKANGHGYDAARASIPREGPALLQGRAVCGQCGSHLRVRYAARRGRQEAWYICNRARIYRGEPMCQSIAGPPVDEAIGMLIAEQMTPAAVELALEVRKEIQARHEEADRLRCRAIERAQTESDLAQRRFMLVDPNNRLVADTLEGEWNEKLRILANAREERERGREHDQFILDKAVHERLVAMTADFNKLWKDPDTPSRERKRLLAHIIEDVTLLKLPAEGTTTLHVRFKGGKIHTLTTMNPKSSAQQIKTKPSIVELVDKLLDDYIYPEIADILNEQGHRPGGTARRGCHNARFTPLKVAYLIHEYKLRSRYDRLRQRGMLTRQEAAVHLNISEQTVARWAKYGLITRHAYNGHYSLYEIPNGDLPQKQCSRWNPLEDRAAAHRQMQTGQEHQLARKEV

SEQ ID NO: 19914 - protein, 517 aa, synthetic construct
MLRAVIYARFSSDMQREESIDAQVRACKSYCQGKGYLVVGQYVDEAKSGRELTKRDAYNQMLADALEDKFDIIIFHKIDRNSRNELNYYTTKDKLEKLGIRYEYAVQHIDASPEGQMMEGVLVSMAAYYSRNLSKETKKGLNENAYKAQFNGGTAPLGFRIVDKHYEIEPLEAEAVRLIFKLYLAGYSYIRICRELELAGYKKRNGKPFDKTCLYDILGNEKYMGRYTFNKTPRAKNGQTRNSHSKTRPDDFIVIDDALPAIISKEDFAAVQAKRETNQRRFSSYKAVEPYLLSGKVICGYCGSAMSGHRVAPRNGEPYGYYYCLKKERVAGERCPQKYVRAEKLEKIAIRALEEEIFSEASIKKIAALMREGYASMTNEADESRKALLQAKTAAEKKLDNLYTFIENGEVDEYSLARMKKIKDELAKIKARLCETSVKSSKILTEEEIFATLAAFKKDLESNADNSAKRFVVNLLINKITVRDNCATVEILPNMLTVYMVPRTGIEPVRVSLPEGF

SEQ ID NO: 19915 - protein, 525 aa, synthetic construct
MKKKSVELAGTPQAIIYCRVSSPRQKTEGHGLESQEHRCRQFADQNDLEVVAVFPDDISGGGDFMKRPGIVALLSYLDAQPGKRYVIIFDDLKRFARDTEFHWRLRREFRTRGAEVVCLNLKLEDTPEGKFVETMFAATGELERSQNQRQVIQKMTARLERGYAVFAPPTGYKYAADREHGKILVRVEPVASILVDALESFASGHLQTKGEVKHFLDARPAFSKDTRTGKIYYSRVERLLSNIVYAGYIEMPAWGVSPRKGHHEPLISLETFELIQKRLNGNPKAPVRKDINEDFPLRGFVLCDDCGRVMTACWSKGRSKHYPYYLCDTEGCENSRKSIPRDKIEGGFAEILQSLQPTRELFGMAKSMFIDAWEMRTAEANRDKGQVENQRRSVEKQIQTLLERIIETGSASVIKAYEDKIEKLEREKLLLEEKVGRIVPPPRRLDEFIEPALALLANPWNIYDNGNLTFKRAVLRLVFAEPVRYSRKSGYRTANTAFPFKVLASIASAQKEMVRPRGVEPLFTE

SEQ ID NO: 19916 - protein, 506 aa, synthetic construct
MRSVITYLRYSSAIQGAEGADSTRRQNDLFKQWLKKNSDAQVVASFSDEGLSGYKGKHLTGQFGDMLARIESGEFPEGTILLVESIDRIGRLEHLETEALMNRILGNGLEIHTLQDGLIYTKDALADDLGISIIQRVKAYIAHQESKQKSFRVSQKWEQRAKLALAGEQRLTKMVPGWIDPDTFKLNEHAETVRLIFKLLLSGESLHNIARHLQANNISSFSRRKDANGFSVHSVRTILRSETTIGTLPASQRNDRPAIPNYYEPAIDASTFNKAQEILDKNRKGRTPASDNPLTINIFKGLFRCQCGASVHPTGTKNKYAGVYRCNSYLDGRCGVPPLKRKPFDKWMIDNFLGMIDVGNDGEAEKEIASLQHEVETVTARIKKATALLLEMDDIDELKIQLKELNQKRTELQTTIDSMRRKASLTDKELPQLKDIDLTTKAGRVECQLILSKHLESLTLGRGQVTVKLSNGTEIIVPTDPLPLTDGAAIFEIAEKNLLNIDTFQL

SEQ ID NO: 19917 - protein, 421 aa, synthetic construct
MQISYIKKTEDPIPKKLRVAAYARVSSGKDAMLHSLSAQITFYSGLIHRNPDWEYAGVYADEAITGTKASRPEFQRLLCDCKAGKIDLILTKSLSRFARNTVTTLQTVRELKECGVDVWFERENIHSLSEDGEFMLTLLSAFAQEESLSASENQKWKIRKNFSEGQPTPTRILGYKLVGDRFEMLPAEAAIVKRIYTDYLSGLGLTAICKKLMNDGVPTKNGGQWRESVIRSILTNEKYVGDILLQKSYVTDHISKKQVRNNGELPQYYVKNAHEPIIDRETFAIVQNEMQRRSSAYPHTRCSDTALHEFDGKILCGKCGCKYRRKKLASGKVVWICPTFNRLGKAYCASQQVPDAILRDLVSGIAFDHICVPCANTVTIITKSGEEITRTWENPSRSESWTPEMREKARQRSIMQWQKEK

SEQ ID NO: 19918 - protein, 533 aa, synthetic construct
MAKREVTIIPAIKSKYASKATESGRKRRVAAYARVSTDSDEQFTSFEAQVDYYTKLINAREDWEFVEVYTDEGISGTSTKHRAGFNRMVSDALEGKIDLIVTKSISRFARNTIDTLTTVRRLKEKSVEVYFEKENIYTLDSKGELLITIMSSIAQEESRSISENVTWGQRKRFSDGKVSLPYKKFLGYEKGEDGYPKVVEEEAKVVRMIYRLFLEGETPSGICHILMAQGIPSPGGGDKWHKSTIDSILTNEKYKGDALLQKKFTIDFLSKKQKINEGEVPQYYVEGSHEAIVSPQVFDLVQFEIQRRKELPTKYSAVNPFSSRIICGECGGLYGSKVWHATDKYKRTVWICNRRYRKGTIAGTGCHTPHLTEAEIKTAFLGAFNKCIRNKAEIIENCRIALAEITDTVELERKAAELSEECDAAAGLIRKCVEENAHTSVDQNAYAERYGALAERYAKYKERLDATNMEISRRNIRKSQIAFFLDELAKSKELVTEFSTGLWNTVVDSVTVYSRSKVVFRFKGGTDVTWKIV

SEQ ID NO: 19919 - protein, 541 aa, synthetic construct
MPKAISYIRFSTKIQSVGDSTKRQSKYINDWLKRNPDYYLDESLRFQDLGISGFSGANAKSGAFGEFLAAVESGYIEAGSVLLVESLDRVSRQDIDTAGEQLRKILRSGVEVVTLVDNEWYTKESLKDSLSMIKAMLVMERAHEESAMKSTRLRSVWAAKRERAAKGEIMSKRCAAWLKVSEDRSHFEFIPENVKAVQRVFQLRLEGLSHVKIAKQMNDEGFSTLNQFKSVTGGWSQSSVTELLSNRSVIGFKVPSKSMAVKGVSEIPNYYPSIITDEQFYAVQQLKQGSGRKPSSDLPLLTNLFKGVLRCSECGFIVVVAGVSAKRSGIYKCSMKSEGRCNSVGFSRLQTDKALVQGLLYNTNRLSLNRDSGSAIGTLQSELEQLHKQRERLIKLAMLADDTESMAKDLKALNSQIKDVEKAVSEVHQREQSSQLETISHLDLTVKKDRIEAQIIIKRIVKEIRLNTAGKECDVFLHNGLKLLNFPLDRVVDGAQWLEVLPLIDGDEFDFEGFTTKPQHIALEEAPEWVKEMEEQPNQPL

SEQ ID NO: 19920 - protein, 508 aa, synthetic construct
MKKAIAYMRFSSPGQMSGDSLNRQRRLIAEWLKVNSDYYLDTITYEDLGLSAFKGKHAQSGAFSEFLDAIEHGYILPGTTLLVESLDRLSREKVGEAIERLKLILNHGIDVITLCDNTVYNIDSLNEPYSLIKAILIAQRANEESEIKSSRVKLSWKKKRQDALESGTIMTASCPRWLSLDDKRTAFVPDPDRVKTIELIFKLRMERRSLNAIAKYLNDHAVKNFSGKESAWGPSVIEKLLANKALIGICVPSYRARGKGISEIAGYYPRVISDDLFYAVQEIRLAPFGISNSSKNPMLINLLRTVMKCEACGNTMIVHAVSGSLHGYYVCPMRRLHRCDRPSIKRDLVDYNIINELLFNCSKIQPVENKKDANETLELKIIELQMKINNLIVALSVAPEVTAIAEKIRLLDKELRRASVSLKTLKSKGVNSFSDFYAIDLTSKNGRELYRTLAYKTFEKIIINTDNKTCDIYFMNGIVFKHYPLMKVISAQQAISALKYMVDGEIYF

SEQ ID NO: 19921 - protein, 614 aa, synthetic construct
MKIKDKRFKITALYERLSKDDEVQGESNSIVNQKRMLTQYAEQHGYENIEHYTDDGWTGTNFDRPDWKRMLADIEAGKVGTVIVKDMSRIGRDYLQVGFYTEVMFREKGVHFIAISNGVDSERRESAEFAPFLNIMNEWYVRDTSRKITTVLKARGMSGKAHTTNRCCYGYKKSADNPDKWVIDEEAAEVVRRIFNMCLNGKGPYQIARELAEDKVERPEYYLGIRGRGVNIKSFDMEHPYMWRGGTVKTILTRMEYTGCTVNFRTKKESYKDKRPTKVDSSEWIIFEDTQEPIIDKHTWETVQKLVDTPRRKGVFDENNPLTGKVFCADCGAKMYHHRNAQGIWKKNYFKAGEMIYHAPEDRYDCSNNIRGRQRYEKLCCSHSVTTKALETLVLETIKRTCDYAVENEAEFREKVCSISEEQQGELSVRLEKRLAKKQKRVSEVNRLIKKLYEDNISGKLNDKRFNAMLSDYESELETLEADIDRDNAELEGMSAKKTDVDVFMELVKKHTTFEELTPAMLNEFVDKIMVYKAVGSGANRTQDVDIYLNYIGRFVVPEVVVELTEEEKLAEAKRQEKLEKKRASNRKYMARKREEARKAWAEIEAEKAKAVGQ

SEQ ID NO: 19922 - protein, 529 aa, synthetic construct
MTYQEGGERMKKITKIEGNLANSFIKPKTRVVAYCRVSTDSNEQLVSLQAQKAHYETYIKANPEWEYAGLYYDEGISGTKKENRSDLLRMLSDCETGRIDLIITKSISRFARNTTDCLEMVRKLIGLGVHIYFEKENINTGTMESELMLSILSGLAESESISISENTKWAIQRRFQNGTFKISYPPYGYQNMDGQMIVIPKQAEIVKYIFAEVLSGKGTQKVANDLNQKGIPSKRGGRWTATTIRGILTNEKYTGDVLLQKTYTDSHFNRHTNYGEKNMYLVENHHEAIISHEDFEAVDVVLNQRAKEKGIEKRNSKYQNRYSFSGKIICSECGSTFKRRIHSSGRKYVAWCCSKHIGNITECSMQFIRDEDIKTAFVTMMNKLIYGQKFILRPLLNGLRNQNNVASFRRIEELETKIENNMEQSQMLTGLMAKGYLEPALFNKEKNSLEAERERLLVEKDQLTRSVNGNFTKVEEVDRLLKFATKSQMLTAYEDELFENYVEKIMVFSREEVGFELKCGITLKERLVN

SEQ ID NO: 19923 - protein, 584 aa, synthetic construct
MNTKVKVIKASNTGARNRNALHLDLKRVAAYCRVSTDSKDQLESYKSQVDYYTNLIKNNKNWILAGIYADEATTGTTATKRADFMRLISDCQNGDIDMIITKSISRFARNTLDTLKYVRLLKENNVGVVFEEENIDTLTMDGELLLTILSSVAQQEVENTSAHVKKGLKMKMEKGELIGFQGCLGYDYDPITKSISINEEEAKIVRYIFKRYLEGNGGSVIGRELEEQGYLTPRGKTKWSDTTVLGVIKNEKYIGDILMGKTFTVDPITKRRLANFGESDKYHIENHHEPIISKEDFEKAQEIRLRRAQNRNTIANKDRKREKLSRQYAFSSMLECGFCGEILSRRTWHTSSIYKKINWQCVKSTKKGKKYCPHSKGIQEAAIEKAFVESYRQLCQTDSTVIDDFLKIVEEEINDNTLVKDLKKIENQLNRIIGQERKLVNLHLEDSIDEEVYAKKYKKLTKQKEELLDEKKTLELTIKDENSIKERLKQFKKVLENKEIIEEFNRTVFESIVDKVVVGRIDKDGTVHPYDLTFYFKTGVKDSQNSNKFKDKRKNAKDNDIDKLCSYKNDEDEKLCYQAKDNAR

SEQ ID NO: 19924 - protein, 515 aa, synthetic construct
MKIKKIEAQSAVVKKLRVAAYCRVSTENEDQKESLEAQREHYESWIRMHDDWECVGVFYDFGISGTKADAREGLQALLYACRTGSVDYVLTKSISRFSRNTSDCLSLVRELLSYNIPIYFEKENIDTGSMESELILSVLSSMAQSESESISKNVKWSVKKRMEEGNFVFGYLPYGYTKDTAGNMVIDPVESEIVKLIFDLALNGMGTYKIAQLLDKRKVPTRKGGKWSGSTVKGILVNEKYYGAAAFQKTYTDSNFRRHNNHGEVDSFIAEDHHEAIISKEVFDRVQVMIQKRIDEHGIVKDMGKYHNKYPFSGIIICGECGGKFKRQTQSGGIAWACSTHLYNKDACSMMFIKDEAIKAAFVTMMNKLIFGCKQVLVPYYDALRLADTDESLQGILDLKNELQRNSDRKNDLRKLRVKGFLDAAMYNQELRRIEMESEEIRAKMKCIDRAGENGDIKETKKLLRFAESAEMLTEFSDELFTEYVDSIIVYTRTCIGFRLRCGLTLKEEVCTGTR

SEQ ID NO: 19925 - protein, 517 aa, synthetic construct
MNVIKIPAKPQKGNNAAKQEVKKLRVAAYCRVSTDNEEQATSYETQIEHYTEFINKNPEWELVKVYADDGISATSTKGREQFNAMIEDCKKGLIDMIFTKSISRFARNTVDCLNYIRMLKEMNIPVFFEKESINTMDSKGEVLLTIMASLAQQESESLSQNVKIGVQYRFQQGKVMVNARRFLGYDKDDEGHLIINPEQAEIVKRIFREYLEGASCKKIAQGLQRDGIPNARGSTKWHDNSIRLILGNEKYMGDALLQKTYTVDCLSKKRIKNSGIVPQYYVEDDHEAIISKEIFLMVQEEMARRARTQLPFGGKKGYSANHAFSQIIFCAGCGEQFRRIHWNNRGKKSVVWRCVTRLKEKEKCRARTVSEETLKAAFLEALNEMVDDSETYLNRLRENLEAAINSANPMSAEALSAKMAELQRELINRTERRENYDDITEEILRLRELQEQKGMDDATQKEHTKRIKELQKFIQSQPSEITEFDESLVKKLLEKVTVHDDYLEFRFKSGVTISIEM

SEQ ID NO: 19926 - protein, 503 aa, synthetic construct
MTQKQNGLAYSYIRFSSKKQEQGDSVRRQTEAAIKYALDNNLILSDKNFQDLGISAFKEGNRPSLADLLSAIEEGSIETGSTIIIESLDRLSRRGIEVTQQIIKSILHHGVFIASLVDGLLLNKESVNDLVSVIRIALAADLAHKESEKKSQRLRETKGQQRQAALEGKPINKILPFWLTRNKDGYCFSERLETVKRIVNLKQSGHGSNKIAQILNKEGYKALRSGEWNHTTIIKTIKNPALYGAYQTTETTKDRKVIKLDLIENYFPAVISKDEWMLLQSDHKKDKSGYKSPLNAYTGLLKCECGGALARQFQTYKGKRYSYHICTNRRDGRNCSLTKSIKNLEDGLSIILGKLELKKTKKLDNSILVERNDIQQKIQNLNEMLLTISKVPASVITTIGNLEEKLSQLDLEIQTHRSIERSEQSVELDRLSSVKDPIELNMLLKRVLKEITVTEMNKGWRVAIKYLNGHSQRFLWKDDRISFLSDTKKLLDYLESIREPDDE

SEQ ID NO: 19927 - protein, 692 aa, synthetic construct
MAKKQRAALICRVSTPQQIKLGLESQVAVLKKRAIKDGYEVTDELIFQEQISGLDAKKPIRKSLQDLMDAVEEHKVDVCYTFELTRISRDPYNLVERVKWFTDRKIPMYIYDAEMWTLDRETKEELEETTSYVFGAATYGKVEIRKMKERTMRGRNEVAKEGMYVGHLSDGYCVVKTERGKEIRVDEDREEVIHKIFDLYTQGNTIDRIAEYLNTNNIPSANSYRLNSPKFKGYQETYRRKGSVVPIKRVGIKWQGSTISNYLHNKWYMGERTYNKQTYYIEPIISTEQWRVVSAMLERNAISFRSKKESTKHPYLLSGLLFCGNCGRRMYGHFTGLNNHYYCSSVEEGVKCGLRGVSKENIEAAVALVVKQKGGLDVVEGKEGVVSNFFKVSPKEEKRLKEEIKTNNKLIAEYEKKSDELDKNYAEAVKQTVKHADDKNRVAVYESMIAEIEDEKINLNNKKYRLTQQNILNTKKLNVGSNADKILTKLMDERNLSTLRELFVTVIEKVHVFNLTPSINVIIINFVDGTKECFLYSYRLMKQKIKIFTRSLFYYDMRDNVLRYKDSSVIVDAKELIKTDPLLIPFERLEELTDKAKEQDAKYKEWRKKYNTGLPTTVPYVVKDETYKEISLKKKHLYNRKYKIKKHKKLTSEEKKQMLAEIDKELAFLSAKVKYLNREEAVKEYRKQKGNR

SEQ ID NO: 19928 - protein, 546 aa, synthetic construct
MNETIKVVGYARFSSSMQREESITAQKRYMMMYAKRNNMEVIDWYCDEAKSAKTVNRPEFQRMINDAKNNPEFKAVLVHKTDRFSRNLSDSIQYKKILEEYGVQVIFVNERFEDNPESHLLYHIMGSVNQFYNENLAREVMKGLKENAYQCKFTGGRPPLGYDVDKDLKLVINEKEAEAVRLIFEMSAEGYGYGETIDKLNILGYKTKKGLPFVKNSLYEILKNEKYKGTYIFNRSCSANSLNKRNNHRRKPEEEIIRIENGCPAIVSSGLWHRANAVKKATRSSFTNAKNTYLLTGLIHCGECGGKFHGNIRYNKNNTNLVYRCSAKKNKRKCESKEIRCEYLDSFVIDKFVEFFFNDDNIKVITKQLNEQYSKSCISDLEYNEAKSTLKILEKSRNNLVEAIAKTGINDIMSDKIKEYEEQIKKTSEFIHKYEKQKIDRIITEDEVREQINHLKDYFYNPKNIIRTKFVLSQYIDRIDITNENVQVKFKVSMSPSGNTDGDYFCVHTETIKRKYLFDYVCEKVDFEQWDIEKLNKSESEHRKGA

SEQ ID NO: 19929 - protein, 503 aa, synthetic construct
MNGVIYARYSSDRQTEQSIEGQLRECQEYADANNIKIVGTYIDRAKTGRNDNRAGFQKMLRDSKQKFFDAVIVWKIDRFGRNREDIAKNKAILRRNGVSVLYAKEHIPEGAEGIILEGLLESLAEYYSAELREKITRGMRESAYKCQFNGSGLSIGYSVDKEHKFHIDPDGAKIVHLLFDMYDDGKTVAEILRHIKSCGIKTRRGKEFTHFGITRILRNRQYIGEYRWHDIVIPGGMPRIISDEQFERVNREMDKNKKAPARARGEDVSFLLTGKIFCGLCKGTMIGDSGTGKSGNKYYYYSCRAKKTRHTCKKKSVQKEWLEREVVRLTSSVVLQDDVIEYIADRVVDIQQKEREDKSIIDYLNNRLSETESAIRNIMKAIEAGIITETTGARLRELEAEREDLKIEIEREKIARPVISREQAIYFLERFKGGDVDDKEYQRQIIDMFVNKIFLYDDKIIITYNYNGDNNEITSEIVEKSAEEALSSASDRCSDKRTSRPPL

SEQ ID NO: 19930 - protein, 503 aa, synthetic construct
MANIRRIEPVLPRLKARKRVAAYARVSMETEQLHHSLSAQVCHYSALIQSNPEWEYVGVYVDEGITGTATKHRDDFKRLIADCEAGKIDLVLVKSVSRFARDTVDTLNATRHLKDLGIDVYFERENIHSISKEGELLLTLLAAFAQAESQSISENIKWSIRKKFKLGIPNGIKAPYGYEWNGDSFSIIPEQGEVVREIYDRYLAGEPAYSIAKGLAEKGVKGQSGVPMDDSTVKNILSSLSYTGTMLLQKNFFTEGHKRRKNKGELPMYAVEEMFEPLVSEADFDKAQQIMKNRASSMPNRNPKLTAFSGIVRCANCGCSISRRTSKYGKKWICNTKERKGKTVCDFRDVYESELEDAATKALSLDGFNADEVKHRIALITIDNAYITFRMKNGTSRQVLRKYQKGYSGFSMRLFCGSCGGMLEADTWKMGPAGKKTKCKVWVCRNCSAPREFDSMFRKAAQELFHEEQCDGLFARNIEKAINYDERIQFYYKKGEVVTWQKE

SEQ ID NO: 19931 - protein, 515 aa, synthetic construct
MKKQAISYIRFSSGKQAKGSSEWRQDAKVAHWLTQHPDYEPSDLSFEDLGKSGWKGAHIEGGMGELLAAVEAGFIRPGAVVLVEALDRAGRLDVADMLATVITPILRAGVSLYTLDDDVEYTKDSLNGGHIYLLVAKIQAANQFSERLSERVNKSYVRRREEAAQGKIPKRRTPLWLDGDGQLIEHLAPHIKQAFELYADGFGERRILRRLQETGIPEFQGLYGSTLKRWLQNKIAIGNWGDIVNVYPAVVDPELFYRVQERIAGNKTTRPASPSKHALTGIVKCGHCGRNYNYHVFKEQPTVLQCSNRFMTTAEKCENSKSVPLAVVEFVLLKTSQQARVEAIRKKKLTVNQKRVIVIEGEIASITQRLQGLARVIGRIGDEPELVQQFDELSAQRETLQKELESISASGSDVSILDQVQDIQITDADPMQLGADLQTVGYTITCTMDGKLVTTHGEIREWEYVGYQRASDSYVVKEGGQSSAGQFTAIPVAPFRNGSENIMEALGLKLNLIKE

SEQ ID NO: 19932 - protein, 578 aa, synthetic construct
MGYVTKKAAQRFEEKKAAIYVRVSTQYQVDRASLPVQREELINYAKYALGISDYVIFEDAGYSAKNTDRPDYQQMMARMRTGEFSHLLVWKIDRISRNLLDFSVMYAELKELGVVFVSKNEQFDTSSAMGEAMLKIILIFAELERKTTSERVSAVFVSRANDGIWNGGKVPYGYSYDKESKTFSIAEDEAKIVRLIYSLYESEKSIVRVARIMNERGLKSRAGSDWSPTTVHTILSSPFYSGTYRYNYRDESNAKRFREKGKDEWVLVENHHPAIVSPERQAAVGVILESKRYNKNATYQRKNVHVFAGLLTCGCCGSTMAATTDKVRADGWRPSMYICSRRRKSEDCTNKYVSDVTLGPFVLNFFANLIKASNSFGRTTSIETLEKKLLRGEALSHVDHIERPGLEELYNHLRSGFDEKCFESPTIAATESSADLSERDLLLSEKRRLERALNRLKTIYLYGDDEMASKDFNIERERITKALSEVDSRINELDIANAFDLSLSDEAFMQKASQFILTQQLLDKRYVNYERFIRKIDPKIVKDFLNETVSNFCIKDGLTTSILLKNGIELRFSYKTAE

SEQ ID NO: 19933 - protein, 555 aa, synthetic construct
MDSLRSTARRAVIYARFSTDLQNVNSTRDQIANCTALAERKEWQVLQVFEDAAISGAKRERPGYKKMLQAVKSGLVDVVLAEGLDRLNRSQELSANLFAVCEFNGVEIHTIAEGRIEELHIGMKGTMDAMHLKRIAQMTHRGLQGRVADGRSAGGLSYGYRIPIDPYTGLRQTGELEPDEHQADVVRRIFREFSEGHSPRAIAHQLNAEGVPSPRGREWKVNTIYGNAKRGTGILNNELYAGVRVWNRLQYRKNPETDQRASRGRDVEEIIRVEVPHLRIVDEELWQAVKARQDGQRRTLSKGAPSTLRRKRYLLSGLVRCGRCGGNMTVAGSGKSRAYYCANAKEKGPSVCRGMPGLRIDRLQPLVLSGLRDELMTPEAVERFRSQFLDRVAEARKERDTEQASLRRAIAQEQKAIDGALRAIRDDMATKSVYAMLGEAEEKKEALKAELAAVEAPALDIPENLAALYREQVDALADTLSDPEVVHRASEILGGLIDRIVIQHEETAGHTAEIEGKLLGLLSFADAKNAASYSDTASSLKLVAGVGFEPTTFRL

SEQ ID NO: 19934 - protein, 537 aa, synthetic construct
MQEKLRVAAYARVSTDKDDQTNSLENQKTYFKNYILDHEDWQLAEVYYDEGISGTQTKKRQGFRHMIEDAENKEIDLIVTKEVSRFARNTVDTLSYTRKLKDFGVGVIFTLDNIDTRDSDGEFRLTIMASIAQEESRKISERVKWGQKRQMEKGVVFGRDLLGYTVHHGVLAINQEEAPIIKAIFHMYTNEGKGTHVIARELSENGMRPKRVHQWSNTVILKILRNEKYVGDLCQKKTFTPNYLTHAKKYNHGEEDTVYLKDHHEAIIDRDLWERTQNELERRSPSADQKSKHSNRYWCSGKLFCAECGNRFVSRTKRLKNGEQYKAWRCHATAAHGTLKEDADGNSIGCNNNSINDKALQACMSYCISLIQSEKDSLREEILSEIALVQKNTVKKTDTKRIKKKIEQLESKKRKAIDLILDELISKEDLKAQTDWYNAEIEKLNIQLSESLHEAKEESRQKNKLEKYIAALDDIMSADSNNELLYKEVLDHIDMYKDNILTIWLKCIPFGIQLKIKTSGRQNCFKTDILETTFIQI

SEQ ID NO: 19935 - protein, 502 aa, synthetic construct
MAKPNEITEAAAYLRKSRMEEGMETEEVLSRHQKTLTDYAERNGIRIIETYCEVVSGESLYARPQMLRLLEDVSEGNYEAVLVMDLDRLSRGRMKDQGIILDAFRDSGTLIVTPDKTYDLSDDIDDELAEFKTFMSRREYKIINKRLRRGLEQSIKDGYYVANPPYGYQRIFVDKRPTLEPLEEEARFVRMMFEMYTNGHGCTSIARHVNLLGARPHRSAKFSRNSVAAILTNSVYVGKVVFNKKKHIKKGSKGNPKHITIYNPKEKWTIVNGVHPPLISKELFEKAQEIMNGRYIPSKKDGTVRSPLAGLVRCKNCGRNMQRLSIKGVDYLLCVEPGCCASAKFEFVEQRVLKHLQDILDDLMAEKSDSAQEKDTSAIDEKLVAIRREMANADRQKTRLYDLLELGEYDLPLFRERMAVVKDKMDALEAEEYKALESIKRIQQTDKAAQARKIATVLESYSESDAPQRNALLHSIVEVIWYSKAKKSKPTEFTLQINLKPF

SEQ ID NO: 19936 - protein, 560 aa, synthetic construct
MAIAIYPRVSTGSQAADGTSLDAQTELCLKRISDLGHSLTEVIVYREEGASGEDIERPQLNRLRQDIAAGLITHVFVTHPDRLSRDLTDKLFICREFESKGVALVFVDTEYSSTPEGQLFFNLMSVIAQYELALIKKRTVRGRLKAVERDKKIMPMRVPPFGYNFENQNLVINEKEAEIVRSIYQWYIFDHLTLREIGSKLFDLGVAPKRKESEHWGASSIVRILNSEVYIGKYYYNRRKFKKVKGEKTKGGAPKKTYEFREKGDWILVEIEPIIDSTLFELAKEQRVKNSTGSGNMKYEYLLKSLIKCSHCGRTWNCTTYTGNQLHSRESVRYTCYRCPNKNPRRYGEGIERCPAQTLRADLLDEYIWDLIMSVISDPNEYIAQLEVMSDSIVTEVRQAIEMIKNQLTEKGKEIEKIKIMFKRDVIDEEQMAAEIAQINVSKLELQQSLDNYLMQLGAFEEGNLNAEKIIYATERIQKFIQNGGTELSFEDKRKIVNWLIDEVRVHYLGDEVQITTIGHLESLLSEQPNNGANIGVMLHRKFKLKRANVYSPKKIVEWE

SEQ ID NO: 19937 - protein, 546 aa, synthetic construct
MPTAVIYARYSSHAQRDASIDQQLAVCRAFAARGGIDVVDTYTDRALTGTNDNRPGFRRMISDAQKGRWNYVIVYALDRFSRDRYDAATNKHKLRQAGVKVISATEPISDEPAGILMESMLEGWAEYYSRELSVKTRRGMSDNAQKCMVNGPVPYGYRRGVDGKYEIVPEEAAVVREIFRRVAAGESFRAISEDLNARGIRRRKNALWDSSSYNWMLSNVRYVGVYVYRDVRIPGGVPAIVTQAEFDTVQQRMAYKRNPRRSAMADAPISRRRDDGLYLLTGKLFCGGCRSPMIGTSGTARSGSLHHYYACRGRTSKTAPGCTLKNVRQGDIEYDIAAAIRTKFLNPETIRAIAEASYAYQLQASANPELPLLEQQLADTNRALKNIMAAIEQGIFTASTRNRLQELEAEKLDLSTRLAIAREHAEKLPTKQEIAAALTYYATGDLTDPLYQEALIDAFLVRAYVYPDHYSIYFSPDATTAVDVPSSVFSAPDPPSLPPTGSHSAPDGSPNRKRADAKASASFFTQCAAGNPAAFAYRCSCCFNAA

SEQ ID NO: 19938 - protein, 507 aa, synthetic construct
MKRVISYIRFSSERQAKGDSLRRQSKMVTDWLKAHPEYYLDESLTFRDLGVSGFTGKHLKGGLGDFLTAIEKGLVKAGDTLLIESLDRLSRQDVDQASELLRNILRSGVDVVTLSDGEHYTRESLKDPLALIKSILIMQRAHEESLRKAERIQAAWNRKKELISEGIKISKRCPAWLKLNDDRKSFSVIPDKVETVKRCFQLRLEGKSIWEIVRTLNAEGHRSMNQYKPGKFGQTSVQDLLKNRSVIGYFTPKGCGEIAGYYPSVIDETTFYKVQQLSYSRYGRKPASDKPLSVNLFKGVIRCSECGHALIITGFSDTRSGIYRCPLRNENRCSAKGLSRKQTDGTLLTLLSRLDRFDSDMTNTIDTLKLHREHISSNIEKLVQLSLEIEDLNAITNKLKQLKNELSQVDADIEKETQRLKSIDTGSLSDCDLSTKAGRIEAQLIIKSAVKEVVLNTAKRRCKVTFHNGRAITLPITENPSKDVTEAIQSLSEVTERGLIDVDEVII

SEQ ID NO: 19939 - protein, 508 aa, synthetic construct
MKKAIAYMRFSSPGQMSGDSLNRQRRLITEWLKVNSDYYLDTVTYEDLGLSAFNGKHAQSGAFSEFLDAIEHGYILPGTTLLVESLDRLSREKVGEAIERLKLILNHGIDVITLCDNTVYNIDSLNEPYSLIKAILIAQRANEESEIKSSRVKLSWKKKRQDALESGTIMTASCPRWLSLDDKRTAFVPDPDRVKTIELIFKLRMERRSLNAIAKYLNDHAVKNFSGKESAWGPSVIEKLLANKALIGICVPSYRARGKGISEIAGYYPRVISDDLFYAVQEIRLAPFGISNSSKNPMLINLLRTVMKCEACGNTMIVHAVSGSLHGYYVCPMRRLHRCDRPSIKRDLVDYNIINELLFNCSKIQPVENKKDANETLELKIIELQMKINNLIVALSVAPEVTAIAEKIRLLDKELRRASVSLKTLKSKGVSSLGDFHAIDLTSKNGRELCRTLAYKIFEKIIINTDNKTCDIYFMNGIVFKHYPLMKVISAQQVISTLKYMVDGEIYF

SEQ ID NO: 19940 - protein, 547 aa, synthetic construct
MKLLATYIRWSTREQDSGDSLRRQTNLIDAFYAKHKDDYYLLPAHRYVDKGKSGFHQQHKAQGSDFRRMFENVMSGAIPEGSLIVVENFDRFSRADIDTAIDDVRQILRKGVSILTLGDGELYDKSALTDPVKLIKHIIIAERAHQESLVKQKRIAQVWNHKTQLARELKKPMGKQAPGWLELSEDGSHYIVDEDKASLVNIIYDKRLSGMSMFAICKWLNEQGYPTINQRKVRISKTKKPDGNWSALSVKHILTSRSVLGYLPAKISTEDRKTVLREEIESFYPQIVTDSKFYAVQQLLEETGKGKTSSGEHWLYVNILKGLIRCKCGLVMTPTGIRKPVYQGTYRCNGNKESRCSYGTVSRKLLDTQLCSRLFSKLSQLHDEATDTAKLDELQRRLNTVDSELEKLTETLIQLPNITQIQEALRVKQEEKDELIVQLSREKARVKSVSSLDLSGLDMESVEGRTEAQIIIKRLVKEIVVSGNEKLVDIYLHNGNMIRGFPLDGKDDHTLTLEEATDEMQSLDDMLIFGEPVTRIYPAGDMEEVDA

SEQ ID NO: 19941 - protein, 470 aa, synthetic construct
MLRPICYERVSSIQQIEGGGGLDDQRSALEGYLDRNSDKFNNERVFIQDRGVSAFKNSNISSESQLGIFLQDVQNRKYGEGDALIVMSLDRISRRSSWAEDTIRFIVNSGIEVHDISASTVLRKDDPHSKLIMELIQMRSHNESLMKSVRAKAAWDRKIIEAVQNGTVISNKMPMWLKNVDNRYQVIQEKADLIIRCFEWYRDGFSTGEIVKRIADPKWQMVTVSRLVRDRRLLGEHKRYNDEVIHNVYPKVIDDDLFLTANRMMDRVMLEKNKPAEDLLLESEVVQEIFQLYESGLGSGAIVKRLPKGWSTVNVLRVLRDKKVVTQKIIDNLTFERVNQKLSMNGVANRIRKDITIAQDDYITNLFPKILKCGYCGGNIAIHYNHVRTKYVICRNREERKICDAKSIQYIRIEKNILKCVKNVDFQKLMIESTGSETSVLDGLREELSSLRREESSYNDKINERKLAGK

SEQ ID NO: 19942 - protein, 559 aa, synthetic construct
MKTKLYSYIRFSSMRQGDGSSYERQIRMAREIAAKYDLELVNDYQDLGVSAFKGANSKTGALSRFLDAIGRSVPVGSWLFIENLDRLSRADIVSAQELFLSIIRRGITIVTGMDNKIYSLDTVTANPMDLMFSILLFIRGNEESQTKRNRTNSSALIKIKAHQENPQNPAVAIEEVGKNMWWTDTTSGYVLPHPVYFPVVQEIVELRKNGRSTAEILDHLNETYAPPPAVSNKKHSKWSRAMVERLFHTRALIGIKEVSVDGVNYELKDYYPRVIDDATFYHLKKNIGARAWNFGDKEEAKPIPLLSGIGLLKCDHCGCAMVKVKGTNKRSDQYRYTCDATRSRRLDCEHPNWSFRGDQLEKAVLQLLADKIWIAEDKANPVPALKVQVDEISRKIDNLIALSAMTGATKELADQITTLNSERETLYNQIKMAEEEMYSVDSQGWEKLAEFDLEDVYNEERLKVRFKIKQALKRIGCSRIDRNKNLFVLEYIDGKTQRVVIENSRGTRKGQIFVDLKTINDRQILESNGLVLHPCLDMLTDKNWKPEEEIPGPLQEFGI

SEQ ID NO: 19943 - protein, 508 aa, synthetic construct
MKKAIAYMRFSSPGQMSGDSLNRQRRLIAEWLKVNSDYYLDTITYEDLGLSAFKGKHAQSGAFSEFLDAIEHGYILPGTTLLVESLDRLSREKVGEAIERLKLILNHGIDVITLCDNTVYNIDSLNEPYSLIKAILIAQRANEESEIKSSRVKLSWKKKRQDALESGTIMTASCPRWLSLDDKRTAFVPDPDRVKTIELIFKLRMERRSLNAIAKYLNDHAVKNFSGKESAWGPSVIEKLLANKALIGICVPSYRARGKGISEIAGYYPRVISDDFFYAVQEIRLAPFGISNSSKNPMLINLLRTVMKCEACGNTMIVHAVSGSLHGYYVCPMRRLHRCDRPSIKRDLVDYNIINELLFNCSKIQPVENKKDANETLELKIIELQMKINNLIVALSVAPEVTAIAEKIRLLDKELRRASVSLKTLKSKGVNSFSDFYAIDLTSKNGRELCRTLAYKTFEKIIINTDNKTCDIYFMNGIVFKHYPLMKVISAQQAISALKYMVDGEIYF

SEQ ID NO: 19944 - protein, 506 aa, synthetic construct
MRTVITYLRFSSAIQGAEGADSTRRQNDLFKQWLKKNSDAQVVASFSDEGLSGYKGKHLTGQFGDMLARIEAGEFPAGAILLVESIDRIGRLEHLETEALMNRIIAHGIEIHTLQDGLIYTRDALSDDLGISIIQRVKSYLAHQESKQKSFRVSEKWKQRAKLALAGEQRLTKMVPGWIDPDTLKLNEHAETVRLIFKLLLDGESLHNIARHLQSNDIKSFSRRKDANGFSVHSVRTILRSETTRGTLPASQRNDRPAIPNYYEAAIDAATFNKAQEILDKNRKGRTPASDNPLTINIFKGLFRCQCGASVHPTGTKNKYAGVYRCNNHLDGRCDVPPLKRKPFDRWMIDNFLGMIDVGNDGESERKIAALQHEVEIVTARIKKATALLLEMDDITELKAQVKELNQKRTELQTTIDSMRRKTSLTDKELPQLKDIDLTTKAGRVECQLILSKHLKGLTLGKDSVTVTLQNDTEITIPTNPLPLNDGSPIFEIAEKNLLNIDTFQL

SEQ ID NO: 19945 - protein, 506 aa, synthetic construct
MRSVITYLRYSSAIQGAEGADSTRRQNDLFKQWLKKNSDAQVVASFSDEGLSGYKGKHLTGQFGDMLARIESGEFSKGTILLVESIDRIGRLEHLETEALMNRIIAHGIEIHTLQDGLIYTRDALSDDLGISIIQRVKSYLAHQESKQKSFRVSEKWKQRAKLALAGKQRLTKMVPGWIDPDTLKLNEHAETVRLIFKLLLSGESLHNIARHLQSNGIKSFSRRKDANGFSVHSVRTILRSETTIGTLPASQRNDRPAIPNYYEAAIDAATFNKAQEILDKNRKGRTPASDNPLTINIFKGLFRCQCGASVHPTGTKNKYAGVYRCNNHLDGRCDVPPLKRKPFDKWMIDNFLGMIDVGNDGEAEGKIASLQHEVEIVTARIKKATALLLEMDDIDELKIQIKELNQRRTELQTTIDSMRRKASLTDKELPQLKDIDLTTKAGRVECQLILSKHLKGLTLGKDSVIVTLQNDTEITIPTNPLPLNDGTSIFEIAEKELLEIDAYQL

SEQ ID NO: 19946 - protein, 559 aa, synthetic construct
MKTKLYSYIRFSSMRQSDGSSYERQIRMAREIAAKYDLELVNDYQDLGVSAFKGANSKTGALSRFLDAIGRSVPVGSWLFIENLDRLSRADIVSAQELFLSIIRRGITIVTGMDNKIYSLDTVTANPMDLMFSILLFIRGNEESQTKRNRTNSSALIKIKAHQENPQNPAVAIEEIGKNMWWTDTTSGYVLPHPTYFPVVQEIVELRKNGRSTAEILDHLNETYTPPPAVSNKKHSKWSRAMVERLFHTRALIGIKEISVDGVNYELKDYYPRVIDDPTFYHLKKNIGARAWNFGDKEEVKPIPLLSGIGLLKCDHCGCAMVKVKGTNKRSDQYRYTCDATRSRRLDCEHPNWSFRGDQLEKAVLQLLADKIWIAEDKANPVPALKVQVDEISRKIDNLIALSAMTGATKELADQITTLNSERETLYNQIKMAEEEMYSVDSQGWEKLAEFDLEDVYNEDRIKVRFKIKQALKRIGCSRIDRNKNLFVLEYVDGKTQRVVIENSRGTRKGRIFIDLKTINDRQILESNGLVLHPCLDMLTDKNWKPEEEQAGPLQEFGI

SEQ ID NO: 19947 - protein, 547 aa, synthetic construct
MKLLVPYIRWSTKEQDSGDSLRRQTNLIDAFYSKHKNDYYLLPAHRYVDKGKSGFHQQHKNQGSDFRRMFENVMSGAIPEGSLIVVENFDRFSRADIDTAIDDVRQILRKGVSILTLGDGELYDKSALTDPVKLIKHIIIAERAHQESLVKQKRIAQVWNHKTQLARELKKPMGKQAPGWLELSEDGSHYIVDEDKASLVNIIYDKRLSGMSMFAICKWLNEQGYPTINQRKVRISKTKKPDGNWSALSVKHILTSRSVLGYLPAKISTEDRKTVLREEIEGFYPQIVTDSKFYAVQQLLEETGKGKTSSGEHWLYVNILKGLIRCKCGLVMTPTGIRKPVYQGTYRCNGNKESRCSYGTVSRKLLDTQLCSRLFSKLSQLHDEATDTAKLDELQRRLNTVDSELEKLTETLIQLPNITQIQEALRVKQEEKDELIVQLSREKARVKSVSSLDLSGLDMESVEGRTEAQIIIKRLVKEIVVSGNEKLVDIYLHNGNMIRGFPLDGKDDHTLTLEEATDEMQSLDDMLIFGEPVTRIYPAGDMEEVDA

SEQ ID NO: 19948 - protein, 508 aa, synthetic construct
MKKAIAYMRFSSPGQMSGDSLNRQRRLIAEWLKVNSNYYLDTITYEDLGLSAFKGKHAQSGAFSEFLDAIEHGYILPGTTLLVESLDRLSREKVGEAIERLKLILNHGIDVITLCDNTVYNIDSLNDPYSLIKAILIAQRANEESEIKSSRVKLSWKKKRQDALESGTIMTASCPRWLSLDDKRTAFIPDPDRVKTIELIFKLRMERRSLNAIAKYLNDHAVKNFSGKESAWGPSVIEKLLANKALIGICVPSYRARGKGISEIAGYYPRVISDDLFYAVQEIRLAPFGISNSSKNPMLINLLRTVMKCEACGNTMIVHAVSGSLHGYYVCPMRRLHRCDRPSIKRDLVDYNIINELLFNCSKIQPVENKKDANETLELKIIELQMKINNLIAALSVAPEVTAIAEKIRVLDKELRRASVSLKTLKSKAVSSLGDFHAIDLTSKNGRELCRTLAYKTFEKIIINTDNKTCDIYFMNGIVFKHYPLMKTISAQQAISTLKYMVDGEVYF

SEQ ID NO: 19949 - protein, 527 aa, synthetic construct
MAKVTCIPQTRNRITSMPTAAMKRKRVAAYARVSTDSDEQFTSYEAQVDYFTSFIKARDDWEFVDVYTDEGITGTSTKHREGFKQMVADALDGKIDLIVTKSVSRFARNTVDSLTTVRQLKERGVEVFFQKENIYTFDGKGELLITIMSSLAQEESRSISENVTWGQRKRFADGKVSMPYKRFLGYDKGPDGTPVVNEEQAEIVRMIFRRFLEGKTPLAICNELEGLGVRSPGGKDTWRSSTILSILSNEKYKGDALLQKRYTVDFLTKVLKKNEGEVPSYYVEDSHPAIIDPAEFDMVQAELSRRKAVGRSYSGTGTFASKLYCADCGGVFGQKVWHSNDKYRRIIWQCNSKFKAGKSKCATPALNEQAIRDMFLKAYAALLAQRRDIIDDCVTAVSALTNVDALNRSISAENERLEQNTELIRAVVREHASIAQTKEDYHRKYDPLMEEHSAISSKLDKLLAERESKTEHGKRLRSFLDALKQAPEALLVWDEQLWLLLVDHATVYPNGSIAFSFKNGTDITVND

SEQ ID NO: 19950 - protein, 441 aa, synthetic construct
MPKVTKIAPRAQTARLLRVAAYARVSCGKDAMLHSLSAQVSQYSRLIQSHSGWQYVGVYADEATTGTKDDRADFQRLLDDCRAGKIDMVITKSVSRFARNTVILLSTVRELKALGIDVYFEEQNIHSASADGELMLTILASFAQEESRSVSENCKWSIRQRFKKGEPTFFRCYGYKWVDGQLQLVPEEAVVVKRIFESYLNGNGLPAISKELAEAGIPSRDGGKWTIISLYYMLRNERYIGDLLLQKEYVADHISKKKVRNNGELPQYYVTDAHEPIINREMFDAVQVELERRREKYSAKDGPTIGRVYPFSGKLNCCTCGDRYRRKIANCGSKYAHPIWICSTFNQKGKAACASKQIPEQILMDTVAKALAIPMFDEDVFDDMVDHIDVTGLNLIRICFKDGTSKDAVWHDRSRKSSWTPEMRAKAAEYSRKGRESKWQK

SEQ ID NO: 19951 - protein, 506 aa, synthetic construct
MRHVITYLRYSSAIQGAEGADSTRRQNDLFKQWLKKNSDAQVVASFSDEGLSGYKGKHLTGQFGDMLARIESGEFPAGTILLVESIDRIGRLEHLETEALMNRILGNGIEIHTLQDGLIYTKDALADDLGISIIQRVKAYIAHQESKQKSFRVSQKWEQRAKLALAGEQRLTKMVPGWIDPDTFKCNEHAETVRLIFKLLLDGESLHNIARHLQANNISSFSRRKDANGFSVHSVRTILRSETTRGTLPASQRNDRPAIPNYYEAAIDAATFNKAQEILDKNRKGRTPASDNPLTINIFKGLFRCQCGASVHPTGTKNKYQGVYRCNNHLDGRCDVPPLKRKPFDKWMIDNFLGMIDVGNDGEAEGKIAALQHEVEIVTARIKKATALLLEMDDIDELKIQLKELNQKRTELQTTIDNMRRKASLTDKELPQLKDIDLTTKAGRVECQLILSKHLKGLTLGKDTVTVTLQNDTEITIPTDPLPLNDGTSIFEIAEKNLLNIDTFQL

SEQ ID NO: 19952 - protein, 508 aa, synthetic construct
MKKAIAYMRFSSPGQMSGDSLNRQRRLIAEWLKVNSDYYLDTITYEDLGLSAFKGKHAQSGAFSEFLDAIEHGYILPGTTLLVESLDRLSREKVGEAIERLKLILNHGIDVITLCDNTVYNIDSLNDPYSLIKAILIAQRANEESEIKSSRVKLSWKKKRQDALESGTIMTASCPRWLSLDDKRTAFVPDPDRVKTIELIFKLRMERRSLNAIAKYLNDHAVKNFSGKESAWGPSVIEKLLANKALIGICVPSYRARGKGISEIAGYYPRVISDDLFYAVQEIRLAPFGISNSSKNPMLINLLRTVMKCEACGNTMIVHAVSGSLHGYYVCPMRRLHRCDRPSIKRDLVDYNIINELLFNCSKIQPVENKKDANETLELKIIELQMKINNLIAALSVAPEVTAIAEKIRVLDKELRRASVSLKTLKSKAVSSLGDFHAIDLTSKNGRELCRTLAYKTFEKIIINTDNKTCDIYFMNGIVFKHYPLMKTISAQQAISTLKYMVDGEVYF

SEQ ID NO: 19953 - protein, 507 aa, synthetic construct
MKRVISYIRFSSERQAKGDSLRRQSKMVNDWLKAHPEYYLDQDLSFRDLGVSGFTGKHLKGGLGDFLTAIEKGLVKAGDTLLIESLDRLSRQDVDQASELLRNILRSGVDVVTLSDGEHYTRESLRDPLALIKSILIMQRAHEESLRKAERIQAAWDAKKEAAKAGIKVSKRCPAWLKLNDDRKTFSVIPEKVETVRRCFQLRLEGKSIWEIVRTLNAEGHRSMNQYKPGKFGQTSVQDLLKNRSVIGYFTPKGCEEISGYFPPIIPETDFYKVQQLSYARYGRKPASDKPLSVNLFKGVIRCSECGHALIITGFSDTRNGIYRCPLRNENRCSAKGLSRKQTDGTLLTLLSRLDRFDSDTTNTIDTLKLHREHISNNIEKLVQLSLEIEDLSAITSKLRQLKGELSQVDADIEKETQRLKSIDVGCLSDCDLTTKAGRIEAQLIIKSAVKEVVLNTAKRRCKVTFHNSKSITLSITENPSEDVTEAIQSLSEVTERGLIDVDVVEI

SEQ ID NO: 19954 - protein, 507 aa, synthetic construct
MKRAISYIRFSSEKQSRGDSLRRQAKMVTDWLKAHPEYYLDESLTFRDLGVSGFTGKHLKGGLGDFLTAIEKGLVKAGDTLLIESLDRLSRQDVDQASELLRNILRSGVDVVTLSDGEHYTRESLKDPLALIKSILIMQRSHEESLRKSERIQAAWDAKKEAAKAGIKISKRCPAWLKLNDDRKTFSVIPEKVETVRRCFQLRLEGKSIWEIVRTMNAEGHQTLNQYKAGSFGQTSVQDLLKNRSVIGYFTPKGCEEIAGYYPAIIDETTFYKVQQLSYARHGRKPASAKPLSVNLFKGVIRCSECGHALIITGFSDTRSGIYRCPLRNENRCSAKGLSRKQTDGTLLALLSRLDRFDSDTTNTIDTLKLHREHISSNIEKLVQLSLEIEDLNAITNKLKQLKNELSQVDADIEKETQRLKSIDVGCLSDCDLSTKAGRIEAQLIIRSAVKEVVLNTAKRRCKVTFHNGKVIDLPITENPSEDVTEAIQSLSEVTERGLIDVDEVII

SEQ ID NO: 19955 - protein, 507 aa, synthetic construct
MKRVISYIRFSSERQAKGDSLRRQSKMVNDWLKAHPEYYLDQDLSFRDLGVSGFTGKHLKGGLGDFLTAIEKGLVKAGDTLLIESLDRLSRQAVDRASELLRNILRSGVDVVTLSDGEHYTSESLKDPLALIKSILIMQRAHEESLRKSERIQAAWNRKKELISEGIKISKRCPAWLRLNDDRKSFSVIPEKVETVKRCFQLRLEGKSIWEIVRTLNDEGHQSMSQYKPGKFGQTSVQDLLKNRSVIGYFTPKGCEEISGYYPAIIDETTFYKVQQLSHYRYGRKPVSDKPLSVNLFKGVIRCSECGHALIITGFSDTRNGIYRCPLRNENRCSAKGLSRKQTDGTLLTLLSRLDRFDSDTTNIIDMLRLHREHISSNIEKLVQLSLEIEDLNAITSKLKQLKGELSQVDADIEKETQRLKSIDVGCLSDCDLTTKAGRIEAQLIIKSAVKEVVLNTAKRRCKVTFHNSKSITLSITENPSEDVTEAIQSLSEVTERGLIDVDEVII

SEQ ID NO: 19956 - protein, 507 aa, synthetic construct
MKRVISYIRFSSEKQAKGDSLRRQSKMVTDWLKAHPEYYLDQDLSFRDLGVSGFTGKHLKGGLGDFLTAIEKGLVKAGDTLLIESLDRLSRQAVDRASELLRNILRSGVDVVTLSDGEHYTKESLRDPLSLIKSILIMQRSHEESLRKSERIQAAWDAKKEAAKAGIKVSKRCPAWLKLNDDRKSFSVIPEKVETVKRCFQLRLEGKSIWEIVRTLNAEGHQTLNQYKAGKFGQTSVQDLLKNRSVIGYFTPKGCEEISSYYPSVIDETTFYKVQQLSHSRYGRKPVSDKPLSVNLFKGVIRCSECGHALIITGFSDTRNGIYRCPLRNENRCSAKGLSRKQTDGTLLTLLSRLDRFDSDMTNTIDTLKLHREHISSNIEKLVQLSLEIEDLSAITSKLKQLKGELSQVDADIEKETQRLKSIDVGCLSDCDLSTKAGRIEAQLIIKSAVKEVVLNTAKRRCKVTFHNGKVIDLPITENPSEDVTEAIQSLSEVTAKGLIDVDEVII

SEQ ID NO: 19957 - protein, 506 aa, synthetic construct
MRHVITYLRYSSAIQGAEGADSTRRQNDLFKQWLKKNSDAQVVASFNDEGLSGYKGKHLSGQFGDMLSRIESGEFSEGTVLLVEAIDRIGRLEHLETEALMNRIIAHGIEIHTLQDGLIYTRDALSDDLGISIIQRVKSYIAHQESKQKSFRVSQKWEQRAKLALAGEQRLTRNVPGWIDPDTFKCNEHAETVRLIFKLLLDGESLHNIARHLQSNDIKSFSRRKDANGFSVHSVRTVLRSESVIGTLPASQRNDRPAIPNYYEAAIDAATFNKAQEILDKNRKGRTPASDNPLTINIFKGLFRCQCGASVHPTGTKNKYAGVYRCNNHLDGRCDVPPLKRKPFDKWMIDNFLGMIDVGNDGEAEGKIASLQHEVEIVTTRIKKATALLLEMDDITELKTQVKELNQKRTELQTTIDSMRRKTSLSDKGLPQLKDIDLMTKEGRVECQLILSKHLKGLTLGKDSVTVTLQNDTEITIPTNPLPLNDGSPIFEIADKELLDIDAYQL

SEQ ID NO: 19958 - protein, 506 aa, synthetic construct
MRTAITYLRFSSAIQGAEGADSTRRQNDLFKQWLKKNSDAQVVASFSDEGVSGYKGKHLTGQFGDMLARIEAGEFPEGTILLVESIDRIGRLEHLETEALMNRILGNGIEIHTLQDGLVYTKDALADDLGISIIQRVKAYIAHQESKQKSFRVSQKWKQRAKLALAGEQRLTRNVPGWIDPDTLKLNEHAETVRLIFKLLLSGESLHNIARHLQSNGIKSFSRRKDANGFSVHSVRTILRSETTIGTLPASQRNDRPAIPNYYEAAIDAATFNKAQEILDKNRKGRTPASDNPLTINIFKGLFRCQCGASVHPTGTKNKYAGVYRCNNHLDGRCDVPPLKRKPFDRWMIDNFLGMIDVGNDGEAEGKIASLQHEVEIVTARIKKATALLLEMDDIDELKIQIKELNQRRTELQTTIDNMRRKASLTDKELPQLKDIDLTTKAGRVECQLILSKHLKGLTLGKDSVIVTLQNDTEITIPTNPLPLNDGTSIFEIAEKELLEIDAYQL

SEQ ID NO: 19959 - protein, 507 aa, synthetic construct
MKRVISYIRFSSEKQAKGDSLRRQSKMVTDWLKAHPEYYLDQDLSFRDLGVSGFTGKHLKGGLGDFLTAIEKGLVKAGDTLLIESLDRLSRQDIDIASELLRNILRSGVDVVTLSDGEHYTRESLRDPLALIKSILIMQRAHEESLRKAERIQAAWDAKKEAAKAGIKVSKRCPAWLKLNDDRKSFSVIPEKVETVKRCFQLRLEGKSIWEIVRTLNDEGHQSMSQYKPGSFGQSSVQDLLKNRSVIGYFTPKGCEEISGYYPAIIDETTFYKVQQLSHYRYGRKPVSDKPLSVNLFKGVIRCSECGHALIITGFSDTRNGIYRCPLRNENRCSAKGLSRKQTDGTLLTLLSRLDRFDSDTTNTIDTLKLHREHISSNIEKLVQLSLEIEDLSAITIKLRQLKGELSQVDADIEKETQRLKSIDVGCLSDCDLTTKAGRIEAQLIIKSAVKEVVLNTAKRRCKVTFHNGKLIDLPITENPSEDVTEAIQSLSEVTERGLIDVDEVII

SEQ ID NO: 19960 - protein, 507 aa, synthetic construct
MKRVISYIRFSSEKQSRGDSLRRQSKMVTDWLKAHPEYYLDQDLSFRDLGVSGFTGKHLKGGLGDFLTAIEKGLVKAGDTLLIESLDRLSRQDVDQASELLRNILRSGVDVVTLSDGEHYTRESLKDPLALIKSILIMQRSHEESLRKSERIQAAWNRKKELISEGIKISKRCPAWLKLNDDRKSFSVIPDKVETVKRCFQLRLEGKSIWEIVRTLNAEGHRSMNQYKPGKFGQTSVQDLLKNRSVIGYFTPKGCEEISGYYPAIIDETTFYKVQQLSHYRYGRKPVSDKPLSVNLFKGVIRCSECGHALIITGFSDTRNGIYRCPLRNENRCSAKGLSRKQTDGTLLTLLSRLDRFDSDMTNVIDMLRLHREHISSNIEKLVQLSLEIEDLSAITIKLKQLKGELSQVDADIEKETQRLKSIDTGSLSDCDLTTKAGRIEAQLIIKSAVKEVVLNTAKRRCKVTFHNGKVIGLSITENPSEDVTEAIQSLSEVTERGLIDVDVVEI

SEQ ID NO: 19961 - protein, 545 aa, synthetic construct
MRHYKDYISQRSDWELAGIYADEEISGTQVGKRQDFQRLINDCVNGEIDYIVTKAIARFARNTLDTLKYVRMLKDMQIGVYFEEENIDTLTMDEELLLTILSSVAQQEVENTSAHVKKGLKMKMERGELVGFQGCLGYDYDVETKQISINKKEAKIVRYIFERYLEGIGGKVIARELDYKSPRGLEHWNDTTVLGIIKNEKYKGDILMGKTFTVDPISKRRLSNFGEEDKYYIKDNHEPIISKEDFEKAQEIRLRRAGNKKTAANVNGKRERYSKMYAFSSMLECGFCGSILSRRSWHCRSDYRKVVWHCVTSIKKGKKFCKHSKGLEKLAIEGDFMEAYRQLHHSNENLMTDLLETIESELNDNSLNRELKRITNKLRTLLKKEENLVNLRIEGKISDTIYDEKYNEISSEKEFLAEEKVNIETTLKSEIDVKKRLTEFKHLLSSQKMLTEFDRAVFESIVEKIIVGGVNSNGEIDPAMLTIIFKTGEIQNKDGKQFKSKRKNAKLETDKLCPQNSDEDKKLYSQGTDNTRGVCSVAGSILASQ

SEQ ID NO: 19962 - protein, 504 aa, synthetic construct
MEITVEKVDTGVQKLGFQALSTLKTVHVAVYARVSTDQEIQLHSLEEQMKAFRAKIAQHPGWMLVDVYADEGISGTSVKKRKEFLRMMEDCEAGKVDYIMAKSISRFARNTVECLSYVRHLQSIGVQLYFEKEGLDTATSVSELILTVMAAFAQEESRSISENLKWGIRKRFENGESRWTKTYGYRKTKDGEIVIEPDEAAIVRMIFKMYQYGITMPDILDELTFMQAPSARGRQTWNKTALKYLLENEKYIGDMRLQKWVSVDHISHKSVKNDSTVIPVYNVKNHHVPIIDRHTYQQVQRIMELKAPHGEYSRYPYFDTNFVCPLCGRKMIPRVMKVSRQKRIIGCFDVDGCRRYAVKAYLVDAALLEAYNTLEIKEKKRTVAMQRMLEIKAESPKLDTVQYYWLDDLVERIEFKQDTMQVFWKCGLESEVALSASKAEEPTHVAELYRNSLDCAQQSENKSVSVVRADKKLVSAVSPREAQRNAAMQAAKNLRAKKGTMANA

SEQ ID NO: 19963 - protein, 481 aa, synthetic construct
MITTNKVAIYVRVSTTNQVEEGYSIDEQKDKLSSYCDIKDWNVYKVYTDGGFSGSNTDRPALESLIKDAKKRKFDTVLVYKLDRLSRSQKDTLHLIEDVFIKNGIEFLSLQENFDTSTPFGKAMIGLLSVFAQLEREQIKERMQLGKIGRAKAGKSMMWAKTSYGYDYHRETGTITINPAQALAIKFIFESYLRGRSITKLRDDLNEKYPKHVPWSYRAVRTILDNPVYCGFNQYKGEIYPGNHESIISKEEYDKTQSELKIRQRTAAENVNPRPFQAKYILSGIAQCGYCGAPLKIMLGVKRKDGSRLKKYECHQRHPRTLRGVTTYNDNKKCDSGFYYKDKLEAYVLTEISKLQDNAGYLDKIFSGDNAETIDRESYKKQIEELSKKLSRLNDLYIDDRITLEELQSKSAEFISMRGTLETELENDPALRKNKRKADMRKLLNAEKIFSMDYEGQKVLVRGLINKVQVTAEDIVINWKI

SEQ ID NO: 19964 - protein, 562 aa, synthetic construct
MTTLPIDLSALTAEERKQFDAAPAVLSPDCDAVCCLYMRYSSDRQTEQSIEGQLRDLISHCKQHRYRIAAVYVDRAISAHAAMEKRPAFQQMLLDSARAPWKTVLVWKLDRFARNREDSAIARMRLRKNGCNVESAKEGISKNPEGVILESLLEGMAEYYSLELSQKVKRGMSETARKGQSTGGPIPLGYTVSNKRLTADPATAPLVVEAFTRYAAGETVAAICKSFNARGLRTARGTQFNKSSFQNVFRNEKYIGVYKYDGIQTENAVPRLIDDDLWAAVQSRLKTNAQAPARGKAKVPYLLAGKIFCGHCGAPMIGECGRGKAGRTYNYYSCSTRRRAHTCDKKPVPKDWIEDIVARDALDVLTDEVIDYVSTVAARQSEKEIQETTQIPVLRQQLKDTDVKLRNLLKALESSASAPDIIVTRIAELESQKKALTAQLSAESRSVLPLTKEMVTCFLETVRARAIPLETQKPMLLDLLVNSVTLYDDTPGFLTIKTAYNLTNLPPKTFRLPTSECSDINQIGSPNRKRADAKASASFFTQCAAGFPAAFAYRCSCCFNAA

SEQ ID NO: 19965 - protein, 481 aa, synthetic construct
MKTMNKVAIYVRVSTTNQVEEGYSIDEQKDKLSSYCDIKDWNVYKVYTDGGFSGSNTDRPALESLIKDAKKRKFDTVLVYKLDRLSRSQKDTLHLIEDVFIKNGIEFLSLQENFDTSTPFGKAMIGLLSVFAQLEREQIKERMQLGKIGRAKAGKSMMWAKTSYGYDYHRETGTITINPAQALAIKFIFESYLRGRSITKLRDDLNEKYPKHVPWSYRAVRTILDNPVYCGFNQYKGEIYPGNHEPIISKEEYDKTQSELKIRQRTAAENVNPRPFQAKYILSGIAQCGYCGAPLKIMLGVKRKDGSRLKKYECHQRHPRTLRGVTTYNDNKKCDSGFYYKDKLEAYVLKEISKLQDDADYLDKIFSGDNAETIDRESYKKQIEELSKKLSRLNDLYIDDRITLEELQSKSAEFISMRGTLETELENDPALRKNKRKADMRKLLNAEKVFSMDYENQKVLVRRLINKVKVTAEDIVINWKI

SEQ ID NO: 19966 - protein, 597 aa, synthetic construct
MKKNNVEIIKADSLVRRRGDNVERHLKRVAAYCRVSSDSEDQKNSYDSQVRHYKEYISQRSDWELADIYADEGISGTQVGKRQDFQRLINDCANGEIDYIVTKAIARFARNTLDTLKHVRMLKDMQIGVYFEEENIDTLTMDGELLLTILSSVAQQEVENTSAHVKKGLKMKMQRGELVGFQGCLGYDYDVETKQISINKKEAKIVRYIFERYLEGIGGKVIARELDELGYKSPRGLEHWNDTTVLGIIKNEKYKGDILMGKTFTVDPISKRRLSNFGEEDKYYIKDNHEPIISKEDFEKAQEIRLRRAGNKKTAANVNGKRERYSKMYAFSSMLECGFCGSILSRRSWHCRSDYRKVVWHCVTSIKKGKKFCKHSKGLEEIAIEGAFLEAYRQVYHSNENLMTDLLETIESELNDNSLNKELKRITNKLRILLKKEENLVNLRLEGKVSDSIYNEKYNEISSEKEFLAEEKVNIETTLKSEIDVKKRLTEFKHLLSSQKMLTEFDRAVFESIVEKIIVGGVNSNGEIDPAMLTIIFKTGEIQNKDGKQFKSKRKNAKLETDKLCPQNSDEDKKLYSQGTDNTRGVCSVAGSILASQ

SEQ ID NO: 19967 - protein, 514 aa, synthetic construct
MAKRKFNKGGEVRLVAYYRYSGGSGQTEQSIEGQRRDCETYARLHNMTIQKEYVDRHISGKTDDRAAFQQMIADSDKGAFDMVICWKTDRFARNRYDSAVYKKRLRDNGVEIVYAAESNIAGAEGIIIEGVMEALAEYYSAELAEKMRRGMRESALKGQAISRCRALGLKTDEHKRFVIDEKTAPTVRFIFEHYAAGESAMSIVEQLNAKGLRTSQGNPFNKSSIPRIIQNEAYRGVYVSKSYDVRIEGAIPAIIDNELWERAQTMLKLNRQLKAKNEPKADYILSGKLYCSCGSLMRGMSGHSATGEVYRYYTCPNKDCHLRNIPKDDLEGKVMQSIVDHLLQPESMEALAEAMVEVQKADAEKPNAERVAIEQSLADVRRRSKNILDAIENGTANAQLCARLDDLTEQERTLSFQLSSLEKEKPVVFTKEQYLFLLEQFLAEPSERTPEYGRRLVNTFVTSMVVSDRELVINFNVSDETVNKNKKASQTNLQKESSSGMHLVRVARIELTAS

SEQ ID NO: 19968 - protein, 456 aa, synthetic construct
MKNKEDATALVRVALYIRVSGEEQKIKGLSLEAQQERLEEYARERGWVIVGTYIDAAKTARKNIHKRTEFQRMIQSVKHNEVDILLFCRLDRWFRSVGDYYKVMEILQSHNCDWKTTDEEYDTTTANGRLYINVKLSIAQNEADIDGERIDVVFDSKIAHGTVVSGSTPFGLRVNSEKRLEIIPDDAAIVQDAFNYFEHTVSQRATTKYIREKYGVNWCYATFHRMLIEELYTGVYNRGDRYNANFCPAIIQRRQFDRVQMLLKKNVRHAPSGRVYLFTSILNCKECGHKMNGYISQGIYYYRCNQHLQRGRCPHNHSAREDRIEQWLFDHLDEELERCKLEWKVKAAERKRASSAKDKAALKRKLTKLKELYVNELIDIEEYKKDYVIYTSALEQIPDIPQESPPDFAAVERILDANYRKIYNALTREDKRTLWRSVIKEIRIDNDQKITGINFE

SEQ ID NO: 19969 - protein, 433 aa, synthetic construct
MSKKITIVSKPPKLERKKRVAAYARVSSGKDAMLHSLSAQVSYYSDLIQSHGEWLYAGVYADEAKTGTKDSRAGFQNLVAECRASKIDMVITKSISRFARNTVTLLQTVREFKALGVDIYFEEQNIHTMSGDGELMMTILASYAQEESRSASENQKWRIKRSFESGIPWDRTLMGYRMENNHYVIVPKEAEIVRRIYNEYLSGSGYQLIAKRLNEEGVPSRFGGKWNQSAVSRILSNHTYTGNLLLQKTFRENHITKRKIFNNGELPKYLAEESHEAIVDEETFQAVQEEKSRRSARFNKKSVSKKTYPFSSFMVCDNCGKNYRRKVTKSGPVWVCNTFNSLGKSACASKQIPEPILQQVTAEVLGKADFTGEQLRSRIQKIVVCNENVLIFRFRDGSEVTRKWKDRSRSESWTEEMKAAANQKALERNKHNA

SEQ ID NO: 19970 - protein, 526 aa, synthetic construct
MPKVTMIPATINPLTHLPKETTQKRRVAGYARVSTDSDEQFTSYEAQVDYYTKFIQSKLEWDFVKVYTDEGISGCNTKHRDGFKEMISDALAGKIDLIVTKSVSRFARNTVDSLVTIRKLKENGVECYFEKEGIYTFDGKGELLITIMSSLAQEESRSISENITWGQRKSFADGKIHLAYKHFLGYKKGEDGRPAIVEEEASVVRLIYRLFLDGKTQAGICRYLEDLEIPSPSGKAKWSKTTVTSILTNEKYKGDALLQKSFTVDFLQKKTKQNEGEVPQYYVESSHPAIIEPDEWDHVQAEFARRKALGNAYSGKSIFSAKLVCEDCGGFFGSKVWHSTDCYRRTVWQCNNKFKGGERCLTPTVDTETVQQLFIKAYNQMMGNRKQIIEDCEIMRKKLTDFKSLDADIERQFEETQIVAELVKAAVKDNAVTAQSQEAYLKKYEALTKRYETAAAELERLQNLRTLRSQKDKAMALYIRTLKKQPTVLSEWNDTLWTVMVEKAIVHRNSEITFEFYNGTKVKVRQ

SEQ ID NO: 19971 - protein, 463 aa, synthetic construct
MAKPQTALQRVALYIRVSSDEQAERGDSIRDQKERGTKYINDHQNMILQDTYIDDGVSGQKLDRDDFTRLIRNVKAGLVDLIIFTKLDRWFRSLRHYLNTQVILDKYNVAWTAIDQPYFDTSTPYGRAFVAQSMTWAELEAQNGGLRVADVFRSKVEHGEVITGKVPRGYMIQNKHLVFSDEAPAMLDSIQYFHREQGLAKTVNYMRETHGINMSIQNLKNSILRNEKYTGRYRGNENYCPRLISDEMYQDIQRVLDNNSTIRSSQKYPYIFSGILICDECGHKMCGCHINVVSRRTSGKVYRYKYPAYECLQYRAYKKCSNGGEIREMRIEEYLLEHIREELSGYLVDFETGEAKRIDNRAKKNKIRRKLDRLKDLYLNEVINLEEYKKDRAEYEEQLAALPDMEQPIKNLKPLKQVLDCNFEIIYNNLNNEEKRAFWRSIIKEIRVSKSIGRNRKYQIIFL

SEQ ID NO: 19972 - protein, 452 aa, synthetic construct
MKAAIYIRVSTQEQIENYSIQAQTEKLTALCRSKDWDVYDIFIDGGYSGSNMNRPALNEMLSKLHEIDAVVVYRLDRLSRSQRDTITLIEEYFLKNNVEFVSLSETLDTSSPFGRAMIGILSVFAQLERETIRDRMVMGKIKRIEAGLPLTTAKGRTFGYDVIDTKLYINEEEAKQLRLIYDIFEEEQSITFLQKRLKKLGFKVRTYNRYNNWLTNDLYCGYVSYKDKVHVKGIHEPIISEEQFYRVQEIFTRMGKNPNMNRDSASLLNNLVVCSKCGLGFVHRRKDTMSRGKKYHYRYYSCKTYKHTHELEKCGNKIWRADKLEELIINRVNNYSFASRNVDKEDELDSLNEKLKIEHAKKKRLFDLYINGSYEVSELDSMMNDIDAQINYYESQIEANEELKKNKKIQENLADLATVDFDSLEFREKQLYLKSLINKIYIDGEQVTIEWL

SEQ ID NO: 19973 - protein, 516 aa, synthetic construct
MAGKKVTVIPMKPRQWAAENTEEKPKLKVAAYCRVSTEMEEQASSYEAQVQHYTDYIQRNPDWELAGIFADEGISGTGTKKRDGFNRMIEACQKGDVEYIITKSISRFARNTVDCLQYIRQLKDLHIAVFFEKENINTMDAKGEVLLTIMASLAQQESQSLSQNTKMGVQYRFQQGQLRINHNHFLGYTKDEDGNLVIEPKEAEVIKRIFREYLEGSSLQEIANGLMSDGILTGGKRKLWRGEGVRLILRNEKYMGDALLQKTYTTDFLTKKRVKNDGSYAQQYYVENSHPAIIPRDIFMQVQQELDRRKSMKNKNSQCFSGKYALSGITVCGDCGNAYRRVHWKNRGTVWRCKSRVDKREHNCSGRTIYEKDLHEAIIKAINETVVDREDFLQQLSENINSVLTDGLTGRLEELDSKLKELESEIISMAIGGQGYDELASQIFSLRDERDAVAKQIAANTNLQQRVDEMVVFVKEHDVINEYSEVLVRRLIEKVTIFEKNIVVDFKSGVRVTVEI

SEQ ID NO: 19974 - protein, 452 aa, synthetic construct
MKAAIYIRVSTQEQIENYSIQAQTEKLTALCRSKDWDVYDIFIDGGYSGSNMNRPALNEMLSKLHEIDAVVVYRLDRLSRSQRDTITLIEEYFLKNNVEFVSLSETLDTSSPFGRAMIGILSVFAQLERETIRDRMVMGKIKRIEAGLPLTTAKGRTFGYDVIDTKLYINEEEAKQLRLIYDIFEEEQSITFLQKRLKKLGFKVRTYNRYNNWLTNDLYCGYVSYADKVHVRGIHEPIISEEQFYRVQEIFSRMGKNPNMNKESASLLNNLVVCSKCGLGFVHRRKDTVSRGKKYHYRYYSCKTYKHTHELEKCGNKIWRADKLEELIIDRVNNYSFASRNIDKEDELDSLNEKLKIEHAKKKRLFDLYIKGSYEVSELDSMMKDIDAQINYYEAQIEANEELKKNKKIQENLADLATVDFNSLEFREKQLYLKSLINKIYIDGEQVTIEWL

SEQ ID NO: 19975 - protein, 452 aa, synthetic construct
MKAAIYIRVSTQEQIENYSIQAQTEKLTALCRSKDWDVYDIFIDGGYSGSNMNRPALNEMLSKLHEIDAVVVYRLDRLSRSQRDTITLIEEYFLKNNVEFVSLSETLDTSSPFGRAMIGILSVFAQLERETIRDRMVMGKIKRIEAGLPLTTAKGRTFGYDVIDTKLYINEEEAKQLRLIYDIFEEEQSITFLQKRLKKLGFKVRTYNRYNNWLTNDLYCGYVSYKDKVHVKGIHEPIISEEQFYRVQEIFSRMGKNPNMNRDSASLLNNLVVCGKCGLGFVHRRKDTVSRGKKYHYRYYSCKTYKHTHELEKCGNKIWRADKLEELIIDRVNNYSFASRNVDKEDELDNLNEKLKTEHTKKKRLFDLYISGSYEVSELDAMMSDIDAQINYYEAQIEANEELKKNKKIQENLADLATVDFDSLEFREKQLYLKSLINKIYIDGEQVTIEWL

SEQ ID NO: 19976 - protein, 452 aa, synthetic construct
MKAAIYIRVSTQEQIENYSIQAQTEKLTALCRSKDWDVYDIFIDGGYSGSNMNRPALNEMLSKLHEIDAVVVYRLDRLSRSQRDTITLIEEYFLKNNVEFVSLSETLDTSSPFGRAMIGILSVFAQLERETIRDRMVMGKIKRIEAGLPLTTAKGRTFGYDVIDTKLYINEEEAKQLRLIYDIFEEEQSITFLQKRLKKLGFKVRTYNRYNNWLTNDLYCGYVSYKDKVHVKGIHEPIISEEQFYRVQEIFSRMGKNPNMNKESASLLNNLVVCSKCGLGFVHRRKDTVSRGKKYHYRYYSCKTYKHTHELEKCGNKIWRADKLEELIIDRVNNYSFASRNIDKEDELDSLNEKLKIEHAKKKRLFDLYISGSYEVSELDAMMSDIDAQINYYEAQIEANEELKKNKKIQENLADLATVDFDSLEFREKQLYLKSLINKIYIDGEQVTIEWL

SEQ ID NO: 19977 - protein, 452 aa, synthetic construct
MKAAIYIRVSTQEQIENYSIQAQTEKLTALCRSKDWDVYDIFIDGGYSGSNMNRPALNEMLSKLHEIDAVVVYRLDRLSRSQRDTITLIEEYFLKNNVEFVSLSETLDTSSPFGRAMIGILSVFAQLERETIRDRMVMGKIKRIEAGLPLTTAKGRTFGYDVIDTKLYINEEEAKQLQMIYDIFEEEKSITSLQKRLKKLGFKVKSYSSYNNWLTNDLYCGYVSYADKVHTKGVHEPIISEEQFYRVQEIFSRMGKNPNMNRDSASLLNNLVVCGKCGLGFVHRRKDTVSRGKKYHYRYYSCKTYKHTHELEKCGNKIWRADKLEELIIDRVNNYSFASRNIDKEDELDSLNEKLKTEHVKKKRLFDLYISGSYEVSELDAMMADIDAQINYYEAQIEANEELKKNKKIQENLADLATVDFDSLEFREKQLYLKSLINKIYIDGEQVTIEWL

SEQ ID NO: 19978 - protein, 586 aa, synthetic construct
MNNLKIIEPKAQSTIVESEKSLNVVAYCRVSTDLHDQRNSLTAQKQFFDYFFKQHSNWNNCNIYADEGISGTSLKKRDAFNKMISDALSLLHPIDLIVTKDVSRFSRNVLDFLDIIEKLRNNKVYVYFITQDISTESNDYRKLLGEHILRAEQESLATSTRVRFGQQLRMSQGVVFGNKNMYGYKIVKDNMGKQHFEIIENEATTVKKIFEWYNEGIGTHRIAKKLEKQGIESKYKNGWSNTVILRILKQEKYVGDLCIGKTFTPDALKHNKKKNNGESKMFVITDHHPEQAIITRELWDSVQKRLAENAPSDEMKRKHNNRYWLSGKIRCGICNERFIRLTKKQKNGNMYVAWDCIQHQHRGNKKKLTTDSGLEYEVGCDSKQVNEFVLRQAVLDIINEIIIPQKEEIIKYTIDYITQSQRSVPSNSIDTDALKKELNSINEQQEKLLDLYLSDNILSKEQFTAKSTELKKREYETAEKLKNGNNEAVIKIELESNIKKYSDAIKEVFDSCANPDNSSEYQEELLERFTKQIIVHPNKILEVYLTVMPFPIFLQYKTSGRGKNYSVEFTIINELSKQSNSDNSSK

SEQ ID NO: 19979 - protein, 518 aa, synthetic construct
MPKKAPKHPAKPKRGKKLEIEEPGVLYGRYSSHNQKDISVEQQFEKGYELAAEYGIKIVDTYADRAVSGRTDKRRDFQRMMADAAKGKFCYVIAWKSNRMGRNMLEALINETKLQELGVRVLYVEEDFDDTAAGRFAARSMMNVNQFYSENMAEDIKRGLYDNAANCMVANGHLPYGYKADETLHYTIDEPKAAVIREIFTRVATGEALVDITSSLNARGIVTSYGRPWGRSSFQKILSNERYRGIYIYGDVRIEGGIPRIVSDELYFKVQEVLTTKKNPQGRHRINGDYLLTGKLFCGHCKAPMVGVSGTSKTGNLHQYYVCQRRRTEKDCDKKNVRRDDIELQIAEAIKNTALKDEIIEWIADSTMAYNERKEAESKVGILEDQLAGTERSIKNVMAAIEQGIITATTKDRLVELESERTAIQAKIAAARADIVTISRDDLISGLEMFREGDVHDKKYQARLFDTFLVAVYLYDDDMKIVFSFSGDKNTIRIPLNQSIDNIENCAESSYKLCLGPP

SEQ ID NO: 19980 - protein, 452 aa, synthetic construct
MKAAIYIRVSTQEQIENYSIQAQTEKLTALCRSKDWDVYDIFIDGGYSGSNMNRPALNEMLSKLHEIDAVVVYRLDRLSRSQRDTITLIEEYFLKNNVEFVSLSETLDTSSPFGRAMIGILSVFAQLERETIRDRMVMGKIKRIEAGLPLTTAKGRTFGYDVIDTKLYINEEEAKQLRLIYDIFEEEQSITFLQKRLKKLGFKVRTYNRYNNWLTNDLYCGYVSYADKVHVRGIHEPIISEEQFYRVQEIFSRMGKNPNMNKESASLLNNLVVCSKCGLGFVHRRKDTVSRGKKYHYRYYSCKTYKHTHELEKCGNKIWRADKLEELIIDRVNNYSFASRNIGKEDELDSLNEKLKIEHAKKKRLFDLYINGSYEVSELDSMMNDIDAQINYYEAQIEANEELKKNKKIQENLADLATVDFNSLEFREKQLYLKSLINKIYIDGEQVTIEWL

SEQ ID NO: 19981 - protein, 433 aa, synthetic construct
MERTIKRVDRKLPKQEKLIRTAAYCRVSSNKDAMLHSLSAQVSYFSSTIQNHPGWVYVGAYVDEGITGTKEDRPKFVKLMEDCRAGKIDLIITKSVTRFARNTVVLLDSIRELKSMGIDVFFEKENIHTLSADGELMISILASYAQEESRSASENQKWRVKRNFEEGKPWRYFMLGYRNVDGKMTIVPEEAEIVKGIFRDYLAGVGITTIVNNLNTSGFVTQSGYKFHNSAVERVLRNYAYTGNLMLQTKYRENHLTKRTLVNNGELPKYHAFETHEPIISLEIFNAVQEEMKRRAEKYAPKTQRQQYPFSGLMVCANCGKNYRRKVTATGPVWICPTYNSSGKASCASKAIPEGILRETTASALEVDKFNEAFFHERVSKMVISAGNCITYYFKDGTEIQRVWKDRSRRESWTPEMKEKARRATAERWKANG

SEQ ID NO: 19982 - protein, 529 aa, synthetic construct
MANARKVQVIEATINPKTHLSTTSPRKRRVAAYARVSTDSDEQAGSYDAQIDYYTRYICNRPDWEFVKVYPDDGISGLSTKKREQFMAMINDALAGKIDYIITKSISRFARNTVDTLTYVRMLKDHGVGVYFEKENIDTMDAKGELLITIMSSLAQEESRSISENVIWGQRKRFADGKVTLPYKRFLGYDRGASKDDPPVVNEEQAVWVRYIYSEYMLGKTACAIAKALTASGVPSPSGKPKWSPSTVESILSNEKYKGDALLQKTFTVDFLSKKKKINEGEHPQYYVEHSHEAIIDPREWKLVQLEMERRKSLGMRYSGNCVLATRIVCGDCGSYFGPKVWNSTSKYKRTIWQCNDKFKGETKCRTPHIEEQEIKSRFVSVINSLLPDKQALLEDCRLMQDALTDCTKIDEQLDALVQELEVIAGLTRKCIAENAAEVIDQDEYKKRYDGLNARYDTTREKIEALEKKKAARIGEADKIGAFMFEMLECDEPLDTFDERLWIAVIDHATVYHDGRIVFTFVNGMEAEG

SEQ ID NO: 19983 - protein, 560 aa, synthetic construct
MTKLYSYIRFSSMRQGEGSSYERQIKMAKEIADRYGLELVNDYQDLGVSAFKGANSKTGALSRFLDEIGRSIPVGSWLFIENLDRLSRQDIISAQELFLSIIRRGITIVTGMDNKIYSIETVTANPMDLMFSILLFIRGNEESQTKRNRTNSSALLKIKAHQQNPQSPAVAIEEIGKNMWWTDTTSGYVLPHPVYFPILQKIVKMKQEGHSTGSVLDYLNEHHTPPAPTSNKQHRKWSIAMVSRLFKTKALIGVKEVTVDGVQYELKDYYPRVLSDSEYYFLKNNLIKKAWSFGHAQEKTIPLLSGIGLLKCAHCGSPMVKRKAANGKVEQYRYTCDGEGSGRTDCLYPNWGFRASSLEGAVLQLLADKVWIAEDKANPIPEIQVQIDEISRKIDNLINLSAMTGATKELANQITDLNTQREALHEEIRLFEREMYSVDSQGWEKLAQFDLSDVQNEERLQIRLKIKGALRSIECARIDRNKNLFVLVYLDGLRQRIVIENNRGIRKGQIFVDLKTINDRQILESAGMVLHDHIDILIDEKAFYDGLPKEEDGPLSKFGI

SEQ ID NO: 19984 - protein, 605 aa, synthetic construct
MRIINKIEPKIPQMPSRKKVAAYARVSMESERLQHSLSAQVSYYSGLIQKNPAWEYAGVYADDGITGTKTNDRTEFNRMLADCEAGKIDIILTKSISRFARNTVDLLNTVRHLKELGISVQFEKERIDSLSEDGELMLTLLASFAQEEIRSLSDNVKWGTIQRFKQGIPNGKFNIYGYKWVGDKLAVIPEEAKIVRFMYREYMKGASRIEIGRMLMEQGIYTRQGYQWVDSNVKVILTNITYTGNMLFQKEYCLDPITKQRKKNRGELPQYFVENTHEAIIPMDEWQAVQEEFQRRRDLGPFGNKSLHLTAFSTKITCGCCGKHYRRSGKRNTAGEVYYIWICQTKSQKGIKACDSKSIPEKMLQKVAADVLGTAEFDEDIFSKLIKEIMVIGTDTLIFRFYDGHEQTTTWVSTAKADWWTPERRRLWGERHKRKDTNPNKNTYYEFTGFIKCGQCGANYRCQANVRKDGTRTRSWYCTGPRSECSNKGIRDETMKALVTEALDLDAFDESVMDAQIEYATVINNTVTFHFRDGHTVTRPYLDKRHGVKWTAERRERQVQSIRASWTEERRKRHGEIIREIRREKRGESNDYTGNDKPVHGNADQ

SEQ ID NO: 19985 - protein, 434 aa, synthetic construct
MERVIERVDFQIPMQPKALRVCAYARVSSGKDAMLHSLSAQVSYYNSLIQTHAGWLYCGVYSDEAITGTKSQRDGFQRMLASCRAGEIDLIITKSISRFARNTVTLLETVRELKSLGVDVFFEEQNIHTMSADGELMLTILASYAQEESLSASENQKWRIRKAFENGELVNLRFLFGYNITASGIQVNEREAAIVREIFTRFNGGESLSAISRDLNDRGCERTFGGTWCADRIRNLLSNEKYTGNALLQKQYRNNHIDKKLVPNRGRLPMYYVAGSHEPIIDQAAFDKAQVRLNELARQAEKREKPTRSTFSGLVRCGLCGSTYKRVTCRGKHFWNCTTFQTKGKAECPAKKIPAETLEALACEVLGTEVLDPDMVRSKITMIRAEKNNVVVFCMDDGLEIVKRWTDRSRAESWSPEMKEQARQRALQTRRGQE

SEQ ID NO: 19986 - protein, 528 aa, synthetic construct
MNTATVRSVTVIPPTINPLTHISMAATRKRRVAGYARVSTDSDEQFTSYEAQIDYYTQYIQRNPEWKFVKVYTDEGISGTSTKHRTGFNEMIDDAMSGKIDLIVTKSVSRFARNTVDSLVTIRKLKEKGVEVYFEKENIYTFDSKGELLLTIMSSLAQEESRSISENVTWGQRKRFADGKVNLPYKQFLGYRKGADGLPEIVPEEAAIVRRIYARFMEGLTPHTIAKELTADGILTPSGKQCWQTSTVESILQNEKYKGAALLQKCFTVDFLTKKQKVNEGEVPQYYVEHSHEPIIVPEEFDKVQAEFVRRKQFGLQYSGKSIFASRIVCGDCGSFYGAKVWNSNNKYRRVVWQCNNKFKGGHRCETPHLDEKTIKARFVDAFNAVLDGKDGILADCRLMQTMLTDCTGIDAEIERLLTEIDVVTELTRRCISENAQSSQNQQEYTARYNSLVERYEKAKVQLEQLRATKTAREAQAEAIGAFMFEVQEMDALTEFDEKLWLAVIDKVTVHTNGRMTFRFRSGTEIDA

SEQ ID NO: 19987 - protein, 530 aa, synthetic construct
MPYCLYVRKSRADAEAEARGEGETLTRHINALLDLAKRRHLDITQIYREIVSGETIAARPVMQQLLSEVEQGLWDGVLVMEVERLARGDTVDQGIVAQTFKFSDTKIITPIKDYDPNNEFDEEYFEFGLFMSRREYKTINRRLQRGRIASVKEGKYVGSQSPYGYQREKLVGDKGYTLAPLPAEADIVRLIFQLYTKGEEQEDGSYKRLGVSRIVRRLNDMRIPPRKSTHWSPATIRDILINPVYIGKIRWNWRKDSKKMVDGRVVIARPRSSIDDCVLADGKHPPLIDDATFALAQEYMAQNPPHPIGERNKVKNPLSGLVVCAKCGKKMVRRPYNDRNQADTLLCADTACDNISSALFYVEERVLQALSDWLAEYRLQWETADDTADNASAVNLKEKALRRLATEYDTLNKQLDNAHDLLEQGVYTTEQFLDRSRKLSERIKKNEADRSTLGADIAADKKREQGRKQIIPKVEKLLDVYDSLPSAKSKNDMLKEVLEKVVYLKTKNGRWNNAPDDFEITLYPKIPKSD

SEQ ID NO: 19988 - protein, 522 aa, synthetic construct
MNTVIYARYSAGPRQTDQSIEGQLRVCTDFCKQRGLTVIDTYCDRHISGRTDERPEFQRLIADAKRKKFEAVVVYKTDRFARNKYDSAVYKRELKRNGIQIFYAAEAIPDGPEGIILESLMEGLAEYYSAELAQKIKRGMHESALKCQSTGSGRPLGYRVDEQKHFQIDPESAQTVQTIFEQYIKGESNAAICELLNSRGLRTAQGKPFNKNSINRIIKNRKYIGEYRYHDIVVEGGMPRIISDELFNLAQAEMERRRTRKAPKSPKAEYLLAGRLFCGHCKGPMQGVSGTGKIGNKWYYYYCGNTRGKNKTCDKKQVSRDRLERAVVDFTVRYILQEDVLEELARKVHAAQERQNDTASEIAFYEKKLADNKKSIANVLRAIESGAATQTLPARLQELENEQAVILGEISFLKGKRLAFTEDQILFALMKHLEPYPGESEQDYRRRIISDFVSEVYLYDDRLLIYFNISSEDGKLKSADLSNIEGSEFDEGLISSTKTHRYEHLTAFAVWRNVFIIDIPVE

SEQ ID NO: 19989 - protein, 611 aa, synthetic construct
MEMKKAYSYIRYSSPQQAKGDSFRRQLSATQAYCSANGYELDEEVSVYQELGVSGFKGDQENLKRFINDCISGRIKKGSLLIVENLDRLSRQTINVALRQFLEILEYVDIYTLQDEKYYSSDVAHSDNQLLDIMTSLIVMSRAYNESATKQKRLKDKWNEKRENINSKKLTTVCPHWLTLNKDWSRFDVKQDRVRIIEKIFELCLSGRGFNQILRFLNSDLENYPTPSKKSKVWARTTVARILSDRRVIGEFQPYIGDNSNREPFGDPIPDYFPPIIDENIFLNAQISLKQRQIGAGKTNGEHFSNVFRGFLYCGTCGSKIEYVNKGTPPKSNSYLTCTNAKRGGECPQSKHFRYTPIEHMLIHLSTVNGFIPKPEQPSDIKRQLEQVEALRDAANNKLSVLLEQDFSLPIISAKVKELSCQIVDFDNQITSFQDKLNSNMQDYEYEQLYFDTVLEPDNLKKYTNRTIFHNYLTKKIKKALLFSEGRCALLFFEMTDSTLHSVILDEKYNFGGVSMSDGKDAFKRLNGNGLTVVDENLWKIQKQFLDFVQSSKEISLTIEDKEIVSSCLISISKTLSKIISNYKHTKLFDLVMDELLLLESVLSKYQKKLI

SEQ ID NO: 19990 - protein, 526 aa, synthetic construct
MEYANRWAAERGMQLDETLSLRDEGLSAYHQKHVKQGALGVFLLAVDEGRILPGSVLVVEGLDRLSRAEPIQAQAQLAQIVNAGITVVTASDGREYNRERLKAQPMDLVYSLLVMIRAHEESDTKSKRVKAAIRRQCQGWIAGTWRGAVRNGKDPHWTRLAENNRFELVPERAVAVRTMIDMFKQGHGAVQTIRELTNRNLSITNGGNQSQHIYKIIRNRALLGEKTLEVDGEAYRLEGYYPPLLSENEFAELQHLAEQRGRRKGKGEIPGIVTGLGITYCGYCGTAVIGQNLMTRKRKENGHPQDGHRRLICVGYSHNQGCKVGGSCSVVPVERAVMNFCADQMNLTRLLEGDDGSTALAGRLAQGRQSVKDLEAQITRITDAMLADSDAPPVAFAKKARELEALLAAKQKEIEALEHELAASANNTTPAAAEAWADLVQGVEELDYEARTQARQLVADTFSKIVVFRKGFDLTNNPDDTIDLLLIAKHGNTRMLRIDRRTGAWNAAEDLDLSGDIPLPNTSIGV

SEQ ID NO: 19991 - protein, 482 aa, synthetic construct
MMNTINKVAIYVRVSTNVQAEEGYSIDEQIDKLKSYCQIKDWTVYDVYKDGGFSGGNINRPALEKMIIDAKKKRFDTVLVYKLDRLSRSQKDTLFLIEDVFSKNDISFLSLQENFDTSTPFGKALVGLLSVFAQLEREQIKERMQLGMIGRAKSGKPMMFTNVSFGYTYSPKTQQLTINQAEAVIVKQIFNEFLGGMSPLRLMAYLNENNILRNGKEWNYQGIQRILRNPVYIGKIKYNNVIYPGLHEPIIDEESYYKAQKLLDARQDEMRIKGKNRQFKAKYMLSGTAKCGYCGAPLRIKIGNKRLDGTRLKVYQCCNRYPRKYAVVTYNDNKKCNSGNYQKEDLEQYVIAEIRKLQLKPEKIDKLFNKVSKIDTVQINKQIASIDNKINRLNDLYLNDMIDIDKLKSDAEKFKEQKRVLEKELDKDLKIQEQEKNKEDFKKTIGFKDVTKLDYEEQSFIVKSLIDKILVKKGFIKILWKI

SEQ ID NO: 19992 - protein, 573 aa, synthetic construct
MTKKAAIYLRVSSIDQNYERQEIELKALAKCLGYEVKYIFEEKRSAVLKMDTRDELTQMRKLTKNEIDRIFIWDITRLSRRAIDFITLINEFTDKGICLHFKDKNIITLDEDGKQDMFVSMYLYILGLFAQMDAENLKAKMRSGRERGLAIGHAYTGCAPYGYKLINKQLYIDEKEAETVRAIFNNYVDGKSIQHIIDILNSNKIPTRTGILWTRNSIYAIITNPVYKGKPELTSITKRDENKKPLEKITRVFKAPVIIESPIWDEAQVQRKKHKSFIDKSKEREALLRGILQCGNCGKAYCTAINGSGVPTYICSDNRANINQKLNCKNGGVACYFLDSICWQTIKDIYAYKNFQDTFTKEKAKNQQLLQENQTQINNFIDKQIELDKENERVNKGYRIGIYTDSEAIRAKGEINNNKARYEKMIEELKAQNSILTAKIKQDFSHYKIPTVELSYEEKKAVCKELIETAKIYSYPPNNRIVQLQLKMGLIFNIVLNPKRRLYYIIDNSTVTFNNPQSAPIFLREELKDKDFTVTCDNNDYFNEEIFGEYSFAQMWNIMDKYGYIQDYPKVKK

SEQ ID NO: 19993 - protein, 522 aa, synthetic construct
MVSDKKVTVIPARKTKERTKDNKKPKLRVAAYCRVSTENEEQASSYETQISHYTSYIKNRPNWKLAGIFADDGISGTNTKNREGFNKMIDDCMAGKIDMIITKSISRFARNTLDCLKYIRMLKDKNIAVFFEKENINSMDSKGEVMLTIMASLAQQESQSLSQNVKMGIQYRYQQGEVRVNCSRFLGYTKDENTKLVIVPEEAEVVKRIYREYLEGNSMLKIKRGLEADGILNGAGNKIWHTSNISKILRNEKYIGDALLQKTYTVDFLTKKRVKNNGLIPQYYVENNHEPIIPKDIYMQVQEELAKRRSPYTSPSGNKRTYSSNHCFANIVICGTCKEIYRRVHWNNRGKKSIVWRCVSRLENTGQFCDARTVHEKDIEESIIKAINNILNKKDCYLPILKNNIASVLNNEKNKELDNIENKLNDLQQKLLSLVHSSSNYDDIAEEIHQLRDKKQDLLLKNARQEEVNKRIEEMTNFLNEQDTTLIEHDETLVRRIVEKVWIYEDKFTIEFKSNVMVEVNE

SEQ ID NO: 19994 - protein, 520 aa, synthetic construct
MRKVKIIEPLANETRNIEKLNVAAYCRVSTDNAKQLDSLGAQIRHYESYIKSNNKWTLAGVYYDEGMTGTSKDKRTGLLNLIKDCKEGKVNLIITKSISRLARNTADCLELVRSFTELGVYLYFEKENINTQSMESELMLSILAGLAENESLSISENTKWSIRRRFQNGTYKVSDPPYGYDAQNGKLVINEEEANIVRHIFSETLAGKGGQKIANELNKRNIKSKRNSKWTANTILGMLQNERYIGDALYQKTYMDSNYKRHTNYGERDMYYIRDNHSPIISREDFEATALILEQRAKEKNITKEDSKYLNRYAFSGKINCKHCGANFRRRTHTSGRHPIAWCCFTHISNIKACPMKYIPDSSFKHAFITMFNKLVFGYEKILIPLYTSLQNFNNEDNLILLEDIEIQLKENHQQRDVLVELLAKNYLDPAIYRESNNKLLQEAKKLQEEKNTLNRMITSSSEELKELNKLLLFLAKADMINNFEDKLFNDFVKDISVFSREEININLKCGLSLKERLVI

SEQ ID NO: 19995 - protein, 561 aa, synthetic construct
MKNKKIKCDIYTRVSTTMQVDGYSLDAQKEKLKRYAEFQNMEIVNEYSDEGKSGKSVEGRPEFQRMLDNIENGTDKVQFVLVFKLSRFGRNAADVLNSLQRMQDFGVNLICVEDGIDSSKDSGKLMISVLSAVAEIERENILVQTMEGRKQKAREGKWNGGFAPYGYELVNGELQIAEDEAEIIRLIYDKFIHTNMGISAIAAWLNQHGYKKKKRQNNTLDAFAASFIKGVLDNPVYCGKLAYGRRKNEKVSGTRNEYRIVKQENYMLHDGIHEGIVSETDWELAHQKREKTGVKYEKTHSLDHEHILSGILRCPLCGSGMYGNVNRKKKKDGTLYKDYFYYACKHRRLVDGHKCGYRKQWSEEKINNAVEEVIRKLVKNPKFEEAILNKIGSRIDTEEIEKEIEGLEKQHRQLTGAKARLGQQMDSLDIMDKFYEKKYQDMETRLYRLYDEIEGVENSIEEVKNRLLNIRQQKISEENVYQFLLYFDKLYDKFTDLEKKEFLNSFVEQVDIYEQEQPDGRFLKHIKFRFPVYFGDRETQELCWDNESTVETVCCLHRVNS

SEQ ID NO: 19996 - protein, 648 aa, synthetic construct
MNREGKKCVLYPRVSTEMQVDGYSLEGQKNGLKRFADREEMEIVGIYEDAGKSGKSIEGRPAFKKMLSDIKNGLEIDYILVYKLSRFGRNAADILNSLEFVQSYGINLICIEEGIDSSQTSGKLLISVLSAVAEIERENIIEQTMNGRREKARQGGWNGGFAPYGYYLKDNQLLIEETEAEAIRIIFDKFANSDIGLGGVAKYLNLQGIKKIPRQNGTLETWSSHFIRLILDNPVYCGKIAYGRRTREKVKGTKNEYKQVHAEDYILEDGQHEGIISEELWQKVHAKRMATGIKQPSKIGKDRSHLLTGILKCPLCGSSMYTNKHAWTNKDGTYKEVYYYICGRNKQERGHHCDYKASLRKIDIEPLVIEAVKELVSDKYFAKEIEKRIGVQTDTTAIDKELANYESKLKEVDLNKARLEREIDNLPIDARFRERKIHDMTLRLDALYDTIVELEERIEDAKLRKSSIEMETITLDNIYKLMLNFGKLYDIISDEEKKSLITYLIKEIQIYPNGESEMPLKSIEFNFPIYRDGQEVRRLLWEKGNTVETVVLLSQQKPDDTIEIDLDLDELDATSAELKATYQEIKDYVLKESGLKVSSLYISQVKRKCGIEVGENYNLPKSENARVPQCPKEKEDAIKAALKYFAMI

SEQ ID NO: 19997 - protein, 632 aa, synthetic construct
MAGIRTENKIYEVGIYCRLSKDDGTDNESASIATQKSILTDYVKRQGWHLAKTYVDDGYSGTNFQRPSFQNMIKDIENGLINCVITKDLSRLGRNYLDCGLYLEVFFPEHNVRYIAVNDGVDTLNKSAMDITPFRNILNEMYSADVSVKIKSAYRARFQQGKFMGTTAPYGYVKDPADHNHLLIDDKVAHVVREIFDLALAGNGIAKIRKHINKQHILRPAAYAVEQGATGYERYFEDNEENRYIWSENSVRGILRSPIYAGNLAGYKRIAANMKSKKRPSKLPEEWEVIPDTHEGIVTQEEFDTVQQLMTSRRREQNAGGFENIFSGVIKCADCGYAMRAASANRRKRPDIIDCVQYTCNNYGRYGNVMCTAHSIEARDLFNAVLADINRFADMAVNDEKAVRAIERRLTETDQSRAKSLEKEKKKLNKRLAELDRLFSSLYEDKVMERITERNFEMMSGKYQKEQLEIEARLKEVTETLNDSYEKSQGVRDFLSLIRNYQGLKELDATIINALIDKILVSEREKLADGTVRQEIKIYYKFIGFVGELHITPTKRWTALKPKNCTVCGVEYVPSSGISKYCPACAKRIQREKSNESKRRSRERNRRACIELSAKNDRLKRITEKGRCICQI

SEQ ID NO: 19998 - protein, 550 aa, synthetic construct
MSRKKQVNQKITALYCRISLDDGSDNESMSISNQKLMLRDFAEKNGMFQYEYYVDDGYTGRNFNRPSFQRMIADIEAGKIGCVITKDLSRLGRNYIEAGSYIEIFFPKHNVRYIAITDGVDSLTRQEMDITPFKNILNDMYSRDISKKVLAGRMTRSRQGKFCGGQPPLGLMRDPDDRGHLILDPETAPVIRKIYDMALDGWGCMRIAKQLMDDKVPITRVKSNTECDVNYYAWGGARISHILRNPFYKGAHLVCRTHQKGIRSNTYDIIPREDWEIIEDCHEAIVSPEEWEQVQSIIDRRPTIMKGNSCPFYNLFHGIIYCATCGKSMQVRYEKVGRTGKNRFTGEMRKPIDKAYYICQTYNRLGKNACTSHKIEARDLYDLVLKDIQELAAQALKDADAFYQRLSSRMERRYLIDASQTQKERQRLEARNQEIDGMFLSLYTDKAKGILTEQRFMKLTAALEQEQEANQKRLQDLMLMMRHSDEQESEVRTFIREIRRYAAIEELDEAVLNRLISKILVGEVKKIDGQKVQEVRIIYNFVGEIPEITE

SEQ ID NO: 19999 - protein, 567 aa, synthetic construct
MRVCNPVLADCPPIKEEHSMSRQSDNKITALYCRLSRDDELTGDSNSIVNQKAILSKYAKENGFKNPLFFVDDGYSGANFDRPSWSELVEKIENGEVATLIVKDMSRLGRDYLRVGLYTDVLFPEKGVRFIAISNGVDSANQQENDFTPFLNIINEWYCRDTSKKIRAVMKSKGEAGEHLCTNPPYGYMKDPDNKKRWLVDETAAEVVKRIFALCLDGYGPSQIARILKEDKVLTPTVHFLQTGRATRNTPPDNLYSWTGDTIADILERPEYQGHTVNFKTYKQSYKSKKTCYNPIEKQLVFENTHEAIIDVDTWERVQELRKNKRRPTRTGKTNLFSGIVRCADCGEKLYYCTGKNFEARQDHFVCSTSRLKGKDVCPTHFIRAVVLEQGVLAHMRLVIACASTHEERFRAAMGAKQKAEAKKELAAKRRQLTQAERRIEELDRLFKRIYEDNANGKLSDSRFQMLSDDYEREQEELREKLLQLNEEIIEQEEQAENIDRFIGKVRKYLDLNELTPAVLNDMVKAVYVHAPDKSSGHREQQIDISYDLVGILPASLLADLQNGETA

SEQ ID NO: 20000 - protein, 483 aa, synthetic construct
MNKVAIYIRVSTDEQATKGNSLAEQEERLRAYCKAMGWEDVVLFPDDGYSAKDTNRPHLQEMLSRVRKKEFNMIVTTKIDRLCRNLLDLLTIVDELSSYQCGYASASESFDTSTPAGRMVLQILGAFAEFERERIRERVKENMKSIVAKGEKAVSRPCFGYNIENGKYVINEDEAAVVRNMADYILQGMGARRIMQAIKGVKTKEGNPFTAEAINKLLRRETLAGMFVYNRRYVHKGKELIRPKAEWIIVENHHEPILEKDLFDKVQLAMNARSTGHRQADNEKWLLSGLVYCTHCGRKMIGRARSKPSGKVYYHYVCSGYMKKAECFHHYIERDEFEDKVIQSLINVQEIHFSLGAQAFEDKNEQLDTTVDVKGLNDRLKKLDNKMQRQIELYEDEAINKDDFKIASKRIDKERNEILTQLKQIEDNNSARMIGKFVSLVDDLKDDLVSQNRALIKNAIRLSVQSIDVTNGSHIDIKYRIFS

SEQ ID NO: 20001 - protein, 683 aa, synthetic construct
MVKELTAGYVRISVDRNHDKVSDDQQKNAIQRFIEEKQLTFFRFYEDLDVSGGDMVNRLGFDQLLEEIEKYNIKNVVFYDLSRYTRNIVDYFNMTIELQKKGVKLFSTEEREAIDLVNWNDSSTNYTFKALINHMNLAKVKKDVSNAMKLIAQSGLSVGGPPPFAMTKVEVQTSKGMKKKFAPGDPEKVELVKLIYKMYVEDKMTTLEIVKHLNDKYPHLVSQKIAIKFRKDPYYTEEGVQSMWNHSTVRRVLCNPLYTGYMVSRRRVRENKKKHIANAEENWVWSYNFQNGLEPDFETIIPYDYWKKAQEIRLGRNKKKGKIYEKKRDSSLYLLSGLLHCGCCKRKMVGKPDRKKNGKQYFFYACKTPWSAPDVCDNKSLIQTKDVDKEVMKIFGNTMNIFNLLKYIRSTIEEEAKSQGDYLKQVTQIDSRISVLSEQQETLIGRLSDPELKVKALIDKFYMQINKMEEDIQTLKDEKEELLNSKGVSKKIDFKELVGLLLKSPDYLDRENAPIIRRHLEQVVERVILDKEQITIRLKIAKKVEVTVLQKELYNQKLRELSSPTGRVSKQKIETAKDAYLIRLLATMWDKYEFEGQEAKMLDLVIRTLEMRFNNNDPDDDPNGGLPLHLNINPESDFESPHEQEALLQGDSLPVSSYLPECIRVRAAFTERSRHRAFVPVRR

SEQ ID NO: 20002 - protein, 531 aa, synthetic construct
MNYKLPEGEYSGYLRKSRVDIEAEARGEEDTYARHERILLDLAKRYGINLTKIYREKPVSGEKIDERPEMMKLLEDVEDQHWKGVLVVEVERLARGDTKDQGIVAQAFKYSETTIVTPMRVYNPNNPDDEEYFEFGLFMSRREFKTITRRLQGGRIDGVKEGRYLGNKPPYGYSRVKLPGKGYTLEPHPDQAPIVQLIYSLYTDQDPEKRLGTARLAAYLNDKQIVTQRNSSWTVATVNGILRNPVYIGRVRWGSRPLQKRRDSKSRPRKPREQWLEVMGMHPPIIDEAQYNLAQQYMNENGHPPAPAGKISNPLASIVKCGICGAAVVLRPYRGKNKTTPSTLMCSTQYCKNVSSYYHLVEERLLESLKEWLSTYKAQWMGKRPKTMKNDDLKLKLHQDMLKRLQNKLHELNEQKKEAFNLVERKVYTTEIFLERSQIIAQEIKETTDAIQQTEDELQTEFKRQTAKVETIPKIEHVLDVYHRTENAAVKNELLKSILEKVTYRKDTGGRWNGGMDKFTLVLYPKLPKEN

SEQ ID NO: 20003 - protein, 663 aa, synthetic construct
MPDALAPDPFTAMAAQLTPKRAVSYIRVSTREQAQRGGSEEGFSLPAQREANKRKAQSMGALVVKEFADRGESARSANRPELQKMLAYLKEDGGIDYVIVHKLDRLARNRADDVEINRAFEEAGVRLVSTSENIDQTPGGMLLHGIMSSIAEFYSRNLANEVIKGMGEKARSGGTLGKAPLGYVNVRGRDEHGREVRTVALDEERAPLIRLAFTEYATGQWTTKRLAAHLHDRGLTTVPTARKPAKAVTGAQLHRMLRHPYYKGVISFQGVEYAGAHEPLVDEETWSQVQAVLDSHRFGERERQHNHHLKTTVFCGLCGARLLVQNTRNSKGDLYPYFICARRQRTHDCAFRAVLIDVVEERMSDLYRMIQLSSQDRQLVEQYVREELRHLERDKDRTIRSLTTRRTNIEDKRRRLMHAHYEGAVPLELLREEQTQLTSELDHIERQLAAYQADITEVRQRLTQALDLLEDCHRLYQAAPPHLKKLLNQVFFERVLVNPAVDEDGRVVLPEDGTNDDGGRSAPDAAAGDCPIGENDGPLQRAAAPRLLADASSDANLAADLRRPFDWLTSRRMHNVARQHRATLLQDNTRENRDNQVDCPVNDTVCNDEALTSGGERFASSSTNPDRVTHDLGLGKAIVVPPLGFEPRTLCLSGTIRGISSLL

SEQ ID NO: 20004 - protein, 528 aa, synthetic construct
MLDNSNVAPGKNKTLRCAIYTRKSHEEGLEQEFNSLDAQRESAEHYIEAQRMRGWTALPDRYDDGGFSGGNMERPGLRRLLADIDAGKIDVIVVYKVDRLSRSLLDFMKMIDLFNEKGVSFVSVTQHFSTTDPTGRMFLGILITFAQYEREVIAERIRDKVAAAKRRGKYCGGVPILGYDVDRDNKKLLVNPDEARTVQYIFRRFIQIGSAKKLGQELNEQGYRTKAWTTKKGKVREGSEWNTAHIYRLLNNRIYIGEIAHKDRSYPGEHEGIIDRATWDKVKAILEDNKPVKVSMARTKMVAPLKGVIRCGHCGCAMGPTYARKNGRHYTYYICQKDSKRTVSRCPLKRIPAGDIEQAVIEQLSAVFRTPTLVAKTFFAARDIEQAERERLLKQKAQLEMELSQAREQALELMKPGSDQPGKAEMLTTVNRQAVDLSKQLTHVSERCRAYRGNSITEQDVSEAFQNVEGFWEDLFPVERNRLIRLLVDKVEIRETGINMELRTNGLTTLIAELAGLACEVTERRVSR

SEQ ID NO: 20005 - protein, 519 aa, synthetic construct
MTNPVKTNSGAIRCAIYTRKSTEEGLEQEFNTLDAQRESAEAYISSQRHEGWTCLPDRYDDGGFSGGNLERPALKRLMADIEAGGIDCVVVYKVDRLSRSLLDFSRLMEIFDRHGVSFVSVTQQFNTTHSMGRLTLNILLSFAQFEREIIAERTKDKMWAARRKGKWVGGMPVLGYDVAEGGGRLEVNEDEAARVRAIFQLYLELESLLPSAQELERRGWNNKRWVTRKGKERGGKPFNKSTLFRLLTNPIYTGKVVFQGTTYEGEHEAIVDVETWKKVQAILRRNRLNGGTLVRNKYGALLKGLIFCTPCGTGMTHSCANKKNGKSYRYYVCQTAQQRGWAKCPTKSVNAYDIESAVVQHIKGLGANPAVLSTTLTKATEQAEARLHELEMERKAAERELKRLHAQVRKLLGGALPAGASEIATDRLADLQERIRTTEQRMTAIQEEIIVLGKTTVKENDLTQALAGFDEVWNSLSSKEQAKIIHLLVERVGFDGRDQSVTVTFRSEGLKQLCQRTAA

SEQ ID NO: 20006 - protein, 519 aa, synthetic construct
MTTSAKTDSGAIRCAIYTRKSTDEGLEQEFNTLDAQRESAEAYIASQRHEGWTCLPDRYDDGGFSGGNLERPALKRLMADIEAGGIDCVVVYKVDRLSRSLLDFSRLMEIFDRHGVSFVSVTQQFNTTHSMGRLTLNILLSFAQFEREIIAERTKDKMWAARRKGKWVGGMPVLGYDVAEGGGRLEVNEDEAARVRAIFQLYLELESLLPSAQELERRGWNNKRWVTRKGKERGGKPFNKSTLFRLLTNPIYTGKVVFQGTTYEGEHEAIVDMETWKRVQAILRRNRLNGGTLVRNKYGALLKGLIFCTPCGTGMTHSCAKRKNGKSYRYYVCQTAQQRGWAKCPTKSVNAYDIESAVVQHIKGLGTNPAVLSTTLTRATEQAEARLHELEMERKAAERELRRLHAQVRKLLGGTLPAGASEIATDRLADLQERIRTTEQRMTAIQEEIIVLGKTTVKEKDLTQALADFDEVWNSLSSKEQAKIIHLLVERVGFDGRDQSVTVTFRSEGLKQLCQRTAA

SEQ ID NO: 20007 - protein, 611 aa, synthetic construct
MRTVKAYIYSRVSSLQQVDAFGLDRQISTVLDFLENAKLPAELGYQLDPSNYEVLESDKGLSGYKGHNFTKGSLGQFKRRVEAGEITEGCLLIESVDRFSRKQGYDAIDEFTFLIKRNIDIVEVETGQIYSYKLDHKLSALSTSIERAHQESKRKARISKKSWNRRKEESLATGVALNNNTPDWLSLSQDKKTYEIDAQKVQTITSIFEWYRDGYGVTEIVNRLNSEGNRYNGRGWNTVTVYNKLRDRRLNGYLIGKYKTIPKKDSESTTDTEKRILENIKIKKEANDNAQRIYPVVIDDELFTKIQSMMDRNVSSKKQRSTTTKQRNLFNGLTKCHECGSPMIVQSMSNGGQYLRCYRQRTKDEKCNSKMLRYFESEKVLLGHIKNLNLDEIYSDRKHAQSLDVLKRQLSDVNEKIVLLNDKVKSASDEDELFAIMEFKRKRILEKDELNQKISSLENESEIVRLNYNYDIDKLTDQDNTALRRKANEHIAKVISAIKCQRIDSSYIGAYYLYDITYHRDILKHILITDNSGKLISEITISEKDNERTYLVREEDQTVFKVESNGNAWVIYASRTKTIDDLLYYINTMMVGREPDDFAYQLNEDHIEWID

SEQ ID NO: 20008 - protein, 572 aa, synthetic construct
MSTLVDDHIKVDSLVSPSEPADGPTAVIYLRVSTKEQAEKGGGEEGYSIPAQRNANLAKADQLGASVVQEFVDAGESARKADRPALMRMIKYVAEHRINYCIVHKVDRLARNRADDVAIHLALRDAGVMLVSASENIDETPSGMLLHGIMSSIAEFYSRNLASETIKGLTQKAAQGGTIGAAPVGYENVGVRNEHGREERTVRIDPERGELVTWAFQVFASGLWTVSEMQRELERRGLTTRPTPKRPARPLSKTTLRRMLRNSYYKGDITYKDVTYRGTHEPLVPREVWYQVQSVLDSHVSAADKSQVHDHYLKGTVYCGQCGSRLIVCHARNHQGSIYPYFVCSGRHSRSTDCTRHAILIEDVERLIEEYYKTIQVSAQVREDVAGMLHAEFDRLMASETKELEQLTRQRDKLEGERFKLLQAHYADAVPLDMLKREQSRIGAALETIDNHIAAHNNEYLEARENLEDSLGLLANIADIYQRCDDLNRKLCNQAFFTRIYIDEDGERRVRAEFQKPFDMLCDPEVQGNALNWAAEAKKKGQAQTGPRMVPLVEGLNLAQVGWLTRLERATF

SEQ ID NO: 20009 - protein, 497 aa, synthetic construct
MVLDSYARLSWKPGTKELEKIDTQFADNREVIERVGARLGEEFSDGLSAWKKDVRRPGWERLLARVEQGLSDGIVVWHTDRLFRQPRDLEKLIDLGDKGFLVYSAHGRRDLANPDDRYILRIETAHAARSSDDTQRRIQRRLATHRENGIVHYNGRVFGWPGKDRAWQPPEGDEALPEDQRAQRPEVPRSQVTAERKAIAAAAEAILAGVEDAQLAREWNAQGLRTVTGLEISGADVRDVMLRARNAGLIEHSGEITGPSTEEPIIPPELYMRLRAKLTARRRGRRPSTAYVGNGALECGACGKKMTSRPHSGTYPDGTKRRQYHCPPNRNGCGKVAADMRAVDAELRAFTIMRLSDSWYAEAINAARARVADRLAEVQREITECEQVQEELAAKLGRRELTMKAFNAANGPLSESLSTLYRERDELTGGSPEGPSTAQPAEDIARQWDHGEVADRRALLIQALGADTMVIDPAPKGGPRKFHHKRMRLVEAQPVAS

SEQ ID NO: 20010 - protein, 493 aa, synthetic construct
MFHIFLSPYLTQGDDGKSATNTKKRDDFNAMIEDCMAGKIDMVITKSVSRFARNTVDSLQTIRKLKENNIAIFFEKEGVNTSESTGELLITILSSQAQEESRNLSENTKWGIVRRYENGIISVNHKKFMGYTKDKKSGELVILPEQAEIVRRIFRMYLEGNSILEITRALEADKIKTVTGKDKWYTGVIEKMLANEKYMGDALMQKTYTVDFLTKKRVKNNGIVPQYYIEDNHEAIIPKELFYKVQEEKARRASLNKSAITRKANKLKKEKSKFSSKYALTEILVCAECGHPYRRQTWSKYGQKSAVWRCENRLKNGTKASCKHSPTLKEEPLHNTIMTAINNVVENNGDFIGAFRENVIRVIGGYSTKDIPTKYDEQIESLQKEMLTLIEENAKQGSVAEDFDDTYKRISDQINELKQAKLKLVREKKQADRYEQQLKEIDSTLKIVRPQVREFDEDLVRRLIKIIKVNKGEKLEIQFESGITMEQMVDYYD

SEQ ID NO: 20011 - protein, 519 aa, synthetic construct
MAGAKIDRVAIYARLSRATEESVSIERQIESARNYAKARGWTVVLEAKDDGVSATRNKPEDRRGWQEVLHSPEDYQAVIVWKIDRLARRVLDFLHADEELQKRGAALVAVDQPIDMTSPEGRGFTQMLAIFGEMEAAAIAARVTAARRTLLNSGRRVGGRPPFGYMNIENPDGPGVILAQDPATIDFVRQAAARAAEGASPYSIARWLEASGVRPRPRRVRDAEGNLSEKPVAADFWHEASVDAFLRAPALAGLTPYSPGRKPKMTKNSKDYVVQDVLRGSNGLPVVDESIAIMTPAERRAMLATMDSAKRPGARTHGNAEPALLYGLARCDGCGSLLHRASSSGGYTTYRCSDAGKRCPTRVSISRPALEEHVVAEVIRVAGELPVTFAEVTAREEPSQRAEVEAAITDTLTALGQVDDLEQEEQLNARLRRLKAARREARSKPDHAEVTLHETGETFAEVLDRVKDVEERRRILGAAISTVTVRPPLRRSNKFDPDRVTIEWDTAESMDADLQMQVD

SEQ ID NO: 20012 - protein, 555 aa, synthetic construct
MKQANEQYTILYARLSQDDGSQGDSNSIQNQRMMLEKYAKDNGFENVKFLYDDGATGTNFNRPAFQEVMALIESGEVATLIVKDMSRLGREYLEVGRLTEIVFPSYGVRFIAMNDGVDSLYGDNEFTPFKNIINEWYAKDCSKKGKASARIKAESGARVASRPPFGYQKDPDDPKRKIIPDEETSPIVQHIFSLCMVGKGPSQIANQLKEEQVHIPAYFYYKKNGVKITGFNSAEPYNWQQTTIAKILENEVYLGHTINLKHTTLSFKNKKRIERPENEQVRIENTHQPLIDKTTWDIVQDIRKHKRRRANMEEQNIFSGLIYCKDCGGTMVLHRAHTMDAVKNNFMCSTYKKKGKENCSAHYIRETQLAEIILDDLRRVTHYARQHEFLFAKHITQKNGAEIRREIAQTERDLENLKRRDTELTALFKRLYEDNVLGKIPNEVFRKLSDDYLTEQKEIQTTIPKKENDLERLKASVSNASAFIDKAKQYTEINELTAEILHLFIERVEVGERTEKWSRTAMQEINIYYRDIGLLDNVIEPQTEESSQTTSTEVA

SEQ ID NO: 20013 - protein, 1248 aa, synthetic construct
MFRLISAEEKDQIATLKFSKELAENQAFQDFIQISPELNFRAWSIGKELKISANFEPGEKYKVKIAKGLKSNQGLINQGEEANIILQKDLDPSLVFANDGVFLPSGAEYQVYIKSRNVKKIHLKVSQIFANNISEYLRYKNLVGKKDDSTQEAFYSSDGFNYVAKNVIDKKIELKNQKNTWINTALDLSDLKGKTGIFSVSLSVDANDLDYKGENVYRIINKASVSKNLIFSNIALSAQNLNKQLVVHARDFSKNEALENVKIELVSKQNQILQSQNTNSNGDVKFQIQEDDEILYILASKENQISVLRFSNPLSTDGYDVEGDQNHEMIKAFIYTDRGVYRAGDSVHLSVVARENTNPLKHPISFTLINPKNQKVIENQILKSQNDIYYTQIHLDKNAINGLYRAIFNIAGVEFSKDILVQSVVPNRIKVELNADENRSLDDGNLNYELSSKYLFGALASNLKYQSFVYFSPKNYHNSKYKDYIFINPSSLIIRASADDKGNLDEKGRVQSSVEIPENILNSQGYNFNARIVSEVFEKGGRSVKAVRDVNLNRYDYFVGMKALTNSYVSEGETIDFYAIVSDLKENLVSGVVCSKRLLNQAVEKSLRTHNLKPKKGAQVMRKNEKITALYERLSRDDFGKDDDQQRESNSISNQKAMLEEFAARQGFTNIVHFTDDGISGTCFDRPGFLAMMKEVEAGNVEYLCIKDMSRMGRDYLKVGQIMEILRQRGVRLIAINDGVDSARGDDDFTPFRNIMNEYYARDTSRKIRSTFQSKGKSGKHLTGTVIYGYLWNEARDQWLVDPEAAEVVKRIFSMTIDGYGPYQIASKLKSEKVLIPSAYLAQHGEGVNKNKTFKDVYGWGSSTICNILEKREYLGHTINFKTRKHFKDKKSHYVPEDEWTIFENTHEPIIDQQTFDLVQKIRGNVRRYPDGWGEAAPLTGLLYCADCGGKMYVHRTNNGKRISQYTCSQYTKVPCGTLCKTQHRINEDVVLSLVSEMLKAIAEYAKHDRAEFVRVVQEAQSSQQTTEVRKQRTRLATAKQRVSELEVLLCKIYEDNILGKLSDSRYATLDAQYEKEQSELTAEISVLEKAVKSYEKHEKDADRFIALIDKYENFDKLTIAMLNEFIEKILVHERDRKGSIQTTQEVEIYFNFVGRFVPPAFGEVELTPEELEEIRKREERKDRLHQNYLKRKASGAQKRYEDKIKKRKKAEIEAKKAAIRAEDIAKGVFVLVSSLPQREPMKGVQTA

SEQ ID NO: 20014 - protein, 539 aa, synthetic construct
MTKKCFPYVRFSSTRQEDGSTRTRQNELIDAFVTKHGLEVDRHLEDAGTSAYHGKNAGSEGVLGKFLKEVRMGEIEKGSYLLIENFDRLSRDKIVRTNKIFTDLIFSGIKIVILDKNKIYEEDNLDFADWVNALLEFERANVESKRKSDFSSKAWKFNREKMRNGEIVTKKVPTWLKVENNAFVIDHAKVERINTLFKLSLSKGLQEATREYNDLYSEKLAIHQAQYLLSNRKLIGEHSPQTIHYDESGQLKRKDEGDSIPNYYPAVVDEKLFYQVQEVIKSRRPFAGRYSNQRYNVFRDLIYCKWCGGTIRYMNKGERDYFICTNSMTGKCDLNSHFGQQSIRGKKLFGMFFAFTDGLNVSALLEENTNAKEIKTEVLKLEAKRKQIANRLQDFKVEVKTMILDGKTIPSTYNEVIAELESNRNHIDNEIDTRTKELDQIYISEKSFMGLKDIDVSGIIYDRTNEAIEKRVQYNNELKKIIKHIRIDFLNTSIEIEFANKLCRLVNSDGDVIDYVIDHVPEDFTAIYNYDKDYINPDV

SEQ ID NO: 20015 - protein, 525 aa, synthetic construct
MPSAFSYVRFSSGKQAKGSSEHRQRAMLGQWLEQHPSFTLSDLRFEDLGRSGFSGEHLDHGLGQLLAAIDSGAIKSGDVILVEAVDRIGRLEPLEMLPLFSRIVKAGVSVITLEDGHVYDRSSVNETSLFLLVAKIQQAHEYSNRLSRRINASYTARREKAKAGLGIKRETPVWLTTDGQLVPHVAPHIAQAFQDYADGLGERRICRKLRESGLEEFSKTNATTVRRWLKNRTAIGYWNDIPDVYPHVVDPALFYRVQQRLDAPKVDRAKPSAHYLTGLVKCAVCGRNYNYKQRKHTDPAMLCTSRARLAGEGCTNSKTFPVIVLDQVRKLTSLPFLQHAMESASSQADPSSQRLAVIDGEIGELSRKIGEATKALLVLGFTPEIQESLEQLKTAREALEEERATLLLPQAEKLTAAQLEAFSNGLLDDEPMKLNHVLQTAGYSMVVHPDGSIDVDGKRFVYEGANRKKKVYKLRLLGEDRQWEPPILSPEQAASLARSVAGAYLPPNSSEEVARYYEKVKHLVR

SEQ ID NO: 20016 - protein, 475 aa, synthetic construct
MKTTNKVAIYVRVSTTSQVEEGYSIDEQKDKLEAYCKIKDWKIYDVYVDGGFSGANTQRPELERLISDVKRKKVDIVLVYKLDRLSRSQKDTLFLIEDVFAKNDVAFISLQENFDTSTPFGKASIGMLSVFAQLEREQIKERMMLGKEGRAKNGKSMSWTTIPFGYDYSKETGVLSVNPTQALIVNRIFTEYLNGKPVVKIIRDLNAEGHVGRKRPWGETITKYLLKNETYLGKVKYKDKVYEGQHEPIITQELFDLVQLEVERRQISAYEKYNNPRPFRAKYMLSGLMKCGYCGASLGLRYTRKDKNGISHHKYQCRNRHSKDLEKRCESGWYSKEELERGVIKELERIKFDPKYKNETLAKKEETIKVEEIKKQLERINNQVSKLTELYLDEIITRKELDEKNDKIKTERQFLEEQLENQKSNVLSIRKRKLTRLLKDFDVEKLSYEDASKIVKNIIKEIIVTKDGMSITLDF

SEQ ID NO: 20017 - protein, 481 aa, synthetic construct
MITTNKVAIYVRVSTTNQVEEGYSIDEQKDKLSSYCDIKDWNVYKVYTDGGFSGSNTDRPALESLIKDAKKRKFDTVLVYKLDRLSRSQKDTLHLIEDVFIKNGIEFLSLQKNFDTSTPFGKAMIGLLSVFAQLEREQIKERMQLGKLGRAKSGKSMMWAKTSYGYDYHKETGTVTINPAQALTIKFIFESYLRGRSITKLRDDLNEKYPKHVPWSYRAVRTILDNPVYCGFNQYKGEIYPGNHEPIISKEEYDKTQSELKIRQRTAAENVNPRPFQAKYILSGIAQCGYCGAPLKIMLGVKRKDGSRLKKYECHQRHPRTLRGVTTYNDNKKCDSGFYYKDKLEAYVLKEISKLQDDADYLDKIFSGDNAETIDRESYKKQIEELSKKLSRLNDLYIDDRITLEELQSKSAEFISMRGTLETELENDPALRKNKRKADMRKLLNAEKVFSMDYENQKVLVRRLINKVKVTAEDIVINWKI

SEQ ID NO: 20018 - protein, 481 aa, synthetic construct
MITTNKVAIYVRVSTTNQVEEGYSIDEQKDKLSSYCDIKDWNVYKVYTDGGFSGSNTDRPALESLIKDAKKRKFDTVLVYKLDRLSRSQKDTLHLIEDVFIKNGIEFLSLQENFDTSTPFGKAMIGLLSVFAQLEREQIKERMQLGKLGRAKSGKSMMWAKTSYGYDYHKETGTVTINPAQALTIKFIFESYLRGRSITKLRDDLNEKYPKHVPWSYRAVRTILDNPVYCGFNQYKGEIYPGNHEPIISKEEYDKTQSELKIRQRTAAENVNPRPFQAKYILSGIAQCGYCGAPLKIMLGVKRKDGSRLKKYECHQRHPRTLRGVTTYNDNKKCDSGFYYKDKLEASVLKEISKLQDDADYLDKIFSGDNAETIDRENYKKQIEELSKKLSRLNDLYIDDRITLEELQSKSAEFISMRGTLETELENDPALRKNKRKADMRKLLNAEKVFSMDYESQKVLVRRLINKVKVTAEDIVINWKI

SEQ ID NO: 20019 - protein, 481 aa, synthetic construct
MKTMNKVAIYVRVSTTSQVEEGYSIDEQKDKLSSYCDIKDWNVYKVYTDGGFSGSNTDRPALESLIKDAKKRKFDTVLVYKLDRLSRSQKDTLHLIEDVFIKNGIEFLSLQENFDTSTPFGKAMIGLLSVFAQLEREQIKERMQLGKLGRAKSGKSMMWAKTSYGYDYHKETGTVTINPAQALTIKFIFESYLRGRSITKLRDDLNEKYPKHVPWSYRAVRTILDNPVYCGFNQYKGEIYPGNHEPIISKEEYDKTQSELKIRQRTAAENVNPRPFQAKYILSGIAQCGYCGAPLKIMLGVKRKDGSRLKKYECHQRHPRTLRGVTTYNDNKKCDSGFYYKDKLEAYVLTEISKLQDNAGYLDKIFSGDNAETIDRESYKKQIEELSKKLSRLNDLYIDDRITLEELQSKSAEFISMRGTLETELENDPALRKNKRKADMRKLLNAEKIFSMDYEGQKVLVRGLINKVQVTAEDIVINWKI

SEQ ID NO: 20020 - protein, 520 aa, synthetic construct
MKNKSVTVIPATKRVGTLKVDAEEKPKLRVAAYCRVSTDSDEQASSYEVQVEHYSNFINSNSEWELAGIYADDGISGTSTKNREEFNRLIQDCMENKVDRIITKSISRFARNTLDCLKYIRQLKEKNIPVFFEKENIDTMDSKGEIMLTIMASLAQQESQSLSQNVKLGLQYRYQQGEITINHNRFLGYTKDEDGHLIIEPTEAEVVKRIFKEYLEGSSLIQIARNLEADRILTGAGNKNWAGTTVKGILVNEKYMGDALLAKTHTVDFLTKKRVKNNGIVPQYYVENSHEPIIPKTLFLQVQEEITRRANLKNKKGSITYSSKYALSGITYCGKCGEIYRRLHWNNRGKKSIVWRCYSRLDKTKDCDARTILEEDLKQVVVDGINRVFGDEGRIKDILNSNIQKMLKVDNTLEVETIDSQLQVLQQQLLEQSSKNQDVTDIGEQIIQLKEQKQNILIGKAVNDNSKQRMDEMLEFIDQNGHGGLEYDEVLVRRLVEQVQVYDEHITIKFKSGIEIEVQN

SEQ ID NO: 20021 - protein, 519 aa, synthetic construct
MKKITKIDTVAQVKPAKLKVAAYARVSTSSEEQLLSLENQKLHYEQRILANSNWEFVEMYFDEGISGTKIDKRNGLKRLLQDCETGKVDFILTKSISRFSRNALDCLEIVRRLIDLNIFIEFEKENINTQTMDGELMLSILSSLAESESRSLSQNTKWGIEKRFQDGTYKIGYPPFGYDWLDGAMVINKEQAVVVKDIFADILKGTSTGDIAEKLNQQGVTTKRRKTWHGTTIRGIIKNEKYIGDALFGKTFTDDSFKRKVNRGDKNQYFMEGHHSAIIDKETFEQAQQMLVQNAKSKNIVQEDDKYQNRYSFSGILKCGECGGTFKRRIQTKNKNEKYVAWACTTHLKDKHSCSMKFIKDEQIKLAFITMMNKLVFSHQILLMPLLADVRSTTYTVDNTQIVVLDDELEKLKQQQDNLVQFVANGYIDRPTFVKEQNQLTKQMDDLENKRKMLTVAISKGFDNLESLEELVKFTKQDQMLTSFEDTHFVIFVDEVVILSRTELVFKLKCGLKLKERLV

SEQ ID NO: 20022 - protein, 452 aa, synthetic construct
MKAAIYIRVSTQEQIENYSIQAQTEKLTALCRSKDWDVYDIFIDGGYSGSNMNRPALNEMLSKLHEIDAVVVYRLDRLSRSQRDTITLIEEYFLKNNVEFVSLSETLDTSSPFGRAMIGILSVFAQLERETIRDRMVMGKIKRIEAGLPLTTAKGRTFGYDVIDTKLYINEEEAKQLQMIYDIFEEEKSITTLQKRLKKLGFKVKSYSSYNNWLTNDLYCGYVSYADKVHTKGVHEPIISEEQFYRVQEIFSRMGKNPNMNRDSASLLNNLVVCGKCGLGYVHRRKDTVSRGKKYHYRYYSCKTYKHTHELEKCGNKIWRADKLEELIIDRVNNYSFASRNVDKEDELDSLNEKLKTEHTKKKRLFDLYISGSYEVSELDAMMSDIDAQINYYEAQIEANEELKKNKKIQENLADLATVDFDSLEFREKQLYLKSLINKIYIDGEQVTIEWL

SEQ ID NO: 20023 - protein, 648 aa, synthetic construct
MLRPICYERVSSIQQIEGGGGLDDQRSALEGYLDRNADKFNNERIFIQDKGVSAFKNSNISSESQLGIFLQDVQNRKYGEGDALIVMSLDRISRRSSWAEDTIRFIVNSGIEVHDISASTVLRKDDPHSKLIMELIQMRSHNESLMKSVRAKAAWDRKIMEAVKNGTVISNKMPIWLKNVDNKYQRIEEKVNLIRHCFEWYKHGLSTGEIIKKIGDPTLQMVTVSRWIRDRRLLGEHVRYNGEVVHNAYPKVIDEDLFITANRMMDRVMLEKRKPADDLLLEPAVVQEIFRLYESGIGTGAIVKHLSKGWSTVNVLRVLRDKGVVKQKIIDNLTFERVNQKLSQNGVANRIRKDITIAQDDYITNLFPKILKCGCCGGNIAIHYNHVRVKYIICRNREEKKICDSKSIQYLRVEKNILQLVKNIDFNKLMSEGILDRGSIIDGIREELATLRKEEQKYIDKIKKRKSEGKLAGIHLSEGLTEIQDRIEELDKEIIKSQDIKEIPKLDFNIEEVLDPMNVELRAKVRKELRLVLKSVKYRVVSKSIFVSLEYYTDVLAHVIVINNQRGGGEVQTEFAIEEYDGYRVYRTDSFVLSYKKGDEVPQFHTYEGVPINNFEYLKLRDLIEEVEGNGIVAGWMYKNYDFVFMNC

SEQ ID NO: 20024 - protein, 605 aa, synthetic construct
MKKKAAIYARVSTDRQEYQRQIKELQSFAERSNMEVKYVFEEKQSGFNSERPEYNKLMALTKEDIDIVLLWELSRLSRKSIEIQSDIEKLTSKGINVYIHNKSLYTLDEQGNINPTTKLIISIVATIAEDEVRTSKQRSKSARQQYIINEGRSYTSHAPYGYTLKNKKLFINEKEANLVRRVYQLCIDGYSIYGIAVLLNSEGLRTRANVLWTQATINSMFKNTVYIGKPKYCISSVRRTSKVFTRQYSRKVLEYVTLDRPELAIISEAIYDKAAEERKKRRHRSLAIDIQPYLLQHLFKCPDCNRYYTFDRTTKRQKYKCARKYDKTVEKPTCQSPALERERVEFMIWESVKYYCIETMANTRKEEQQLPLLEEIDALKAKIENIDNMKQKIVKKAEIIVTAAIDLKIHYSNMPELYNKKMEEVDKLNKEAIKLDYERKRYKSQIENAKSQIDAINNVKDMSQYLKDVDFDTKYNLLHEVVDVILPYGTKDNCFLLEVRLKTGLKYYIGYYPIRAYYIQFLPSKGNYFVGEERSGYLEIINAKSCEHISLETEMKKYTIVEYINQMDIPANRYPALPYRLKKRDKFLKDMLQGYSKEQLLEMLQ

SEQ ID NO: 20025 - protein, 490 aa, synthetic construct
MKVGIYCRVSTEEQAKEGYSIDAQKQRLTDFVSSQGWEIHDFYIDDGYSAKDLNRPSMKRLKDDVKRRNFDVVLVYKLDRMVRSVTNLHELLELFDKHDVKFKSATEVFDTTSAMGRFFITIVAAMAQWERENLAERVKMGMDTKALKGERNGAVAPYGYDLENGNLIINPMEAEILKRIYSMYVNGHGIKAIVTALNREKVPKRGADWAYGSVYYILTNPVYCGKIRWNYRQAGGELTGKEMLSDGTHPTLITEEEFNMAQEIREGRKKDGKRQTSDFIYSGILKCGRCGTAMIGGARPTKNGRRRFYKCMGRFHKGMCNMPIIGEDSVTKTLLDNLETFDERLLNDIAIPEANNVESEFEDLINQLERELDQLKARKKKWQFAFANGAISLEELKELTAEDSKTETYIKAQLEELPQRKKREPVDVESIINKLRNIKLAWTELDQLTQKQLVRDLFESIVVDADETDFRGGPGSSMPISRFKWKLNDL

SEQ ID NO: 20026 - protein, 577 aa, synthetic construct
MRVAVYARVSTEHEAQINALENQLEWYKIECSRHSDWEIVEVYVDQGITGTQAQKRPEFLRMMEDAQKGKFDLIITREVSRFARNTVDTLSYTRELKARGVDVFFINDGINTATNDGELRLTIMSSMAQDESRKISERVKAGQKISREKHVLYGSGNILGYRRENGTYVPDPDQAETVRLIFQMYSTGENGLVKIVNELYRLGRLDAGGHVSWDASKVSRVLHNATYKGCICYNKSHSDGYLTQKRVKNLDESSYIYVKGDFEPLVSEEMWDRCQQILASKSARVIDENGKKHKYMRNTPKSVWTAKLRCSCGAGFIQFKWRVNRDGAVVHGFQCYRRTRRPSISYLQEHGLDLGISCQIRAICEWKLDLMAAKVFEHLTFDKGKTVKEVYKILNRCMAEEKTVRISRKAMLENSIARQRERLDKYIDLCADGIITKQELAERRKGLDAQIAELQSQYENVEQEDERSGTLDMNLIAQKLDEWQKASRNDVDRELINSCVAQITPLTNEEYRWVLDFQLTEVQSRNSATCTLDGFMEMARFRISFEEAKAFKASRNQGIRKNEWHDLTIAVGIRTKA

SEQ ID NO: 20027 - protein, 522 aa, synthetic construct
MRRKNGMDWKYRAGLYLRLSKEDEAQGQSGSISNQRTLLERYAREQGWEVAGCYIDDGYSGLHFDRPGFQRLLSDIEVGVVNLVLTKDLSRLGRDYIDTGYYLERYFPSRQVRYIALADGIDTFDSSSAQNDMGPFKSVMNDLYAKDISQKVRAVMDTKREAGQFIGAFAPYGYQKDPENKNQLFVDGSAAEVVRRIFEEYLAGQSMAGIARQLNQDGVLPPSRYKAEIQRLPYHNANAVQGVWRAETIRTILGNPTYAGDLAQGKNEKLSYKLKSSHKLPRQEWTVVPDTHEAIIGKEAFQLVQQLLESRSGCCKRKAHSHLLSGLVFCGDCGKPMTFCKRSSGRSFVLICSGYSRYGECQRHTTDEAQLERIVLERLNRFAKQALPPGAEETLLQSCSGRNEALWLREKAHAQERLSQIGSILQALYEDRAAQRLEESEFTQLTQAYREEKKKLQGLLEKKHFQEEDGRLSLCAAAHRLLYFEQPDRRLLCRMIRRITIGQSGAVSIDYSFQEPEPDSGI

SEQ ID NO: 20028 - protein, 491 aa, synthetic construct
MRAVAYCRYSTDNQTENSIMYQISAAEDFCRRNNLELIDVYSDEAKTGTNTNRDGLQRLLADCKTDKFGAVIIYDQSRLSRSVTDWFSLRETLSHANIRLYSCCESLSDDVLDSSAFMSEGVHAIFNQVHVLETRKKSIAGVATKAKRGEFCGGTPPLGYDIVEGQYVINELEASGIRLLFRMYVDGYSYQQIMDKLEAGGYRTKRGNKIGINAIYYLLINERYTGVFTWNRYQYKQMRKRVGKRDNPNYVRIENAVPAIITRETWERAMKRMQSNKRATNKAKREYLLSGLIECGYCGSTYTGFASKNRSSGEETYYYMCGNKNRLKTCHAKNVRADQIESAVYYILKDELLNKQLIERTADVIMNIREQSPDSSTEIKKQIAEKKQGVNNLLKAVERGLNTDAAFPRIDDLQTEIKALEARLAHCQPDGTIDREKLLQKLKADAARIDEDFMQRRAVIREYVNKIIITDDGIEVQCIGDYDITGGATQI

SEQ ID NO: 20029 - protein, 476 aa, synthetic construct
MVEAAKTGVFDVLIVEALDRISRDQEDMASIFKRLTFQGIEIVTVHEGKADAIQVGIRGIVSSLFLTDLAHKVRRGHAGNIREGKHAGGLAYGYRHTPGKAGVWVIHEPEAAIIRRIYSEYVAGDRTREIIDRLNAEHIAAPRGAYWRKNTLTGSNNRHNGILGNEVYCGRLVWNRVRMVKDPDTGKRISRPNPESEWHRADAPHLKIVEPEIFDKAAAIRRERGHLAPAYRRKPRHMLSGLLRCGSCGGGMSVKGEDSGGTRVVCTRYREAGTCDNQRSYYLHTIEQTILGGLRDHLRNPEAIKLFLKTYHAERKRLAADNTNTKARLERELGEVGRKLERAMSAMLASPAAVETFTDAIATLEADKRRLNSELSSLTEPVNVVSLHPAAQARYLALVEKLAAGGKGGKPGNDTVTAIRELIESATIQKTSPGQPVVIDVKGKLEGLLKTPVFAESASGGKLVAREGLEPPTPGL

SEQ ID NO: 20030 - protein, 515 aa, synthetic construct
MKTAIYLRKSRADLEAEARGEGETLAKHRTTLLKIAKEMNLNILSVREEIVSGESLVKRPEMLALLEEIEDNKYDIVLCMDMDRLGRGGMKEQGIILETFKRSNTKIMTPRKTYDLNDEWDEEYSEFEAFMARKELKIITRRMQRGRIASVEAGNYLGTHAPYGYDIQRLNKRERTLTINSEEASVVRMIFDWYANEDMGANAIRSKLNDLGYKSKLGNEWNPYSILDILKNNVYIGKVTWQKRKEVKRPDAVKRSCARQDKSDWIIADGKHEPIIPESLFEQVQEKLNSRYHIPYNTNGIKNPLAGIIKCAKCGYSMVQRYPKNRKETMDCKHRGCENKSSYTELIEKRLLEALKEWYINYKADFEKHKQDDKLKETQIIQMNEAALRKLEKELVDVQKQKNNLHDLLERGVYTVDMFLERSNVVSNRITEITSTMENLKKEIKTEIKKEKVKKDTIPQVEHVLDLYFKTDDPKKKNSLLKSVLEKAVYKKEKWQRLDDFELVLYPKLPQDGDI

SEQ ID NO: 20031 - protein, 491 aa, synthetic construct
MLAKPVGGYCRISDADLADIRRAVKAGTLTPEEAAEEERKGVLRQREDIEGLSGGVPVRWYEDNNLSAFKRNVKRPDFERMVKDLKAGRISGILAYDIDRVYRQPRDLERVIDIYEVSKESLIFKTLSGQNFDLTASDGRFSARLFVNIANKSSEDTRRRVVRANVAKAKKGKSHASGQVFGWLEDDPSKLDAQTASIRRQAVEKYIAGDRVATVMKWLASENVINQATGKHFTWGGTKAMILAPRNWGIRTYNDDLIYDDNGEIVMGDWEALFQNLETWHQIQALKGRDAKGTGESNVSYLLTSIARCGRCGGSLKGHPKWAKGKRTSGYNYNCNKQRPEQCGSLSINGPQLDEMIQNFVWAQVIKASKQKRTLEPPEPWARESELKDVEEQMDELQALWEAKKVRAGSYVTALDDLKAQKNELLADRAVHVIPSGTRAISQELLAKGWEGLSIERQRLIVRKVLRAVIVYPAKSRGGRFDPSRVEPVFH

SEQ ID NO: 20032 - protein, 550 aa, synthetic construct
MTQPDIPATFHGSPPDEDGEPWIAYIRVSTWKEEKISPELQREAISQWARRTGRRIIAWVEDLDVSGRHFKRKITKCIERSEAGEARGVAVWRYSRFGRDRTGNQYWLARLEKAGGDLESATEPVDATTAVGRFQRGMILEFGAYESDRAGEQWRETHEHRKYKLGLPAQGRRRFGYIWHRRRVPDATEPEGFRLQKEWYEVDLAVGPTVADLYRAYVDGAGFSVLCGALNRAGHCTTQGRPWQTETLARFMDSGFAAGLLRVHNPECRCRKADGHCRNRVYIQGAHEELIDFDLWQSYQQRRKEVAATAPRSREGIYELTGLVKCAGCRLGTSLNTARREEGNVPGFSYRCSLRAKSGATACPGILIQRLDVEKEVFEWLKTKAADGIDAAPPTETEPPKHDSTAEQANNITARARAQAEVDKQRQALARLRADRAANPEDFGPGEYEEAADLIRKERATAQALLDSIPEAEPIRDRKEFVPLIVGTVAEWKTLATRERNMMLRKLIRRVAITRNGPGTENHKVEIHPLWEPDPWPTPQRGARNQATER

SEQ ID NO: 20033 - protein, 539 aa, synthetic construct
MVKNGARVYSYLRFSDPRQSTGSSADRQLQYAQNWAASKGLVLDSTLSLRDEGLSAYHERHVKQGALGVFLQAIEDGRIASGSVLVVEGLDRLSRAEPLQAQAQLAQIINAGITVVTASDGREYNRAGLKSQPMDLVYSLLVMIRAHEESDTKSKRVKAAIRRQCEGWTAGTFRGLIRNGKDPQWVRWAGDAWELIPERVAAVRRALELYKQGMGAGRAANVMHQEGHELTDWGVSGLQIYRLIKLPALRGAKRLSVDGEDYELDDYYPRILTDVEWGELQHLASQRHRRRGHGEIPGIVTGVGLAYCGYCGTALVAQNLMNRKRKDGTMADGHRRLHCTSYSKNGGCSAGGSCSVVPVERALMNFCSDQFNLQRLLQDGDRGSGLHHQVIAARAEVDKLTGQLAKVTDALLADDSGAAPLAFVRKARELEQRQNEAEHRLKDLEYQVAALSSVARPAHAERWSELAAEVEAGDFNAREQVRQLVLDTFERIVIYMRGVGASDRSSRTIDVQLLSRTGQHRLLKIDRRSGAWVASEDWS

SEQ ID NO: 20034 - protein, 506 aa, synthetic construct
MKRAVLYCRVSRSTEESVSIDRQEHELRTVAEAAGWPVVAVFTDDGLSGRKDRAKADRALAMLEDGEADVLLVWEMSRWSRMGLSAVAKLVGVLGARDGALFVAHKEGLRSDQPAFGIMAAVIAEVAAMEAEGTRDRIKSMRSHVLGQTEPGEMRWLGGSAPFGYRAEARPGGGKRLVIDEDEAPAARTAARMFTTGSSLTEVTTWLQGQGVATPQSPARRARQTGQPVDGLDAGMWRLTTVRKLFLSPTLLGRTTRRVQVGQRADGSPIEEYRVVTDAAGLPIQRWEPVIDPGTWAAIQASIVKRGPNSPKKAASWLSGLLFCGLCGSVLYANHRKDRALGTFRCANKAVPSQKCPGVSIARGALEAYMEGLILDAIGGLDELRVSERVEGADASELEAVAHAIGDLQAALAEDGADYAVLLPKLDASKARRRELLEAPGRVVRTRVATGRTLAEAWTVGGVRERQVLIAGMLHGVEVARPLGSRRPIEERLTVFWHDPIAEDDD

SEQ ID NO: 20035 - protein, 558 aa, synthetic construct
MKKKEIVVGIYLRVSTDKQAQEGFSIDGQEHEATEFAHKYFIGHELAIRVYVDEGVSAKSIKGRKDLNRMMRDVKAGALDVVITYKVSRLSRTLSDSLKIVEEIHKEKVRFISIKEGEYGTPHANLQFNILASVAQYQREELVENVKMGMSQRARIGKFNGGLVLGYETIEKELVIVPEEAETVKLIFTKFVHEGWGTKKIANYLNDIGRRTKKNNPFSVSTVSIILDNPIYKGYIRFNQVIGWEQNRRKGKNPDYILSKGQHKPIIDEETWDKANLIRKQRATGMPRQYSGTFPLTSILKCPQCGAYMTSLYGAKRKDGTKKRYYACGMYHNQGRSVCNPNLIDADWIEKEVFKRVQEAFISDESVNNITNEINHHIRQHPSYMNKTNEEQIWKNKLKELENRKKRIQELVESEIYTVEEAKARMSELRSETEKTKESLQKAIKRQSTSTVTLKAVTPDFIRQQLQEFMELKEQLSVQEFRQLLVASIEKIEASKKELKNIYFSFIAHLPNLDPSDPVLHKTDDSPILLRGLYFKSNHYLFVIRFPPINPKRSVYLF

SEQ ID NO: 20036 - protein, 507 aa, synthetic construct
MKRVISYIRFSSEKQAKGDSLRRQSKMVTDWLKAHPEYYLDESLTFRDLGVSGFTGKHLKGGLGDFLTAIEKGLVKAGDTLLIESLDRLSRQAVDRASELLRNILRSGVDVVTLSDGEHYTSESLKDPLALIKSILIMQRAHEESLRKSERIQAAWDAKKEAAKAGIKVSKRCPAWLKLNDDRKSFSVIPEKVETVKRCFQLRLEGKSIWEIVRTLNDEGHQTLNQYKAGKFGQTSVQDLLKNRSVIGYFTPKGCEEISGYYPAIIDETTFYKVQQLSHYRYGRKPVSDKPLSVNLFKGVIRCSECGHALIITGFSDTRNGIYRCPLRNENRCSAKGLSRKQTDGTLLALLSRLDRFDSDTTNTIDTLKLHREHISSNIEKLVQLSLEIEDLSAITSKLRQLKGELSQVDADIEKETQRLKSIDVGCLSDCDLTTKAGRIEAQLIIKSAVKEVVLNTAKRRCKVTFHNGKSITLPITENPSEDVTEAIQSLSEVTERGLIDVDEVII

SEQ ID NO: 20037 - protein, 506 aa, synthetic construct
MRTVITYLRFSSAIQGAEGADSTRRQNDLFKQWLKKNSDAQVVASFSDEGLSGYKGKHLTGQFGDMLARIESGEFPEGTILLVEAIDRIGRLEHLETEALMNRIIAHGIEIHTLQDGLIYTRDALSDDLGISIIQRVKSYVAHQESKQKSFRVSQKWKQRAKLALAGEQRLTKMVPGWIDPDTFKCNEHAETVRLIFKLLLDGESLHNIARHLQANNISSFSRRKDANGFSVHSVRTILRSETTRGTLPASQRNDRPAIPNYYEAAIDAATFNKAQEILDKNRKGRTPASDNPLTINIFKGLFRCQCGASVHPTGTKNKYAGVYRCNNNPDGRCDVPPLKRKPFDKWMIDNFLGMIDVGNDGEAEGEIASLQHEVEIVTARIKKATALLLEMDDIDELKIQLKELNQKRTELQTMIDNMRRKASLTDKELPQLKDIDLMTKAGRVECQLILSKHLKGLTLGKDSVTVTLQNDTEIIVPTDPLPLNDGTSIFEIAEKELLEIDAYQL

SEQ ID NO: 20038 - protein, 508 aa, synthetic construct
MKKAIAYMRFSSPGQMSGDSLNRQRRLIAEWLKVNSDYYLDTITYEDLGLSAFKGKHAQSGAFSEFLDAIEHGYILPGTTLLVESLDRLSREKVGEAIERLKLILNHGIDVITLCDNTVYNIDSLNEPYSLIKAILIAQRANEESEIKSSRVKLSWKKKRQDALESGTIMTASCPRWLSLDDKRTAFVPDPDRVKTIELIFKLRMERRSLNAIAKYLNDHAVKNFSGKESAWGPSVIEKLLANKALIGICVPSYRARGKGISEIAGYYPRVISDDLFYAVQEIRLAPFGISNSSKNPMLINLLRTVMKCEACGNTMIVHAVSGSLHGYYVCPMRRLHRCDRPSIKRDLVDYNIINELLFNCGKIQPVENKKDANETLELKIIELQMKINNLIVALSVAPEVTAIAEKIRVLDKELRRASVSLKTLKSKAVSSLGDFHAIDLTSKNGRELCRTLAYKIFEKIIINTDNKTCDIYFMNGIVFKHYPLMKVISAQQAISALKYMVDGEVYF

SEQ ID NO: 20039 - protein, 581 aa, synthetic construct
MPQLYSYIRWSSDRQDKGTTKSRQVAAAKAYAEEAGLELVEIIDPGVSAFRGKNRAGKLGDFIDAVKNNAIPSDSWLYCENLDRLSRDQVDEALRLFLELIGLGLTIVTGMDRKVYNRESIRQNPTDLMISILMFIRGNEESETKSHRTIGNVVALVERHKNGLPVNIKSVGRHPFWIDDSGSQYEAVKKHPVYWSIAREALDMFISGHGVYSVKRALDKKYPNGLRGKEWDYQVLKKMRDNRALIGERTIKVDGQSYKLCNYYPALCKDETEFLILAEKKKQNKFISKKCTTDKIRLLSGFSILRCSKCGGTMHSFMNKNVHRYICTNGTHKQKNCSGWSVIGSLVEHCTMIALLIGYINQSRKNGCDTTSIDEDIINKQSVIEGLNSKITNLTLAISIAKDVNELATLLQSLNTQREKLLVEIEKLKERSVSLKAKGSFEIEITDFLILIQYATFKNLEDENRNKIRKVIHSIIEFIVIDKTDSCITIYIKCYGIDEVFIFGGVQRKPYWRFDIGIVNDSKLQMISNYDKNIGRTKERKNKEYLDGLRESYQGLYESAVLMLNEMGYPDINGALFWPNR

SEQ ID NO: 20040 - protein, 508 aa, synthetic construct
MKKAIAYMRFSSPGQMSGDSLNRQRRLIAEWLKVNSDYYLDTITYEDLGLSAFKGKHAQSGAFSEFLDAIEHGYILPGTTLLVESLDRLSREKVGEAIERLKLILNHGIDVITLCDNTVYNIDSLNEPYSLIKAILIAQRANEESEIKSSRVKLSWKKKRQDALESGTIMTASCPRWLSLDDKRTAFVPDPDRVKTIELIFKLRMERRSLNAIAKYLNDHAVKNFSGKESAWGPSVIEKLLANKALIGICVPSYRARGKGISEIAGYYPRVISDDLFYAVQEIRLAPFGISNSSKNPMLINLLRTVMKCEACGNTMIVHAVSGSLHGYYVCPMRRLHRCGRPSIKRDLVDYNIINELLFNCSKIQPVENKKDANETLELRIIELHMKINNLIAALSVAPEVTAIAEKIRVLDKELRRASVSLKTLKSKAVSSLGDFHAIDLTSKNGRELCRTLAYKTFEKIIINTDNKTCDIYFMNGIVFKHYPLMKTISARQAISTLKYMVDGEVYF

SEQ ID NO: 20041 - protein, 506 aa, synthetic construct
MRTVITYLRFSSAIQGAEGADSTRRQNDLFKQWLKKNGDAQIVASFSDEGLSGYKGKHLTGQFGDMLARIEAGEFPEGTILLVESIDRIGRLEHLETEALMNRILGNGIEIHTLQDGLIYTKDALADDLGISIIQRVKAYIAHQKSKQKSFRVSQKWGQRAKLALAGEQRLTKMVPGWIDPETFKLNEHAETVRLIFKLLLDGESLHNIARHLQSNGIKSFSRRKDANGFSVHSVRTILRSETTIGTLPASQRNDRPAIPNYYEGVVDIPTFNKAQEILDKNRKGRTPASDNPLTINIFKGLFRCQCGASVHPTGTKNKYAGVYRCNNHLDGRCDVPPLKRKPFDRWMIDNFLGMIDVGNDGESERKIAALQHEVEIVTARIKKATALLLEMDDIDELKIQLKELNQKRTELQTTIDNMRRKASLTDKELPQLKDIDLMTKAGRVECQLILSKHLKGLTLGKDSVTVTLQNDTEITIPTNPLPLNDGSPIFEIADKELLDIDAYQL

SEQ ID NO: 20042 - protein, 559 aa, synthetic construct
MSKEKIKVYLYTRVSTSIQIDGYSLEAQKSRMKAFALYNDYEIVGEYEDAGKSGKSIEGRIQFTRMMEDIKSGKDGVSFVLVFKLSRFARNAADVLSTLQIMQDFGVNLICVEDGIDSSKDAGKLMISVLSAVAEIERENIRVQTMEGRIQKAREGKWNGGFAPYGYQLIDGKLLINEEEAIAIRTIFDQYVNTSIGANGLSKYLENHGIRKIPRQNGKNPLFDAGLIRKILKNPVYNGKIAFGRRTLEKVHGTRNEYRQVEQDDYLVAEGIHEAIIPDELWQAAQVKLKAQAKKYEHVNKGKNMRTHLLSGIVKCPICGAGMFGNKSIKYKKDGTKYKDFYYYGCKHRLMNRGHKCTYNKQIREELLDDAVAEVIIKLVSNPKFASMMQEKINMKVDTSAIENEIDNYQKELRKSHSTKFKLIEEIDNLDVDDKHYKRRKQDLDDRLYRMYDKIEELEGQLIEAKAKKETIEAEKLTGDNIYKVLIYFDKLYKVMNDVERRQLIEALISEIQIYEEKQPNGQWLKSITFKLPIIDEDLNISLDNDEQVECVSLLEKRS

SEQ ID NO: 20043 - protein, 452 aa, synthetic construct
MKAAIYIRVSTQEQIENYSIQAQTEKLTALCRSKDWDVYDIFIDGGYSGSNMNRPALNEMLSKLHEIDAVVVYRLDRLSRSQRDTITLIEEYFLKNNVEFVSLSETLDTSSPFGRAMIGILSVFAQLERETIRDRMVMGKIKRIEAGLPLTTAKGRTFGYDVIDTKLYINEEEAKQLQMIYDIFEEEKSITSLQKRLKKLGFKVKSYSSYNNWLTNDLYCGYVSYADKVHTKGVHEPIISEEQFYRVQEIFSRMGKNPNMNRDSASLLNNLVMCSKCGLGFVHRRKDTVSRGKKYHYRYYSCKTYKHTHELEKCGNKIWRADKLEELIIDSVNNYSFASRNVDKEDELDNLNEKLKTEHTKKKRLFDLYISGSYEVSELDAMMADIDAQINYYEAQIEANEELKKNKKIQENLADLATVDFDSLEFREKQLYLKSLINKIYIDGEQVTIEWL

SEQ ID NO: 20044 - protein, 452 aa, synthetic construct
MKAAIYIRVSTQEQIENYSIQAQTEKLTALCRSKDWDVYDIFIDGGYSGSNMNRPALNEMLSKLHEIDAVVVYRLDRLSRSQRDTITLIEEYFLKNNVEFVSLSETLDTSSPFGRAMIGILSVFAQLERETIRDRMVMGKIKRIEAGLPLTTAKGRTFGYDVIDTKLYINEEEAKQLQMIYDIFEEEKSITTLQKRLKKLGFKVKSYSSYNNWLTNDLYCGYVSYADKVHTKGVHEPIISEEQFYRVQEIFSRMGKNPNMNRDSASLLNNLVVCSKCGLGFVHRRKDTVSRGKKYHYRYYSCKTYKHTHELEKCGNKIWRADKLEELIIDRVNNYSFASRNVDKEDELDNLNEKLKTEHTKKKRLFDLYISGSYEVSELDAMMADIDAQINYYEAQIEANEELKKNKKIQENLADLATVDFDSLEFREKQLYLKSLINKIYIDGEQVTIEWL

SEQ ID NO: 20045 - protein, 519 aa, synthetic construct
MKKITKIDTVAQVKPAKLKVAAYARVSTSSEEQLLSLENQKLHYEQRILANSNWEFVEMYFDEGISGTKIDKRNGLKRLLQDCETGKVDFILTKSISRFSRNALDCLEIVRRLIDLNIFIEFEKENINTQTMDGELMLSILSSLAESESRSLSQNTKWSIEKRFQNGTYKIGYPPFGYDWVDGVMVINKEQAVVVRDIFADVLKGTSTGDIAEKLNQQGVTTKRRKTWHGTTIRGIIKNEKYIGDALFGKTFTDDSFKRKVNRGDKNQYFMEGHHSAIIDKETFEQAQQMLVQNAKSKNIVQDDDKYQNRYSFSGVLKCGECGGIFKRRIQSKNKNEKYVAWACTTHLKDKHSCSMKFIKDEQIKLAFITMMNKLVFFHQILLKPLLADVRSTTYTVDNTQIVVLDDELEKLKQQQDNLVQFVANGYIDRLTFVKEQNQLTKQMDDLENKRKMLTGSISKGFDNLESLEELVKLTKQGQMLTAFEDSQFDSFVDEVVILSRTELVFKLKCGLKLKERLV

SEQ ID NO: 20046 - protein, 520 aa, synthetic construct
MKNKSVTVIPATKRVGTLKVDAEEKPKLRVAAYCRVSTDSDEQASSYEVQVEHYSNFINSNSEWELAGIYADDGISGTSTKNREEFNRLIQDCMENKVDRIITKSISRFARNTLDCLKYIRQLKEKNIPVFFEKENIDTMDSKGEIMLTIMASLAQQESQSLSQNVKLGLQYRYQQGEITINHNRFLGYTKDEDGHLIIEPTEAEVVKRIFKEYLEGSSLIQIARNLEADRILTGAGNKNWAGTTVKGILVNEKYMGDALLAKTHTVDFLTKKRVKNNGIVPQYYVENSHEPIIPKTLFLQVQEEITRRANLKNKKGSITYSSKYALSGITYCGKCGEIYRRLHWNNRGKKSIVWRCYSRLDKTKDCDARTILEEDLKQVVVDGINRVFGDEGRIKDILNSNIQKMLKVDNTLEVETIDSQLQVLQQQLLEQSSKNQDVVSIGNQIIQLKEKKQSILLSKAESDSSKQRMAEMMEFIEQVGKDRLEYDEVFVRRLVEQVMVYDENITIKFKSGIEIEVQN

SEQ ID NO: 20047 - protein, 638 aa, synthetic construct
MVESTATPITSSAYADAADTFVGPPQTMRTATASTIPPSDNRAVLYLRVSTQGQVKTDYDPEGISIPAQRAACERKAAQLDLQIVDEYVEPGRSGTEMTKRVAFQQLLDRIRRTRDVDHVIVYELSRLARNRIDDAIVMADLRKRGVTLISATESVDDTPVGQLMHGILAAFNEYRSAKDGADIAYKMAEKAKKGGTLGVAPIGYLNTIDRLEGREVRSVAIDPDRAPFVRRAFELYADGDSTIDDIVTDLNRNGLTTRGTQARPAGPISKSKVAAMLKDPYYLGLVKHKGQTYPGRHTPLIDQELFDRVQDLLEARGYAGERRRRNHHYLKGTLFCGKCFSDSGVIRRMIIQRAIGRHGGEYRYFFCRGVQTHVCDAPYSNVDLVEAAVEEHYKTLRFTPEFIAALRSSMRQTLADSASATRVLHLDLKKQLKQLDVKEDNLLDMAASGDLAKDKIQQRLRDIDQRRREIEDELVSVVDQLPTAEAYLDRCLELLEDPYRLYMAASDDTRRRLNQAIFKHLFVYSERVTGHDMNTPLAELLAADAGWRAKQSTGDRATAKSAATAALKRNRATGVISGGSVELVDDLLNCAISRDVCSKPSMVRAEGLEPPRSFEHGDLNPARLPISPRPQGFDITW

SEQ ID NO: 20048 - protein, 492 aa, synthetic construct
MKQQAKRALVVVRLSRVTDETTSPLRQREACLELCEQRGYEVIGTAEDLDISAGKTSPFDRPQLGDWLTNRRGEFDVLVTFRMDRIVRRLLDLADLIRWCQSNSVSLVSATETFLDLDSAFGDIIALLVAKVAEMELAAISERNRSAAQHNMRQGKYRGGPPPWGYTTEKVDGDWRFVQDEEQVTVINEVVRRVLDGEPLRQVAADLTDRAVLTPRDRVNQLKGRPIHGYRWHSAKLREMLTSKSLLGHAVTANGSIRNDDGSPIIRATPILERDVFEQVQVELAGRENRKEPTKRSSSLLLRVLYCGVCGKPAYKLKGGKGRQDRYRCASAQYKSTCGNGMVLVADANEVLTDAVMFELGDKYRRDRVWDAGSDYAAELAEIDDTLADLTDQLGTGAFRKGTRQRERLDARIADLAERQAQLAAQATRPAGWTWVPTTELFKDWWKSQTVEQLNMWLRSMDIQMWWNHQGIQIDMLHLERMAEQWSNPSNG

SEQ ID NO: 20049 - protein, 504 aa, synthetic construct
MKQQLRAVVGSRVSHLDDDKATTRKVSHKAQTEEGERWAKSQGYEVVGAFEDLGVSAGKTTPFERPDLGKWLAPERLHEWDVLVFSKIDRAFRSTSDCVDFARWTKENRKILAFSGDGVVLDYLHPKGESLDQMMSEFFIYVGSFFAAIELNRFRTRATDRLSYLRMTDRVSHGVPPLGFRTVPHPSGQGKALERDPEGYALLHEIKDKLLHENYSLTGVVQWLNETGRQTAVAKARKGDAKWSVTSLKRTLTNERTQGLRMSGGKAVLDSQGIPIRMAEPTFNDDEWEQIQQAVNQRSTSGRARYMTDNPFAGIVYCVCGYAVAQHRRKSSSGKEHTYVRCGQGCRGAWKLADVYEQLDFSFLGGYADQEMTKLVFVPGEDRSDELAGIERSIARLRWESDNDLVDDEDLYQSRMAALLSRKREIGQIVVPARWERQGTGKTYRELWADPETDRRQVMRDARIRLVLHFIPKGSDAPFVTQAHFVDMWNPAEEGKSTWLEAVT

SEQ ID NO: 20050 - protein, 613 aa, synthetic construct
MTRVAIYARYSDDKQSAHSIEDQVRICRLHADKQDWRVVSTYSDAAISGSTVILRPGVQALLRDALAGEFDVVLAEAMDRLSRDQEDIAGLFKRLRFAGVPIVTLSEGEVSELHVGLKGTMNALFLKDLAAKTHRGNRGRVEAGKVAGGNSYGYKVVREIDVAGKVTTGEREIIPYEADIVRRIFRDYVAGKSPRQICIELNAEGVASPRGRAWGEMTIRGHLSIQSGILNNHFYIGQMVWNRRRDVRNPDTGRARHRVNPQSEWVYAQAPHLRIIDDDLWNAAKARQEHHARAYRDAVARGAQSFQAAATSRRPQTLLSGLITCGLCGGTVAKRGNNRLACVAHIKGQGCTNASAVRSDSLEARVLVGLRERLMAPEVMAEAMRAFIEETNRLNHHRRANETADRLRLEKARKAIAGIVSAIEDGGYTRPLMERLKSLDAEVETIERTLAEAPRDVPDVHPNVAELYRRKVERLVEALNNPADRTEAATALRALIEKVVVTPTGRRGEADVRLFGDLETVLAWAEDKEVGFRSPATLFLRAAGDGLSVPASDRSGTGVRRPGPPVGGASESVRRRAKTPACRTAPEQRLHAKILRARPGRFAPSPSAQRASA

SEQ ID NO: 20051 - protein, 512 aa, synthetic construct
MQTEYALYLRKSRADLEAEAHGEGDTLARHEHILMELAKSRALPIGAIYREIVSGERIANRPVMQQLLSEVEDGRWKGVLVTETSRLARGDTIDQGIVAQAFKFSGTLIVTPSKTYDPTQEADEEWMEFGLFMSRQEYRMIRRRMTAGMNAAKREGRFIGNVAPYGYERFKLDGRGWSLRIVPEQAEIVRMIFDLYNSGLGYCRIEKRLNELHIPAPKGEKWTSATIPGIIQNPHYIGMIPAGRRPGRKVVKDGEVKLIRPRQKCELYPGMHEPIISRETWDKAQARIGKNREARVPAGRRQSNPLAGLLVCDCCGKNMQRRPQTGSSQTQILCPTRGCSTVAHNADELEDMVIDSLRVFLAKLEAGKPAKTDVSAEYAALEECTKKLKDLEARQRRTFELVEDGTYTREIFLARQAELTAERVKIEQQKAELEEAITKKKQEAEAQNNLAPAARQVLEAYKKELSAEDRNRLLKKVIDHIDYHKRKRTRWNPESDLSITLHPVVTSSSPHR

SEQ ID NO: 20052 - protein, 640 aa, synthetic construct
MRRKKDKSNGITALYERLSRDDDNAGESNSIVHQKQMLEDYAIKHGFTNLVHFTDDGWSGATFDRPSWNRLVEGVKNGEITACICKDMSRIGRDHLQVGFFTDILFREKEVRFIAINNGIDSDRQETSEFAPFLNIMNEWFVRDTSKKIKAVLKSRGSSGNAHTSNIPPYGYLKDPENPDHWIIDEEAAEVVRRIYRMTIEGKGPYQIARELSEEKIERPSYYLGKKGLGNHASNYDKENPYMWRGNQVTTLIARPEYIGKTVNFRTFKNSYKDKKTKRADKEDWVVFDDTQEPIVDEETWLLAQKLRQNVRKADPMGEPNVLTGKIYCADCGAPMYNHRQRKGRERIYYTTKGEKRISHSNPADCYECSTYNLAYQKYDRHCTCHHISTKALKSIILKTIQETCHYVSLNEREFVYSLQEESAMKDIAVSETVKNRIERNQKRVHELDMLIRKIYEDNVIGRLPDRLFQSMLTDYENEQNELNKIIETDTADMQRIIGGQNNVERFLKLVKKYENITELTPAMINEFIDKILVHEPQGKGADRTTEVEIYLNYVGQFQVPVEQHEPTEEERIAAEKEAERLRRKRESNRKYMKKIREKSKEFAEHERIAEEKSSDSNVCVEQNATSKSNRQKVKGEKIA

SEQ ID NO: 20053 - protein, 640 aa, synthetic construct
MRRKKDKSNGITALYERLSRDDDNAGESNSIVHQKQMLEDYAIKHGFTNLVHFTDDGWSGATFDRPSWNRLVEGVKNGEITACICKDMSRIGRDHLQVGFFTDILFREKEVRFIAINNGIDSDRQETSEFAPFLNIMNEWFVRDTSKKIKAVLKSRGSSGNAHTSNIPPYGYLKDPENPDHWIIDEEAAEVVRRIYRMTIEGKGPYQIARELSEEKIERPSYYLGKKGLGNHASNYDKENPYMWRGNQVTTLIARPEYIGKTVNFRTFKNSYKDKKTKRADKEDWVVFDDTQEPIVDEETWLLAQKLRQNVRKADPMGEPNVLTGKIYCADCGAPMYNHRQRKGRERIYYTAKGEKRTSYSNPADCYECSTYNLAYQKYDRHCTCHHISTKVLKSIILKTIQETCHYVSLNEREFVYSLQEESAMKDIAVSETVKNRIERNQKRVHELDMLIRKIYEDNVIGRLPDRLFQSMLTDYENEQNELNKIIETDTADMQRIIGGQNNVERFLKLVKKYENITELTPAMINEFIDKILVHEPQGKGADRTTEVEIYLNYVGQFQVPVEQHEPTEEERIAAEKEAERLRRKRESNRKYMKKIREKSKEFAEHERIAEEKSSDSNVCVEQNATSKSNRQKVKGEKIA

SEQ ID NO: 20054 - protein, 501 aa, synthetic construct
MNIREDVIYARQSVDRKDSISIESQIDFCKYELKGGSCRVFKDKGYSGKNTDRPEFQKLLGEIRKGKVRRVVVYKLDRISRSILDFANMMELFQEYDVEFVSSTEKFDTSTPMGRAMLNICIVFAQLERETIQKRVTDAYYSRCLKGFHMSGQAPYGFELEPTVVEGIRTKMMAADPVAANHVRLMFEMYAEPETSFGDITRYFEEQGIKIYGKSLTRPFLSQLLRNPVYAQADLEMYEFFKSQGAVVVNDAADFAGTNGCYLYQGRDVKEDKDKSLKDQILVIAPHEGFVPSDIWLRCRKKLMTNITFQNGRKARNTWLAGKIKCGKCGYALKTTHNPSGYEYLRCSKRADHKGCPGCGTLRKNEFEQFIFTAMGEKFREFKLLRGGEEKANPKITAYQVELAQVEAEIEKLLDTLTGANATLLAYANKKIEDLDNRRKTLSKAIADLSVETLSFQQIELLSGYLDDWENISFEDKRKAADGLISSISATSDYVKIEWKI

SEQ ID NO: 20055 - protein, 565 aa, synthetic construct
MNRYGKRCVLYPRVSTEMQVDGYSLEGQKNMLTRFADREEMIVVDTYEDAGKSGKSIEGRPAFQKMLRDIEDGLDIDYILVYKLSRFGRNAADILNSLELVQSYGVNLICIEEGIDSSQTSGKLLISVLSAVAEIERENIIEQTMNGRREKARQGGWNGGFAPYGYTLEDNKLMIEETEAVAIRKIFELYTSSEIGLGGIANQLNLQGIRKIPRQNGTLEDWTGHFIKLILDNPVYCGKIAYGRRTKEKVKGTKNDYQMKRNDDYILTEGQHKGIVSEEVWEKAHAKRLRTGVKQPSKIGRDRVHLLSGLLKCPVCGSPMYTNKHAWTNKDGTYKEIYYYVCSRNRMVRGKHCEYKAMLKKTDIEPMVIEAIREIVRNEEYAQAIKKRIGVQIDTKAVDKELEGYQAKLKEVDLNKTRLEREIDSLPADAKYRERKLHDMTLRLDSLYDVIVELEEKIEDARLRRDAIKQQAITLENIYKIMVNFDCVYNIINDEEKRNVVTALIKEIEIYRNDESEYPLKRIGLNFPVFKDGGEVTELLWDKGNTVETVVLLSQLKQKPDVSHR

SEQ ID NO: 20056 - protein, 519 aa, synthetic construct
MQYEEYLIYLRKSRSDASLEAMGVDVLERHEQILLDLAKRMNLSIGGIYREVVSGESISARPEMQKLLSEVESGRWEGVLVMEVERLARGDTVDQGIVQRAFQYSGTKIITPTKTYNPNNEFDEEYFEFGLFMSRREYKTIRRRMRAGVTAAVKEGKWPFNQAPYGWQRVKLEHGRGWVLAPDPDEAPVVKLIFRLYTGPDRIGITHICRYLDNRGIKPRNGDAWLECSVMGILRNIVNDQRVGIGRRKVVKQVQNGSVSKVRPHSDYDFTAPGLQPRLIDHDVFLEAQEYLSKNSHKLPESYGIKNPLAGILVCSCCGKKMQRRPASKDGSGRCPYDVLMCNTRGCPTIGSTLDLVERELIQALSDWVAGYQLDPTLEVENKVPEKEQLLSSAVSNHDLLLKQNGNLYDLLEQGVYTTEIFLERSHELQKRIKESEAHIEILKKDLEYEKEKIANIENFIPSCKELLSCYWDLSVQDRNKALKMLLESVEYTKTKRNRKGDKDNPTFTLNLKPRIPRI

SEQ ID NO: 20057 - protein, 516 aa, synthetic construct
MARAAKQDNNSEIIDGVIYARYSEGPNQTEASIEGQVRECKEYAKRNGIRIINVYSDSKHTGTNDNRAEFQKMLRDSRRGGFSVVVVWKIDRFGRNRAEMAQNKALLKLQGVKVVSAKEYIPDSPEGIILESVLEGMAEYYSANLSQNIKRGMKENALHCKSNGSGKSLGYIVDKDGYFEIEPNEATIVKTIFQKYDEGMKIADIWREIVASGAKTKRGKDFTQYGISRVLSNRAYIGEYRYGDIVTPGGMPRIIDDDLFNRVQERRALSKKAPASRRSNSDVDFLLTGKVFCGHCKGTMRGMSGTSKTGRKFYYYACHDKISKHNKCTKKNVKKEWLETEVTRITRDDILNKETIEFIADRVVEIQRLEQEDKSMLRYYEQQLRDTQSAINNIMKAIEAGIITSSTKSRLFELEEQKSIIEGEIEREKITTPVIEKEQVIFSLERFFGGDINNKEYQRNIIDMFVNKVILYDNKIIITYNISSQNEISVDVVEQAAFAALDECSSKLSLAPPAGA

SEQ ID NO: 20058 - protein, 576 aa, synthetic construct
MKKNFKMPGSGSETPIRVAIYVRVSTVYQIDKDSLPMMKQDLTSYCKYILNTDDFVIFEDAGYSGKNTDRPAYQKMMSQIRQGLFTHLLVWKIDRISRNLLDFANMYAELKDLGVTFVSKNEQFDTSTAIGEAMLKIILVFAELERNMTSERVTATMINRASNGVWNGGRIPFGYSYDKPTQVFSIDPEENKIYNFMVETYEDTQSIVHTSRRLNEAGYRSRNGNMWSPVAVWTILRNPWYKGVYRYNYYKIPGRKAIKHESEWVIVENHHPASIDPDRFDRIQATLDKNARYRNTPGRKTAQKNVHVFSGLVWCAECGSAFTASPGKLHVSGYRPSKYGCPNVRKTKTCHAKYTSDVVLGEFLLNYILNILNAQKQFAYIHSTDDLQKRLLHGSTFSNVDHVDPDGLASLLNMLEKCSGSDPVLLKRPRSKPKMDPELKRMMADQKKQQRALDRLNDLYLYSDDSISEREYLVRKQQITDRLQEINEAIGMMSQEPWMRTMNDEEFIRQASSFILTQKLADKQYIYYENLAESLDPEILKNFFVSILDSIILRDGRPETVVFRNGLSHTFTYKDS

SEQ ID NO: 20059 - protein, 543 aa, synthetic construct
MNLTKAKETKTRVCCLYRVSTKGQVDKAENDIPMQKKACHEFAESKGWTIIKEHAELGVSGFKVAAADRDELQEIKREAEKQEFDILLVFMFDRLGRKDNETPFVLKWFVEQGISVWSTVEGEQRFDSNVDDLLNYIRFWQASSESQKTSVRIKTRMKQIVEDGHYMGGTVPFGYRAVYKGRMNKKGRPVKDLEIDPREGEIVREIFFKVAREGYSAHGIARMLNERNIVTHGGARFQTNHVLRMLRHRGYTGYMIAKENTSGFIPELQIIEESIYEDAMAIVEQRKKENEQRRSVAQSSYNKTLLAGNLYCAHCGTRLSGFWHKDRYRLADGTVKEVMAPKYNCYAKGLKVRPCDGQQLYKAEIVDEIVEGIAKDIFAMISRMPKDPTIEAQLKKNIQNKENLLRELDAKLQSAKKELELYEAQIIKCIEGKSKLSESTLARMISRAEDSVAVYEKEIEKARMDKQNQKDTAAQIEDFYKEFKGWADEYESATLERRRVILSQLFSRIEIGRGYEVKVEIAMSYKQFLNLSENPQTGNRTVA

SEQ ID NO: 20060 - protein, 528 aa, synthetic construct
MRTVIYARFSKESQNPRSTADQISLCRKRAEQEGWTIVGTFEDAAISGAAGIGEDQRPGLNAMMRMVEGGGVDQVLAESTDRIARHVADAHNLRERMEFAGARLFTLFDGTVTPMVSLVKGFMDAQFRTDLAQRVRRGQIGTVQQGRASGGIPYGYVQANRLDEKGGLVRGLRDIDPEKAQIVQRIFTEYAGGKSPFAIVSDLNRDGIPGPRGKLWYSTSLHGEKNHKRGILRNEIYIGVLTYGRSRQVVNPQTRRRLMRYNGEEEVMRVPVPAMRIIDDDLWHRVQAMLEEKSTTQPHRARRPKHILSQLATCGVCGADFVRTTGFHWGCSVRRYGGACDNNRLIRTDDFERRVLADLKTGMLAPDVVSAYVREYHRDFARASADLGRDRARIERKLEETERRKERLLKAFADGGSEFEEIRDMLTSARKTVDQLSRELANMDAVPTVLTLHPHMEEVYRRQVEDLEQALAAPEAKLEAIPRLRAMIARIIVSPNPEKKRGVIVEVVRQMDEILAMATRTDKAAQLR

SEQ ID NO: 20061 - protein, 618 aa, synthetic construct
MTSAYADSYDELQQDTAVPVAHPADDVEPGTRAVIYLRVSSAGQVKTDYDPEGISIPAQREACLRKAKELGVTVIDEYVEPGRSATEMTKREAFQQMLARVRSQGDVDYVIVYMLSRMARNRYDDAIVMADLRKRGVTLVSATESIDGSPVGQLMHGILATFNEYQSRQSGADIATKMERKARTGGTLGRAKLGYLNHIDHSEGRVIRTIVLDDERAPFVQLAFELYDTGDYTLDELADELYDRGLRTRPTAKHPAKKVSINKLSQMLRDRYYVGYVTYKGEEIRGRHEPLIDDDLFDRVQDRLNSRSAAKERRRVHHHHLKGSLFCGRCRRVAGITQRMIIQRTLNSKGAEYLYFFCRGRQTGTCDAPHVNAELVEDAIERHYATIRFSQAFIADIRAQIDTVVNEQEKAARLLHQQLSSQLHELDTQEENVIDLAADGTLPQTKVKAKLRDIERQRRHLTQRRDTASADLTDAARLIDVSLTLLERPEELYRRCTEQQRRLLNQAIFHNIYIEDEEVTDHNLQEPFGQLHAIQQAQLPTQHPAITAPEPRDSKKATRQAGGPSSPSGVAVLLQGLQSGTCSSSTSKVELRGIEPLTFSMRTRRATNCATAPEEPPL

SEQ ID NO: 20062 - protein, 515 aa, synthetic construct
MKTAIYLRKSRADLEAEDRGEGETLAKHRSTLLKIAKEMNLNVLAVREEIVSGESLVKRPEMLALLEEIEDNKYDVVLCMDMDRLGRGGMKEQGIILETFKRSNTKIMTPRKTYDLNDEWDEEYSEFEAFMARKELKIITRRMQRGRIASVEAGNYLGTHAPFGYDIHRLNKRERTLTINSEEASVIRMIFDWYANEDMGASAIRNKLNDLGYKSKLGNEWNPYSILDILKNNVYIGKVTWQKRKEVKRPDAVKRSCARQDKSDWIIADGKHEPIIPESLFRQVQEKLNSRYHVPYNTNGIKNPLAGIIKCAKCSYSMVQRYPKNRKETMDCKHRGCENKSSYTELIEKRLLEALKEWYIDYKADFEKHKQDDKLKETQVIQMNEAALRKLEKELVDVQKQKNNLHDLLERGVYTVDMFLERSNVVSDRINEITSTMEKLKKEIKTEIKKEKVKKDTIPQVEHVLDLYFKTDDPKKKNNLLKSVLEKAVYKKEKWQRLDDFELVLYPKLPQDGDI

SEQ ID NO: 20063 - protein, 488 aa, synthetic construct
MQPYAVYVRVSTDRDEQVSSVENQVDICRNWLERNGFIWDESCVYKDEGISGTLFIDRPAIQLILEKAKQKKIDTVIFKSISRLARDLKDSLEIREVFLAHGVRIISVEEGYDSNKAGKNDMAFELWSLFSAQYSRTLSSSISAALAAKVRRGEHIGKVPYGYDRVEQKLVIKNEEAEVVRQIYKWYNDGWGFKKISNELNELGIKPKNNNVWQLTSVQRLIRNTIYKGTFILNQYTNVKVGGKKKQIRNPPEKWLIFENHHPAIVDKEIWDKANGEQVQSRKVRITPWNEFRYLAKCSECGSNMTIVQSHRKKKSGERTEWKYLKCSQYRRAGRHGCVNHVPIQYGDFREFILNLLMKKGESILLNLTSNVANEQVKKERKLQQSLKQNEQRKKNLLDVYMDGLIDKAEFEMKRHEVEQVVSKITDQLLLIQKTETVQMNIQTIKDAFRELKKQNQDLFDVFQTLIEEIIVHPEGTIDITYTFEEPK

SEQ ID NO: 20064 - protein, 515 aa, synthetic construct
MKTAIYLRKSRADLEAEARGESETLAKHRTTLLKIAKEMNLNVLAVREEIVSGESLVKRPEMLALLEEIEDNKYDVVLCMDMDRLGRGGMKEQGIILETFKRSNTKIMTPRKTYDLNDEWDEEYSEFEAFMARKELKIITRRMQRGRVASVEAGNYLGTHAPFGYDIHRLNKRERTLMINSEESSVVRMIFDWYANEDMGASAIRNKLNDLGYKSKLGNDWNPYSILDILKNNVYIGKVTWQKRKEVKRPDAVKRSCARQDKSDWIIADGKHEPIIPESLFEQVQEKLNSRYHVPYNTNGIRNPLAGIIKCSKCGYSMVQRYPKNRKETMDCKHRGCENKSSYTELIEKRLLEALKEWYINYKADFEKHKQGDKLKETQVIQMNEAALRKLEKDLVDVQKQKNNLHDLLERGVYTVDIFLERSKAVSDRINEITSTMENLKKEIKTEIKKEKVKKDTIPQVEHVLDLYFKTDDPKKKNSLLKSVLEKAVYKKERWQRLDDFELVLYPKLPQDGDI

SEQ ID NO: 20065 - protein, 451 aa, synthetic construct
MTKAAIYIRVSTQDQVENYSIEVQRERIRAFCKAKNWTVYDEYIDGGYSGSNLERPSIKKLLTDLKNIDVVVVYKLDRLSRSQRDTLELIEEHFLKNKVDFVSITETLDTSTPFGKAMIGILSVFAQLERETIAERMRMGHIKRAENGLRGNGGDYDPAGYTRQDGHLIIKKDEANHIKRLFDLYEQQHSITKVQEVLKEEGYPIWRFRRYRDILSNTLYIGHVTFAGKEYEGQHEPIVSSEQFKRVQALLKRHKGHNAHKAKQSLLSGLITCSCCGENYVAYSTGKSKDVESKRYYYYICRAKRFPAEYEERCMNKTWSRKKLEDIIITGLKRLTVEDNVNNKQKKKINYEKLIKDIDKKMERLLDLFTTNTNISRQLLEQQMEKLNLEKENLIQKQKRQEEEKTIAQDTLIDSIKSIDSLEFKDKQVLINNLVKQINIDHKNVEIIWRF

SEQ ID NO: 20066 - protein, 515 aa, synthetic construct
MKTAIYLRKSRADLEAEARGEGETLAKHRATLLKIAKEMNLNVLAVREEIVSGESLVKRPEMLVLLEEIEDNKYDVVLCMDMDRLGRGGMKEQGIILETFKRSNTKIMTPRKTYDLNDEWDEEYSEFEAFMARKELKIITRRMQRGRIASVEAGNYLGTHAPFGYDIHRLNKRERTLTINSEEASVVRMIFDWYANEDMGASAIRSKLNDLGYKSKLGNEWNPYSILDILKNNVYIGKVTWQKRKEVKRPDAVKRSCARQDKSDWIIADGKHEPIIPESLFEQVQEKLNSRYHVPYNTNGIRNPLAGIIKCSKCGYSMVQRYPKNRKETMDCKHRGCGNKSSYTELIEKRLLEALKEWYINYKADFEAHKQGDKLKETQVIQMNEAALRKLEKELVDVQKQKNNLHDLLERGVYTVDIFLERSKAVSDRINEITSTMENLKKEIKAEIKKEKVKKDTIPQVEHVLDLYFKTDDPKKKNSLLKSVLEKAVYKKEKWQRLDDFELVLYPKLPQDGDI

SEQ ID NO: 20067 - protein, 501 aa, synthetic construct
MKPNIKEVAIYLRKSRDESDGKEDVLAKHESLLLEYVKNHNLKYEIYKEIGSSEYIDSRPKMVRLLNDVSQKLYDAVLVVDLDRLSRGDLEEMGRIGRIFKDSKTIVLTPTKTYDFNDEEQALINNFEMVFANHEFRMIKKRMLRGKLQGTKAGKWTNGRPPFPYVYNRLTKELDVDSDKVKVYEFMKKMFLEDMKATYEIAWKLNELGFKTNRNSYWYENTVRRLLINEVHLGKVVYGKTSGSGSKKKLNANGVQIKDRSEWIIAEGSHQQLKTEEEHQRILAILESRRYTPKGTRTNVQVLSKLIYCGKCNRVMSFTGKASGKKYVKTCLTTDHFGNRCHNRCLNVEVIYAQLFLDLEQYEQQLLNHEPKEKQGDSSTLQLALHNKLEELERLEKGVNRIKDLFIDEVIDKSEMKKRLEKQKQLMQMKKEEIRSIEQSLAVIGNVRTDDDRLHAIREFKKAWNTEGISKRELNTLAKQLIDRIKYTREGNNVQINIKFL

SEQ ID NO: 20068 - protein, 515 aa, synthetic construct
MKTAIYLRKSRADLEAEARGEGETLAKHRSTLLKIAKEMNLNVLSVREEIVSGESLVKRPEMLALLEEIEDKKYDVVLCMDMDRLGRGGMKEQGIILETFKRSNTKIMTPRKTYDLNDEWDEEYSEFEAFMARKELKIITRRMQRGRIASVEAGNYLGTHAPYGYDIHRLNKRERTLTINSEEASVVRMIFDWYANEDMGANAIRSKLNDLGYKSKLGNEWNPYSILDILKNNVYIGKVTWQKRKEVKQPDAVKRSCTRQDKSDWIIADGKHEPIIPESLFEQVQEKLNSRYHVPYNTNGIKNPLAGIIKCSKCGYSMVQRYPKNRKETMDCKHRGCENKSSYTELIEKRLLEALKEWYINYKADFEKHKQDDKLKETQVIQMNEAALRKLEKELVDVQKQKNNLHDLLERGVYTVDMFLERSNVVSDRITEITSTMENLKKEIKTEIKKEKVKKDTIPQVENVLDLYFKTDDPKKKNSLLKSVLEKAVYKKEKWQRLDDFELVLYPKLPQDGDI

SEQ ID NO: 20069 - protein, 515 aa, synthetic construct
MKTAIYLRKSRADLEAEARGEGETLAKHRTTLLKIAKEMNLNVLSVREEIVSGESLVKRPEMLALLEEIEDNKYDAVLCMDMDRLGRGGMKEQGIILETFKRSNTKIMTPRKTYDLNDEWDEEYSEFEAFMARKELKIITRRMQRGRVASVEAGNYLGTHAPFGYDIHRLNKRERTLTINSEEASVVRMIFDWYANEDMGANAIRSKLNDLGYKSKLGNEWNPYSILDILKNNVYIGKVTWQKRKEVKRPDAVKRSCARQDKSDWIIADGKHEPIIPESLFEQVQDKLNSRYHVPYNTNGIKNPLAGIIKCSKCGYSMVQRYPKNRKETMDCKHRGCENKSSYTELIEKRLLEALKEWYINYKADFEKHKQDDKLKETQVIQMNVAALRKLDKELVDVQKQKNNLHDLLERGVYTVDMFLERSNVISDRITEITSTVENLKKEIKTEIKKEKVKKDTIPQVEHVLDLYFKTDDPKKKNSLLKSVLEKAVYKKEKWQRLDDFELVLYPKLPQDGDI

SEQ ID NO: 20070 - protein, 515 aa, synthetic construct
MKTAIYLRKSRADLEAEARGEGETLAKHRTTLLKIAKEMNLNVLSVREEIVSGESLVKRPEMLALLEEIEDNKYDAVLCMDMDRLGRGGMKEQGIILETFKRSNTKIMTPRKTYDLNDEWDEEYSEFEAFMARKELKIITRRMQRGRVASVEAGNYLGTHAPFGYDIHRLNKRERTLTINSEEASVVRMIFDWYANEDMGANAIRSKLNDLGYKSKLGNEWNPYSILDILKNNVYIGKVTWQKRKEVKRPDAVKRSCARQDKSDWIIADGKHEPIIPESLFEQVQDKLNSRYHVPYNTNGIKNPLAGIIKCGKCGYSMVQRYPKNRKEAMDCKHRGCENKSSYTELIEKRLLEALKEWYIDYKADFEKHKQDDKLKETQVIQMNEVALRKLEKELVDVQKQKNNLHDLLERGVYTIDMFLERSNVISDRINEITSTMENLKKEIKTEIKKEKVKKDTIPQVEHVLDLYFKTDDPKKKNSLLKSVLEKAVYKKEKWQRLDDFELVLYPKLPQDGDI

SEQ ID NO: 20071 - protein, 545 aa, synthetic construct
MKDTTIYYETSLTIIIVLYNIIYDMKGVIFMKTAIYLRKSRADLEAEARGEGETLAKHRTTLLKIAKEMNLNVLAVHEEIVSGESLVKRPEMLALLEEIEDNKYDVVLCMDMDRLGRGGMKEQGIILETFKRSNTKIMTPRKTYDLNDEWDEEYSEFEAFMARKELKIITRRMQRGRVASVEAGNYLGTHAPFGYDIHRLNKRERTLTINPEEASVVRMIFDWYAHEDMGANAIRSKLNDLGYKSKLGNDWNPYSILDILKNNVYIGKVTWQKRKEVKRPDAMKRSCARQDKSDWIVADGKHEPIIPESLFEQVQEKLNSRYHVPYNTNGIKNPLAGIIKCSKCGYSMVQRYPKNRKETMDCKHRGCENKSSYTELIEKRLLEALKEWYINYKADFEKHKQDDKLKETQVIQMNEAALRKLEKELVDVQKQKNNLHDLLERGVYTVDMFLERSNVVSDRITEITSTMENLKKEIKTEIKKEKVKKDTIPQVEHVLDLYFKTDDPKKKNSLLKSVLEKAVYKKEKWQRLDDFELVLYPKLPQDGDI

SEQ ID NO: 20072 - protein, 499 aa, synthetic construct
MEFVAIYMRLSRDSTQNGIEESLENHRLALTRICKTNGWKHDIYEEIASGVSPEREQLNLLLSRLNDYTAILTMDVDRIGRDPEHNEKVLKMLILNGIKIITPSGEYDFANENSQMLYRMQSMLSSFEYSAIRKRLGRGKFLEASKGNWVMNNIPLGYLKNPETKRLEIDENESKIIRYIFEKTIEGYSVNKISQDLDAFGWRSKKGKVLSTAHISQMRRNPLYYGVVRYERKNELGRVLEDCWVEDAHPGIVTKEEFLRCQELIKNNNNKKFKTHGKVKHILQGLIYCAKCGRKRYICVDRKDVPYIKADGAKIENVRCSDAGMALKPVTDAVIEDVKKLKPELEEEIIKLKKRDITKSEKEISNKLIETEANKDKLNKKKKNLVEMRMNGEITKDEFLQFKDGLEEQIRHTDDMIQLLQMKLNNLSNTEDEVKKLEKVIWTIDNLDNLSVEKINSFLRSIIKKVLFSRNIESNPNTTKRDDVEPTVDIEWIEGIPIL

SEQ ID NO: 20073 - protein, 352 aa, synthetic construct
MKAAIYIRVSTQEQIENYSIQAQTEKLTALCRSKDWDVYDIFIDGGYSGSNMKRPALNEMLSKLHEIDAVVVYRLDRLSRSQRDTITLIEEYFLKNNVEFVSLSETLDTSSPFGRAMIGILSVFAQLERETIRDRMVMGKIKRIEAGLPLTTAKGRTFGYDVIDTKLYINEEEAKQLQMIYDIFEEEKSITFLQKRLKKLGFKVKSYSSYNNWLTNDLYCGYVSYKDKVHTKGIHEPIISEEQFYRVQEIFSRMGKNPNMNKESASLLNNLVVCSKCGLSFVHRRKDTVSRGKKYHYRYYSCKTYKHTHELEKCGNKIWRADKLEELIIDRVNNYSFASRNVDKEDELDNLN

SEQ ID NO: 20074 - protein, 515 aa, synthetic construct
MKTAIYLRKSRADLEAEARGEGETLAKHRTTLLKIAKEMNLNVLAVREEIVSGESLVKRPEMLALLEEIEDNKYDVVLCMDMDRLGRGGMKEQGIILETFKRSNTKIMTPRKTYDLNDEWDEEYSEFEAFMARKELKIITRRMQRGRVASVEAGNYLGTHAPFGYDIHRLNKRERTLTINPEEASVVRMIFDWYANEDMGANAIRSKLNDLGYKSKLGNEWNPYSILDILKNNVYIGKVTWQKRKEVKQPDAVKRSCARQDKSDWIIADGKHEPIIPESLFEQVQEKLNSRYHVPYNTNGIKNPLAGIIKCSKCGYSMVQRYPKNRKETMDCKHRGCENKSSYTELIEKRLLEALKEWYINYKADFEKHKQDDKLKETQVIQMNEAALRKLEKELVDVQKQKNNLHDLLERGIYTVDMFLERSNVVSDRITEITSTMENLKKEIKTEIKKEKVKKDTIPQVEHVLDLYFKTDDPKKKNSLLKSVLEKAVYKKEKWQRLDDFELVLYPKLPQDGDI

SEQ ID NO: 20075 - protein, 558 aa, synthetic construct
MTKLYSYIRFSSMRQSDGSSYERQIRMAKEIADRYNLELVNDYQDLGVSAFKGANSKTGALSRFLDEIGRSIPVGSWLFIENLDRLSRQDIISAQELFLSIIRRGITIVTGMDNKIYSIETVTANPMDLMFSILLFIRGNEESQTKRNRTNSSALLKIKAHQQNPQNPAVAIEEIGKNMWWTDTTSGRVLPHPVYFPVLQKIVQLRQEGHSAGAILDYLNEHHEPPAPTSNKKHGKWSRAMVSRLFNTKALIGVKTVNVDGVEYELRDYYPRVLSDSEFYFLRKNIIKKAWDYSHDKEKVIPLLSGIGVLRCVHCGATMVKQTAANGKREQYRYCCDGRKSGRTDCPYPNWGFRAVTLEGAVLQLLADKIWIAEDKTNPIPEIQVKIDEISRKIDNLINLSAMMGATKELANQITDLNSQREALHEEIRLFEREMYSVDSQGWDKLAQFDLSDVQNEERLKVRMKIKGALHEIECSRIDSKKNLFVLVYLDGLRQRLVIENNRGLKKGQIFVDLRTINDRQILESAGMVLHPCIEMIIDADWKAPEEIPGLLSEEFGI

SEQ ID NO: 20076 - protein, 577 aa, synthetic construct
MPKLYSYIRWSSDRQDKGTTKDRQLSAARTYAEEKGLEMVEIIEPGVSAFRGKNRSGKLGDFIDAVKSNAIPSDSWLYCENLDRLSRDQVDEALSLFLEMIRLGLTIVTGMDKKVYNKASIRQNPTDLMLSILLFIRGNEESETKSKRTIGNVFALVERHNQGLPVNIKSVGRHPFWIDDSGSQYEAVKKHPIYWNIAREAIDMFLDGHGVYSVKRALDEKYPNGLKGKEWDYQVLQKMRNNRALIGERTMKVGGQIYKLKNYYPLLCKDETEYLVLAEKKEQNNFKSKKESKDKIKLLSGLSLLRCSKCGGTMHSFINKKTPRYICTNGTHKQKSCSGWSIIASLVEHCTMIALLMGYLNNSWKNGSDTTLIDEEINAKQSIIADLDSKISNLAAAISVAPNVVELATKIQVLNTEREQLLINVVNLKERSVSLKSKGSFEIEMTEFLILIQYAVFTDLEDEDRNKIRKIISSIIEYVIVDKTDSCITIRIKCYGIDEVLVFGGVNRKPHWEFDIELVNDDQDSNAVVVTDEIREKTNQYLVDLRKSYHNLYDSSVSMLSQVGYPEINGSLFWPNR

SEQ ID NO: 20077 - protein, 449 aa, synthetic construct
MKKVFVYHRVSSDQQLDGSGIARQAELLEGYLERTGICAEMDDPAPVVLSDQGVSAFKGLNISEGELGAWMEQVRNGMWDSSILVVESIDRFSRQNPFDVMGYINALMAHNVAIHDVMANIVISRSNSKDLPFVMMNAQRAYDESKYKSDRIRKGWAKKREQAFNKGTIVTNKRPQWIEVENDKYVLNHKAAVVKEIFALYQTGMGCPTIAKQLQTKEGEQYKFNRPWTGELVHKILTNRRVTGKIFISEIIRNHDDIENPVTQKKYDMDVYPVVINEEEFELVQELLKSRRPNAGRVTVKKDGQEEVLIKSNLFSGIARCTECGGPMYHNVVRAKRTPKKGDPKIEEYRYIRCLNERDGLCENKAMTYETVERFVVEHLLSMDLNTVIKEQEFNPEIEVIRIQIDQVKDQITKEGANKQVISSQADSLIKISRIWADFFPANTSNQPI

SEQ ID NO: 20078 - protein, 506 aa, synthetic construct
MRHVITYLRYSSAIQGAEGADSTRRQNELFKQWLRKNSDAQVVASFSDEGLSGYKGKHLTGQFGDMLARIEAGEFPASTILLVESIDRIGRLEHLETEALMNRILGNGIEIHTLQDGLIYTKDALADDLGISIIQRVKAYIAHQESKQKSFRVSQKWKQRAKLALAGEQHLTRNVPGWIDPDTFKCNEHAETVRLIFKLLLDGESLHNIARHLQSNDIKSFSRRKDANGFSVHSVRTVLRSESVIGTLPASQRNDRPAIPNYYEAAIDAATFNKAQEILDKNRKGRTPASDNPLTINIFKGLFRCQCGASVHPTGTKNKYAGVYRCNNHLDGRCDVPPLKRKPFDRWMIDNFLGMIDVGNDGESERKIAALQHEVEIVTARIKKATALLLEMDDITELKAQVKGLNQKRTEIQTTIDTLKRKTSLTDKELPQLKDIDLTTKAGRVECQLILSKHLKGLTLGKDSVTVTLQNDTEITIPTNPLPLNDGSPIFEIADKELLDIDAYQL

SEQ ID NO: 20079 - protein, 506 aa, synthetic construct
MRSVITYLRYSSAIQGAEGADSTRRQNDLFKQWLKKNSDAQVVASFSDEGLSGYKGKHLTGQFGDMLARIESGEFSEGTVLLVEAIDRIGRLEHLETEALMNRIIAHGIEIHTLQDGLIYTRDALSDDLGISIIQRVKSYVAHQESKQKSFRVSQKWKQRAKLALAGEQRLTRNVPGWIDPDTFKCNEHAETVRLIFKLLLDGESLHNIARHLQSNDIKSFSRRKDANGFSVHSVRTVLRSESVIGTLPASQRNDRPAIPNYYEAAIDAATFNKAQEILDKNRKGRTPASDNPLTINIFKGLFRCQCGASVHPTGTKNKYAGVYRCNNHLDGRCDVPPLKRKPFDRWMIDNFLGMIDVGNDGESERKIAALQHEVEIVTARIKKATALLLEMDDITELKAQVKGLNQKRTEIQTTIDTLKRKTSLTDKELPQLKDIDLTTKAGRVECQLILSKHLKGLTLGKDSVTVTLQNDTEITIPTNPLPLNDGSPIFEIADKELLDIDAYQL

SEQ ID NO: 20080 - protein, 506 aa, synthetic construct
MRTVITYLRFSSATQGAEGADSTRRQNELFKQWLRKNSDAQVVASFNDEGLSGYKGKHLSGQFGDMLSRIESGEFSEGTILLVEAIDRIGRLEHLETEALMNRIIAHGIEIHTLQDGLIYTRDALSDDLGISIIQRVKSYIAHQESKQKSFRVSQKWGQRAKLALAGKQRLTKMVPGWIDPETFEVNEHAETVRLIFKLLLDGESLHNIARHLQANNISSFSRRKDANGFSVHSVRTILRSETTIGTLPASQRNDRPAIPNYYEAAIDAATFNKAQEILDKNRKGRTPASDNPLTINIFKGLFRCQCGASVHPTGTKNKYQGVYRCNNHLDGRCDVPPLKRKPFDRWMIDNFLGMIDVGNDGESERKIAALQHEVEIVTARIKKATALLLEMDDIDELKIQLKELNQKRTELQTTIDNMRRKASLTDKELPQLKDIDLTTKAGRVECQLILSKHLKGLTLGKDSVTVTLQNDTEITIPTNPLPLNDGSPIFEIAEKELLEIDAYQL

SEQ ID NO: 20081 - protein, 508 aa, synthetic construct
MKKAIAYMRFSSPSQMSGDSLNRQRRLITEWLKVNSDYYLDTVTYEDLGLSAFNGKHAQSGAFSEFLDAIEHGYILPGTTLLVESLDRLSREKVGEAIERLKLILNHGIDVITLCDNTVYNIDSLNEPYSLIKAILIAQRANEESEIKSSRVKLSWKKKRQDALESGTIMTASCPRWLSLDDKRTAFVPDPDRVKTIELIFKLRMERRSLNAIAKYLNDHAVKNFSGKESAWGPSVIEKLLANKALIGICVPSYRARGKGISEIAGYYPRVISDDLFYAVQEIRLAPFGISNSSKNPMLINLLRTVMKCEACGNTMIVHAVSGSLHGYYVCPMRRLHRCDRPSIKRDLVDYNIINELLFNCSKIQPVENKKDANETLELKIIELQMKINNLIAALSVAPEVTAIAEKIRVLDKELRRASVSLKTLKSKAVSSLGDFHAIDLTSKNGRELCRTLAYKTFEKIIINTDNKTCDIYFMNGIVFKYYPLMKTISAQQAISTLKYMVDGEVYF

SEQ ID NO: 20082 - protein, 506 aa, synthetic construct
MRSVITYLRFSSATQGAEGADSTRRQNDLFKQWLKKNSDAQIVASFSDEGLSGYKGKHLTGQFGDMLARIESGEFPQGAILLVESIDRIGRLEHLETEALMNRIIAHGIEIHTLQDGLIYTRDALSDDLGISIIQRVKSYLAHQESKQKSFRVSEKWKQRAKLALAGKQRLTKMVPGWIDHDTFKINEHAETVRLIFKLLLSGESLHNIARHLQSNGIKSFSRRKDANGFSVHSVRTILRSETTIGTLPASQRNDRPAIPNYYEAAIDAATFNKAQEILDKNRKGRTPASDNPLTINIFKGLFRCQCGASVHPTGTKNKYAGVYRCNNNPDGRCDVPPLKRKPFDKWVLENFLGMIDVGNDGESERKIAALQHEVEIVTARIKKATALLLEMDDIDELKIQLKELNQKRTELQTTIDSMRRKASLTDKELPQLKDIDLTTKAGRVECQLILSKHLKGLTLGKDSVTVTLQNDTEITIPTNPLPLNDGSPIFEIADKELLDIDAYQL

SEQ ID NO: 20083 - protein, 547 aa, synthetic construct
MKLLATYIRWSTREQDSGDSLRRQTNLIDAFYAKHKDDYYLLPAHRYVDKGKSGFHQQHKAQGSDFRRMFENVMSGAIPEGSLIVVENFDRFSRADIDTAIDDVRQILRKGVSILTLGDGELYDKSALTDPVKLIKHIIIAERAHQESLVKQKRIAQVWNHKTQLARELKKPMGKQAPGWLELSEDGSHYIVDEDKASLVNIIYDKRLSGMSMFAICKWLNEQGYPTINQRKVRISKTKKPDGNWSALSVKHILTSRSVLGYLPAKISSEDRKTVLREEIEGFYPQIVTDSKFYAVQQLLEETGKGKTSSGEHWLYVNILKGLIRCRCGLVMTPTGIRKPVYQGTYRCNGNKESRCNYGTVSRKLLDTQLCSRLFSKLSQLHDEATDTAKLDELQRRLNTVDGELEKLTETLIQLPNITQIQEALRVKQGEKDELIVQLSREKARVKSVSSLDLSGLDMESIEGRTEAQIIIKRLVKEIVVSGNEKLVDIYLHNGNMIRGFPLDGKDDHTLTLEEATDEMQSLDDMLIFGEPVTRIYPAGDMEEVDA

SEQ ID NO: 20084 - protein, 506 aa, synthetic construct
MRTVITYLRFSSAIQGAEGADSTRRQNDLFKQWLKKNSDAQVVASFNDEGLSGYKGKHLSGQFGDMLSRIESGEFSKGTILLVEAIDRIGRLEHLETEALMNRIIAHGIEIHTLQDGLIYTRDALSDDLGISIIQRVKSYLAHQESKQKSFRVSEKWKQRAKLALAGEQRLTKMVPGWIDPETFKLNEHAETVRLIFKLLLDGESLHNIARHLQANNISSFSRRKDANGFSVHSVRTILRSETTRGTLPASQRNDRPAIPNYYEAAIDAATFNKAQEILDKNRKGRTPASDNPLTINIFKGLFRCQCGASVHPTGTKNKYQGVYRCNNHLDGRCDVPPLKRKPFDKWMIDNFLGMIDVGNDGEAEGKIAALQHEVEIVTARIKKATALLLEMDDITELKTQVKGLNQKRTELQTTIDNMRRKASLTDKELPQLKDIDLTTKAGRVECQLILSKHLKGLTLGKDSVTVTLQNDTEITIPTDPLPLNDGTSIFEIAEKNLLNIDTFQL

SEQ ID NO: 20085 - protein, 535 aa, synthetic construct
MLRQTTQKITALYPRLSHEDELQGESNSISNQKRILETYAKQNGFSNLRWYTDDGYSGANFQRPGFQSMLADIEAGKVATVIVKDMSRLGRNYLQVGMYTEMIFPQKGVRFIAINDGVDSAQGDNDFAPLRNIFNEWLVRDTSKKIKAVKRSKGMSGKPVTSKPVYGYLMDEDENFIIDEEAAPVVKQIYRLCLAGNGPTKIARMLTEQEIPTPGTLEYRRTGSTRRYHPGYECKWATNTVVHILENREYMGCLVNFKTEKPSYKTKHSIENPIEKQAIFENHHEPIIDTQTWERVQELRKQRKRPNRYDEVGLFSGMLFCADCGSVMYQQRYQTDKRKQDCYICGNYKKRTHDCTAHFIRTDLLTAGVLSNLRKVTSYAAKHEARFMKLLIEQNEDGGKRRNAAKKKELEAAEKRIGELSAIFKRLYEDSVGGRISDERFTELSADYEAEQQELKERVARIQAELSKAQEATVNAEKFMNIVRKHMNFEELTHTLLREFVEKIVVHECSYDENGTRRQDIEIYYSFVGKVDLPE

SEQ ID NO: 20086 - protein, 698 aa, synthetic construct
MPKIPRITALYERLSRDDDLAGESNSITNQKKYLEDYAQKNGFKNICHFTDDGFSGVNFNRPGFQSLIKEVEAGNVETLIVKDMSRLGRNYLQVGFYTEVLFPQKNVRFLAINNSIDSNNASDNDFAPFLNIMNEWYAKDTSNKIKAVFDARMKDGKRCSGSIPYGYNRLPDDKQTLVVDPVASEVVKRIFLLANEGKSPRAIAELLTEEKVLIPAAYAQKYHPEQYNGIKFSDPYLWGTSSVRTILGRQEYLGHTVLRKSVSTNFKLHKRKETEEDEQYVFQNTHEPIISQELWDSVQKRRCRVNRASAWGTHTNRLSGYLYCADCGRRLTLQTHYSKKDGSTQYSYRCGGYASRVNGCTAHSISADNVEALILASVKRFSRFVLKDEEIFALELQSLWKEKREEKPKQNQSELKRCQKRYDELSALIRSLYENFMSGLLPERQYKQLMAQYDSEQAELESKVETMKSEIAEDKSSSADIQHFISLIRKCKNPTEISDSIFNELVDKIVVYEAEGTGNARTQKVDIYFNYVGQVDIAYTEEELAELKAQKGQEEQQRMEKQRKREKAYREKRKAKKIAENGGEIIKTKTCPHCGKEFTPTSNRQLFCSRECWNQARQEQKKADREAERGDYYYRQRTCAVCGHSYWPTHSQQEFCSDECRRINHNKKTLEFYHKKKGNPKPDPEAAPKPKPKEDNAA

SEQ ID NO: 20087 - protein, 554 aa, synthetic construct
MAVSYLRVSTKEQAERGGRAEGFSIPAQREANLRKARDLNAVITEEFIDAGESARKADRPELMRMIEYVQTHQVAYCIVHKVDRLARNRADDVTIHLALKEAGVVLVSATENIDETPSGMLLHGIMSTIAEFYSRNLAGEVSKGMNQKALSGGTNGKAPMGYLNVTRRDELGREVRTVEVDPDRAPLVRWAFEAYATGNHSTISLREELIDRGLTTVPTPKRPSKPPVLSTIHKMLTNPYYKGSVRFRGASYDGIHEPLVAREVWYRVQAVLNAHQTSGEKTQSHDHYLKGSLYCGECGSRLTLTNARSRRGVVYPYFMCSGRHAKRTNCERKSMFVPDIEAAVEDHYRQVQIPEHVVTALRELVTGEFDRLHAVAKQERQAYKIERDALRDERTKLMQAHYAGAVPLDLLGSEQRRIARRLVFLDAQIKAGDIEYDQAKAHLDDCLALAGDMHAIYMSIDDSLRRIANQAFFDKLIVQDEDAIHGEPGVPFTVFLNPDVQTLAVRQQGRTAESRTQTGDVAGLNNDLLVEARGLEPLTPCLQSRCATNCAMPP

SEQ ID NO: 20088 - protein, 468 aa, synthetic construct
MEKLKAVAYCRVSTIMQEEGRSLEFQIKKCQDYCEFQNYELIEIIQDVESGGNDDREGFLELREKVRAKAFDVLVVFESSRISRVTLTMLNFVLELQKSNIHFVSISQPELNTTTPTGMLFFTIQATLSEYERKQISVRVKSNKWARAKAGIWQGGKLPLGYKKDPENNNVILIDEDNALFVQNIFSYYLKTQSLAKTAKEFGKHMESLKWILTNTFYTGIFRYGKKENNINTGIVKINEDYQYFEGFHPPIIDNETFNKVQDLIVKNKKNRPASYRLLFAGLVYCSCGGKYHSSFGGGGYNYRCEKCKKNISAKKLEQAILDKIFLMTELEELNNNDSQNEKYQEEIKLLKKIIAKDKKEKEKNLLLFKNEIINIEELKKEMDKISNSIISKEKEIKELEKLISNNKLNFEKSNNLNLLKEVVKNMENEDREELNKLFKLLIDKILILNKNEINVYNKEIKISINIK

SEQ ID NO: 20089 - protein, 679 aa, synthetic construct
MNNMDKKILIYCRVSTQQQTTDRQKEELLKFAEDNHWNVAEEDIFIDVISGFKKGEFRPEYAKMLERVEYGDIDIILFSEFSRLARNATELLEQIKLFIDKGINLYFDKQKLWVKDTNKDVGSLILLHVLAVMSSYEIELFVERSLSGKITKVQAGHGGGDERAYGYMHNENKQIVINPIESKIVARIFEMYVGGYSSIQISEILNAEKVPAPYVRKLNEYKKNREAKGLEVKEYKFDTDNLKWRISTINRLMHNELYKGNRRITFYKPDPTNPLPLSERQDREIVYEYSEHVESLRIVSDELFQQAQDKLSKAHYNKNNAVRHENLLKHLMVCGECGANFSVGKSNETSKNYISGGRTYKCYGRVNRKDKPRTCTNGAELRQWKLDGLVLQLSIQMFAEINIQQTNILKIENLGKEIEELVQIKSSKNTELVEAENLYKKTLKRLIAIEDDEVAKNLISDAKHKYDETKNMLNKTIDKLSREITTKRITIDNLKRLNANPLLINKMDEIRKDRNLVKTMVDEYIDKITIFRLHELWLLVVVSYKGGEEMWGTIKCARYKKEEMFYDELHCHYGVEFQGWLLNNTERCFSYDKNTHIITYNGESKIYVEFKSGEYNYDTFNQMIQETGWMGCFPFYAYEDSGKDLSVPSNEDFGKSLQENRIDWKAHNEKVLERLLSKS

SEQ ID NO: 20090 - protein, 559 aa, synthetic construct
MKGKIALYSRVSTSEQSEHGYSVKEQEQVLIKEVVKNFPGYDYETYTDSGISGKNIEGRPAMKRLLQDVKDNKIEMVLSWKLNRISRSMRDVFNIIHEFKEHDVGYKSISENIDTSNASGEVLVTMFGLIGSIERQTLISNVKLSMNAKARSGEAITGRVLGYKLSLNPLTQKNDLVINENEAHIVREIFDLYLNHNKGLKAITTILNQKGYRTINQKPFSVFGVKYILNNPVYKGYVRFNNHQNWAVQRRSGKSDKNDVILVKGKHEAIISEDVFDQVHEKLASKSFKPGRPIGGDFYLRGLIKCPECGNNMVCRRTYYKTKKSKERTIKRYYICSLFNRSGSSACHSNSINAEVVERVINVHLNRILSQPNVIKQIASSVIEELKLKHSKQTEIKYDIDSLDKQKAKVKTQQERLLELFLDDEMDSEMLKAKQSKMNQQLEVLDQQIKEAKQANQSQDDIPNFDKLKARLILMITRFSVYLRKATPEAKNQLMKMLIDSIEITTDKQVKLVRYKIDESLIPQSLKKDWGSFFMPKFNFVINVTNENRIENLSLLPLF

SEQ ID NO: 20091 - protein, 676 aa, synthetic construct
MDKRVIIYCRVSTQQQTTDRQKEELLKFAAENHWNVEEEDIFIDVISGFKKGEFRPEYAKMLERVEHGDIDIILFSEFSRLARNATELLEQIKLFIDRGIHLYFDKQKLWVKDNDKDVGSIILLHVLAVMSSYEIELFVERSLSGKITKVQAGHGGGDERAYGYMHNENKQIVINPIESKIVARIFEMYVGGYSSIQISEILNAEKVPAPYIRKLNEYKKNREAKGLEVKEYKFDTDNLKWRISTINRLMHNELYKGNRRITFYKPDPTNPLPLSERQDREIVYEYSEHMESLRIVSDELFQQAQDKLSKAHYNKNNAVRHENLLKHLMVCGECGANFSVGKSNETSKNYISGGRTYKCYGRVNRKDKPRTCTNGAELRQWKLDGLVLQLSIQMFAEINIQQTNTLRIENIGKEIEELIQIKSSKNTELVEAENLYKKTLKRLIAIEDDEVANNLISDAKHKYDETKNVLRKAMDKLSREITTKRITIDNLKRLNANPLLINKMDEIRKNKDLVKTMIDEYIDKITIFRLHELWLLVVVAYKGGEEMWGTIKCARYKKEEMFYDELHCHYGVEFQGWLLNNTEHCFSYDKSTRTITYHGGSEIYVEFKSGEYDYDTFNQMIQETGWMGCFPFYAYEDSGKDLSAPSNEGLEKSLQENRIDWKAHNEKVLERLLSKS

SEQ ID NO: 20092 - protein, 539 aa, synthetic construct
MQVDGYSLDAQRDKLRKYAAYEDMVVAGEYSDEGFSGKNIQGRQEFQRMLNDIQDGKDGVSYVLVFKLSRFGRNAADVLNSLQLMQDFGVNLICVEDGIDSSKDAGKLMISVLSAVAEIERENIRTQTMAGREQKAREGKWNGGFAPYGYKLENGNLVIAEDEVEVIRVIYDRYIHTNEGVAGVAKYLNRNGFIKKLRQNNTIPGFSRNFVQDVLDNPVYMGKIAYGRRRTEKKQGTRNEMHVVEQSEFPVYEGQHEAIISEEDWYLAQEKRKINSFKREKVNNPDHAHILSGILKCPCCGKSMYGNIAKAHSKDKKTRYYYYCKNTVTPTGHECSFRLNIEQTEINKFVAKIISAMVNNPRFVEAIQAKIGTAVDTEDMEKQIAVLQGQLKQAFGTKNRLERQMDTLDINDAHYDRKILDLQRRYDEQYDTIEEIEVQIGELQSQMRSIQQEKISGDNIYRLLLAFDEVYHSATEAEQKEFMKAFIERIEMFPEKRKDGSWIKKIVFNFPVPVDGEEVKEFPLETETTVETVCLLTLR

SEQ ID NO: 20093 - protein, 486 aa, synthetic construct
MKIAYARVSSREQSENSHALEQQIARLESSQVDRVIQDVESGSKNSKSPGFRELMDLVKEGKVAEIVVTRLDRLTRSLSSLQKTMEILKAHGVALVSLDDSIDTSTAAGVFHLNMLGALAEMEVGRLSERVRHGWSHLRDRRVAMNPPFGYRKENDQHVLDTTPFLCLISDRSEWSRAKISRYYIDTFLQERSIRLTLRVVYPHFGIQVYRSRRRGPHATRLIRFSPSAFNEWLTNPVLQGHLSYRRNASGNRKREDPKTWQIIPNTHEPLITAEEAAMIKQILSRNRQAKGFGSPKRRHSVSGLVFCGECRSACYHQSGCQNYARSKRLGIPQIIRRYYQCKNWRSRACPQKAMVSLDIIEEAVIAALISRAEDLAKMADTPAPTPEPLALRELRSQLADLNRMAYNPAIENAKAQIKNQIAGMELDLTHTTQESSRLGQLISALADPDFWKEGLEPNEKSQLFQDLVSQVIIKDGAVLEVKLKV

SEQ ID NO: 20094 - protein, 558 aa, synthetic construct
MKRVIGYIRVSTDNQDLERQRVLIRKYCENKGYSLLRIEEDYAISGTVSNRNGLNSILNITNSVADMVVVSELSRLSRQDDIFETLTQIHTIIRNVDLVILDEPDKVYEAGKTIILSDFLMLAIKAYGAADERKKIVSRMTTGKDSKVQAFPLMLTDSNIPTGFKAVPNPNYIKGATPKMLLVEDEERMQLVRDIFNYVANGLSLGKTAEKLNMLGYRTARNKPFYEQSIRTIINDSIYNGVRYWKGMKLELPVKFISNEIWNLAHKKVQENKNYSGEAQKHYNPLKGIIKCPCGQTSMYGRTSSCITYRCLDRIKMGIKSPCTNVGIKAETLIYAVWKDVRLRTLDETYQAKSNEKIAEIEAENIKLTQSIKEKDSEIAKLQSDLKTVIDNVMASTNITIVKALNGKADSIDSQIKSIEAEKTAIDEEIASNNRRIADEIKSQSRKELDSLSLEGKGEMFRELLSKVVYYSVSLNSGFIVITYKNDLETIIAYHNRNKPFLWALPITFRFNKVKRTVIVPTLPEQPKMTSFVLERIKEKEYTFKQLQESFNLEEYKI

SEQ ID NO: 20095 - protein, 481 aa, synthetic construct
MITTNKVAIYVRVSTTNQVEEGYSIDEQKDKLSSYCDIKDWNVYKVYTDGGFSGSNTDRPALESLIKDAKKRKFDTVLVYKLDRLSRSQKDTLHLIEDVFIKNGIEFLSLQENFDTSTPFGKAMIGLLSVFAQLEREQIKERMQLGKIGRAKAGKSMMWAKTSYGYDYHRDTGTITINPAQALAIKFIFESYLRGRSITKLRDDLNEKYPKHVPWSYRAVRTILDNPVYCGFNQYKGEIYPGNHEPIISKEEYDKTQSELKIRQRTAAENVNPRPFQAKYILSGIAQCGYCGAPLKIMLGVKRKDGSRLKKYECHQRHPRTLRGVTTYNDNKKCDSGFYYKDKLEASVLKEISKLQDNANYLDKIFSGDNDETIDRESYKKQIEELSKKLSRLNDLYIDDRITLEELQSKSAEFISMRATLETELENDPALRKNKRKADMRKLLNAEKVFSMDYEGQKVLVRGLINKVQVTAEDIVIKWKI

SEQ ID NO: 20096 - protein, 559 aa, synthetic construct
MSKEKIKVYLYTRVSTSIQIEGYSLEAQKSRMKAFAIYNDYEIVGEYEDAGKSGKSIEGRIQFNRMMEDIKSGKDGVSFVLVFKLSRFARNAADVLSTLQIMQDYGVNLICVEDGIDSSKDAGKLMISVLSAVAEIERENIRIQTMEGRSQKAMEGKWNGGFAPYGYKLEDGKLFINEEEAVAIRTIFDQYVNTTIGANGISKYLENHGIRKIPRQNGKNPLFDAGLIRKILKNPVYNGKIAFGRRTLEKVHGTRNEYKQVEQDEYLISEGIHEAIVSDEVWQAAQVKLKSQAKKYEHVNKGKDTRTYLLSGIVKCPICGVGMFGNKCTKKKKDGTKYKDFYYYGCKHRQMIRGHKCTFSKQIREELLDDAVAEVIVKIVSNPKFASMMQEKINMKVDTSEIEKEIDNYQKELRKSHSTKFKLIEEIDNLDVEDKHYKRRKQDLDDRLYRMYDKIDELESSLIDAKAKKQTIEAEKLTGDNIYKVLIYFDKLYKVMNDVERRQLISALISEIQVYEEKQSNGQWLKSITFKLPIIEENLNIDLDNDEQVECVSLLEKRS

SEQ ID NO: 20097 - protein, 452 aa, synthetic construct
MKAAIYIRVSTQEQIENYSIQAQTEKLTALCRSKDWDVYDIFIDGGYSGSNMNRPALNEMLSKLHEIDAVVVYRLDRLSRSQRDTITLIEEYFLKNNVEFVSLSETLDTSSPFGRAMIGILSVFAQLERETIRDRMVMGKIKRIEAGLPLTTAKGRTFGYDVIDTKLYINEEEAKQLQMIYDIFEEEKSITTLQKRLKKIGFKVKSYSSYNNWLTNDLYCGYVSYADKVHTKGVHEPIISEEQFYRVQEIFSRMGKNPNMNRDSASLLNNLVVCGKCGLGFVHRRKDTVSRGKKYHYRYYSCKTYKHTHELEKCGNKIWRADKLEELIIDRVNNYSFASRNVDKEDELDSLNEKLKIEHTKKKRLFDLYISGSYEVSELDAMMSDIDAQINYYEAQIEANEELKKNKKIQENLADLATVDFNSLEFREKQLYLKSLINKIYIDDEQVTIEWL

SEQ ID NO: 20098 - protein, 452 aa, synthetic construct
MKAAIYIRVSTQEQIENYSIQAQTEKLTALCRSKDWDVYDIFIDGGYSGSNMNRPALNEMLSKLHEIDAVVVYRLDRLSRSQRDTITLIEEYFLKNNVEFVSLSETLDTSSPFGRAMIGILSVFAQLERETIRDRMVMGKIKRIEAGLPLTTAKGRTFGYDVIDTKLYINEEEAKQLQMIYDIFEEEKSITTLQKRLKKLGFKVKSYSSYNNWLTNDLYCGYVSYADKVHTKGVHEPIISEEQFYRVQEIFSRMGKNPNMNRDSASLLNNLVVCGKCGLGFVHRRKDTVSRGKKYHYRYYSCKTYKHTHELEKCGNKIWRADKLEELIIGRVNNYSFASRNVDKEDELDSLNEKLKTEHAKKKRLFDLYISGSYEVSELDGMMADIDAQINYYEAQIEANEELKKNKKIQENLADLATVDFDSLEFREKQLYLKSLINKIYIDGEQVTIEWL

SEQ ID NO: 20099 - protein, 452 aa, synthetic construct
MKAAIYIRVSTQEQIENYSIQAQTEKLTALCRSKDWDVYDIFIDGGYSGSNMNRPALNEMLSKLHEIDAVVVYRLDRLSRSQRDTITLIEEYFLKNNVEFVSLSETLDTSSPFGRAMIGILSVFAQLERETIRDRMVMGKIKRIEAGLPLTTAKGRTFGYDVIDTKLYINEEEAKQLQMIYDIFEEEKSITTLQKRLKKLGFKVKSYSSYNNWLTNDLYCGYVSYADKVHTKGVHEPIISEEQFYRVQEIFSRMGKNPNMNRDSASLLNNLVVCGKCGLGFVHRRKDTVSRGKKYHYRYYSCKTYKHTHELEKCGNKIWRADKLEELIIDRVNNYSFASRNVDKEDELDSLNEKLKTEHVKKKRLFDLYISGSYEVSELDAMMADIDAQINYYEAQIEANEELKKSKKIQENLADLATVDFDSLEFREKQLYLKSLINKIYIDGEQVTIEWL

SEQ ID NO: 20100 - protein, 624 aa, synthetic construct
MIKTFIYSRVSSQEQLSGGGLDRQETDVREYVTRNGLDQYEIVAMVDRGISGYDGSNMRDGELGKWYKDAITGMYWGSHLVLEAIDRFSRRDPMLAMEDFTVLVNKGGIKVHIVKFNTFINGDNLPMLSMMMNLAHSESKQKSDRISKGWQRRRRMALDNGTAITARTPYWIDVRDNEYRLNNSSIAVVEAFAMYKQGLSCGLIAKKLNELKHYFPYMWTKTAVQHIVDGLNTSGIIDAPRAIKTIKAFYKSGFSVEDIAKKMNAEFQFMKEWNAPAVHKLLQNKSVTGLVEIQKRKLIQEFDSDGKPLELRTKSEGEKYFESIYPQIISIDDFELIQKLLESNRKVDTKTGKGQTTGGTVTQNEDGELVKQFILSSLCRCYKCGGAMFNNIVRSKRKNGKVDTYSYLRCLNERDAHCDVKALNYPVIERAIIEHVKGLNFDTMFKGTNNSELELLKTREVELLRDIATYEDAIAARKAAGKNTSPVLVTSLVDAQDDLEALQKKIRAISGVTVNAEELTSLNESVFDVAEYELRNMVELELQKIIKRITFNCTEKNIYFITIQYNTGTVLQHGLKVDKKKGVIETYELHEGNKGYVSNGEVITPALIEAAESKNIGIFEGKVM

SEQ ID NO: 20101 - protein, 529 aa, synthetic construct
MQPARAVTVIPATTGRLATATAVRASLKRVAAYARVSTDNDEQLSSYEAQVDYYTKHIQSNTAWKFVEVYTDEGISATSTKKRDGFNRMIADALNGKIDLIITKSVSRFARNTVDTLTTVRQLKEKGVEVYFEKENIYTLDSKGELLITIMSSLAQEESRSISENVTWGHRKRFADGKLMLPYGQFLGYEKGEDGLPKIVEKEAAVVRLIYKMFLEGKTSSGIAKYLTENGVPTPSGKDNWQQSTVMSILQNEKYKGAAMLQKTFTVDFLTKKKKLNEGEVPQYYVENSHPAIISAEAFDLVQHEIKKRKEVKGYKTGINSFSGKIVCGECGSFYGSKVWHSTSKYRRTIWQCNSKFKNDRKCMTPHLYEDKIKGAFLEAFNSLIKNRDEILQCYEEIINVLADTSELDKETAKLQSECEVVAELLRKCVEENAHSALDQKEYQRRYTALANRYETARTGLSKINDKRLERNAKRESMRSFINSIRQSDQLLADFDEELWNNTVENVTVYSECEIKFAFKNGIELEWKI

SEQ ID NO: 20102 - protein, 442 aa, synthetic construct
MLRTVRKIEPLAARLPSKKRVAAYARVSSGKDAMLHSLSAQVSYYSDFIQKHRGWEYAGVYADEAVTGTKESRAEFQRLLKDCRNGKIDMVITKSISRFARNTVTMLEAVRELKSLEVDVFFEKENIHSMSGDGELMLTILASFAQEESRSVSENCKWRIRKRFAEGEIVNLRFLFGYHIKNGEIEINPEEAEVVEMIFNDYISGMGCTLIAKKLRGMNVDRPRGGTWTSNKVADIIKNEKYAGNALLQKKYVDNHLTKSLLKNKGVLPKYYAEETHASIIDPDTFQKAQEIMDRNRKRNAGKNVAGVYPFTSKIVCTNCGKNYKRKNRKGKASWSCSTYLKLGKEACNARQIPEDILLSIATEVLELQEFDDTYFLKQIKEIQVLEHNLVRFVFQDGQMIDKQWQHKSRSESWSEEDREKARMRQLDYLERRNSICSQQEQ

SEQ ID NO: 20103 - protein, 513 aa, synthetic construct
MENYCIYLRKSRADEEIEKTLGEGETLAKHRKTLLEFSKKMQFNIVKIHEELVSGESLLYRPAMLELLKEVEQGLYAGVIVMDQQRLGRGDMEEQGIILKTFKKANTKIITPDKTYDLNNEFDEEYSEFEAFMSRKEYKMINKRLQRGVIRSVHEGNYLPARPPYGYLIKEDKFSRTLVQHPEQSHIIKLIFDWYVNDKVGFNTIANNLNSMGLKTLRNQAWTTGAVSYIIKNPVYIGKISWKKVITSRSTTPGKLKKTRTRPESDWIVVDGKHEALIDADTFEKAQIINKSKYIPPVKPSNKLSNCLAGLVVCGVCGYKMKYRPYPNVDAHLICERKCGNKSSKYKYIEARIIKLLDEYADQISANLDMDSNKDREKSISALTYNLSVLEKEMKDLGVQRERLHDLLEQGVYDIDTFLERSKNIADRLLSTNEAIKQTQEKIKLEIEKSNIEVNMLDKIKNIVAAYYDIDDPVKKNTLLKEVLEKAVYTKVKGQREDNFSLEIYPNYNTSLI

SEQ ID NO: 20104 - protein, 525 aa, synthetic construct
MTRKAEQKAVIYCRVSTTKQTKEGNGLDSQETRCREYAKYKGYSVEDVFQDDKSGSLIDRPGMKAMLGYLSRHRKEAVVVIIDDISRLARSLDAHTRLRSAIASLGARLESPSIEFGDDSDSQLVENLLASVSQHQRQKNGEQVKNRMWARVMNGYWVFQAPVGYHYENVRGHGKLLVPKEPQASIVREALEGFASGRFQIQAEVKRFLEAQPEFPKANSRYVRPQQVTDILMNPVYAGYIAVPKWDVQPRKGHHEPLISFQTFKKIEERLHEKAKVPARMNLTADFPLRGAVACGDCGSPLTSCWTTGRNKYYPYYLCCKKGCSSYGKSIRRDVIEGEFDALLRAVQPTPGLFKVASRMFEDLWNHRLSAGHERIHHLKAELTKVDRQIEQFLSRIADTEIESIIQTYEDRIRKLEEQKIMVKEKIVECGRPVRSFDETLRTAFEFLGNPWKLWASDRLEDKRTVLKLVFADKLVYARNTGFRTANLSLPFKALADLSSGHFKMVEPGGFEPPSASTPSSALHV

SEQ ID NO: 20105 - protein, 604 aa, synthetic construct
MKKVFVYHRVSSDQQLDGSGIARQAELLEGYLERTGICAEMDDPAPVVLSDQGVSAFKGLNISEGELGAWMEQVRNGMWDSSILVVESIDRFSRQNPFDVMGYINALMAHNVAIHDVMANIVISRSNSKDLPFVMMNAQRAYDESKYKSDRIRKGWAKKREQAFNKGTIVTNKRPQWIEVENDKYVLNHKAAVVKEIFALYQTGMGCPTIAKQLQTKKGELYKFNRPWTGELVHKILTNRRVTGKIFISEIIRNHDDIDNPVTQKKYDMDVYPVVINEEEFELVQELLKSRRPNAGRVTVKKDGQEEVLIKSNLFSGIARCTECGGPMYHNVVRAKRTPKKGDPKIEEYRYIRCLNERDGLCENKAMTYETVERFVVEHLLGMDLSTVIKEHEFNPEIEVLRIQIDQVKDQITNYENGIERRKSAGKPISFDMREELDDAKSALERLLARQASLATVQVDVPVLQDVNVTELYDVNNVDIRTRYENELNKIVSNIRLKRNGKSYTIDINYKQNELKRHVLFVENKKKEQTLIGEVIIEDVDGAKFYYTPSFMIMLKDGEIRFQQTNEDLSIIDYSLLLNYIDAVDRSDAVGVWMRNQFNFLTFN

SEQ ID NO: 20106 - protein, 522 aa, synthetic construct
MATSLVRAVVGARVSIFTDGKESQITQRTKGTAYAESQGWTVVGAFEDLDVSAIKKSPWDRPDLKQWLTDRADDWDALVFAKTDRVFRSAADCVKLSEWCRDHKKILVLVDDGIKLDYFHPDSQQDAFAGAMSKVFLILASVFAEIEGQRFVQRALDRVTQYRHQPRWAYGVPPYGFQVVDRPEGGKTLGHDLEAQQVLQGIATRLLSGDSLTRITADLNETGVLSPADRLRQRTGKELRGSSWTVITVQTILTNPATQGIKTAKGKPVLDAGGEPVRVGPPSFDSETWGRIHSELAQRSQSGQQRRHSDNPLLGVAKCGVCGKNMRHFQRTKGGRHYRYYICGSTPKACPGVLINADNAELAVETSFLDVHTNRRIKERVWRAGSDHSAELEQTTNTITALWEDRALGLFTTPEDQDMFRSQMAALVAKRDALAQTPVIKAGWIDVETEQTYGAVWPDATPVERRKMLTDAGMKLTVYRANKYETYVDLDKAIGEGAVGEELHSELEARAAEERRRWGMPD

SEQ ID NO: 20107 - protein, 503 aa, synthetic construct
MENQPKRALIVTRLSRVTEATTSPERQMEICQVLCDDRGYEVVGHAEDLDVSGSVDPFDRRRRPNVARWLANEAEPFDVIVVYRVDRLTRSLRHLQKLVHWAEDNDKLVVSATEPHFDMTTPFAPVLIALIGTVAQMELEAIRERNSSAARHNIRAGRWRGGQPPWGYVSSNASGEWRLVPCPEQVELINEVAARVLGGEPLQRIAHDLTSRGIPTPKGRTEWNVTPLKRSLTSEAMLGYVMSGDKPLRNDDGSPIIRAEPILSREVFDRVKVELESRSRRGEPTKRSSSLLLRVLYCGVCQLPAYQFNGGSHSKSPRYRCSSTGKSTKCENLTVRMDLADQAFTENLLDMFGDSERLERIWDTGSDHSAELADINEVLEDLTGLLGTGPYKAGTPQRSALDARIAALATRQAALSAEAVRPSGWAWKPTGEMFAEWWGNQDTESRNVWLRSMNIKVTYNNSSGAVTWGLDWGDLKKFEEQLKFGKSAQRAVRQLDKMAEQWE

SEQ ID NO: 20108 - protein, 547 aa, synthetic construct
MMKEVKKKRALICIRLSRVTDATTSPERQRQACEELCKARDYDVVGIAEDLDISAGKTSPFDRPQLGQWLRDPTRYDVIVFMRVDRFVRRLFDLADAIRWSQDHGVTLVSATESHFDLSTKLGGVVALLVASIAEMELDAISERNSSAFKHNFTLGKWRGGQAPWGYVPGKIDGEWRLVQDPAQVEVIHEVVAKVLEGQPLRAVAHELTTRGIPTPRDSFAMHQGREVKGYAWHPSRLKAFLTSQTLLGRVVMREQLKDAQGRPQRDAKGRKIFGDDVLVTNDDGSPVVRAEPILTMSVFKRLCAELEGRENRKEPTKRSTGLLLRIIYCGVCGQAAYRLKGGAGRKPRYRCASAQGSSVHQCDNRTISLEWADGEVERQILQNMGPLERKRRVWFSGNDHTDELTEVNDMLEDLVDQLGTGVFKRGTPQRERLDQRIAALTERQAELSASPRVEPGWVYEGTGETLADWWAEASDQEKNIWLRQYGFRYEWVSHTGDNGRIVVDEFKQVGDLTMDLDADTLLGPVWDIVSAMSDPANIEAYNALSD

SEQ ID NO: 20109 - protein, 530 aa, synthetic construct
MNKYDQARLEDVVQPGKRIVFYARYSTEKQEYDMQKHSVETFLQRYGCQIYKEYVDRATSAIKVPFEKREDLQNLIRDAEEGKFDVVITYKNDRIARRIEEHQLFREKMRELNIHVVVSSSSELYTVGEVVSQAVKDGLTRIEAALIQDRTKDTFRSKTKRGTWLGGKAPYGYTYRVIEENDGGRKTRKEYFKDEEDQQEAVMEIFRLFEIGYGFQQIANEIHSRKLDKNMKWTKEKIRYIITNPFYCGFISMNRYDNGVLNDKNQWVEGKPKNMTPLFKREYWEYIMRLFEERKKRKVHSRDYSTPFLLRGILNCDQCKELMLAKNQQSGGEKYKGKKKKEQRRIYECKKCDFKLQANMIHERFRKDYLPYVLEQVTQGKKEQVESAIEERLKKEMQSLKGSKKKLDEEIAKLNQQIEALNVEMKSYYDKETIDKKVLEFMSIIMSHRTNKIHELHTVKDKKVGLQERIDRIAKTMQQKKYLPPQHLIREFAKENVDTQKLRAFLLQFFKCIHVARDGNLVLSINEYLM

SEQ ID NO: 20110 - protein, 487 aa, synthetic construct
MEPYAVYVRVSTDRDEQVSSVENQIDICRNWLERNGFTWDEKLVFKDEGISGTLFVERPAIQLLLQKAKAKEIDMVIFKSISRLARDLKDSLEIREVFLAHNVRIISVEEGYDSVKAGKNDMAFELWSLFSAQYSRTLSSSITAALAVKVRRGEHIGKVPYGYNRENQKLVIKEEEAKAVRRMYRWYIDGWGYKKITNELNRLGVKSKTKKNWQMTSVQRILRNPIYKGTFILNQYTSVKVGGRKKQIRNPKEKWFIFPKHHPAIVDEETWERANQKNIISSKTKITPWNEFRDLAKCAVCGSNMVIVQSHLRKKNGERTEWKYLKCSQYRRAGKHGCVNHVPIQYSEFRQFIIELLIKKGEFITLNLQSNVEQEQKEKIKKLQQFVNTNEQKKKSLLDLYLEKLIDKTEFEKKRIDLDAEIMKVDRELFVLQNDDVIQTDIKTIKEAFEQLRKQGEDLFHVFKTLIRQIVVHQNGKVDIVYIFEKA

SEQ ID NO: 20111 - protein, 515 aa, synthetic construct
MKTAIYLRKSRADLEAEARGEGETLAKHRTTLLKIAKEMNLNVLSVREEIVSGESLVKRPEMLALLEEIEDNKYDVVLCMDMDRLGRGGMKEQGIILETFKRSNTKIMTPRKTYDLNDEWDEEYSEFEAFMARKELKIITRRMQRGRVASVEAGNYLGTHAPFGYDIHRLNKRERTLTINSEEASVVRMIFDWYTNEDMGANAIRSKLNDLGYKSKLGNEWNPYSILDILKNNVYIGKVTWQKRKEVKRPDAVKRSCARQDKSDWIIADGKHEPIIPESLFEQVQEKLNSRYHVPYNTNGIKNPLAGIIKCSKCGYSMVQRYPKNRKETMDCKHRGCENKSSYTELIEKRLLEALKEWYINYKADFEKHKQDDKLKETQVIQMNKAALRKLEKELVDVQKQKNNLHDLLERGVYTVDMFLERSNVVSDRITEITSTMENLKKEIKTEIKKEKVKKDTIPQVEHVLDLYFKTDDPKKKNSLLKSVLEKAVYKKEKWQRLDDFELVLYPKLPQDGDI

SEQ ID NO: 20112 - protein, 604 aa, synthetic construct
MESDNSTLIDLLVANRQLNTQAAAKIAVSYPRVSSKKQAEKDGDPDGYSLPAQREANRRKAATLGAVVVEEFVERAESAKSADRPKLQEMLNYIREHKVDYVIVHKVDRLARNRADDVEISLAIKQAGAELVSATENIDETPNGMLLHGIMSAIAEYYSRNLAVEVTKGMTQKAKIGGTPGKAPLGYLNVRKINAHGADVRTVEVDPMRAPLITWAFHAYASGDWTLKALAAELEHRGLTTRPTPKTPARAIKYNSLHKILTTPYYKGVVVFSKAAYSGKHKPLVDEVTWAKVQEVLSSHATGEKQREHPHYLKSSVFCGNCDSRLVITNAKNPSGTIYPYFICLGRHQKITDCEVKAVLIAEVEQKVADYYRTVQLDPDLRNQIETMLQDEMAAYRASAETQHKQLSLQKDRLERERSSLLQAHYAQAVPLDLLKTEQDRIARSLAEITERLAATTMEFQQFELAVVSALDYAMNCHRAYIGAVHVTGGKQIRRLLNQAIFTRIYIDDEGIHGDLAEPFRTLLSDELANAAEQHAANEERGMAGDGKHCATSDNDPRTPLTEVLEKTNKKPDDSVASLKLTTLVPSAGFEPATPALGEPCSIP

SEQ ID NO: 20113 - protein, 550 aa, synthetic construct
MLCYSYVRFSTPDQAKGDSYRRQMEFASNYCKLHNLTLVEDLSFKDLGVSAYKGNNLKNGALGKFLELVVSGQIPCGSTLIIESFDRLSRQTAIKAQAVFFEIISAGITIVTAMDNRSYNLQSVADNPFDLMYSLMIMIRANEESETKSKRVKEAIKSKIDNKKIIPSKLPYWIKHNKNEDILELIPERAQTISYIIERYLSGFGINKLTRHLNETIPPFAGKSWYPLYLQKLLRSVSLYGERQFNMNDTLYIMDDYYPAIIDKSKFAVIQENLDSRAPTRGGKIPSAITGIRKVYCGYCQGVLVSQSTKRNGKIVDGLRRARCGTNNNAGSCITSSFRISIVESAIAEYCSQHFDLSLLAPESNSSKLDLAKYRLELKQLDTIIANYVKFISDGNISPAIISALDETEKNKKNLQQKIQKAELNTLANSKSEIAAKWKTIKTNLSVYDEENILKLRELIRGSIKRILVFQYGPWANTGPITTSSGKIIQPYKGNFSIQITFNNGVRKTLELGENVKDQEVDTINRTITENGNTYTPDEYILMIQKTLTK

SEQ ID NO: 20114 - protein, 498 aa, synthetic construct
MENQHKRALIVTRLSRVTEATTSPERQMEICQVLCDDRGYEVVGHAEDLDVSGSVDPFDRRRRPNIARWLANEAEPFDVIVVYRVDRLTRSLRHLQKLVHWAEDNGKLVVSATEPHFDMTTPFAPVLIALIGTVAQMELEAIRERNSSAARHNIRAGRWRGGQPPWGYVSSNASGEWRLVPCPEQVELINEVAARVLGGEPLQRIAHDLTSRGIPTPKGRTEWNVTPLKRSLTSEAMLGYVISGDKPLRNDDGSPIVRAEPILSREVFDRVKVELESRSRRGEPTRRSSSLLLRVLYCGVCQLPAYQFNGGSHSKSPRYRCSSTGKSTKCENLTVRMDLADQAFTENLLDMFGDSERLERIWDTGSDHSAELADINEVLEDLTGLLGTGPYKAGTPQRSALDARIAALATRQAALSAEAVRPSGWAWKPTGEMFAEWWGNQDTESRNVWLRSMNIKVTYNNSSGAVTWGLDWGDLKKFEEQLKFGKSAQRAVRQVTKA

SEQ ID NO: 20115 - protein, 518 aa, synthetic construct
MPKAISYIRFSTKIQSVGDSTKRQSKYINDWLKRNPDYYLDESLRFQDLGISGFSGANAKSGAFGEFLAAVESGYIEAGSVLLVESLDRVSRQDIDTAGEQLRKILRSGVEVVTLVDNEWYTKESLKDSLSMIKAMLVMERAHEESAMKSTRLRSMWAAKRERAANGEIMSKRCAAWLKVSDDRSHFEFIPENVKAVQRVFQLRLEGLSHVKIAKQMNDEGFSTLNQFKSVTGGWSQSSVTELLSNRSVIGFKVPSKSMAVKGVSEIPNYYPSIITDEQFYAVQQLKQGSGRKPSSDLPLLTNLFKGVLRCSECGFIVVVAGVSAKRSGIYKCSMKSEGRCNSVGFSRLQTDRALVQGLLYNTNRLSLNRDNGSAIGTLQSELEQLQKQRERLIKLAMLADDTESMAKDLKALNSQIKDAEKAVSEVHQREQSSQLETISHLDLTLKKDRIEAQIIIKRIVKEIRLNTAQKKCDVFLHNGLKLLNFPLDRVVDGEIFLEVLPLLEADEFDFDTYRVIE

SEQ ID NO: 20116 - protein, 604 aa, synthetic construct
MEIRKAYIYSRVSKGTQTKGDGLRRQVESATKFVEMENASNRSSGRHTYVVEDNLITDRGLSAYKGLNTEANAGLGAFIEAAKNGDIARGSLLVVEAIDRISRLPADEARKLFGMFKTFGIDVAIVKFGIIIYHNENTKLEHDLLLTAAFHLAHLESDQKSKRIRARFEHKRKLEKNGGEKRTSICPAWMELSHDRTEFVLIPEHEQVLRRMIEMKLSGIGCLRIAKSLNEEGILNFSGKPWQVKLVEKYLKMEQLIGSFQRVEHVRDENGTIQKKPIGLIEKNYYPAVIDGDTFLRLKQSFKRSGGRQTGAYKNLFSNMLYCPTCGSAMSYSKPNRGRKKIRCRKQIDGRGCSQRALYYDVLEDRLIRALAGLDYAKINSDSFVELEKEISTLEATISDLEEQAEIVNDQYLKEEDVRFQSTFREKLQLIFDKIDVNRKRYEQLVTVKHDYDLSMVSELKLEKEEDREKYNQFVRNFIDYIIASDDRDDSPRFVRVQFKADSIGEVHFGFNGELYENEGVLTEFFTKENTSSGEEVKRAISLSKVGLYEKKLAEITDVKPPMTKDVRELIRYYFELQQAVKSDMPKWGDIAKAAQLPLEGRVI

SEQ ID NO: 20117 - protein, 374 aa, synthetic construct
MLCYSYVRFSTPEQARGDSHRRQMEFAKNYCRLNNLTLVEDLSFKDFGVSAYRGDNLKTGALGKFLELVNSGHIPTGSTLIIESFDRLSRQTAIKAQAIFSDIISAGITIVTAMDNRSYNLQSVTDNPFDLMYSLMIMIRANEESETKSKRVKEAIKSNIKNKKIVASKLPYWIKHNKERDLLELIPERAEIIQHIIEKYLAGLGINKLTRYLNDNIKPFAGKNWYPMYLQKLLRSTSLYGERQYNIDGTLHIMDNYYPAITTKNTFAIIQENLNARAYTRGGKIPSAITGIGIAHCGYCHDVLVSQSTKRKGKIVDGLRRARCNSSSKGTKCITTTFRISIVENAIAEYCSQHIDLSFLEPVSDNSRTQLAKI

SEQ ID NO: 20118 - protein, 609 aa, synthetic construct
MIRAVIYCRCSTEEESQKNALEKQVAEAESSVRQYGWVLVDRYVESRSGTTAKGRNEYKRLFNDLLTDKFDVIVIKSQDRLMRNTKDWYLFVDRLCTEQKKLYMYIENKFYSTDDALITGIKAILAEEYSRELSKKINNAHRNRQRDGGNVMLPGNAYGFKRMPDKSVALVEKEAEIKREMYRLCAAGYGTRTISTIMRNRGIVNRDGKPFTSSYILRMLRNPINKGTAVMGKYHFDFDSKRTIKNPKEKIYIHEDKVPRTVSDELWNAANEQIDKRSVKIKDGEDDIGKNPGKYQLSGKIVCGMCGQPYWRKVHRKHSNHELIYTWACSSYLELGRSDNLRARPNLRKVFLENEKGCDNINIAENEFYAVLEEICSNQYQKNKKKIIEKMMKLLSKSLNNQDGTKEIEKLEREQEDIERKMKFLVDKLIDGVLTDQMYRTKQEELEKKRDQNKKKILELTERTSNTQNIKDRLQEIETRLNDDDLFKKATIDNMLEEVDKIVVYPRYMEIYFSLSSVTGCMDLKIFDGDKKCFRVDYGNRLDYKSRQRDAREVVVDLIRENPRITGKMIAKEIGCSLSGANYKLKVLKKEGRIRFNGAGGKGCWEILE

SEQ ID NO: 20119 - protein, 519 aa, synthetic construct
MHLFKEIQSDREAEAHGEGETLARHQRILLDLAKKKEYIVGAIYREVVSGETIADRPVMQQLLHEVESGMWDGVLVVEVERLARGDTIDQGVVSRAFQYSDTKIITPTKIYDPNNEFDEEYFEFGLFMSRREYKTIKRRLNAGRISSVKEGKYCGNKPPYGYERIKLAREKGYTLRPVPAQAEIVKMIYTWYAGDGCEQIGVAKIVRKLNDMGIKSALGGDWTPASIQGILTNPVYIGKIRWNGRKTVKTIQNGQVVKTRPRSRNVLICEGLHPSIISDDLYNSVQEIRQKNPPRPISIKNTVRNPLAGIVYCSKCGRAMVRRPHQKRGQEDTLMCPYTSCPTVSSKLSLVEKAVLDGIKEITEKYKLNNDINVPYNTINSGIVSKQNLIREKESELESLNVQKAKQYDLLERGIYTTEVFLERSKTIARSIQSCSDIITKLREEIEHDENIKAQQSNFIPRCEELLNNYWDLNIESRNRMLKNLVEKVVYSKNIKNTYGKGNEINFELDIFPKIQKND

SEQ ID NO: 20120 - protein, 640 aa, synthetic construct
MRRKKDKSNGITALYERLSRDDDNAGESNSIVHQKQMLEDYAMKHGFTNLVHFTDDGWSGATFDRPSWNRLVEGVKNGEITACICKDMSRIGRDHLQVGFFTDILFREKEIRFIAINNGIDSDRQETSEFAPFLNIMNEWFVRDTSKKIKAVLKSRGSSGNAHTSNIPPYGYLKDPENPDHWIIDEEAAEVVRRIYRMTIEGKGPYQIARELSEEKIERPSYYLGKKGLGNHASNYDKENPYMWRGNQVTTLIARPEYIGKTVNFRTFKNSYKDKKTKRADKEDWVVFDDTQEPIVDEETWLLAQKLRQNVRKADPMGEPNVLTGKIYCADCGAPMYNHRQRKGRERIYYTAKGEKRTSYSNPADCYECSTYNLAYQKYDRHCTCHHISTKALKSIILKTIQETCHYVSLNEQEFVYSLQEESAMKDIAVSETVKKRIERNQKRVHELDMLIRKIYEDNVIGRLPDRLFQSMLTDYENEQNELNKIIETDTADMQRIIGGQNNVERFLKLVKKYENITELTPAMINEFIDKILVHEPQGKGADRTTEVEIYLNYVGQFQVPVEQHEPTEEERIAAEKEAERLRRKRESNRKYMKKIREKSKEFAEHERIAEEKSSDSNVCVEQNVTSKSNRQKVKGEKIA

SEQ ID NO: 20121 - protein, 436 aa, synthetic construct
MENTTISTREKSVVVPITVKYCLYARKSTEAEDQQALSIESQIKEMLALAERDGLMVAEIKKEAHSSKEVGQRPIFNQMLAEIREKKFNGILTWAPDRLARNAGDLGSVVDLIDQKLIVEIRTYSQKFTNNPNEKFLLMILGSQAKLENDNKVVNVMRGLKARCEMGWRPSQPPTGYLSEHRTDKKCQVKVDPHRGHTVKQMFEKVGNEQWSGRKVFRWLVDSGFKTKTGKTLTLGNIYILLRNTFYYGEFEYPVGSGNWYQGKHTPIITKELFDKVQVVLNEKFIPKTESKEFAFTQLIKCGYCGSGITADEKFKKLKDGGVNRHVYYFCSTARNIDCKNPAITEPGLINEFIELIDRIDLDELGIRASIELEIARFNKFRIGVLGHKKESHNADIDIRNYAKYLLRDGTITEKRELLSFMKSKLIIKDKKIELS

SEQ ID NO: 20122 - protein, 443 aa, synthetic construct
MKIKNPTQGEDYEKPRVEPKKIRYCLYARKSTESEERQVLSIDSQIKEMLQLADREGLEVVTMKRESHSAKETGQRPIFNEIIEELKQEKFNAILTWAPDRISRNAGDLGKIVDLMDAGKLHMIRTFGQTFGNNPNEKFLLMILGSQAKLENDNRGINVKRGLRTRVEMGLWPGMAPLGYLNQKLMDRKCQIIIDPERAPIIKKMFEKVAYEGWSGRKVYNWLRFDLNFYTRGNKPLTLSGVYRIFDMPIYYGPFEYPRKSDNWYQGTHEPIITKELYEKAQEHLKRDKIVRENREFAFTKLFTCGMCQSGITAQEKYKELKDGTTAKYVYYSCSKAKDRNCPNKYIREEELIEELFKVIDKVDINELGMRMKLEEEIKRFNRLQRLSTKGTPKYSINEDDVNTREYAKYVLREGTPLEKRELMGHLRSRLVLNDKKITLLKE

SEQ ID NO: 20123 - protein, 527 aa, synthetic construct
MNQKFFLYARKSTDVEDRQVLSIEAQLQELRDYAKRENIEISAEFIEKQSAKIPGRPMFNRMLDDIEKLGGNILAWHPDRLARNSVDGGRVIYLLDTEKLASLKFPTFWCDSTSQGKFMLNMAFGQSKYYVDSLSENTKRGMRQKVRRGEYPGLTPIGYINDSRTKTINIDKKSAPVIRKAFEMYSEGNQTLDTIGMFLAQNNLFAKNGKRIHISRATFILSNPFYYGHFRYNSEIYEGKYEGIVAKKLWDQVQEVMKRRSRPRHKQKNEPQAYCGLLSCASCGMQITGEYRVKTQLNGTEHFYTYYHCTKKSKTQKCPEPCIRQESLDAQISSLLQKVSLPQNWADYLNTRLGKDKVESAQSVSALVSENEKRIQDIVVKLQRLLDGYLDQDIDKEVYRAEKSKLLSEKKSLEEEISRNQQKQKHWLEPMEKWIKDAGNMEKIALDSNLFAKKVAAKEIFGSNLLLQNKLVRASAPKILNSAGENQWACLRHAHETIGISDKSRVLEPMARIALATYPLPWGCSTI

SEQ ID NO: 20124 - protein, 618 aa, synthetic construct
MTEGSLNSNLARRITGMARKRAVLYLRVSTPGQVNTDYDPEGISIPAQREASKRKALQLEADIVREFVEPGRTATSIDKRPKFQEMIAWVKAQKDIDYIIVYHFNRVFRNSVDAGITKRDLKKVGTRVVSTILDMGESPESSLVETILHAVDQYQSEASGADISYKMGQKVRNGGTIGVARLGYLNVRELKPEGGEIRTIAVDPERAPLVKLAFELYATGDYTLEDLSDELYERGLRTRPTPRRPAKQVSINKLSLMLRDRYYLGFVSKDGDEIRGRHEALITPALFEQVQDIANARSAAGERRRIHHHYLKGSLFCGRCWRASGELKRMIIQRTVNSRGTEYMYFFCRNKQNGSCSSPHINIVHLEEAVEVHYRTIRFDPAFAATVRAHVAATLAEGQSAARLLRAQLSTELSALQAKELNLIDLAASGDETLPQDMIKEKLREIGRQRQRLNERLNEATEDLSEAARLVELCLTLLADPEELYRQCDDEQRRLLNQALFHRLFVDEEGVTGDELKEPFATLDSYRGGRHRALDKPDPNGGDRAIQAERPASEDRSGPLGLYEVHALLAGIDLGHCSSKPSGVELRGIEPLTFSMRTRRATNCATAPGEACPSFGAP

SEQ ID NO: 20125 - protein, 695 aa, synthetic construct
MKSAVAYLRVSTKEQAERGGQVEGFSIPAQREALKRKAQSLNAVIVAEFVDAGESARSADRPELQHMLEYLKEHRVEYVLVHKVDRLARNRADDVAITMAIRANGAQLVSATENIDETPSGALTHGIMSSIAEFYSRNLAAEVHKGMSQKAKIGGTPGRAPLGYLNVGRSTAEGREERTVVVDKERAELIAWAFDEFASGDWTERSLANELKALGLTTRPTPSQPARPLSPRTLHSMLTNPYYKGDVMYRGVAHAGRHKPLVDSATWQAVQDVLAGHAAGEKYRKHHHYLKSSIFCGCCGSRLIVSHAKNRHGVIYPYFVCIGRQMKRTSCRQKALPIAKVEEAIEDHWATVQLDEDVLEVLRDSLRGMVIAHHRDAQAEESRLVVTRKKLTAKREKLVEAVYNGAMPMDLIAREQEAIGRQLAEVESRLGAFRETSDQLETHLDAIFKILGSCHAVYLAADLRQRRLLNQSLFQALYVSEDHVRADYAAPFDMVLAPEFLAEAEKVVEVRRVRHGAPADALTRSFALENGRISFAENKKPFGEGYVTEGLLARTLPKIAGSVGSRELTMAALRTSLSNTRSPLSRLLLARKNQEEPVPGTRFSTHDAIIADAGTTEPAAVRLAVKPNHLLKPYEAEQLLEAYNSGVSQKELARRFRVHHTTVKRHIVRRRCTFMLGRAVVGCVARKPTTKGGPR

SEQ ID NO: 20126 - protein, 475 aa, synthetic construct
MKAALYPRVSTEEQSKEGYSLAAQLEKMRAFCFSQGWTIYKEYTEEGRSAKNMERPQLQSLLSELNQFDVVLVYKLDRLSRNVGDINYLLDTFEKNNVAFKSVTEPYDTTTAQGKLLINIFASLAQFEREQLAERTHMGMSRKHQEGSRNGGRAPFGYYLDTNGNLAINEIEAKWVRWMFESFHTKGKKMITEELNKNGVRTRTGTFWNHSAVDYVVTNPVYYGALRWNYRTKKGNRTYEEVIVEGNHPAIITKEVYDAIKKKRKDRKNTGWKSRTVYPFASVLRCARCGHAMHGGKRPRADGSEHRFYKCAGRFEYKICDMPVIAEDTIEQEFIKSLHYIKVEADVPDQEVVNTKEIKKELKRIEERKSRWKELYVDGDLTKKEYKEKMDDEIEKENELIRSLEIRQETPTTDVINSIIENIKTKWYNITFENRKQILTTIFDTIKIECLKSHSGGLGERPLIEIKDITFKKPI

SEQ ID NO: 20127 - protein, 430 aa, synthetic construct
MSTDQDEQLSSYENQVRHYHDYIAQHDDYDLVDIYTDEGISGTNTKKREGFNRMIADCREGKIDRILVKSISRFARNTLDCIKYVRELKELGIGVTFEKENIDSLDAKGEVLLTILSSLAQDESRSISENATWGIRKRFERGEVQVNATKFMGYDKDEDGKLIINPEQAQVVRDIYKLYMDGYSPEYIARYFNSEGIKGWSGKANWCPGAILKMLQNEKYKGDALLQKTFTVDFLTKKRMQNDGQVNQYYVEGSHEGIIDEETWETVQLEIARRKTYREEHQLKSYIMQSEDNPFTTKVFCGACGSAFGRKNWATSRGKRKVWQCNNRYRIKGVEGCYSSHLDEATLEQIFLKALELLSENIDLLDGKWEKILAENRLLDKPYSMALSDLLRQEQIDFNPSDMCRVLDHIRIGLEGEITVRFLEGTGVDL

SEQ ID NO: 20128 - protein, 507 aa, synthetic construct
MQQSTKTVGIWIRVSTEMQVQSDSPEHHERRARLYAEAKGWTVCEVYRLDAVSGKSVIEHPEAKRMLADVKRGKITGLVFSKLARLARNTKELLEFADYFKKHDADLISLDESLDTSSPAGRFLFVMIGALAEFERAEIASRVQASVPIRAKLGKPLGGSSPFGYVWRDGKLVPDEKEAPVRRLLYELYQEHGRKKTVARILNDRGYRTRGGGTFSMTTVTRLLRDPTAKGIRIANSTRNVGKSKPIVRKPESEWVYHQVEPIVSEELWDTCQALLDGSRSKYKKPAKKTVHLFAGYAFCGCGGKMYVTSSNKSRYVCYGCKKTKIPIVDLEGVYHEQLRALAVAPGEVEKHLAAANETLGEKQRLLEVLSAEREKVSADRERAYELYMSKEIEKEDFGTRYRPLTQRLEQIDQELPALQASIDVLKISQLSEAEVRSAATNLYDRWPLLPFGEKRSIVEAITEKIVIAQEDIDISFLYEPSIETAANRLRSIRDSSPPPAGSAPDR

SEQ ID NO: 20129 - protein, 560 aa, synthetic construct
MKTYFAYIRVSTTKQGKEGSSLSAQRDAIEAFARRNDLAISEWYEEQQTAAKIGRAAFLRMMGRLERGGAAGIILHKIDRGARNLWDWARIQSLLDIGIEVHFAHDNLDMKSRGGRLAADIQAVVAADYVRNLREETRKGLRGRLKQGLLPRAAPLGYQNNGKGKAKTIDPIVGPLVRLAFELYASRQHSFKTLRKELHREGLTTKNGSPLNLCSITAMLRNPFYAGVIRLKSTGEHFPGIHEPLISADLFQEVQNVLDGKLTISVSKHEFLYRRLLKCGLCGTTLIGERQKGHVYYRCHTTSCPTTGIREDHVSTELSYHVEGMLLAREDVEELIPIISEEDKAWSAQRSERLRSADLKIAALKEREARLTDAYVDQLIDRETYERRKALLFLEIARAREARSYLPDAKDTMSARIDAFFGFVQSLDVTKVSGRVRTFRDAVNILTSNRTLVGKKLCVTLQSPFQELSSGLAVLRCSPARGDSRNSEAQNTDGDTNAHREVGRTLATERAEVLLKHLRGWKPPPDFTLSETTSNSRTGPQQWRKNLMHQRPEDELREAA

SEQ ID NO: 20130 - protein, 549 aa, synthetic construct
MARLISYLRMSTSEQLRGFSLERQRKLIADFAAKNDLSLENSHALEDIGHSAFSDDTQQKELTKFFEDLEKGKFQPGDVFALENIDRLTRRGPIDALMKVNAIISKGLKLAIISDKEQKILEEIDVYTIITLSIDATRANVESKNKSDKGLLNWASKRELAAVHKIAMTAQAPAWLDTQTFDVFDEEKRKDIKRRRYVLNPEKAETVKLIFELFQNGNGSLKIKNILNERRIPTFKNIEYWEPSIISKILRNPATFGLYQPKKQNTGKRDLIAACEPIEDYFPAIISRETFEQCQRIAATNTTRKGRKGKVFTNLFTGLLKCADCGGPVHLLNPGIDKRAKVPKSVNYIVCKKGKFTRECILKRLRYDDFEITLLKAIQEINLADILDENNPLDALTKKLRTIETKIDKNKKLLENFQKSFIEHDGALPSFMIDGAKQAELEIKNLLLEKSQTEVEVSQLNIYNSNIDNAVEELKANGTYETRSKINLLLHEIIKSIVIDFELNDYAIMFKNGAKRFINDGIIQNVFRTTDHKQRQSELEEIFNWNRGQ

SEQ ID NO: 20131 - protein, 532 aa, synthetic construct
MTITTPLPRSFSDVFQSDETINVYSYIRFSSKAQKLGFGEIRQLEQLNRFFDQYPQARQVERYEDLGVSAFKGKNLKTGQLAKFVERIKSKEILPNALLLVESFDRISRMGGYDALELIISIIQADCAIYTLFDNRLYSKRKKDSSVDISLIQNILERANDESRAKSERISDAKARNLEKGLNGGIITKRCPFWISFIGGKFVLNENAEAVKKATELCFDFGFQVVAQELNKQGYPKKYSASSIGKFLHSHALYGSFLALKLDENGQRSIVNKEVRNYYPALISEAEFHRISAKLKERLDPRLAGRKSDDFKNILRGLVFCKCGSTFRYHAQKSQYVDLVCSASMIGKCEFAKLGKGVRHRYALVEQLFLIFHAQIPFHKIIIKSDDIKALEKEYENVSGLIILKEKALANNFSILEKSSESAQKYIMSRIDEVSLELDKLKLDEHRLKVQINSLHIASKSELKVIEIYRLLVTEKGRVRINNFLHSQKVKLIITPIMKKYFSIEIVHDENHIDTIDVTPTGYTARINAHLK

SEQ ID NO: 20132 - protein, 537 aa, synthetic construct
MAKRKFNKGGEVRLVAYYRYSGGSGQTEQSIEGQRRDCETYARLHNMTIQKEYVDRHISGKTDDRAAFQQMITDSDKGAFDMVICWKTDRFARNRYDSAVYKKRLRDNGVEIVYAAESNIAGAEGIIIEGVMEALAEYYSAELAEKMRRGMRESALKGQAISRCRALGLKTDEHKRFVIDEKTAPTVRFIFEHYAAGESATSIVDKLNAKGLRTSQGNPFNKSSIPRIIQNEAYRGVYISKSYDVRIEGAIPAIIDDELWERAQTMLKLNRQLKAKNEPKADYILSGKLYCSCGSLMRGMSGHSATGEVYRYYTCPNKDCHLRNIPKDDLEGKVMQSIVDHLLQPESMEALAEAMVEVQKADVEKPNAERVAIEQSLSDVRRRSKNILDAIENGTANAQLCARLDDLTEQEQTLSFQLSSLEKEKLVVFTKEQYLFLLEQFLMEPSERTPEYGRRLVNTFVTSMVVSGRELVINFNVSDETVNKNKKTSQTNLQKESSSGMRLVHLAHQQANYSLYAASGYFSLVEHQFSARLWRTA

SEQ ID NO: 20133 - protein, 507 aa, synthetic construct
MKRVISYIRFSSEKQSRGDSLRRQSKMVTDWLKAHPEYHLDQDLSFRDLGVSGFTGKHLKGGLGDFLTAIEKGLVKAGDTLLIESLDRLSRQNVDRASELLRNILRSGVDVVTLSDGEHYTRESLKDPLALIKSILIMQRSHEESLRKSERIQAAWNRKKELISEGIKISKRCPAWLKLNDDRKSFSVIPEKVETVKRCFQLRLEGKSIWEIVRTLNAEGHQTLNQYKAGSFGQTSVQDLLKNRSVIGYFTPKGCEEISGYFPPIIPETDFYKVQQLSYSRYGRKPASDKPLSVNLFKGVIRCSECGHALIITGFSDTRSGIYRCPLRNENRCSAKGLSRKQTDGTLLTLLSRLDRFDSDTTNTIDMLRLHREHISSNIEKLVQLSLEIEDLSAITSKLKQLKGELSQVDADIEKETQRLKSIDVGCLSDCDLTTKAGRIEAQLIIKSAVKEVVLNTAKRRCKVTFHNSKSITLSITENPSEDVTEAIQSLSEVTERGLIDVDVVEI

SEQ ID NO: 20134 - protein, 547 aa, synthetic construct
MKLLATYIRWSTKEQDAGDSLRRQTNLIDAFYSKHKNDYYLLPAHRYVDKGKSGFHQQHKAQGSDFRRMFENVMSGVIPEGSLIVVENFDRFSRADIDTAIDDVRQILRKGVSILTLGDGELYDKSALTDPVKLIKHIIIAERAHQESLVKQKRIAQVWNHKTQLARELKKPMGKQAPGWLELSEDGSHYIVDEDKASLVNIIYDKRLSGMSMFAICKWLNEQGYPTINQRKVRISKTKKPDGNWSALSVKHILTSRSVLGYLPAKISSEDRKTVLREEIEGFYPQIVTDSKFYAVQQLLEETGKGKTSSGEHWLYVNILKGLIRCKCGLVMTPTGIRKPVYQGTYRCNGNKESRCSYGTVSRKLLDTQLCSRLFSKLSQLHDEATDTAKLDELQRRLNTVDGELEKLTETLIQLPNITQIQEALRVKQEEKDELIVQLSREKARVKSVSSLDLSGLDMESVEGRTEAQIIIKRLVKEIVVSGNEKLVDIYLHNGNMIRGFPLDGKDDHTLTLEEATDEMQSLDDMLIFGEPVTRIYPAGDMEEVDA

SEQ ID NO: 20135 - protein, 515 aa, synthetic construct
MKTAIYLRKSRADLEAEARGEGETLAKHRSTLLKIAKEMNLNVLAVREEIVSGESLVKRPEMLALLEEIEDNKYDVVLCMDMDRLGRGGMKEQGIILETFKRSNTKIMTPRKTYDLNDEWDEEYSEFEAFMARKELKIITRRMQRGRIASVEAGNYLGTHAPFGYDIHRLNKRERTLTINSEEASVIRMIFDWYANEDMGASAIRNKLNDLGYKSKLGNEWNPYSILDILKNNVYIGKVTWQKRKEVKRPDAVKRSCARQDKSDWIIADGKHEPIIPESIFEQVQEKLNSRYHVPYNTNGIKNPLAGIIKCSKCGYSMVQRYPKNRKETMDCKHRGCENKSSYTELIEKRLLEALKEWYINYKADFEKHKQDDKLKETQVIQMNEAALRKLEKELVDVQKQKNNLHDLLERGVYTVDMFLERSNVVSDRITEITSTMENLKKEIKTEIKKEKVKKDTIPQVEHVLDLYFKTDDPKKKNSLLKSVLEKAVYKKEKWQRLDDFELVLYPKLPQDGDI

SEQ ID NO: 20136 - protein, 515 aa, synthetic construct
MKTAIYLRKSRADLEAEARGEGETLAKHRSTLLKIAKEMNLNVLSVREEIVSGESLVKRPEMLALLEEIEDNKYDAVLCMDMDRLGRGGMKEQGIILETFKRSNTKIMTPRKTYDLNDEWDEEYSEFEAFMARKELKIITRRMQRGRIASVEAGNYLGTHAPYGYDIHRLNKRERTLTINSEEASVVRMIFDWYANEDMGANAIRSKLNDLGYKSKLGNEWNPYSILDILKNNVYIGKVTWQKRKEVKRPDAVKRSCARQDKSDWIIADGKHEPIISESLFEQVQDKLNSRYHVPYNTNGIKNPLAGIIKCGKCGYSMVQRYPKNRKEAMDCKHRGCENKSSYTELIEKRLLEALKEWYVNYKADFEKHKQDDKLKETQVIQMNEVALRKLEKELLDVQKQKNNLHDLLERGVYTVDMFLERSNVVSDRMNEITETMEKLKKEIKTEIKKEKVKKDTIPQVEHVLDLYFKTDDPKKKNSLLKSVLEKAVYKKEKWQRLDDFELVLYPKLPQDGDI

SEQ ID NO: 20137 - protein, 536 aa, synthetic construct
MIKAVIYARVSTAEQAEEGYSIDAQFDVVKKKCEQEGRIVVDRYVDRGISGKNMENRPDLQRLLRDARGDKFQEIWVWKTNRLARNHLDLLKIVDELDKNNVGFKSCSEAFDTATPTGKLLMNVLASIGEFERESIVENVKMGMKQRAREGKWNGGIVLGYNTVKINEDENTTRLGIDEKEAFIVKEIFNLYAKGRGLKAITNLVNKRGYKTKKGNFFTPIAIRTILLNPVYIGKIRYNVRENWNEKGRKGINKNPIYAEGKHEAIISLELWNKVQEIYINRSRRPQRIFDGTFPLSGLIKCPMCGAPMVAGRVKKKLKDGNIKIIKYYQCGVWRNKGTAACHSNGIRADKIEEVVLGRISTILTKDKILRDIINNLNLNIKNKVKPLEDELNIINKSILNFEDKKCKVFDLYEEGIILKDVLTNRLEYISNQIEVYLINKSRIEKELQENTSEPITFDKVKQLLQKFNDLIRGTESTKQKLILQLIITKITINNNRELDSITLHFNRKIEKYLLGIEEDGTSQQVSSSFSFTIVI

SEQ ID NO: 20138 - protein, 516 aa, synthetic construct
MKRIAIYSRKSRETDTGESIKNQIDMCKTYFNRADQDCSFEIFQDEGFSGGNINRPSFQRMLELAKHKQFDIIAVYKVDRIARNIVDFVNIYDELENHDVKLVSITEGFDPSTPIGKMMMMLLASFAEMERMNIAERVRDNMKGLAKIGRWSGGTPPTGYKNKTIINDNGKKESYLELIPEKKQLIISIFRKAADGYTTYQIGKMFNMSPKTVSNILCNPTYVKSDELSANYLKSIGYSVFGELNGNGYLSYNRRPKKKGKKLFNAKGMFTAVSNHEAPIDSKTWIKANNNLKDRATEAKPRISSNSFLAHLVKCSCGSGMYIHTGHAKKDGTKNLYFVCSKKKGGSKCTSKWLRVDGVEKKVLNVFKKISLNPKLLESYLKQKNKHVDYTESIKNIKKQINKNDEKINSLTDKIIFLKGTAIDIVSKKINNLADENSRLNEQLLALEREKMFSEVDGENIKLLTVNINQFLQNFDKIDTTERQIFIKSIIKKIVWNSNANNNKGKKGKISIEFLE

SEQ ID NO: 20139 - protein, 490 aa, synthetic construct
MKSLESYAIYVRVSTDRDEQVSSVENQIDICRNWLERNGFTWDEKLVFKDEGISGTLFVERPAIQLLLQKAKAKEIDMVIFKSISRLARDLKDSLEIREVFLAHNVRIISVEEGYDSVKAGKNDMAFELWSLFSAQYSRTLSSSITAALAVKVRRGEHIGKVPYGYNRENQKLVIKEEEAKAVRRMYRWYIDGWGYKKITNELNRLGVKSKTKKNWQMTSVQRILRNPIYKGTFILNQYTSVKVGGRKKQIRNPKEKWFIFPEHHPAIVDEETWERANQKNIISSKTKITPWNEFRDLAKCAVCGSNMVIVQSHLRKKNGERTEWKYLKCSQYRRAGKHGCVNHVPIQYSEFRQFIIELLIKKGEFITLNLQSNVEQEQKEKIKKLQQFVNTNEQKKRSLLDLYLEKLIDKTEFEKKRNDLDVEIMKVDRELFVLQNDDVIQTDIKTIKEAFEQLRKQGEDLFHVFKTLIRQIVVHQNGKVDIVYIFEKA

SEQ ID NO: 20140 - protein, 475 aa, synthetic construct
MKTMNKVAIYVRVSTTNQVEEGYSIDEQKDKLEAYCKIKDWKIYDVYVDGGFSGANTQRPELERLISDVKRKKVDIVLVYKLDRLSRSQKDTLFLIEDVFAKNDVAFISLQENFDTSTPFGKASIGMLSVFAQLEREQIKERMMLGKEGRAKNGKSMSWTTIPFGYDYSKETGVLSVNPTQALIVNRIFTEYLNGKPVVKISRDLNAEGHVGRKRPWGETITKYLLKNETYLGKVKYKDKVYEGQHEPIITQELFDLVQLEVERRQISAYEKYNNPRPFRAKYMLSGLMKCGYCGASLGLRYTRKDKNGISHHKYQCRNRHSKDLEKRCESGWYSKEELERVVIKELERIKFDPKYKNETLAKKEETIKVEEIKKQLERINNQVSKLTELYLDEIITRKELDEKNDKIKTERQFLEEQLENQKSNVLSIRKRKLTRLLKDFDVEKLSYEDASKIVKNIIKEIIVTKDGMSITLDF

SEQ ID NO: 20141 - protein, 491 aa, synthetic construct
MGLAAIYLRLSRNEEQLNIDEILLNHRNALTKIAKQQKLTYDIYQEISSGVNTERPELNLLLSRLDDYDALLVMDIDRISRDNAHAEEIKKMLIIHDIKILTPQGAIDLSQESNEMLFSFQAMMANFEYKQIRKRLGRGRLAAAEQGKWTMSNRVPLGYKKNEEKRLEVVEDEAKIIRFIFQKTLERVSANEIAKQLDILGWRSRQGKVLTSTHISNMRRNVVYYGVVKAGRKVNGRVVDEVFVEDAHEPIVSKQMFLEVQKILEENTTGNFFNKLKATRKLQNLIYCNCCKRKRYIQCDGNGIDYIKSCIYKVDNNKCRDRGYKYEPIEQFVLQKVKEKKPAFEQELQMLKSLDTTEVEKKLSIQKESLEKQINRFNKRQRNLKEMRMDGEISKAEFYEMRDENEEQIKQVKQQMELIDIKLENLSNTDEEQARLKDAIKKLDKLEELKAESCNTFLKKFIKKIWFSSNTEANHDTTKPREDATIEIEWL

SEQ ID NO: 20142 - protein, 452 aa, synthetic construct
MKAAIYIRVSTQEQIENYSIQAQTEKLTALCRSKDWDVYDIFIDGGYSGSNMKRPALNEMLSKLHEIDAVVVYRLDRLSRSQRDTITLIEEYFLKNNVEFVSLSETLDTSSPFGRAMIGILSVFAQLERETIRDRMVMGKIKRIEAGLPLTTAKGRTFGYDVIDTKLYINEEEAKQLRLIYDIFEEEQSITFLQKRLKKLGFKVRTYNRYNNWLTNDLYCGYVSYADKVHVRGIHEPIISEEQFYRVQEIFSRMGKNPNMNKESASLLNNLVVCSKCGLGFVHRRKDTVSRGKKYHYRYYSCKTYKHTHELEKCGNKIWRADKLEELIIDRVNNYSFASRNIDKEDELDSLNEKLKIEHAKKKRLFDLYINGSYEVSELDSMMNDIDAQINYYEAQIEANEELKKNKKIQENLADLATVDFNSLEFREKQLYLKSLINKIYIDGEQVTIEWL

SEQ ID NO: 20143 - protein, 515 aa, synthetic construct
MKTAIYLRKSRADLEAEARGEGETLAKHRTTLLKIAKEMNLNVLSVREEIVSGESLVKRPEMLALLEEIEDNKYDVVLCMDMDRLGRGGMKEQGIILETFKRSNTKIMTPRKTYDLNDEWDEEYSEFEAFMARKELKIITRRMQRGRIASVEAGNYLGTHAPYGYDIHRLNKRERTLTINSEEASVVRMIFDWYANEDMGANAIRSKLNDIGYKSKLGNEWNPYSILDILKNNVYIGKVTWQKRKEVKQPDAIKRSCARQDKSDWIIADGKHEPIIPESLFEQVQEKLNSRYHIPYNTNGIKNPLAGIIKCSKCGYSMVQRYPKNRKETMDCKHRGCENKSSYTELIEKRLLEALKEWYIDYKADFEKHKQDDKLKETQVIQMNEAALRKLEKELVDVQKQKNNLHDLLERGVYTVDMFLERSNVVSDRITEITSTMENLKKEIKTEIKKEKVKKDTIPQVEHVLDLYFKTDDPKKKNSLLKSVLEKAVYKKEKWQRLDDFELVLYPKLPQDGDI

SEQ ID NO: 20144 - protein, 452 aa, synthetic construct
MKAAIYIRVSTQEQIENYSIQAQTEKLTALCRSKDWDVYDIFIDGGYSGSNMNRPALNEMLSKLHEIDAVVVYRLDRLSRSQRDTITLIEEYFLKNNVEFVSLSETLDTSSPFGRAMIGILSVFAQLERETIRDRMVMGKIKRIEAGLPLTTAKGRTFGYDVIDTKLYINEEEAKQLQMIYDIFEEEKSITALQKRLKKLGFKVKSYSSYNNWLTNDLYCGYVSYADKVHTKGVHEPIISEEQFYRVQEIFSRMGKNPNMNRDSASLLNNLVVCGKCGLGYVHRRKDTVSRGKKYHYRYYSCKTYKHTHELEKCGNKIWRADKLEELIIDRVNNYSFASRNVDKEDELDSLNEKLKTEHAKKKRLFDLYISGSYEVSELDAMMSDIDAQINYYEAQIEANEELKKNKKIQENLADLATVDFDSLEFREKQLYLKSLINKIYIDGEQVTIEWL

SEQ ID NO: 20145 - protein, 515 aa, synthetic construct
MKTAIYLRKSRADLEAEARGEGETLAKHRTTLLKIAKEMNLNVLSVREEIVSGESLVKRPEMLALLEEIEDNRYDVVLCMDMDRLGRGGMKEQGIILETFKRSNTKIMTPRKTYDLNDEWDEEYSEFEAFMARKELKIITRRMQRGRVASVEAGNYLGTHAPFGYDIHRLNKRERTLTINPEEASVVRMIFDWYAHEDMGANAIRSKLNDLGYKSKLGNEWNPYSILDILKNNVYIGKVTWQKRKEVKRPDAVKRSCARQDKSDWIIADGKHEPIIPESLFEQVQEKLNSRYHVPYNTNGIKNPLAGIIKCSKCGYSMVQRYPKNRKETMDCKHRGCENKSSYTELIEKRLLEALKEWYINYKADFEKHKQDDKLKETQVIQMNEVALRKLEKELVDVQKQKNNLHDLLERGVYTVDMFLERSNVVSDRITEITSTMENLKKEIKTEIKKEKVKKDTIPQVEHVLDLYFKTDDPKKKNSLLKSVLEKAVYKKEKWQRLDDFELVLYPKLPQDGDI

SEQ ID NO: 20146 - protein, 515 aa, synthetic construct
MKTAIYLRKSRADLEAEARGEGETLAKHRSTLLKIAKEMNLNVLAVREEIVSGESLVKRPEMLALLEEIEDNKYDVVLCMDMDRLGRGGMKEQGIILETFKRSNTKIMTPRKTYDLNDEWDEEYSEFEAFMARKELKIITRRMQRGRVASVEAGNYLGTHAPYGYDIHRLNKRERTLTINSEEASVVRMIFDWYANEDMGASAIRNKLNDLGYKSKLGNDWNPYSILDILKNNVYIGKVTWQKRKEVKRPDAVKRSCARQDKSDWIIADGKHEPIIPESLFEQVQEKLNSRYHVPYNTNGIKNPLAGIIKCSKCGYSMVQRYPKNRKETMDCKHRGCENKSSYTELIEKRLLEALKEWYINYKADFEKHKQDDKLKETQVIQMNEAALRKLEKELVDVQKQKNNLHDLLERGVYTVDMFLERSNVVSDRITEITSTMGNLKKEIKTEIKKEKVKKDTIPQVEHVLDLYFKTDDPKKKNSLLKSVLEKAVYKKEKWQRLDDFELVLYPKLPQDGDI

SEQ ID NO: 20147 - protein, 515 aa, synthetic construct
MKTAIYLRKSRADLEAEARGEGETLAKHRTTLLKIAKEMNLNVLSVREEIVSGESLVKRPEMLALLEEIEDNKYDVVLCMDMDRLGRGGMKEQGIILETFKRSNTKIMTPRKTYDLNDEWDEEYSEFEAFMARKELKIITRRMQRGRVASVEAGNYLGTHAPFGYDIHRLNKRERTLTINPEEASVVRMIFDWYANEDMGANAIRSKLNDLGYKSKLGNEWNPYSILDILKNNVYIGKVTWQKRKEVKRPDAVKRSCARQDKSDWIIADGKHEPIIPESLFEQVQEKLNSRYHVPYNTNGIKNPLAGIIKCSKCGYSMVQRYPKNRKETMDCKHRGCENKSSYTELIEKRLLEALKEWYINYKADFEKHKQDDKLKETQVIQMNEAALRKLEKELVDVQKQKNNLHDLLERGVYTVDMFLERSNVVSDRITEITSTMENLKKEIKTEIKKEKVKKDTIPQVEHVLDLYFKTDDPKKKNSLLKSVLEKAVYKKEKWQRLDDFELVLYPKLPQDGDI

SEQ ID NO: 20148 - protein, 452 aa, synthetic construct
MKAAIYIRVSTQEQVENYSIQAQTEKLTALCRSKDWDVYDTFIDGGYSGSNMNRPALNEMLSKLHEIDAVVVYRLDRLSRSQKDTITLIEEYFLKNNVEFVSLSETLDTSSPFGRAMIGILSVFAQLERETIRDRMVMGKIKRIEAGLPLTTAKGRTFGYDVIDTKLYINEEEAKQLRLIYDIFEEEKSITTLQKRLKKLGFKVKSYSSYNNWLTNDLYCGYVSYADKVHTKGVHEPIISEEQFYRVQEIFSRMGKNPNMNRDSASLLNNLVVCGKCGLGYVHRRKDTVSRGKKYHYRYYSCKTYKHTHELEKCGNKIWRADKLEELIIDRVNNYSFASRNVDKEDELDSLNEKLKTEHTKKKRLFDLYISGSYEVSELDAMMSDIDAQINYYEAQIEANEELKKNKKIQENLADLATVDFDSLEFREKQLYLKSLINKIYIDGEQVTIEWL

SEQ ID NO: 20149 - protein, 452 aa, synthetic construct
MKAAIYIRVSTQEQIENYSIQAQTEKLTALCRSKDWDVYDIFIDGGYSGSNMNRPALNEMLSKLHEIDAVVVYRLDRLSRSQRDTITLIEEYFLKNNVEFVSLSETLDTSSPFGRAMIGILSVFAQLERETIRDRMVMGKIKRIEAGLPLTTAKGRTFGYDVIDTKLYINEEEAKQLQMIYDIFEQEKSITSLQKRLKNLGFKVKSYSSYNNWLTNDLYCGYVSYADKVHTKGVHEPIISEEQFYRVQEIFSRMGKNPNMNRDSASLLNNLVVCSKCGLGFVHRRKDTVARGKKYYYRYYSCKTYKHTHELEKCGNKIWRADKLEELIIDRVNNYSFASRNVDKEDELDSLNEKLKTEHAKKKRLFDLYISGSYEVSELDAMMSDIDAQINYYEAQIEANEELKKNKKIQENLADLATVDFDSLEFREKQLYLKSLINKIYIDGEQVTIEWL

SEQ ID NO: 20150 - protein, 515 aa, synthetic construct
MKTAIYLRKSRADLEAEARGEGETLAKHRTTLLKIAKEMNLNVLSVREEIVSGESLVKRPEMLALLEEIEDNTYDVVLCMDMDRLGRGGMKEQGIILETFKRSNTKIMTPRKTYDLNDEWDEEYSEFEAFMARKELKIITRRMQRGRVASVEAGNYLGTHAPFGYDIHRLNKRERTLTINSEEASVVRMIFDWYANEDMGANAIRSKLNDLGYKSKLGNEWNPYSILDILKNNVYIGKVTWQKRKEVKRPDAVKRSCARQDKSDWIIADGKHEPIIPESLFEQVQEKLNSRYHIPYNTNGIKNPLAGIIKCAKCSYSMVQRYPKNRKETMDCKHRGCENKSSYTELIEKRLLEALKEWYINYKADFEKHKQDDKLKETQVIQMNEAALRKLEKELVDVQKQKNNLHDLLERGVYTVDMFLERSNVVSDRITEITSTMENLKKEIKTEIKKEKVKKDTIPQVEHVLDLYFKTDDPKKKNSLLKSVLEKAVYKKEKWQRLDDFELVLYPKLPQDGDI

SEQ ID NO: 20151 - protein, 506 aa, synthetic construct
MRHVITYLRYSSATQGAEGADSTRRQNELFKQWLRKNSDAQVVASFNDEGLSGYKGKHLSGQFGDMLSRIESGEFSKGTILLVEAIDRIGRLEHLETEALMNRIIAHGIEIHTLQDGLIYTRDALSDDLGISIIQRVKSYLAHQESKQKSFRVSEKWKQRAKLALAGEQRLTKMVPGWIDPETFKLNEHAETVRLIFKLLLDGESLHNIARHLQANNISSFSRRKDANGFSVHSVRTILRSETTIGTLPASQRNDRPAIPNYYEAAIDAATFNKAQEILGKNRIGRTPASDNPLTINIFKGLFRCQCGASVHPTGTKNKYQGVYRCNNHLDGRCDVPPLKRKPFDKWMIDNFLGMIDVGNDGEAEGKIASLQHEVEIVTTRIKKATALLLEMDDIDELKIQLKELNQKRTELQTTIDNMRRKASLTDKELPQLKDIDLTTKAGRVECQLILSKHLKGLTLGKDTVTVTLQNDTEITIPTDPLPLNDGTSIFEIAEKNLLNIDTFQL

SEQ ID NO: 20152 - protein, 547 aa, synthetic construct
MKLLATYIRWSTKEQDSGDSLRRQTNLIDAFYAKHKDDYYLLPAHRYVDKGKSGFHQQHKAQGSDFRRMFENVMSGVIPEGSLIVVENFDRFSRADIDTAIDDVRQILRKGVSILTLGDGELYDKSALTDPVKLIKHIIIAERAHQESLVKQKRIAQVWNHKTQLARELKKPMGKQAPGWLELSEDGSHYIVDEDKASLVNIIYDKRLSGMSMFAICKWLNEQGYPTINQRKVRISKTKKPDGNWSALSVKHILTSRSVLGYLPAKISTEDRKTVLREEIESFYPQIVTDSKFYAVQQLLEETGKGKTSSGEHWLYVNILKGLIRCKCGLVMTPTGIRKPVYQGTYRCNGNKESRCSYGTVSRKLLDTQLCSRLFSKLSQLHDEATDTAKLDELQRRLNTVDGELEKLTETLIQLPNITQIQEALRVKQEEKDELIVQLSREKARVKSVSSLDLSGLDMESVEGRTEAQIIIKRLVKEIVVSGNEKLVDIYLHNGNMIRGFPLDGKDDHTLTLEEATDEMQPLDDMLIFGEPVTRIYPAGDMEEVDA

SEQ ID NO: 20153 - protein, 560 aa, synthetic construct
MTKLYSYIRFSSMRQGEGSSYERQIKMAKEIADRYGLELVNDYQDLGVSAFKGANSKTGALSRFLDEIGRSIPVGSWLFIENLDRLSRQDIISAQELFLSIIRRGITIVTGMDNKIYSIETVTANPMDLMFSILLFIRGNEESQTKRNRTNSSALIKIKAHQQNPQSPAVAIEEIGKNMWWTDTTSGYVLPHPVYFPILQKIVKMKQEGHSTGSVLDYLNEHHEPPAPTSNKQHRKWSIAMVSRLFKTKALIGVKEVNVDGVQYELKDYYPRVLSDSEYYFLKNNLIKKAWSFGHAQEKTIPLLSGIGLLKCAHCGSPMVKRKAANGKVEQYRYTCDGEGSGRTDCLYPNWGFRASSLEGAVLQLLADKVWIAEDKANPIPEIQVQIDEISRKIDNLINLSAMTGATKELANQITDLNTQREALHEEIRLFEREMYSVDSQGWEKLAQFDLSDVQNEERLQIRLKIKGALRSIECARIDRNKNLFTLVYLDGLRQRLVIENNRGIRKGQIFVDLKTINDRQILESAGMVLHDHIDILIDEKAFYDGLPKEEDGPLSKFGI

SEQ ID NO: 20154 - protein, 508 aa, synthetic construct
MYKEQQVALYVRVSREEQVDGFSLEAQEAALRAEVKLRNKLVYDIYRDEGISGVRGDREGLNALLRDARRGCFGAVLVWTISRLSRKLDYLLEVFSELQGLGVAVRSLNEAFDMSTPGGNFALTMLGAVAQMQREAWMEASLIGMERRAKSGRWGGGMMLGYRMVADEEDLRGGGKLEIIAEEAETVMEIFTLYAAGLGYKAIVNRLNGENKTGKTGKAFTLNTVKGILTNAAYVGKTRFGEVYYDGLHEPIVSKELWEAVQLRLCEQTKPVQKVIDHEYLLSGLLKCPACGSGMLPSHTKSKRKDGSYRINHYYACGAYLNKGSTVCKPNSVRAVEADAKVLTWLQEFLTSPFWLRRVTEVLRQQYEQAVLPQIEQREQAERKLTELGRQSKELLRRYEEGFLDKPAFLTAMGELAAERKSWQAVLVESVSMAEQPDCWSEADIRAAFCVFQQVLSQAKPEQRSKLIRQLAHKIYVNEERQVVGIDLQLPSTLATEQGEGLPLRVAI

SEQ ID NO: 20155 - protein, 555 aa, synthetic construct
MQAAEKLEKASRVALYVRVSTEEQAEHGYSIEAQLDILRQHCKSNNKEIVAEYVDPGVSGKEMTKRAKLQKLLRDAELGRFDEVMVWKFNRMSRKMYDLMKIVSHLDKHKVSFRSCSENFDTATPMGRFSLHMMGAVGEFERNTIVDNVKLGMKQRARMGFRNGGACLGYCSVEDSGGTGKKRKTRLVVVPEEAVIIKKIFDLYAAGKGFRAIATQLNREGAKTKKGNFFAPDSVREILKNPIYAGTVRYNRYEGWSETRRRGKNDKPILTEGRHEAIISREQWEQVQEMFAKRSKASPRVHDSENLLTGLIRCPECGTPMVISRSHYRLKDGSKVALRYYSCGQFKGKGSTVCHANSVRADYAEAYVLERIPLVLHQPKLLTAIVKAVNQKRRGSGDALLGERAAIEENLAQIETKKRRILEVYEMEGLDREALAIRLDTLAAEARNLCTRRAEIDSEMEEDTGQEVTVATVRQFLEQFNRVLQAASPEQKKTLLHLVIREITIHADKTIDQIVLHFDPDSEAGKDPLANAKANGSLLHFGANRKRGPKWRIAI

SEQ ID NO: 20156 - protein, 527 aa, synthetic construct
MSYCLYLRKSRSDMEAESHGEGETLARHEKLLLELARRGNYNVTQIYREVVSGETLVARPVMQQLLSEVEQGLWEGVLVVEVERLARGDTIDQGIVAQAFKYSDTKIVTPTKVYDPNNEFDEEYFEFGLFMSRREYKTINRRLQRGRLAASKEGKHVGGSKPYGYVRKKIENDKGWTLAIDEEQADIVRLIFRLYTTPEESEDGSLRHIGIHDIARRLDALGIPAPGGGNEWSVSTIHNMLLNPVYIGKIRWQHKKSKKVVEGGSVSVKRYISPPGEELVFDGLHPPIVSEELFNKAAEIMTANPPAVRGEQSLVNPLAGLLRCGRCGRNMAYRSSPNYPSVRCLSRHCHVPGSNLLLVEARVLEALSGWLSSYRLEWSSEPSPSDASRIEQAEKALRRSESEVKRLRDMLSRTHELLEQGVYDTDTFLERSRLLSEQISAAEATVSRCSSELASERRREENKRNIVPKVERLLEVYSSLPSAQAKNDMLKEVLEKVEYFREKRAVKGGHMDEFEIVLYPKLPPAEN

SEQ ID NO: 20157 - protein, 545 aa, synthetic construct
MSAYDARMTTKQHARRALIAVRLSRVTDATTSPERQIAACKELCAARGYDVVGIAEDLDVSAGKTTPFDRPQLGRWLQDPTRYDVIVFFRVDRIVRRLFDLADLIRWSRQHSVTLVSATESHFDLSTDFGDIIALLVAKVAEMELEAISERNASAFRHNFSKGKYRGGIPPWGYIPQRDDETGEWRLVQDPVQVGVIHEVVGRVLKGEPLRAIAHDLTGRAVLTPKDRFAQVRGRDVVGYEWHSGPLKRALTSQTLLGRVVTREQATDAQGRPQRDTKGKKVFGAETVMVGEDGSPIVRAEPILTRDVFERVGVELAGRENRKEPTKRSSGLLLRIIYCGVCGKPGYRLKGGVGRKPRYRCASAQTAGGPCANKTISLEWADGEVERHVLENMGPLERRQRVWFSGNGHTDELSEINETLADLTDQLGTGMFKRGTPQRERLDKRIAALTARQDELSSIPSEPAGWRYEPTGELFSDWWEQQDDEAKNVWLRQMGFKWEWASHSDDRGRVVVDRFEQVGELDMDLDADQLFGWLGALSDLPRDQS

SEQ ID NO: 20158 - protein, 547 aa, synthetic construct
MMEEVEKKRALICIRLSRVTDATTSPKRQRQACEELCKARGYDIVGIAEDLDVSAGKTSPFDRPQLGQWLRDPTRYDVIVFMRVDRFVRRLFDLADAIRWSQDHGVALVSATESHFDLSTKLGGVVALLVASIAEMELDAISERNSSAFKHNFTLGKWRGGQAPWGYVPEKIDGEWRLVQDPVQVEVIHEVVTKVLEGQPLRAVAHELTTRGIPTPRDSFAMHQGREVKGYAWHPSRLKAFLTSQTLLGRVVMREQLKDAQGRPQRDAKGRKIFGDDVLVTNDDGSPVVRAEPILTMSVFKRVSAELEGRENRKEPTKRSTGLLLRIIYCGVCGQAAYRLKGGAGRKPRYRCASAQGSSVHQCDNRTISLEWADGEVERQILETMGPLERKRRIWFSGNDHTDELTEVNDMLEDLVDQLGTGVFKRGTPQRERLDQRIAALTERQAELSESPRVEPGWVYEGTGETLADWWADASDQDKNIWLRQYGFRYEWVSHSGDNGRIVVDEFKQVGDLSMDLDADTLLGPVWDIVSAMSDPANIEAYNALPD

SEQ ID NO: 20159 - protein, 526 aa, synthetic construct
MKAAIYARYSTDKQREASIEDQFTICARRAEREDLDVAQRYSDDGVSGSTPVARRAGGARLLMDAFNGRFDVLIVEGLDRLSRDQVEQEQLVRRLEHRGIVIIGVADSYDSRMGGRKIMRGVRGLINEMFLDDLRHKTHRGQAGQVERGYAAGGKSYGYDIVRDHLGSKYQVNDVQAGWVRWIFGRYAEGWSVQRIAHELNARKVPSPRASTWVVSAIYGSPNKGSGILNNCLYQGLYIWNRSQWVKDPDTGKRQRVDRPREDWREIQVPELRIVDEDLWQTVRKRIDGRLPGRKQGAPVRTLFGGLMACPYCRGAIIAINSRLYGCANRKDRGPTVCKGIHFKRETADKNLLETLRDELLSPAAQEQLRRQVQAILAEHQRSSMSGGATAARRRKELDGEIQRLVDAIASIGTSQALADRLRAAEAERGQLAASKPKAGSDGPSAAEIGERIGKTLANLESALAADVQQARILVAELYGKIDVVAEGENIYAEYNNAAEKLLLASSGMSLKLVAGAGFEPTTFGL

SEQ ID NO: 20160 - protein, 547 aa, synthetic construct
MTAPPLRALLVARLSVMTDESTSPARQLEHSRNAVQARGWTEAGVATDLDVSATKYSPFDRPELGDWLKNRHHEFDAIVVWRLDRLVRSSKDLADLISWCEANGKTLVSATEGFDLSTPFGKAMVAIIAALAELEAGTLSTRVKDSHNALRKMDRWPGGQPPYGYRIVEHPRAGKTLEIDPVSSQAVRIMGEMTLAGKSQWEIAARLTADGFPTPARYYHKEGVSRKTEVSDVWNQSSVGKILKSPATQGYKLIGRSVKERRLARGADGMPIRYTPKGIFTDEEWAQIQEVLKARSRTRERSHGAAPLLGIVYCAGCGDRLYRVVNSHSNGKTYSYYRCVPKSGKPKCEGSTFLESEIQETVDSRVYDNLKALPVTERKFIPGEDHTDELQAVSRAMTTIRDEYDLGLYDYDGGQDEYRERLAALVEKRKLLESLPQREPQYIDEPTGETYAEAYERMNPEERRALLMKAGIRLYVRKLGENGRYAHLIVPDEFPDTFNVPREEYYKRYREWVERPLTPEEEELARNPYPEWDKLAWELRHEYRGKK

SEQ ID NO: 20161 - protein, 513 aa, synthetic construct
MLCYSYVRFSTPDQAKGDSYRRQMEFASNYCKLHNLTLVEDLSFKDLGVSAYKGSNLKNGALGKFLELVVSGQIPSGSTLVIESFDRLSRQTAIKAQAVFFEIISAGITIVTAMDNRSYNLQSVSDNPFDLMYSLMIMIRANEESETKSKRVKEAIKYKIDNKKIIPSKLPYWIKHNKDEDVLELIPERAQTISYIIERYLSGFGINKLTRHLNETIPPFAGKSWYPLYLQKLLRSVSLYGERQFNMNDTLYIMDDYYPAIIDKSKFAVIQENLDSRAPTRGGKIPSAITGIRKAYCGYCQGVLVSQSTKRNGKIVDGLRRARCGTNNNAGSCITSSFRISIVESAIAEYCSQYFDLSLLAPESNSSKLDLAKYRLDLKQLDTKIANYVKFISDGNISPAIISALDEAEKDKKNLQQKIQKSELNTLTNSKREITAKWKTIKTNLSVYDEENILKLRELIRGSIKRILVFQYGPWANTGPITTPSGKKIQPSKGNFSIQITFNNGVRKTLELG

SEQ ID NO: 20162 - protein, 548 aa, synthetic construct
MNIHSPTTTARAALYLRVSTARQAEHDISIPDQKRQGEAYCEQRGYQLVETYVEPGATATNDKRPEFQRMIEAGTSKPAPFDIVVVHSFSRFFRDHFEMEFYVRKLAKNGVKLVSITQEMGDDPMHQMMRQIMALFDEYQSKENAKHVLRAMNENARQGFWNGARPPIGYRIVAAEQRGSKIKKKLEIDPLHADTVRLIYRLFLEGDGTSGAMGVKAIATYLNERRFFTRDGGRWGLAQIHAILTRTTYIGEHRFNTRSHKDREKKPESEVAIMAVPPLIERETFDAVQARLKSRNPMVTPARVSSGPTLLTGICFCAKCGGAMTLRTGQGSTGATYRYYTCSTKARQGKTGCKGRTIPMDKLDHTVADYIGDRLLLPKRLETVLASVIDRRQERTERRREHLAELQRRITEADQRLGRLFDAIEAGMVDKDDAMAKERMVSLKALRDQAAADAERTQLALDSSGNQGVTPDMLKGFARKARERIRLNDGGYRRDHLRALAQRVEVADDEVRIMGSKSELLRTLVAASSVETAAFGVHSSVLKWRAIC

SEQ ID NO: 20163 - protein, 504 aa, synthetic construct
MPQQNNGIAYSYVRFSSKRQELGDSLRRQTEMAEGYATKNGLKLSSKNFQDLGISAFREGKRASLVDMLAAIEEGQISAGSTIIIEALDRLSRRGIDATLETVKEILRKEVQVVSLSDGLLLTKNSLNDLQSVIRIAVAADLAHKESERKAVRLRETKGQQRQAALAGKPINKVLPFWLQRTTDGYELSDKAEIARQIVRLKQEGKGSNMIAKTLNKQGTAGIRASQWNHASITKMLKNPALYGAYQTGETTKERELVKLDLVEGYYPSLISKEDWLLLQSDQSKSKRGRRSADNPYSGLLRCECGGALIKRKHTVKGKLYVYHGCLNAKDGRCSQNISIKGLDGALTTILGRLEFKKKSSLDQSIHQERQLLEKRISDLNSKLQTLDNIPLSVIKSIGTMENRVKEITEQITKDAREQRGIDAVKNEKLSSITDGLELNLLLKRVLKNITVARSGNGWVVKILHLSGHKQNFLMVDGEIKFMSDTIALQKLLAGFREEEETAK

SEQ ID NO: 20164 - protein, 504 aa, synthetic construct
MPQQNNGIAYSYVRFSSKRQELGDSLRRQTEMAEDYATKNGLKLSSKNFQDLGISAFREGKRASLVDMLAAIEEGQISAGSTIIIEALDRLSRRGIDATLETVKEILRKEVQVVSLSDGLLLTKSSLNDLQSVIRIAVAADLAHKESERKAVRLRETKGQQRQAALAGKPINKVLPFWLQRTTDGYELGDKAEIARQIVRLKQEGKGSNMIAKTLNKQGTAGIRASQWNHASITKMLKNPALYGAYQTGETTKERELVKLDLVEGYYPSLISKEDWLLLQSDQSKSKRGRRSADNPYSGLLRCECGGALVKRKHTVKGKLYVYHGCLNAKDGRCSQNISIKGLDTALTTILGRLEFKKKPTLDQSIHQERQLLEKRISDLNSKLQTLDNIPLSVIKSIGTMENRVKEITEQITKDAREQRGIDAVQNEKLSSITDGLELNLLLKRVLKNITVTRSGNGWVVKILHLSGHKQNFLMVNGEIKFMSDTIALQKLLAGFREEEETAK

SEQ ID NO: 20165 - protein, 530 aa, synthetic construct
MRKVYSYMRFSRPEQAKGTSIERQSHFAEQYALEHGFELDKSLTMMDKGLSAFHGIHKKKGAFGQFLAAVSAGKVKSGSVLVVESLDRLSREDPLIAQSALSDLILSGITVVTAADNQVYSREEIQQNPFKLIMSLVVMIRANEESETKQRRSNAFLKSALNQYQTNGKVRRLGADPSWLDFNKDDDTYSFNERIEVIRQILGLYNQGFGSLKIARQLTEESILTLSGKRNAWGQTTVANIVKSHALYGMKRINVQGVDYDLEDFYPALITKSKWLALQQHRTKRSKSMHGRGETVHLITGHGKGFTTCGYCGGGLGAQTQKQYKRSGEYSKTVTRLHCLTHKETSSCCSSVFLEPIENAVLFAACIGVEPQSLVPTANNVNYSALIDEIENKVKHIVEQVTAGAPWDLFKDAHDRLTLEKQKLIKERDSQKPDVNQSDVQKWVEKLIELADKARADNKEARLKCRTLISSVCKSIVIQLRGHDLKSEPLITITFVTDEQFEFKVGKDGAVRFVDNDMAVNRRLKPLLTE

SEQ ID NO: 20166 - protein, 550 aa, synthetic construct
MTSIRPLVSLRSPNAYSYIRFSSAIQAKGDSLRRQAQLAQDYCLKHSLTLSEQSFTDLGVSAFRSANTNEDNGLGHFLKALEQGVIPRGSFLLVESLDRLSRASVMTALSQLLNIISHGITVVTLLDDRMYNSNSNTTDLIISLTVMERAHNESKTKSERIKASWANKRANPTTTNRTSLAPFWLKLNEDKRTYTVIEKNAETVRRIFQMSISGHGIIGIVRKLNEEQIPSPKGGSWSNTSICRILNSKAAIGEYTPNIGRASTNTPISNYYPPIIDEDKFYLSQSRKAERSKPESAGRKTTFPNVFNQIAKCGVCGATMYYDNKSPTLKYLTCREFKKKNCTNRPIRIEFMHKFIVEQYLLPKYFQHHISMTTATSKQEDLISSLEAKIKEEEQALCQLMDITENFTSHIAVQQMENRDRKITQLKKKLEETKVQQAKVALTPRIGFRQAQQLVANALQTKVHDKKPINMEPEQLREYRVSLNRSLKDAFDSLRIHNVKADPQITVRCNQFTYVIEKSCLKSIHQDLYWAVKCDPHHTVATNCNIRNTL

SEQ ID NO: 20167 - protein, 480 aa, synthetic construct
MKFAIYVRVSTLEQAEEGYSIEEQIDKLIKYCEVKNWDIFKVYKDGGFSGSTTDRPGLSSLITDSKRKKFQGVLVYKLDRLSRSQKDTLYLIEDIFTANDISFVSLNENFDTSSAFGKAMIGILAVFAQLEREQIKERMVMGKVGRAKSGKAMSWSKVPFGYIYENDTYVAHPIQAPIVKQIFDDYMSGISITKLKEKLNDEGHIGKEISWSYRTIRQTLANPIYAGINRYNGELFEGNHEGIITKDYFEKVQSELKVRQVAAYEKNNNPRPFQSKYMLSGIIRCGLCGASLSVGMRAKRKDGSRHRYYRCYSKSKKKNLTMTKDPNGCSSPNYSMDELEKHILSQIEKIRLNPELIDVLSANDSVVDLSSYNKRIDELDLSLEKIVNLFIDDAIPKDILEARMEKIKQEKDSLENKIDSLKIKRPILAPIDAKDILSKLTDNIWNLSYEDQKSIVMELISKILVYPDKLEIHWKFANNQ

SEQ ID NO: 20168 - protein, 595 aa, synthetic construct
MEKKHAILLVRVSTSVQDYEAQIYDLRQYGNKFGYTDFHIIETKETAFADFDQKIGTNEMFRFIESNPHYNTIFITELSRLARRQSILHSIKELFINSRIQLYIKDSEYKLLDESGNITQQAETMFTLFGLFAEAEIKQKLERFQRKKKELMELGLSIGGKLLFGYDRFMTDNKKNTLVVNEEQALIIRTVFNWYINGLDEVKSPSVKRISIECIKRGFHPYTHSKRNLNKLLKEEAYTGEKITNNKRKNPKYKLVPNEPEYLISNNKIKYPVIIESETYNSVQEKLKSNITKGDKETKHITILSKLINCPSCGRKLSANYRSTTGASKNSYRCTSRTDTQPCGSSKSLSMNLIDSAVWGLIKADLPTLSKRINEINPDQYLLQLDSHLGNFIEREKEIENEIQENVQVVDSMGKMRNVNVIELVQKSAKKIEKLETELDKIAQEKARIASNKLLIQDKQENVESVIKDNLSTIENSKELLKKYINSFVDQINILEHNVSYTVLEIVLNDFTVSQDYTEYFGDTLPIQLELDYIVIDKRVTRDIKLAYMKSQSPSTDFTRFTKLTFEQIIPQVKKEMNTNDYDLSLPIQYSKLLF

SEQ ID NO: 20169 - protein, 638 aa, synthetic construct
MKPKLYSYVRFSSAKQREGNSLERQQDTALRIASRYDLELDTTAFHDLGMSAFKGKNAHEGKLSEFIKQIGIKVPVGSWLVVENLDRISRDDAWSALDIFKSILSKGIVIVTGMDEKVYKYADVKNNPTDLIISLLMFTRAHDESLTKKNRVESQARSLIRHNLTRKSGTPAKSIESVGQNVWWVDTKSGYVTPHPMYFSAAQKIIELKQSGETLLGIQRYLNKHYPAPKKRIYKDQTGQALTPKTEQWGKHLIRTFLNPTVHGQKVFTLDKRDESGAIMCDPDTDAPLKETLTIPDYYPALMSEIDYLTLSKLDRHRAITRSSSKYPEGNPEPEIPLLSGIGILFCGKCGSFMFKSGSSKNKYRYICGSKIVQGKPCGKKGFTSYQLEHTVLQLISDHVWNNHQEDKTAWYESEIEKASEAVNTLYKLATLTDGLEELADQIKANKQKKVTLEREFQQYKISRSEIQTTGWEQFRHFDVHDTKNPNRKRIRLKVKQAIKRIDCYDIDERHDHFEVTFADETKQRIVIKFNRNRSPGVSYVEAQTVNAHDLLKMQGLVLHSFIDELIEPEKFAQHIKDKQEVSILNPTFITELEDGVGKAEGDGMAIMVDGNKNKSYATVNGIKYEINSLEDLEKLSR

SEQ ID NO: 20170 - protein, 584 aa, synthetic construct
MKEVEVIKARNDLQTRTRGKKIEFMRVGAYCRVSTDSADQLNSYKSQVAYYTDMIKKNKEWVLADIYADEAITGTQVAKREDFQRMINDCMNGEIDMVITKSISRFARNTLDTLKYVRMLKERNIAVYFEDEKINTLTMDGELLLVVLSSVAQQEVENISANVKKGLKMKMKRGELVGFQGCLGYDYHKDTKTITVNEEEAEIVRYIFNRYIEGAGGSVIAHELENLGYKTKYGSSTWVQSTVIGIIKNEKYKGDLLLGKTFTVDPISKRRLENFGEEDKFYIRNHHEPIISEEVFEKAQEILSRRNVNRGKIGEGNTKREKYSRKYAFSCMLECGFCGGTLTRRNWHSSSQYSKVIWQCVTATKKGKKFCKHSKGIPETAIEEAFVESYRLLCDDNKDVLEEFLQRMDDTLSSSAVSKQLAKAEKEIDALEKKKSKLVDMRLEEIIDKETYESKYADLVSKQEQLVEERQKLQETSDNEKDIKKRLKEFKKTLEQNEVLDKFDRYVFESIVEKVIVGGLDENGNVDPAQLTFVYKTGLKNSVDGAKFKPQRKNARGRHRTDELCSHDSNEVDKMCSDSSNDTR

SEQ ID NO: 20171 - protein, 544 aa, synthetic construct
MAPNLQVSAVASPTTFSAGMNDHTPLRGLSVLRLSVLTDETTSPERQRAANEEAARALGIELSPEREAVDLGVSASKTTPFERPELGAWLERPADWDALVCWRFDRLVRSMADVFALAEWAKAHRKMIVFAEGPGGRLVLDFRNPLDPITHLLVMVFAFAAEMEAQAIRERVNGAQAAMRTMELRWRGARPPYGYMPQELETGGWTLVQDPKAVKVIERIMRDLFAGKTASTVSTELNAEGVPSPRDHWSLRQGRKTGGKTGATKGKNVSREKFSWRPAMLSRLMRSYALLGWKTHDGNPVRDSNGAPVMSTTEPILTREEFDAIGSLLDSRKTKQTPRKDSKALLLGVIFCASCGGRVYADLQKGTYKCGYSSRGQQCERPVNVRMDWAESRVEEKFLAAVGGLRVTEIKVTAGYDPAPEIAATLAEYEEHQKQEGRQRSQAARDAWQRRADALDSRLAELESREKVEPKREVVATDRTYADEWASAGVTARRDMLTDAGARFVVNRLEPKKPAHRSRFTINADFYSDAAAELAAIAEVELSA

SEQ ID NO: 20172 - protein, 689 aa, synthetic construct
MTSGNLIPTAVLKRKAVVYVRQSTQAQVQLNLESQRRQYELVDVARRWGFRKVEVIDEDLGRTASGAVERPGFERLVDDLCTGHVGAVLCLEASRLSRNGPDWHRLLELCGEVDARVIDLDGVYDPGLPNDRLLLGMKGSISEFELGVLRARMYEAARAKAQRGELRISVPFGYVWHRDYGLGFDPDMRLQETIHLIFARFRELGSARQVLISMIDDGVHFPRPSDGKKMVSFDWVPIRYRNVISILKNPFYAGAYVYGKSEKRTEIVDGRVRKSYGHYKPASEWAVVLKDHHEGYIGWSEYERNQELLAANAYGKAGGVKSGRGGRALLPGLISCGRCGRRLVVMYAGRGQGYPVYRCERGNLMMAQARCMSFNGFRTDAAVTREALEAVAPMAIEAALEAERMQLESEAKRRQMIEMDLQQARYEASLAERRYAACDPENRLIAAQLERSWEATLRRVETCEAQLSEVQRVEPVDAVPDFTGLAQDLEASWNAPGVDMRCRQQLLRALIKDIVADVDDDARDVILTIHWHGGQHSQVRVRKPKSGEHGQRTPEEALAIMRSMATRWSDAEIAATLNRMGMQTGQGKTWTARRVQSLRTVHKISGYRSSDKNGEWLTMSDAAAKLGVSHVKIRRFIRDGLLPAEQVMRGAPYQIRASDLEDERIKADLARNTPRRIHDDNQESLFSAI

SEQ ID NO: 20173 - protein, 571 aa, synthetic construct
MKGIATYYARCSTDKEEQKQSIDNQISGLMKYAEDHDYILSESGVFSSRDGGNIPYKGYVDEGFSGAKSTKYRKAFLQMMKDAKAGFFDVILTKSVSRFGRNVKEMLIHIDELKKIGVGVWFEDIQSFTLNNADMLKIQLFATLAEAESTSKSDSIQWAKKEAAKKGIWSGREPYGYNIVQGKLVINKYEAKVVRNIYKLYIDDLYGVNKIAKKLYVDDQIPTKRGGKWTGSHVAKILKNEIYLGKVRQHRTRKSDINSNLIEKIPIDKQIIYDDQLLRIIDDETFFRAKAEMASRPHIESFTYNTKHDDGKKVRTGAKTNGRGRYSTSHLFSNLLCCGNCGGMMRKKVQKTTRQTHHYYYCRNHEQYGNSVCEYRNLVREEEMLEWIKEEIKERINAPEVNDWYYTKLIENRYQTVDFAKTIKEHTERLTELAEEKETNFRLVVKKFISDEEYNTRNQSIDSEMQKLQNEIKRLNFIDDEIYSLKLKFEDFNKELNNLDLNDLSNVVLRKFLQRITITTYEGETFREINWRLLDSDEDDIINNNPTIKQEIYEEEMLYEEEIAFMEQYGE

SEQ ID NO: 20174 - protein, 548 aa, synthetic construct
MLTLAGSEKFNKAELEALLAKIKILIYARVSTDGQVDNYSIESQIERCMDLAKQKGITEDEVVVLVEDGESGDNPNRPMINYVLFLLEYGIGDHVIFLHPNRMSRFLHLQTQLSNRIWSLGKDFWFVEFDFDKSSPESMLNFNIQGSIAEYNKAKILADTKRGRITKVKNGQIPGLNRIYGYTYDTELDTLVENPVEKEIYLKMVDMLLHKDYSCSRIAEELSLRNVPAPKKDRWYQVTISRIFKNETYTGNYYFGKTKVIRNADGTKRQVPQPREEWRRISVPVYIDMETYHRIQKRLDELNKNKPGRPTEDYLLQGICRCGRCGAAVSSGVTTKTKNRLLKYYVCQHKTKKSYEVGTGESNPICKGRNWRVDYVDKIVWVYVKNIISKPTEIFERIVKQQSENSNSDDLLKQKTKLEKSLQEKETTRERYTEMYAAGIIKMKDLEDKVSAVDMQVKDIKKELHTIKHKLLATFHNANDVNLIQDTLKKYQYIMNENLITMENRRKIVRVFLSKVVLNDNKIDLHFKASKNIMDGIIDMEKEKILSL

SEQ ID NO: 20175 - protein, 592 aa, synthetic construct
MPKIWPYIRFSSEEQKKGDSLRRQQDLIDKFAARPEIVAEGATIDTSLDLNDLGVSGYTGKNLLQGRFKTFLDAVDSGIVKPGDYLAVEALNRVTRLNPRASLPILLGLLEKGVKIAITDSSLIYTNTGDITQLYIAIGELQRGYSESQEKGRRVREAWDDKKKRAFATGEIATSRLPLWLRAVKTTERGMVIRTVEKIPERVAVVKEIYRLSDTNVGAIATARILTEKGIPTFTRENGRKNPNYGDFWQPSYVKKILDNRAVMGHYQPMTWEKLPDNRRRRINHGPEIENYFPEVIEPELFRRVQEKRKGRAIEGQGNKGKKFSNLFTKIAHCSKCGATASHVNKGSNPRKGGRYLVCYRARHGECSYNAWRYDEVETAILKFLAEADIKSIIQDDSRADDLINKKYEVDAQISDIQEMLDAFKADFKRLKGRVTDVERELAIENEQLIEVLKSKAEKLEQEIFNAFEQQKADIEKDIQVLRNLSHTEDETTVFEIRSKINERLKLIVKDIVIDFQEKIVEIQFRNGNVRYLSEKASITYSEPTQKDLEDREMMDEVWASMSENERQQIIDHSIPVEIANDPHLLVKFFES

SEQ ID NO: 20176 - protein, 584 aa, synthetic construct
MPTAYAYIRYSSKAQGEAGKDSVDRQMASIQAITKHHDVELLPENIFSDTGVSAHDGSNKKKGKLKDLIDMINDVHIKPGDYIFVESIDRLSRQRLLQAKELVNSILEKGVILITTIDGQRYEKPNETNRIDDLQQDILLSVIAKRAHEESKTKSVRRKSAWNRAKKLADDEKAIFNGHNPPYGISYNKEENRFDIVEEEAQEIRDIFESLKYVGVSLTIRKINAYAKRKWTNKNIHLLFQTKYVLGSYMAQRRDENKNKVFERFIEGYYPQIVSYELFNEALEAMKLRAHRKHYGNQTVGSLNIFRHSIKCDCCNASMLFEKQTNPKGVCYGYFHCFTRKELKTNCNQPRFRFDLAYGLFLELVYQATTKEDFDVHPWQILELEEEKQDREHYIKNGVRYSFATQHDVEIEEKIESFRELLISLLSNKKRQASDNKKLVELRNVLLEQKSYKDNLLKSFAGFTNGVIPQEFLAVVSSTELKINDIEGELSKLQAEINTRKTSINIYSENDIIELYNTEEGRLKINQFFITNDIVFKFNFEKETRTLYCKIHYQGIMIDKIAKQFTLHNPLSEFGIKNLNEYFN

SEQ ID NO: 20177 - protein, 624 aa, synthetic construct
MMHEKIGPHHLERKAILYVRQSSAHQVLHNRESSMLQYAMRDHLTVLGWSRVETIDDDLGRSAAGGVVRAGFDRMIAEVCLGKVGAVAAREVSRFARNSRDWQQLIEMCRVVDTVLIDQETVYAPRQGNDRLLLGLKGSLNEYELDLLRQRSLSARDEKARRGELVVAAPVGFVKVGDRLEKEPDRRVQEAITLVFDKVAELGSARQALLWFLEHGLDLPAKRNNGDVVWRRPSYATIHRMIENPIYGGAYAYGKTRAASGYDATAIRSRSRHKARDEWLALIPGAHEGYVGWERAEAIRKMVSDNVPTSRHHGAPSMDALLAGLVRCRRCGRKLTVRYTGTKHNIARYSCWRGLLDNGEPRCIAFGGLRVDDAIEEALLRVVEPVAIAAAAEAEAQAANRRDQVRDAVSRDLEAARYAADRAFRQYDAGDPENRLVAAELEAGWNQALIRVGEIENKITAHDAATPRPSPVLATGITALATDLRAVWSAPTTIKHFVGLDVSLDPTSVCVLDEAGAVVWRGKIASTPEALTEAIRKARAPGAPERQQESPSGGRPQIGCDHAPNRDRRQRIPPAALVLQRLMNVDQTGFTTKSLRTVQIAVKAWREETAVEIITRDTHSTFLF

SEQ ID NO: 20178 - protein, 538 aa, synthetic construct
MTNQSTNNLKITALYVRLSNDDEREGESNSIMNQKKMLSKYASDHNLRKTTFYIDDGVSGTTFNRKGFQAMITDIEAGIVGTVVVKDMSRFGRDYLQVGMYTDIMFPEHNIHFIAINDGVDSEQGDNEFTPFRNIINEWYAKDTSKKIRAVFKAKGMTGAPLTTNPPYGYIKAPDNPTQWLVDDYSATIVRRMFQLTMEGYGPTQIAKKFQAEKILVPTHYAVSQGRKTNTVPSQSPYYWSDRTIAKLLEKPEYLGHTVNFRTTRKSYKDKRKIERDKKDWVIFENTHEAIIEQSVFDTVQELRKHKRRLTKQNELPLFSGLLFCADCGGKLYFCRGKSIARNQENYICSSYRRRTTECTSHYIRSVVLEEVVTNNLRKTMAYIQANGKSFFGDVLKGDQQAKKKEAQNQQKQLHDAQKRITELDAIFPQLYEDMVSGRINSERFDKLSSSYEEEQVLLKQQVVDISKEIQTELDVNVYIRELRKFVHKHVNFDSLTPELLHEMIDKIIVHTGKKIEVHYKFGLGELGNLVDEHIIKK

SEQ ID NO: 20179 - protein, 454 aa, synthetic construct
MRMKAAIYIRVSTQEQVENYSIQAQTEKLTALCRSKDWDVYDIFIDGGYSGSNMNRPALNEMLSKLHEIDAVVVYRLDRLSRSQKDTITLIEEYFLKNNVEFVSLSETLDTSSPFGRAMIGILSVFAQLERETIRDRMVMGQIKRVESGLPLTTAKGRTFGYDVVDTKLYINEEEAKHLQLIYDIFEEEKSITFLQKRLKELGFIVKSYSSYNKWLMNDLYIGYVSYSDKVHVKGIHEPIISEDQFYRVQEIFSRMGKNPNMNKESSSLLNNLIVCEKCGLGYVHRAKDTVSRGKKYHYRYYSCKTYKHTHELEKCGNKIWRADKLEEIIISRVKNYSFATRNLDKEDELDSINAKLKVEHLKKKRLFDLYINGSYEVAELDKMMADIDAQINYYNSQIEANEELKRNKKVQESLAELATVDFDSLEFREKQLYLKSLINKIYIDGEQVTIEWL

SEQ ID NO: 20180 - protein, 558 aa, synthetic construct
MTKLYSYIRFSSMRQSDGSSYERQIRMAKEIADRYNLELVNDYQDLGVSAFKGANSKTGALSRFLDEIGRSIPVGSWLFIENLDRLSRQDIISAQELFLSIIRRGITIVTGMDNKIYSIETVTANPMDLMFSILLFIRGNEESQTKRNRTNSSALLKIKAHQQNPQSPAVAIEEIGKNMWWTDTTSGRVLPHPVYFPVLQKIVQLRQEGHSAGVILDYLNEHHEPPAPTSNKKHGKWSRAMVSRLFTTKALIGVKTVNVDGVEYELRDYYPRVLSDSEFYFLRKNIIKKAWDYSHVKEKVIPLLSGIGVLRCVHCGATMVKQTAANGKREQYRYCCDGRKSGRTDCPYPNWGFRAVTLEGAVLQLLADKIWIAEDKTNPIPEIQVKIDEISRKIDNLINLSAMMGATKELANQITDLNSQREALHEEIRLFEREMYSVDSQGWDKLAQFDLSDVQNEERLKVRMKIKGALHEIECSRIDSKKNLFVLVYLDGLRQRLVIENNRGLKKGQIFVDLKTINDRQILESAGMVLHPCIEMIIDADWKAPEEIPGLLSEEFGI

SEQ ID NO: 20181 - protein, 505 aa, synthetic construct
MKKAIAYLRFSSLQQAKGDSARRQKKLIDEWLSHNPDYYLDPVTYEDMGLSAWRGHHAVRGAFAVFMVAVEQGLVGHDTVLLIESLDRLSREKIGEATGRLRAVLEAGIDVITLSDNVRYTRGSLDDPFAIIRAILIAQRANEESELKSRRMRAAWAEKRKAAAAGTIMTTKCPYWLKVNAARDGFDVLEERAEVIRSVFRMRLEGMSFVRISCALNAQGKENLKGKVSQWNSSSIERLVRKKAVIGYLVPSHQCTAAEAEEIPGYYPPIISEEDFALAQLMYREPESRRDGNFNPYLINIFRGLMRCGLCGHAVILTGISIKGYGYYVCSMRRQNRCEAVTIRRDLTDRYLISGLVQEASAMGGRVSAEDTLRPLTARHLQLTGSLHNIIRAIEIASDVSELSERAKSLSGEIRKLEREMAGVRQMRDCVAVTQLNLQDIGARQTCQRTARSLFREIRMHTGAKTCDVFLNNGMKIHNYPLYRQVGWSSILDAMAFLGEKEIFL

SEQ ID NO: 20182 - protein, 506 aa, synthetic construct
MRHVITYLRYSSAIQGAEGADSTRRQNDLFKQWLKKNSDAQVVASFNDEGLSGYKGKHLSGQFGDMLSRIESGEFSEGTILLVEAIDRIGRLEHLETEALMNRILGNGIEIHTLQDGLIYTKDALADDLGISIIQRVKAYIAHQESKQKSFRVSQKWGQRAKLALAGKQRLTKMVPGWIDPETFEVNEHAETVRLIFKLLLDGESLHNIARHLQANNISSFSRRKDANGFSVHSVRTILRSETTIGTLPASQRNDRPAIPNYYEAAIDAATFNKAQEILDKNRKGRTPASDNPLTINIFKGLFRCQCGASVHPTGTKNKYQGVYRCNNHLDGRCDVPPLKRKPFDKWMIDNFLGMIDVGNDGEAEGKIASLQHEVEIVTTRIKKATALLLEMDDIDELKIQIKELNQRRTELQTTIDNMRRKASLTDKELPQLKDIDLMTKAGRVECQLILSKHLKGLTLGKDSVIVTLQNDTEITIPTNPLPLNDGSPIFEIADKELLDIDAYQL

SEQ ID NO: 20183 - protein, 506 aa, synthetic construct
MRTVITYLRFSSAIQGAEGADSTRRQNDLFKQWLKKNSDAQVVASFSDEGLSGYKGKHLTGQFGDMLARIESGEFPEGTILLVEAIDRIGRLEHLETEALMNRIIAHGIEIHTLQDGLIYTRDALSDDLGISIIQRVKSYVAHQESKQKSFRVSQKWKQRAKLALAGEQRLTKMVPGWIDPDTFKCNEHAETVRLIFKLLLDGESLHNIARHLQANNISSFSRRKDANGFSVHSVRTILRSETTRGTLPASQRNDRPAIPNYYEAAIDAATFNKAQEILDKNRKGRTPASDNPLTINIFKGLFRCQCGASVHPTGTKNKYAGVYRCNNHLDGRCDVPPLKRKPFDKWMIDNFLGMIDVGNDGEAEGKIASLQHEVEIVTTRIKKATALLLEMDDITELKTQVKELNQKRTELQTTIDSMRRKTSLSDKGLPQLKDIDLMTKEGRVECQLILSKHLKGLTLGKDSVTVTLQNDTEITIPTDPLPLNDGTSIFEIAEKNLLNIDTFQL

SEQ ID NO: 20184 - protein, 507 aa, synthetic construct
MKRVISYIRFSSEKQAKGDSLRRQSKLVTDWLKAHPEYYLDESLTFRDLGVSGFTGKHLKGGLGDFLTAIEKGLVKAGDTLLIESLDRLSRQDIDIASELLRRILRAGVDVVTLSDGEHYTKESLKDPLSLIKSILIMQRAHEESLRKSERIQAAWNRKKELISEGIKVSRRCPAWLRLNDDRKSFSVIPDKVETVKRCFQLRLEGKSIWEIVRTLNAEGHRSMNQYKPGKFGQTSVQDLLKNRSVIGYFTPKGCEEIAGYYPSVIDETTFYKVQQLSHSRYGRRSVSGKPLSVNLFRGVIRCSECGHALIITGFSDTRSGIYRCPLRNENRCSAKGLSRKQTDGTLLALLSRLDRFDSDTTNTIDTLKLHREHISSNIEKLVQLSLEIEDLNAITSKLKQLKGELSQVDADIEKETQRLKSIDVGCLSDCDLTTKAGRIEAQLIIKSAVKEVVLNTAKRRCKVTFHNGRAITLPITENPSEDVTEAIQSLSEVTERGLIDVDVVEI

SEQ ID NO: 20185 - protein, 507 aa, synthetic construct
MKRVISYIRFSSEKQAKGDSLRRQSKMVTDWLKAHPEYYLDQDLSFRDLGVSGFTGKHLKGGLGDFLTAIEKGLVKAGDTLLIESLDRLSRQAVDRASELLRNILRSGVDVVTLSDGEHYTSESLKDPLALIKSILIMQRAHEESLRKSERIQAAWDAKKEAAKAGIKVSKRCPAWLKLNDDRKSFSVIPEKVATVKRCFQLRLEGKSIWEIVRTLNDEGHQTLNQYKPGKFGQTSVQDLLKNRSVIGYFTPKGCEEISGYYPAIIDETTFYKVQQLSYARYGRKPASDKPLSVNLFKGVIRCSECGHALIITGFSDTRSGIYRCPLRNENRCSAKGLSRKQTDGTLLTLLSRLDRFDSDTTNTIDMLRLHREHLSSNIEKLVQLSLEIEDLSAITSKLKQLKNELSQVDADIEKETQRLKSIDVGCLSDCDLTTKAGRIEAQLIIKSAVKEVVLNTAKRRCKVTFHNGRAITLPITENPSEDVTEAIQSLSEVTERGLIDVDEVII

SEQ ID NO: 20186 - protein, 604 aa, synthetic construct
MKKDVKVIKGDTTLKRTASGCVERSIKRVAAYCRVSTDTEDQINSYNSQVEHYTEFIKKNKEWTLAGIYADEAITGTQVDRRIDFQRLINDCMNGDIDMIITKSISRFARNTLDTLKYVRKLKEFNVAVFFEEENINTLTMDGELLLTILSSVAQQEVENISANVKKGLRMKMERGEMVGFQGCLGYDYDSETKSISINEKEAEIVRYIFRRYIEGVGGMVISRELEEQGYLSPRGNKRWTETTVLGIIKNEKYKGDLMMGKTYTVDPMTYTVDPISKRRLDNFGEQDKFYIENHHEPIISEEDFEKAQGIRLRRSKNRNTVANNGGKREKYSRKYAFSSMLECGFCGHNLSRRNWHSSSEYTKVIWQCVNATKNGKKYCPHSKGIEEEAIEKAFMESYRQVCHNNVEITNEFLKTVEEELKDNSLAKDLKKITNQLDKILKKEKDLVELRLNESISMDIYQDKYNEIAISKEKLLAEKRTLEVTLTDEKALKKRLEGFKKLLESNKYLDEFDRAVFESIVDKIIIGGTNDEGEIDPAMITIIYKTGKKDSQDGRLFKSRRKNAKEVNEETDNKLYPHSSDEVNNLCSYPMDNTRRDGSTFVQT

SEQ ID NO: 20187 - protein, 562 aa, synthetic construct
MLTNTQEISYFSNPTSNISEILRVAIYARVSTTEQAEEGYSIDEQTRILNEWCKENGYVVYKEYVDRGISGKSISARPALQQLLMDAKKKEFDIVVVWKMNRLARNILDLLKIVNLLEQKNIAFRSFSERYETATPSGKLQFHMMAAIAEFERGNIAENVKMGMLARAKEGSWNGGQVLGYDTVEISGENKKRRHTKLVINENEAQTVRRIFELYTKGHGYKSIANTVNKEGHRSKKGGLFAINTIKTILSNPVYIGFIRYNVRRDWNSKRRNNINPDPVLVKGHHEPIITNEIWEKAQSLLRNRSNRPNRIHSGEFPLTGLMKCPACGAGMVLGRTTNRNKDGSKRVLEYYVCGAWKNKGTSACNSNGVRTEYADEYVINRIATLANSEKLIRDVVAKINAGMNKKAAPLQKEYESLKKTLNSVQIKRERVFGLYEDGLIDKSELSKRLEKLNEEKQLLEDRIAPLEMELGEGIQKEITFDMVSEVMKNFVASYKTSITTEQKKQLLSLLIKQITIDDDRKIESIQIQLNNDVVSHFTNKGEGKLSGDDDFSSPFYVCFAI

SEQ ID NO: 20188 - protein, 550 aa, synthetic construct
MKSAIYIRVSTNKEEQKQSLDNQKELFMNLLSEKGWDLYDIYLDIQSGTKTKKRPQLKRMIEDARMNKFDIILAKELSRLARNGQLSYEIKNLAENRGIHILTLDGAIDTLSGNTQMFGLYAWMYEQESQRTSERVKTALRVRAKGGKFKGSIPPYGYYVEHGVLKIKDDFTPNIVRRIFNSYLSGMGFDSIARELLEEGLPTPSMVAGKRNASPLWHGSGVRIILENPHYIGNLVQQRETSINVTSEKRKKNDPSNFVIIEDTHEPIITKEDFNVVQQLIAERKRKRPHAKKHLFSNISYCADCGRSMHFKKSRKGYVCGGYNKHGRTQCSDHFVKEDELIKIISDDIKEMFSKLSTKSIQHDIEKKITKLIQRDQKRLTVIHKEIENLKKDKTIALRMKIRGEIQDDEYRLLIEDNGNQIAKLNEEKVKIEKGLLQQKQTIDFTKIIRNLENFVQNPILDEEMLHKLIERIEIKEDGSPRIFYRFSDPYISSIFLLATHSTRRAPYAETYQQAVPHASHTRHPPAPANRAPGFPGCKTHTQPASASSQ

SEQ ID NO: 20189 - protein, 459 aa, synthetic construct
MCERRTEMKAAIYIRVSTQEQIENYSIQAQTEKLTALCRSKDWDVYDIFIDGGYSGSNMNRPALNEMLSKLHEIDAVVVYRLDRLSRSQRDTITLIEEYFLKNNVEFVSLSETLDTSSPFGRAMIGILSVFAQLERETIRDRMVMGKIKRIEAGLPLTTAKGRTFGYDVIDTKLYINEEEAKQLQMIYDIFEEEKSITTLQKRLKKIGFKVKSYSSYNNWLTNDLYCGYVSYADKVHTKGVHEPIISEEQFYRVQEIFSRMGKNPNMNRDSASLLNNLVVCGKCGLGFVHRRKDTVSRGKKYHYRYYSCKTYKHTHELEKCGNKIWRADKLEELIIDRVNNYSFASRNVDKEDELDSLNEKLKIEHTKKKRLFDLYISGSYEVSELDAMMSDIDAQINYYEAQIEANEELKKNKKIQENLADLATVDFNSLEFREKQLYLKSLINKIYIDDEQVTIEWL

SEQ ID NO: 20190 - protein, 491 aa, synthetic construct
MGLAAIYLRLSRNEEQLNIDEILLNHRNALTKIAKQQKLTYDIYQEISSGVNTERPELNLLLSRLDDYDALLVMDIDRISRDNAHAEEIKKMLIIHDIKILTPQGAIDLSQESNEMLFSFQAMMANFEYKQIRKRLGRGRLAAAEQGKWTMSNRVPLGYKKNEEKRLEVVEEEAKIIRFIFQKTLERVSANEIAKQLDILGWRSRQGKVLTSTHISNMRRNVVYYGVVKAGRKVNGRVVDEVFVEDAHEPIVSKQIFLEVQKILEENTTGNFFNKLKATRKLQNLIYCNCCKRKRYIQCDGNGIDYIKSCIYKVDNNKCRDRGYKYEPIEQFVLQKIKEKKPAFEQELQMLKSLDTTEVEKKLSIQRESLEKQINRFNKRQRNLKEMRMDGEISKAEFYEMRDENEEQIKQVKQQMELIDIKLENLSNTDEEQARLQDAIKTLDKLEELKAESCNTFLKKFIKKIWFSSNTEANHDTTKPREDATIEIEWL

SEQ ID NO: 20191 - protein, 515 aa, synthetic construct
MYRPQELDVFIYLRKSRKDLEEEKKAMEHGQHYDTLERHRTQLLELAHKEQHNIIDIFEEVVSGEYISERPMMQKLLREVETGIADAVLVMDLDRLGRGDMVDQGTIYRVFRYSETFIITPTEVINPNDENQELTFSIKSLIAREELKTIVKRMQRGRRASAKEGKSISRVPPYGYLRDDNLKLYPDPERSWVIPKIFEYMADGMGRQAIAQELDRLGISPPEGEYWNPSTISSIIKNEVYLGHIIWGKIRYTKQNGKYIRKKVPKERWQRHNHAHPSLVSEELFQKATMAHSKRWRPPTIKTKKLSNPLAGILLCELCGHSMLYQPRKDRPNPQVRCVQPSCKGIQKGASLVLVEQRILDGLKQIIESFEIQENMVQKKKVSSNIHLQQRALEKKEQQVNDLQKQKNKLHDLLEKGVYDIETFLERQNSIVIRLKATQEEIKQLEHEIKSTLEREKHIHEFVPKIKNVLEAYYATEDIEKKNRLLKSVLEKATYLRKKSWQRKDEFVVELYTKI

SEQ ID NO: 20192 - protein, 522 aa, synthetic construct
MKLSHILQPNMKAAFYGRHSTDKQDMDMQLNSVMEVIRKYDCTHTHSFLDKAVSARKNKITSRKELENMFEAAKRKEFDFVIVYKSDRLARDPLEHQTIRIIMKTLDIPIIISSTESVYNTDTDLIVQLMEDGFTKYEVDTITARTQSGLENKAKQGKWLGGKPPFGYTYDKNSEQFIEHTEELCYVKEIFNLYVNGHGFQYIANRLPNGSRRGKDWGKENVKAIVLNPFYCGLLSWRRQTDGKQNVRDIWIEAPNHYVKPIISRITWESCWRIYSEKRNGNMVPKHYKTSFLLQGLLSCEKCQEIMKTKNQQTVSSTNKQYGGKIYLCTNCKLRIDADLLHDKVVNQTLTDVKISGFHNVYHAIEQKIQYEIQELNNNIQKYQRLLENYTIKLYNITEELKQRMKNNDDKRFLKSLAIYRSDVQRKLDGIIQQMNDFKQQIILKEKIEKSKEIWLHTLNEVFQDDVKFQEISDMDKRRFLLPLIQSVSIKENKKRNEYDISLQLRTDFSKRDVKNQISLIL

SEQ ID NO: 20193 - protein, 515 aa, synthetic construct
MKTAIYLRKSRADLEAEARGEGETLAKHRSTLLKIAKEMNLNILTVREEIVSGESLVKRPEMLALLEEIEDNKYDVVLCMDMDRLGRGGMKEQGIILETFKRSNTKIMTPRKTYDLNDEWDEEYSEFEAFMARKELKIITRRMQRGRVASVEAGNYLGTHAPFGYDIHRLNKRERTLTINPEEASVVRMIFDWYANEDMGANAIRSKLNDLGYKSKLGNEWNPYSILDILKNNVYIGKVTWQKRKEVKRPDAVKRSCARQDKSDWIIADGKHEPIIPESLFEQVQEKLNSRYHIPYNTNGIKNPLAGIIKCAKCGYSMVQRYPKNRKETMDCKHRGCENKSSYTELIEKRLLEALKEWYINYKADFEKHKQDDKLKETQVIQMNEAALRKLEKELVDVQKQKNNLHDLLERGVYTVDMFLERSNVISDRITEITSTMENLKKEIKTEIKKEKVKKDTIPQVEHVLDLYFKTDDPKKKNSLLKSVLEKAVYKKEKWQRLDDFELVLYPKLPQDGDI

SEQ ID NO: 20194 - protein, 538 aa, synthetic construct
MEKKKVAVGYIRVSTEEQAKDGYSLDNQGSVINKKCAYEGWEVKHIFHDKGISGASIDKRGGIKDLLKYIKSNKVDYLVVYKVSRLSRKIADVVAIADHLEKVGVKLIAIEDNIDTSTPMGKYFLVLGAIFAEMERENIITQVKGGMEQKAKLGEWNGGKPPLGYDLDNKKLKVNEEEAKIVKTIFTEYLKGNGYKAIASCLNEKGFKTKLDKLFSGNGVKEILKNPIYCGRVRWGYREDWGKLHEGNKRKRQYNDTPIISEGIHEAIIEKEIFDKVQSILKSNPRSHMKQFNGNHLLSGLIRCPDCGYGMSMQNVKSKGKVYEYYTCNQYQAYKSCKPNSIKKSDIEEEFLTIFEAVINEPSTLTTILESLNNTGQQGKQIGLDIKRKEDEIKKLRSKESKLMDELLEGNDNYKATIRGKIQEISDDIVVLENDIKKLQTIIKKNAESKLDINEIRSLLQKAGKVIPLLDKPSQQALIRKLITSIKVKDKHIVEVHFSFQKGLKVDYTKELTEVPTDDQSFRVRSDTENRIISKCGF

SEQ ID NO: 20195 - protein, 487 aa, synthetic construct
MKLQARRALVVIRLSRVTDATTSPARQLEACLELCKQRGYEVIGTAEDLDISAGKTSPFDRPQLGDWLTNRRGEFDVLVTFRMDRIVRRLLDLADLIRWCQEGSVSLVSATETFLDLDSAFGDIIALLVAKVAEMELTAISERNRSAAQHNMREGKYRGGPPPWGYRAEKIDGDWRFVQDDQQVRVINEVVRRVLDGEPLRQVAADLTGREVLTPRDRAYQLKGKEIRGYSWHSAKLREMLTSKSLLGHAVTANGSIRNDDGSPIIRATPILEREVFERLQVELAGRENRTEPTKRSSSLLLRVIYCGVCGKPAYKLKGGRGRQDRYRCASAQYKSTCGNRTVMIADAEEILTDAVMSVLGGKYRRDKVWDPGSDHAAELAELEETLSDLTDQLGVGSFRKGTRQRERLDARIAELARRQSELAARASKPAGWTWVPTDELFGDWWTSQTVEQLNLWLRSMDIRMCWNHQGIQTDMLHLEKMSEQWS

SEQ ID NO: 20196 - protein, 452 aa, synthetic construct
MKAAIYIRVSTQEQVENYSIQAQTEKLTALCRSKDWDVYDTFIDGGYSGSNMNRPALNEMLSKLHEIDAVVVYRLDRLSRSQRDTITLIEEYFLKNNVEFVSLSETLDTSSPFGRAMIGILSVFAQLERETIRDRMVMGKIKRIEAGLPLTTAKGRTFGYNVIDTKLYINEEEAKQLQLIYDIFEEEKSITTLQKRLKKLGFKVKSYSSYNNWLTNDLYCGYVSYADKVHTKGVHEPIISEEQFYRVQEIFSRMGKNPNMNRDSASLLNNLVVCGKCGLGYVHRRKDTVSRGKKYHYRYYSCKTYKHTHELEKCGNKIWRADKLEELIIDRVNNYSFASRNVDKEDELDSLNEKLKTEHAKKKRLFDLYISGSYEVSELDGMMADIDAQINYYEAQIEANEELKKNKKIQENLADLATVDFDSLEFREKQLYLKSLINKIYIDGEQVAIEWL

SEQ ID NO: 20197 - protein, 507 aa, synthetic construct
MFFKETETQEIIKYEDYPYAVYARVSSEKDEQVTSIANQIDICHHWIEKNNYEWKDEAIQLDDGISGTVLLDRKAMQLILDKAQKRKLKMVVFKSISRLARDLKDALEIREVLLAHGVRVVTLEEGYDSLYEGKNSMKFEMFSMFAAQYPQTISVAASGALAAKARRGEHSGRVPFGFKKEGKFLAINEEEAKVVRFIFDLHNNHGYGHKRIVLKLNEELALGNIVKPQKTEFWQLSTVQTILKNPIYCGVFIANRHTQVKIGGRKKFIRNPKEKWTVYKDWCPKIISEEEYEKANNKEHKMRKKRFNPRNELRGMMKCGVCGCNMVVLPSYKYNQKREKKEFNYLKCSAYRRGGTALCVNHAPMQYKDLRAFVIKTLKQKGKKLKLDVKSDFEEQKKNRIKRTKIEIENAENKKKRLIELYLEDQLITKVEFQAKRKELEEQIEKLNDKLFMLEREEEETIDISNIKNAFAQLERTDQDLFEAFSALIDKLVIYEDGTVDFHYKFK

SEQ ID NO: 20198 - protein, 497 aa, synthetic construct
MTINNVAIYLRKSRAEDGLTDAESLENHRNVLTGIAERNSWKYEIFEEIGSSMSISERPQLKLLLDSVTNKYIYDAVLVMDVDRLSRDRYDSSLIMKILRDNDVKIVTADGKITDLRDENDALMTDFKDIFSNYEYKQITKRMIRGKEASARKGRWSSGRVPLGYVYNKDTGMLDIDEDKAPIIREIFHMYANGTGTHFISLEMNKRGYRGAMGKPFGGKSIRDIITNEIYLGNATLRKFIKEGNTYKLRPEEEHIRHEGIYPAIVEKELFVSVQRRYESQKMKPNRAKAGTHSLSGLVRCGYCDKVHAIQMRPTKGRVLKGCSKRDLITGVLCKNHGILYEKVMEEVFKDLSKYSATLDETVERLIEDKTMYLNSKDRELASLESQLKTIEAQLKRINYMFMNDLLSEEELGEMKPQKVKEKDHILKRITEVKELTVDDKLEEYEKVSKTLKNILDNREVLSDKDLNRLLSSVINRIVLYNYKDKDVEPRIVIEFK

SEQ ID NO: 20199 - protein, 467 aa, synthetic construct
MKCVVYRRVSTDMQVEEGISLDMQKLRLEQYAKSQGWVVVNDYCDEGYSAKNTERPAFQKMIKDMKKKQFDIILVYRLDRFTRSVSDLHSILKIMDEYNVKFKSSTEIFDTTTATGRMFITLVATLAQWERETTAERVRDSMHKKAELGLRNGAKSPMGYDLNKGNLYINHTEAEIVKYIFEMFKTKGIISIVKSLNSRGVKTKRGKIFNYDAVRYIINNPIYIGKIRWGDDILTDIAQKDFETFIDKDTWYTVQQVQDSRKRGKVRLHNFFVFSNVLKCARCGKHFLGNKQVRSHNRIVMSYRCSSRHHKGTCDMPQVPEDVIEKEFLNLLEDAIVDLDDTEEKPIELSNLQEQYNRIQDKKARLKYLFIEGDIPKNEYKKDMLTLTQEENIIQKQLANVTDTASSLEIKELLNQLKDEWYNLNNESKKAAVNAIVSSITVEVTKPARVGKNPIAPVIKVTDFKIK

SEQ ID NO: 20200 - protein, 459 aa, synthetic construct
MCERRTEMKAAIYIRVSTQEQIENYSIQAQTEKLTALCRSKDWDVYDIFIDGGYSGSNMNRPALNEMLSKLHEIDAVVVYRLDRLSRSQRDTITLIEEYFLKNNVEFVSLSETLDTSSPFGRAMIGILSVFAQLERETIRDRMVMGKIKRVESGLPLTTAKGRTYGYDVVDTKLYINEEEAQHLQLIYDIFEEEKSITFLQKRLKKLGFKVKSYSSYNKWLMNDLYIGYVSYSDKVHAKGIHEPIISEDQFYRVQEIFSRMGKNPNMNKESSSLLNNLIVCEKCGLGYVHRAKDTVSRGKKYHYRYYSCKTYKHTHELEKCGNKIWRADKLEEIIISRVKNYSFATRNLDKEDELDSITEKLKTEHSKKKRLFDLYINGSYEVAELDKMMADIDAQINYYDSQIEANKELKRNKKVQESLAELATVDFDSLEFREKQIYLKSIINKIYIDGEQVTIEWI

SEQ ID NO: 20201 - protein, 490 aa, synthetic construct
MYELKYAVYVRVSTDRDEQVSSIENQIDICRYWIEKNGHEWDENSIYKDEAVSGTAWLERYAMQLILEKVRRKELDTVVFKSIHRLGRDLRDALEIKEILLGHGVRLVTIEEGYDSYYEGKNDLKFEMYAMFASQLPKTVSVSVSAALAAKVRRGEYTGGIVPYGYKIVDQKYTINEEEAELVRKMYELYDNGLGYMKIADAINDMGVPSRTGKLWAYPSIRAIITNAAYKGDYIMQKYAEVKVDGRKKMIINPKEKWVVFENHHPAIITRDLWDRVNNSKTDKKTKRRVAIKNELRGLACCAHCRTPLALQQRMYKNKEGETRYYCYLICGRYKRMGARGCVKHSGLQYSDLRLFVLQKLKEKENDLEKVFNLNDTDKHQEKQKKLRKEKKELEIKRERLLDLYLDGGPIDKETFTKRDKNFEKIIKEKELEILKLDDVKTLVVEQQKVKEAFELLEKSEDLYSTFKKLITRIEVSQDGVINIVYRFEE

SEQ ID NO: 20202 - protein, 558 aa, synthetic construct
MTKLYSYIRFSSMRQSDGSSYERQIRMAKEIADRYNLELVNDYQDLGVSAFKGANSKTGALSRFLDEIGRSIPVGSWLFIENLDRLSRQDIISAQELFLSIIRRGITIVTGMDNKIYSIETVTANPMDLMFSILLFIRGNEESQTKRNRTNSSALLKIKAHQQNPQSPAVAIEEIGKNMWWTDTTSGRVLPHPVYFPVLQKIVQLRQEGHSAGVILDYLNEHHEPPAPTSNKKHGKWSRAMVSRLFNTKALIGVKTVNVDGVEYELRDYYPRVLSDSEFYFLRKNIIKKAWDYSHDKEKVIPLLSGIGVLRCVHCGATMVKQTAANGKREQYRYCCDGRKSGRTDCPYPNWGFRAVTLEGAVLQLLADKIWIAEDKTNPIPEIQVKIDEISRKIDNLINLSAMTGATKELANQITDLNSQREALHEEIRLFEREMYSVDSQGWDKLAQFDLSDVQNEERLKVRLKIKGALHEIECSRIDSKKNLFVLVYLDGLRQRLVIENNRGLKKGQIFVDLKTINDRQILESAGMVLHPCIEMIIDADWKAPEEIPGLLSEEFGI

SEQ ID NO: 20203 - protein, 797 aa, synthetic construct
MSLALVHSRAQVGVLAPAVSVETHLANGLPSLTLVGLPEATVKESKDRVRSAIVNAGLDYPARRITQNLAPADLPKDGGRYDLAIALGILAANGQVPVATLDDIECLGELALSGALRPVQGVLPAALAARDAGRALVVPRENAEEASLASGLVVYAVGHLQELVAHLSGQLPLAPYAANGLLLEQRPYPDLSEVQGQVAAKRALLVAAAGAHNLLRLCNNAPKPQRASPMKPKAYSYIRFSSPEQAKGDSYRRQRAAALKYCAENGLELADTKEYRFFDSGRSAYTGKHISDEGEFGRFLSLVKEDRIKPGSFLLVESLDRLSRDKVNIALGQLLNLLGTGIKVVTLSDKRTYSNDSPDLATELIVSIAVMMRAHNESSEKGNRVAEAWRKKRELARSDKTPNGAACPYWLKLVDGAHQPVQERVDVIRRIFDMTIAGYGQTAISRKLNEDGIPVFGSTRSTREKPRNKSGLWGTSSVQKILQNRALLGEYQPTHLIGRVRQNDGDPIQGYYPEVITQDVFLQAKAARAQRQTSGSTKQSRNFNIWQGIAKCQLCGDAMHLINKGRPPKGYTYLQCYSTKKGKCGNGSIRIEQTEAVFKEILTNVDSMSLIHGRSAEVRKNLEVEEGKLALIANKLEQAIEAHTAYPSLSGAKLLHDLEEEHTKILAARDDLRGQLASHRVINKDDYFEQLDLVTYERRAAANGLLKRLGIQVQLKRDNPSRFQCRVLDKSDEATTDEIQQILFGVLYEDGKVTTQALDPDIFNRQVEQGVISSIAAIREQEEDGVGWQWFSGKLTR

SEQ ID NO: 20204 - protein, 518 aa, synthetic construct
MTFRAAFYGRFSSDNQRDESIDAQKRAAEHFCRSNDYRIVAEYEDRAKTATSDKRPGFLQMIEDSEKGMFDVVIIHKLDRFSRDKYDSAKYKRILKMNGIRLISVTENLDDSPESIILESLLEGMAEYYSKNLAREVMKGMKETAYQCKHTGGLPPIGYSVDPITRKYIINEEERRIVDTVFSMFIAGYGYNQIIRELADNDYKSRYGKPISKGTLGTILRNEKYTGTYIYNLTDGKDVHGKRNGNRKKDNEDVIRVEGGMPAIISKEVFQQVQEKMDSNKRQPGAYKAKEVYLLSGLIVCGECLKNVGTPYSMMGNTKFSGRNKLKYVTYRCGNRDRTKECNNPELRREYIENYVISQLQEKIFNEEAIPLLAKQLNDYHNSKQSNVKGERERLAKSLEGIERQITNIVNAIASGTFNIALSSKLEELEQHKLQLGQKLLETKAVTEKAAITEDTLRQLLSKFGVHVTNHDLPEIKKFIGSYVDKVLVYKEHVEIIFKLQIVDLTYGAEGSRTPVRR

SEQ ID NO: 20205 - protein, 543 aa, synthetic construct
MQDEEKIQVCAYCRVSTENESQVSSLNNQTYYFEEKTEQSGNYTLYKIYADEGLTATSWKKRIHFKEMLNDAGLDIEIYRKEIKAYVSNREPKFKRILIKDVSRFSRNASEGLELVTKLREKKVHIDFVSLGLSTEQMTNDMIIGFFLLAAENESKDKSQKILWGKKIGAERGVIHTTDNFYGYKYIKETNSLETIEEEAEVIRLIYNLYINEGFGFRKIVNYLTDQKIYTRKGKPFVQQSIKRMLCNEAYTGVLVRNKMDAPKVFTSKSYATLKPRSEWMITNNRIPQIIEPSTLQKSIEIRGSKTNYKNSVGIYKGIKSEYGGLIVCGICGQAYTSNVETKNNKKFYNCRLKKGKGKSYCSNVNVYLEQIESTIESLCSGKLFDVLLSDRNANIAKIESKVLELLSKMDQKNLDEIKKLKKELEDIKLENKRLAILFVKGTINEELLNEMQKELDMQMVKLNGEIKDKSMSNNQIEDEIAKLRNTANSLKKIEMKSVYSKDEVIEQIALIEVRRDEVNQRKAHLDLRFKIFENIEKITQDV

SEQ ID NO: 20206 - protein, 525 aa, synthetic construct
MKNCYLYRRYSTSKQSKGSSLERQQLLADRWCAANDGRLLDVITDEGYSAFKGDHISQGAFAGVLSAISSGQIPAGSYLLVENIDRLSRQAIGDALTTWMNILGADINIVTLMDGKIFTKESRNDLGSMLTYLVTQERAWSESHAKSVRTTNAIKAANKRLLNGEVARVTRPASWVTFTPSGYELNHKADAVRRLFELYLSGLGQASTAKQLNDEGITTLSGRSPKWSSASVRKVLLNENVTGIKNIDGNAVEVYPVVVTREDWLKAKNQLSSKSLGASITVGKVANPLTGFCHCGECSETMHYASSRSSAGVRYEYLQCASHRRLHKCGNVMFKLSHLFAVAKSLAAVLCDLPVEQDETQRLTAAVQDAALSLEDVRGRLATASDMAVKFPSEAAFSALSRLELEVTENTQHLEQAEIALASAKGVQAAPLIQLSAVRKLHLSDEASRREAAQIFRNSFESWVFNADGSSELLTKRHGVIYLDGAGRNLEIRAQSAAFEGIVSRFKAIPFEIGGKQGLITLDKA

SEQ ID NO: 20207 - protein, 604 aa, synthetic construct
MEIRKAYIYSRVSKGTQTKGDGLRRQVESATKFVEMENASNRSSGRHTYVVEDNLITDRGLSAYKGLNTEANAGLGAFIEAAKNGDIARGSLLVVEAIDRISRLPADEARKLFGMFKTFGIDVAIVKFGIIIYHNENTKLEHDLLLTAAFHLAHLESDQKSKRIRARFEHKRKLEKNGGEKRTSICPAWMELSHDRTEFVLIPEHEQVLRRMIEMKLSGIGCLRIAKSLNEEGILNFSGKPWQVKLVEKYLKMEQLIGSFQRVEHVRDENGTIQKKPIGLIEKNYYPAVIDGDTFLRLKQSFKRSGGRQTGAYKNLFSNMLYCPTCGSAMSYSKPNRGRKKIRCRKQIDGRGCSQRALYYDVLEARLIRALAGLDYAKINSDSFVELEKEISTLEATISDLEEQAEIVNDQYLKEEDVRFQSTFREKLQLIFDKIDVNRKRYEQLVTVKHDYDLSMVSELKLEKEEDREKYNQFVRNFIDYIIASDDRDDSPRFVRVQFKADSIGEVHFGFNGELYENEGVLTEFFTKENTSSSEEVKRAISLSKVGLYEKKLAEITDVKPPMTKDVRELIRYYFQLQQAVKSDMPKWGDIAKAAQLPLEGRVI

SEQ ID NO: 20208 - protein, 595 aa, synthetic construct
MEVIDAYIYSRVSKESQAKDGEGLKRQIERAEKFIENENKINTNYRYQLVDEIVDAGLSAYYGKNTSKNGGLGAFLEAAKQGEIKEKSLLIVEAVDRLSRLPADRSRRLFTKLKKYKIDVAITKFSLIIPHDEQLDMGVDLLLTAAFHLAHMESEQKSQRIKATFDKKRREETVGGEKRTSVCPAWMELSSCKTYFELIPERVEVLRTMINMKLDGYGCHRITKYLNERNIANFTGKPWRNEVVNKYLKMIQLKGELQRVEHQIIDGKTKKVPVGAPIENYYPPVIDRSTFIALQSTFPVSVKGRVGSAFPNLFRGLLRCPSCGNILSYSKTLRGYPKLRCRSRLDNQGCTQKYTRYDPIEQHLVQSLVGLDYSRLLNTSYKKLQKEISIIDGKVESLRNSILVLSDELSELEHIETIKVYGSLIDQKHNELDILSAKRDELTKVSSSYDYNAIKELDLTTVEGRQKYHEYVAKFIDYIVVQDPDSRSSATVVKFKSQKIGLLFFPFDKSSWDLSHEKILIDYYTKGEDIAGAIQRPISLSYALNRRDLLKKVSTVKPPQEPEYLADIRYLFEIKQEFKKEPDKWRSLKRKLRLQ

SEQ ID NO: 20209 - protein, 521 aa, synthetic construct
MKNVITIGANAPRNSELASISLPKKRRVAGYARVSTDHEDQTTSYESQMKYYTEYISSRSDWEFVKMYSDEGISGTNTKLRVGFKSMIEDALAGKIDLIITKSVSRFARNTVDSLTTVRKLKEVGVEIYFEKENIWTLDSKGELLITIMSSLAQEESCSISENVTWGLRKQFAEGKVHFPYTNVMGFEKGENGEIVVNQEDAKTVRYIFQQALLGKTPYSIAKDLTQQGILSPSGKNHWSSVTIKRMLRNEKYKGDALLQKTYTIDFLSKKKNINKGELPQYYVENNHEAIVDKETFDAVQATLDRKEKGKGSTTLFSSKLVCGDCGHYFGSKVWHSTSKYRRVIYQCNEKYKGEKKCTTPHVTEDEIKDWFVSAINKVISNKDEIISNLETLLEISGTADLEQRMKELETEVEVVSQMISKLVTDNAVMPQNQDVYQEKYRNLVDRYDALIVELESVEKEHLDKAKRNKELQAFLKTLKSQECLVTEFDDLLWETAVERIIIKENRNIEFIFKNGEVTVH

SEQ ID NO: 20210 - protein, 526 aa, synthetic construct
MNTHSNSDDITKAVIYCRVSSAKQTVRGDGLASQETRCREFAKYKGYEVVEVFRDDTSGSLTSRPGMQAMLSFLKGQRKEQHAVIIDDISRLARGLMAHFELRVKIGDAGGVLVSPSIEFGEDSDSQLVENLLASVSQHQRQKNGEQTINRMRARTQNGYWVFQAPVGYRYERASGHGKLLVRDEPNASILQEALEGYASGRFETQVEVKRFLERQPSFPKDLPNGEIRNQRIHDLLTRVVYAGYIEAPNWGVGLRKGQHEGLISFETFEKIQARLKSTAKAPARKDISADFPLRGFILCNDCGKPLTACWSQGKSQKYPYYLCATKGCESYRKSIKRDELEAAFEGVLQSLEPSPNLFKIVKAMFKDAWDMRLAQANETAKVLKANVAQIEKQIEALLDRIVESGNASVITAYEKRIAKLEREKVLAQERLTVTGKPRLTLEESFEHALAFLSSPWNLWCNSDLIGRKTVLRLAFMEPLAYCRNQGLRTPNLAFPFKALGGFYSGKCEMAHPTGFEPVTSAFGVF

SEQ ID NO: 20211 - protein, 518 aa, synthetic construct
MNKQAVIYVRVSTSKQAEQELPIEGQIVQCKEKALSLGATVVKVFKDEGRSGRSDSRPEFQAALEYCELFSPDYFICWSTSRFARNRLESQLNKRRLSKAGTLLEYVTVNFDADSASGLLHEGILELFDEYYSHQIGVDTKRSMIQNARKGFFNGGKVPYGYNSVPAESDPKRKELRINESEAAVVRKIFDMRQKGLGGHSIASELNRLGLICRNARWSRRMVSSLLRNPSVAGQIVFNKTGRHGVPNSPDKWIVIDSHQPIIPREIFDQVQEIIDSVKFDNKTAHNSTYLLSGLVYCGVCERKMLIEKAKGASRKYSYYNCGTNSRGPGCDSRRINADILDPWLAEQVCDRILTPENLSGLLKEFAELSMTWEKKQRQDIGLFQAELNRLEVAQERLYQLLEQPESGLGVRELGSRIKRNNKKIDELNQKIAELELQPTPKTRLTEGDLEDLANTLKTIILDTASPVKVREFLSHLIEIVTIGTETVNIVYRPDVLIDGDCRPQEQKFIAGAMVAPP

SEQ ID NO: 20212 - protein, 558 aa, synthetic construct
MSKEKIKVYLYTRVSTSIQIEGYSLEAQKSRMKAFAIYNDYEIVGEYEDAGKSGKSIEGRIQFNQMMEDIKSGKDGVSFVLVFKLSRFARNAADVLSTLQIMQDYGVNLICVEDGIDSSKDAGKLMISVLSAVAEIERENIRIQTMEGRIQKAREGKWNGGFAPYGYKLEDGKLFINEEEAIAIRTIFDQYVNTTIGANGISKYLENHGIRKIPRQNGKNPLFDAGLIRKILKNPVYNGKIAFGRRTLEKVHGTRNEYKQVEQDEYLISEGIHEAIVSDEVWQAAQVKLKSQAKKYEHVNKGKDTRTHLLSGIVKCPICGVGMFGNKCIKKKKDGTKYKDFYYYGCKHRQMIRGHKCTFRKQIREELLDDAVAEVIVKIVSNPKFASMMQEKINMKVDTSEIETEIDNYQKELRKCHSTKFKLIEEIDNLDVEDKHYKRRKQDLDDRLYRMYDKIDELESSLIDAKAKKQTIEAEKLTGDNIYKVLIYFDKLYKVMNDVERRQLITALISEIQVYEEKQPNGQWLKSITFKLPIIEENLNIGLDNDEHVETVVLMSRK

SEQ ID NO: 20213 - protein, 416 aa, synthetic construct
MKIRKLPPKPAALKLTRVAAYVRVSRESERLTHSFSAQVSYYNKLITNTPGWEYAGVYSDYATTGTSISGRGEFNQMIEQALAGSIDIILTKSISRFARNTVDLLTTVRALKAAGVSVRFERENIDTANAEGEVLLTLLASFAQAESESISANAKWGIRKKYKDGLLHSRHPYGYLYHHGQLDIIEEEAVIVRRVFAEFLEGISPEKTCKQMNQEGLRSRGGGKFSASVTRDWLENPTYIGTAILQQYFSAHAGDNTPTLNRGELDKYIVEDSHPPIIERSVFYAVQAELARRRATGGRGLTPTGGSSALTHRITCTICGRNYHRRTRRLAHSTYKYWWCETATKGKGNPCHAHQLREEHLHAIIKRLLGLHAWDNQQVIEQIEQIEASPNWVLTIHLSSGNTATINCRTGEEVTA

SEQ ID NO: 20214 - protein, 562 aa, synthetic construct
MNNHAIAPSSHFDQTIQLGPQKKAAIYARVSTVEQAEEGYSIDEQVRVLKEWCEREGYVVYKEYVDRGKSGKNIKGRPALQQLLSDTQQKAFDLVLVWKMNRFSRKSLDLLGIVDELKNKGIGFRSYTEKYETESPSGVLQFQMMAAIAEFERSNIAENVKMGMLARAKEGSWNGGHVLGYDVVSTPSNNSKRKASGLVVNDIEAQSVRKIFQLYTEGHGYKSIAGYMNRGGHRTKRNKGFSINSIKTIVTNPLYKGIIRYNVRRDWNEKRRNNINPNPIMEKGKHEAIISSEVWEKAQAIMKTRGGKPNRVHSGEFPLTGIMRCPMCGAGMVLSRTTNRKKDGTKRILEYYACGAWKNKGTTVCRSNGVRTDYADEYVLKKIANVANNEILIQKIVEKINGKNQNGEAPLRQEYEYIKKSLDTIESKRDKVLGLYEEGLIVKADLITRLTSLNEEKGSLTERISPIENQLGQVAVKEVSFKIVEQVMRNFTASFKEAMTREQRKQLLRLLINQITISESREIESIQIQLNKEVVRHFTILGGEKSSISDDFSPPFSMYFNI

SEQ ID NO: 20215 - protein, 462 aa, synthetic construct
MIRVSRERDGMTSPEVQRHAIESYAGSNGIDIVDWVEGIDETGSRARSAWWPRLDQSIERLEAGEFEVIVVWKFSRTARHRLRWAVALDRVDALGGGLLSATEPIDDRTSHGRLARGMVGEFNAYQADLIGDTWREAHARRFREGKPINGKPRFGYAYSPTDGFTPDPITGAVLAETYRRYISGESVYALVRWLNSGPTRTVGGYGGNGDGLWSERTLRRVLDSGFAAGIITYQGEQKRGIHEQLITDEEWSAYLEARGRRRVYRRSERSTYAYSGMVWCACGSKMHGGTHSQDRAQSYRCKDGKEKGTHDGGYVAQSLIDDAVREWLAEHEARISAEVRAGIERRPRRVATDPTADLKRQLADIANRQVILAEQRLSMGMPQAAYETLRDRYAAQATALEQELRTTEVQKSAPLRVLPVLLERWSDLTVEERREYLRSLIARIEVTPGRPHARIEIVPHDS

SEQ ID NO: 20216 - protein, 515 aa, synthetic construct
MKTAIYLRKSRADLEAEARGEGETLAKHRSTLLKIAKEMNLNVLSVREEIVSGESLVKRPEMLALLEEIEDNKYDVVLCMDMDRLGRGGMKEQGIILETFKRSNTKIMTPRKTYDLNDEWDEEYSEFEAFMARKELKIITRRMQRGRVASVEAGNYLGTHAPFGYDIHRLNKRERTLTINPEEASVVRMIFDWYANEDMGASAIRSKLNDLGYKSKLGNDWNPYSILDILKNNVYIGKVTWQKRKEVKRPDAVKRSCARQDKSDWIIADGKHEPIIPESLFEQVQEKLNSRYHVPYNTNGIKNPLAGIIKCSKCGYSMVQRYPKNRKETMDCKHRGCENKSSYTELIEKRLLEALKEWYINYKADFEKHKQGEKLKETQVIQMNEVALRKLEKELVDVQKQKNNLHDLLERGVYTVDIFLERSNVVSDRINEITSTMENLKKEIKTEIKKEKVKKDTIPQVEHVLDLYFKTDDPKKKNSLLKSVLEKAVYKKEKWQRLDDFELVLYPKLPQDGDI

SEQ ID NO: 20217 - protein, 507 aa, synthetic construct
MKRVISYIRFSSEKQAKGDSLRRQSKMVTDWLKAHPEYYLDQDLSFRDLGVSGFTGKHLKGGLGDFLTAIEKGLVKAGDTLLIESLDRLSRQAVDRASELLRNILRSGVDVVTLSDGEHYTSESLKDPLALIKSILIMQRAHEESLRKSERIQAAWNRKKELISEGIKISKRCPAWLKLNDDRKSFSVIPEKVETVKRCFQLRLEGKSIWEIVRTMNAEGHQTLHQHKPGSFGQSSVQDLLKNRSVIGYFTPKGCEEISGYYPAIIDETTFYKVQQLSYARHGRKPASAKPLSVNLFKGVIRCSECGHALIITGFSDTRSGIYRCPLRNENRCSAKGLSRKQTDGTLLALLSRLDRFDSDMTNTVDTLKLHREHISSNIEKLVQLSLEIEDLNAITSKLKQLKGELSQVDADIEKETQRLKSIDVGCLSDCDLTTKAGRIEAQLIIKSAVKEVVLNTAKRRCKVTFHNGRAITLPITENPSEDVTEAIQSLSEVTERGLIGVDEVII

SEQ ID NO: 20218 - protein, 515 aa, synthetic construct
MKTAIYLRKSRADLEAEARGEGETLAKHRTTLLKIAKEMNLNVLAVREEIVSGESLVKRPEMLALLEEIEDNKYDVVLCMDMDRLGRGGMKEQGIILETFKRSNTKIMTPRKTYDLNDEWDEEYSEFEAFMARKELKIITRRMQRGRIASVEAGNYLGTHAPYGYDIHRLNKRERSLTINSEEASVVRMIFDWYANEDMGANAIRSKLNDLGYKSKLGNEWNPYSILDILKNNVYIGKVTWQKRKEVKQPDVVKRSCARQDKSDWIIADGKHEPIIPESLFEQVQEKLNSRYHVPYNTNGIKNPLAGIIKCSKCGYSMVQRYPKNRKETMDCKHRGCENKSSYTELIEKRLLEALKEWYINYKADFEKHKQDDKLKETQVIQMNEAALRKLEKELVDVQKQKNNLHDLLERGVYTVDMFLERSNVVSDRITEITSTMENLKKEIKTEIKKEKVKKDTIPQVEHVLDLYFKTDDPKKKNSLLKSVLEKAVYKKEKWQRLDDFELVLYPKLPQDGDI

SEQ ID NO: 20219 - protein, 427 aa, synthetic construct
MEKRKLYSYIRWSSDKQAKGSSLQRQLETARRVAHENDLELVEIIDAGLSAFRSKHLEKGSLGAFIEAVKVGQIASDSWLTVESLDRISRDAILKAQGLFMELLELGITIYTGMDNRIYTKSSVTDNPMELMLSIMTFSRANQESMVKSQRQKSATQLKINKFNASVRADNGYPHAIRNSGANVFWSDVSDGTVRPHEYYFPIAKLIVSLRLKGWGYMRIAKHLNENYTPPKGTAKRKHFKDLWSPKLICNFLQSRTLMGEKSIRVDGVEHILKGYYPQVISENEFYSLQNVINRKLANEPNNYIPLLTGIRRFKCGCGAAMVAFFQYDKIRYRCDGMKSLDKRMHCGAKSFNGASIENAIVQICADKIFKDVKTHTSNVGAIQAMLVEAKRKYNRGMDMLLEDTAPQGLNIKLIELEKQIEELQKN

SEQ ID NO: 20220 - protein, 555 aa, synthetic construct
MCVAIGYMRYSSKLQGAGSTIHRQKSLINKWVEDQKTHHGKVYEVKFYTDKGLSGWTGENLLAGALGRLIEEVEAGGYPEGTPIILESIDRLSRQGHEEATAILRRLTSTGCVVHSILDRQVIQRSDLKTFIGAMQIIAVAERGREESDIKSERVSSSKERNYELAKLGKKLVTRNLPGWIYLDQKGKMQIDPAKQKLVKEIFEMRLAGHTYQGIAETMTNRGEPVLNERKGAQRWLPNSIRTLLHSRSVIGVLPASKVNDKYKEIEDYFPSAITKDLFYAVNDLNVPAVRSREKKQYPETVFLFKGLVKCRYCKGNVFLNGAKPGYWGRIRCIGHHDKVCDAPSLPRYDFEQSLITRMFPLLKSMDVSTEENPVAVLQAKIDHLTNILEGYYDDLEEIPREDKPRRKSINERISKRANEKEEYERQLVVVRRKMEVITENTLSDLNYDDYSDRLKMQLVICRNIERIVLDSLFDKVHIKLVNGNVLMNFPLYGDVDGARLVITAKENTGITDVERILGLDDAMPTVYNLAPSSGVFMDDREFPEVEPDYPNEEQ

SEQ ID NO: 20221 - protein, 583 aa, synthetic construct
MATRLYSYVRWSTDKQSGNTSLDRQTDKAKAFASLHGLEYVQILDAGISAFRGKNTTQGALAGFIEAVKAGAIPNDSYLYVENLDRLTRQDVMTALNLFTGLLSLGLTIVTGMDGKVYSQDSVKNNVTDLMMSLFLFSRANEESLTKQKRAHETALKLIDRHRAGLPVNIKSAGSAPWWIDASMGTYEAVKPHPVHWKAAQKAVELMLEGWGCFRVASYLTDNPDLYPPPRGNRGKGKKRSECWAVANLKAMRSNRALYGEKVITIDGVTHRLSNYYPAVCSQTDFARLQDVACSNRHKVGEVRQTITLLSGLGLLRCGHCGGSMSFFSKEGRIRYVCETGKNKTSACRVWSVSGLLVERCLLAPLIRGYMDLMMGKQGKREDLTQAIEAKRVELNGIESQISNITSAITMGGNIPALVASLQALEHTKSGVLVELERLTQRQALQDGKDHQLESMVDFYELLTPDLLEDTTDERRLKAREVVRAVVRSVTLSKGPDKALTLSYELQDKTAYVYTGTLTAEGKKGYTLEVVNGDIQINGTEDNEEAQRLIGVIQDAEQEYHKAISKILAGFPAPVGSHFFGKR

SEQ ID NO: 20222 - protein, 507 aa, synthetic construct
MKRVISYIRFSSERQAKGDSLRRQSKMVNDWLKAHPEYYLDQDLSFRDLGVSGFTGKHLKGGLGDFLTAIEKGLVKAGDTLLIESLDRLSRQDVDQASELLRNILRSGVDVVTLSDGEHYTKESLRDPLSLIKSILIMQRSHEESLRKSERIQAAWNRKKELISEGIKISKRCPAWLKLNDDRKSFSVIPEKVETVKRCFQLRLEGKSIWEIVRTLNAEGHQTLNQYKAGSFGQTSVQDLLKNRSVIGYFTPKGCEEISGYYPSIIHETDFYKVQQLSYSRYGRKPASDKPMAVNLFKGVIRCSECGHALIITGFSDTRSGIYRCPLRNENRCSAKGLSRKQTDGTLLALLSRLDRFDSDMTNTIDTLKLHREHISSNIEKLVQLSLEIEDLSAITSKLKQLKNELSQVDADIEKETQRLKSIDVGCLSDCDLTTKAGRIEAQLIIKSAVKEVILNTAKRRCKVTFHNGKVIDLPITENPSDNVTEAIQSLSEVTERGLIDVDEVII

SEQ ID NO: 20223 - protein, 644 aa, synthetic construct
MFNFDKSKYKGICVPYARFSTDVQDEIGRKSLERQIEEAKRFSDEYGLFFDEDIAFVDRGVSGFALSGDTAKTFQKGQMQLMLELLEEIDVTEREFIYITFHNFDRFSRMSPDVASRYFEQILDKGFNIVTTIDNEVYKRNSGNLEQMIISIIHMSTAYYESEVKSIYISDSRQRKRDVIEYLYNDETQKGKHRHIGIKACCPRWIKTKDIIYEYVAKDGSVKKEALKRFEIDEERAQIINYIFDLKIQGMGNGKICQVLNEQNIPVFHSGNYTKAKYWNLSTISNYLKNENVIGHSYLYHKAKEEVFNEKTQTFSTKRVRKIATDKLYNYYPAIMSEEKFNQAKEAVKANSVKVDRSKSSEKPHMFSNLMRCSCGTRLHYKLTKKNNVKKVDDYFEYLKCERAALNDGCKGENINYKNFEAQFINFIRYIDVNEILDHANGVEAVIQGLTELEEREAAINLKITGLTKTYQSLINAGVDGSDVLVELEKAKGELQEVEFEKSKFLNSMKSQTSSSSESIKQKKSALKSKVFAEKVEARKAVNELLKQKIRWMEVYATAYAKFVIVCFVDNVIRTYAYQDEFATDLMFNTIKINTDGLKGYEADELMVLMIKTVRESLAGMNEVITNTDLKIKLAAVKSEYMNK

SEQ ID NO: 20224 - protein, 664 aa, synthetic construct
MFSFDKSKFKGICVPYARFSTKGQSKIGKKSLERQIEEARRYAKSNNLYINEDLIFADKGISGFAQQGNIAKAFKKGQMQVMLALLEEVPYQEREFIYVTFHNFDRFSRMSPKQARTYFDLILQKGFNVVTTIDNQLYTRHDKDLGKMLISTIKMTTAWEESQVKSIYIKDALARKKKVVEYLYTHPSQKGKYKHIGVVQPNMPRWIDHEKIELTYTDESGSKRTDSFKKFTLNKEKTKIVNYIFDLKIQGLGYARICRRLNEEGIPTFDQGKHRIAKKWHVFAVQNLICNEMVLGHITLHTHNEEEYMCEIDKVFKKRKIKQTATEKLYNYYPAAVSEAKYLEAHKNTIQQDKPKKLGRIGERTNIFAQILLCECGGTLQYRRTKKNKKKSESVSVNEYLQCNNAFVNHKCNSQTINYTMLETAFFRYVNNIDFKKICSTTNSKHALKIIDIDADIKELTDEIESLKLREAGLAKTYMSLASAGLDGSTALIDREKTKKEIAEKVLELENLELKKKGLEIEADKDNREFVDINDYMLNKDNYSSDEKIIIRKKINDFLHSKIEWMEVVSTERQKFVIIAFHDTVIRTFAFDDRCANDLMFNEIDVDLSGLNRVQASNLMFTLIKAIRNSLKGVEAVITKADLIRYLQHIKQDYLNNIGEQASV

SEQ ID NO: 20225 - protein, 575 aa, synthetic construct
MTKIAYSYTRLSTEKQIKGHGFTRQREAIEKVCCQHGWQLSDQTFNDLGVSAWKGANATTGALSQFIDLAKKGAIRPNSVLIVESVDRLSRQQVDKSLRLMLELLEVGVSIFTLSDSKLYTTNSDSVMLDLMMWLMTAQRAHEESEIKSLRVRAAKKKNKELIRKGIIVTRKCPEWLTVSDDKSCFLVNNERAEIVRKIFTWYSQGFSTKPIALKLNELGIPYWGKSSTWSYRHIRSLLKHRGVIGEIQLLKRIDGRDVADGDPVEDYYPAIIDRGLWATCQQIKSSKTTAKGRVVERGMANLFRGLLKCECGSGLAINSSTVKGRTYRFLRCSQLKTTGCQAKNWHYEKTERILLIALRHSLSSFSEEDHAVSLRECQHYLARISEELKEKERQAENAINYLLDKPSKLLEARLQTLEDDIARLKAIQEQAEHRLEAVHYEKSTALDKVEELQRVLEDIANDDDSRHKANGLLRRLIDTITLGSISNPRSKEFMEVSDNDYHGLIIIKRRDGLELRIEVLKDYGLSISWEGDDFTVIECSPTQQLNSQHVSQRLINLGGQTVDLWDDEGWVASS

SEQ ID NO: 20226 - protein, 653 aa, synthetic construct
MFDYDKSIFDGICIPYARFSTTEQDKVGRKSLERQLEEAKRYASQNNLYISDDLIFTDKGVSGFAKQGQLSKTFEKGQMALLLDVLEDVPFKERENIYLCFHAFDRFSRQHPEVAYEQFSRILKRGFNIVTTIDDCLYSSKEADLESMLISIIKMSSAHYESEVKSVYVSDAHRRRREMLEYLYNHPTQKGKHKHIGLKQSTTPRWIIESEIIYDFVDDNGVARKDSFSKFSLDEAKAEIINQIFDWKIQGLGHTKICQLLNQKQIPTFEDGNCRKAEKWHTFAISNLFKNKSTIGTFTLKTVEGEEYFCESERIFKTRSNKVDATSEMENYFPAVVTVEKYEAALKIIAMNNKGEKISEPEGKTHVFSKVLRCTCGGRLVFKGTRKTGKSEKADWFEYLRCEKAILKDGCDAENIIYKDFEMAFLRFATSSNYTVFSTTQSKLKTKLKRLSIKQSYLNGEKEQLLLEAKGLNKTFESIVTQNLDATLLLDSISKNKSLLNTVQNELVKIENQVKGVEREYEKSGKPIDKRIIKKELRSEDYSKRLLMRKAVNQQLRKNVVHMEVCSTKLLKFVIVCFDDYVIRTYAYQDEFSSDLMFNFIKINVENLDESEAYDLIIHLFKEVRISLSGENAVITNFDLKVHLSGIKEKYLK

SEQ ID NO: 20227 - protein, 673 aa, synthetic construct
MIGEETLREEIFQYDKAKFKGICVPYARFSTKGQSKVGKKSLERQLSKAREYAKRNNLFINEDLIFTDKGVSGYSNQGELSKAFKKGQMATMLLLLEEVPPEERDNVYITFHNFDRFSRMSPDAAQAHFNKILNRGFKIVTTIDNQLYDRRDKGMSNMLISIIKMTTAWQESLNKSIYITDALSRKKKVIEYLYNHPSQKGKHKHIGVVQPSIPRWIDQENITYEYIDADGSKRTDTFKKFSLNQYKAEVVRKVFELKIAGLGYTRICQKLNNDGVEVFEQGRFKKAKKWHPYAVQNIITSDKVLGHITLKEMVTEEYHCKETDEIKTKKVKKEVTSKLENYYPSVVDEEVFRLANVLKFQEKKGKPLGRIGERTNIFATFMSCYCGATLQYSRSQINKRSNKAPVYREQLRCNNALVKNGCFDDYINYVELEQAFFKYVHHIDFREVCLVGDKSLETEIKNLQAEITYLNGQKKELKLKNSGLEKTFESAISQGLNADYVLVALNEAKKSADLIETKINDLKVRITKLQLSLDSKESDFLDIVEYSKRIKNSSTETKIMMRKKLNDFLHSKIKWMEVCSSKHSKFVILCFHDDVIRTFAYSENYANDLMFNTIKISYEVEDSQLNYELFLIYIHQIKRSLRGETEVVSNGDLIEALQRLKRKFYAGKGIDYV

SEQ ID NO: 20228 - protein, 382 aa, synthetic construct
MPKAISYIRFSTKIQSVGDSTKRQSKYINDWLKRNPDYYLDESLRFQDLGISGFSGANAKSGAFGEFLAAVESGYIEAGSVLLVESLDRVSRQDIDTAGEQLRKILRAGVEVVTLVDNEWYTKESLKDSLSMIKAMLVMERAHEESAMKSTRLRSVWAAKRERAAKGEIMSKRCAAWLKVSEDRSHFEFIPENVKAVQRVFQLRLEGLSHIKIAKQMNDEGFYTLNQHKSVKGGWSQSSVTELLSNRSVIGFKVPSKSMAVKGVSEIPNYYPAIITDEQFYAVQQLKQGSGRKPSSDLPLLTNLFKGVLRCSECGFIVVVAGVSAKRSGIYKCSMKSEGRCNSVGFSRLQTDKALFRGCFTTLTVFHSIVILALLLVLFKVN

SEQ ID NO: 20229 - protein, 529 aa, synthetic construct
MRKVYSYMRFSRPEQAKGTSIERQSNFAEQYALEHGLELDKSLTMMDKGLSAFHGVHKTKGAFGQFLAAVTAGKVPSGSVLVVESLDRLSREDPLIAQAALTDLILSGITVVTAADNQVYSREEIQQNPFKLIMSLVVMIRANEESETKQRRSNAFLKSALNQYQANGKVQRLGSDPSWLDFNKDNDTYSFNERVEVIRRILNLYNQGIGSLKIARQLTEESIPTLSGKRSAWGQTTVANIVKSHALYGMKRINVQGVEYDLEDFYPALITKSKWLALQQHRTKRSKSMHGRGEVVHLITGHGKGFTTCGYCGGGLGAQTQKQYKRSGVYSKTVTRLHCLTHKETSSCCSSVFLEPIENAVLFAACIGVEPQSLVPTVNNVNYSALIDEVDNKVKHIVEQVTAGAPWDLFKDAHNRLKSEKQKLIEERDSQKPDVNQSDVQKWVNKLVELADKARANDKEARLKCRTLISSICKSIVIKLRGHDLKSEPVVTITFVTDEQFEFKVGKSGAVQFVDNGMAVNRRLKPLLA

SEQ ID NO: 20230 - protein, 556 aa, synthetic construct
MNYVAYLRVSSYNQKELGDSIDGQRQSIIDWVQAKGGNILRWYTDDGVSAFKGKRNQFELMLHELENDIVKADGLIVYSLSRFSRNLLRQLEAKKLLEKKGITLVSATEALPTNQEDNFIMVSLLGLMNEHYSIQNGKVVTDRLRDTARKGYFTGGPVPYGYCSITVSGVTSKCRKKLQIFEEEADLVKQIFSLSEKGVNGKPLGVKSIAEMLNKKLQYRRGTKWNRNSVSRILRNTAYIGDFVYNSGGREPIIVKIPAIIDRNQFDNVQDGLKSRDIFSAESRRLRSHCLLTGLLKCQVCGGSMVVTSGKSGKYSYYQCSKQVRHAPDTCTSKRIRRDIVERVVKQKFIGELLKEDHLKKIHTRTRLRIKEANRTLVSDKNRLSKRKSNLETRYSRLIMMVADGELAPDERINKNLSEISAQIDALEHELARLSVRINFPVKNFGDARLQDFAVAVQEYLMDADDEKVKQLMLSTVTSVKVVEGAKKLIFEGSNMAVLYLIANAKTGTEFSVPVFVTKWRRDRDLNPISLKTYIYQALEFSSFLRSSTKCHVDEC

SEQ ID NO: 20231 - protein, 529 aa, synthetic construct
MKKVYSYMRFSRPEQAKGSSIDRQSQYAEQYALEHGLELDKSLTMMDKGLSAFHGVHKTKGAFGQFLSAVTAGKVPSGSVLVVESLDRLSREDPLIAQAALTDLILAGITVVTAADNQVYSREEIQQNPFKLIMSLVVMIRANEESETKQRRSNAFLKSALNQYQTNGKIRRLGSDPSWLDFNKDDDTYSFNERVEVIRRILNLYNQGIGSLKIARQLTEESIPTLSGKRSAWGQTTVANIIKSHALYGMKRINVQGVDYDLEDFYPALITKSKWLALQQHRSKRSKTMHGRGEVVHLITGHGKGFATCGYCGGGLGAQTQKQYKRSGEYSKTVTRLHCLTHKETSSCCSSVFLEPIESAILFAACIGVQPQSLVPTVNNVNYSTLIDEIENKVKHIVEQVTAGAPWDLFKDAHDRLKSERQKLIKERDSQKPDISQNDIQKWVDKLVKLADKARAGDKEARLKCRTLIHSVCKSIVIKLRGHNLKSEPVVTITFVTDEQFEFKVGKNGAVQFVDNGMAVNRRLKPLLT

SEQ ID NO: 20232 - protein, 516 aa, synthetic construct
MSNNKALAFLYIRFSTKKQEQGDSIRRQINAAEAWCKEKDIELSAQTFEDLGVSAFKEGGKRPALEDMLFAIEQGRIPRNSYLLLEDHDRLSRRGWLHTQTLVHKVVKLGVKIVMLRSRTVYDQSNINNISDNIMLMFSADRAFQESERKSQLIKASRNNARKNREVTGKLPAWIARNGDEFIFNDKLTTIQELIGCKLSGKSHQATAKHLNSLGMTTGSGSVWSASGVRAIIQNHALYGAKAYFDTGADGRMNAKPIEIVPDIFPQLISFQQYQSLNVKKASGRTSKRGAFTQLLKCGCCGSAMTTRSSNYKGQPRTYKMCVRATEGSCSQVERVREPERYLNDVLRKLTYQIIKGAYVSRTGEYEKQLETLNETKDKLISLGLTDALTDVYVDMNRVRELIEDSKIADQANIEPDVDFAYVCDIENIEERNTELRKLLSKIVFYCISKRGQTSQWKVVIHQVNGFTISFLLDQQYGFGNTNVKFVADKQQYIKDTQVDMYAWEDEYVDAILDNV

SEQ ID NO: 20233 - protein, 559 aa, synthetic construct
MSKEKIKVYLYTRVSTSIQIEGYSLEAQKSRMKAFAIYNDYEIVGEYEDAGKSGKSIEGRIQFNRMMEDIKSGKDGVSFVLVFKLSRFARNAADVLSTLQIMQDYGVNLICVEDGIDSSKDAGKLMISVLSAVAEIERENIRIQTMEGRIQKAREGKWNGGFAPYGYKLEDGKLFINEEEAVAIRTIFDQYVNTTIGANGISKYLENHGIRKIPRQNGKNPLFDAGLIRKILKNPVYNGKIAFGRRTLEKVHGTRNEYKQVEQDEYLISEGIHEAIVSDEVWQAAQVKLKSQAKKYEHVNKGKDTRTHLLSGIVKCPICGVGMFGNKCIKKKKDGTKYKDFYYYGCKHRQMIRGHKCTFSKQIREELLDDAVAEVIVKIVSNPKFASMMQEKINMKVDTSEIEKEIDNYQKELRKSHSTKFKLIEEIDNLDVEDKHYKRRKQDLDDRLYRMYDKIDELESSLIDAKAKKQTIEAEKLTGDNIYKVLIYFDKLYKVMNDVERRQLISALISEIQVYEEKQSNGQWLKSITFKLPIIEENLNIGLDNDEQVECVSLLEKRS

SEQ ID NO: 20234 - protein, 595 aa, synthetic construct
MTNNVEIIKANPLVTRRNDSNGSLLRRVAAYCRVSSDSDDQKNSYDSQVRHYREYISQHKDWNLVDIYADEGISGTQVGKRQDFQRLISDCLDGKIDYIITKAIARFARNTLDTLKYVRLLKDKQIGVFFEEENIDTLTMDGELLLTILSSVAQQEVENTSAHVKKGLKMKMQRGELIGFQGCLGYDYNQDTKSISINEKEAKIVRYIFERYIDGIGGRAIARELDELGYKTPRGLDHWQDTTVLGIIKNEKYKGDILMGKTFTVDPISKRRLINFGEEDKYYIKNNHDAIISPEIFTQAQEIRLRRSGNKKTIANTKGKRERYSRMYPFSSRLECGFCGTVLSRRSWHSSSEYKKIIWHCTTSIKRGKKYCTHSKGIEEKAIENAFLQSYQQLFYENNNLTEDFLEIIKEELTDDTLKVELTKIVSKLNSLYKKEEKLVSMNLDGKISDSVYEDKFNQIQIEKEKLLEEKVNLEVTLKSEVDIKSRLENFKEILTSQKTLTEFDKDIFESIVEKIIVGGINSDGEIDPAMLTIIFKTGDSSTKDAKSYKSKRKNAKIDNDKLCFNAVTDDEKKCTNKENNARRDGSTFVQTRCR

SEQ ID NO: 20235 - protein, 559 aa, synthetic construct
MSKEKIKVYLYTRVSTSIQIDGYSLEAQKSRMKAFALYNDYEIVGEYEDAGKSGKSIEGRIQFTRMMEDIKSGKDGVSFVLVFKLSRFARNAADVLSTLQTMQDFGVNLICVEDGIDSSKDAGKLMISVLSAVAEIERENIRVQTMEGRIQKAREGKWNGGFAPYGYQLVDGKLFINEEEAVAIRTIFDQYVNTNIGANGLSKYLENHGIRKIPRQNGKNPLFDAGLIRKILKNPVYNGKIAFGRRTLEKVHGTRNEYKQVEQDEYLIAEGIHEAIISDELWQAAQVKLKSQAKKYEHVNKGKDVRTHLLSGIVKCPICGVGMFGNKCIKKKKDGTKYKDFYYYGCKHRQMIRGHKCTFSKQIREELLDDAVAEIIIKIVSNPQFASIMQEKINMKVDTSEIEKEIDNYQKELRKSHSTKFKLIEEIDNLDVDDKHYKRRKQDLDDRLYRMYDKIEELESFLIDAKAKKQTIEAEKLTGDNIYKVLIYFDKLYNVMNDVERRQLITSLISEIQIYKEKQPNGQWLKSITFKLPIIDEDLNISLDNDEHVECVSLLEKRS

SEQ ID NO: 20236 - protein, 461 aa, synthetic construct
MRCAIYRRVSTDEQVEKGYSLENQKIRLESFATSQGWEVVGDYVDDGYSGKDTNRPAFKKMFKDVEKFDVILVYKLDRFTRSVKDLNEMLETIREHDIAFKSATESIDTTTATGRMILNMMGSTAQWERETISERIKDVIDKQREQGIWNGGITPYGYRKTDGILSVQEDEAETVRFIFKNVIAYGYIKISKLLNEKGIPTAKGKGLWIAQSVRNIVKNHYYYGKMNYCNNGREEFAEIKIEGYKPIISKDEFNLAQKATKKRASTPTRSRSDEIYPFSGIAVCPQCGAKLGGTIVKVRGSKYKYYRCSKRNQNRCNSPAFRDTSLDEAFLKYLKMPYPDLKVKRVDNLNSSDVIKKEIKKLNSKKDKVKELYIEEFLTKKEFKDKIFTIDNKILELESELENNNQAISDDLYRETLLFMEQTWNGLDDETKAFSLRGLFDSLVFKKTGRSKVEFIDHTLL

SEQ ID NO: 20237 - protein, 487 aa, synthetic construct
MKYAVYVRVSTDKDEQVSSIQNQIEICRYWIEKNGFEWDENSIYKDEAVSGTAWLERRAMQLILGKARKKELDTVVFKSIHRLGRDLRDALEIKEILLGHGVRLVTIEEGYDSYYEGKNDLKFEMYAMFASQLPKTLSVSISAALAAKVRRGEYTGGTVPYGYKIVDKKYVINQEEAEIVREMYELYDNGLGYLRISNALNDVGKYKRSGKLWTYSAVKLIITNPMYKGNYVMGRSTEVKVDGRKKRIQEPREKWVVFENHHPAIIERPLWDKINNPKINKKIKRRVAVTNELRGIARCIHCGSPFVLHTYKYKNKEGEELNYGYLTCGTYKLTGGRGCVKHSGLRYERLRSLVLRKLKEKERDLEKVFKLNDKDKHQEKQKKLRKEKKELEIKRERLLDLYLDGGSIDKETFTKRDANFAKNIKEKELEILKLDDVKALIVEQQKVKDAFKLLEDSENLYPVFKKLIARIDISQNGAVDIRYRFEE

SEQ ID NO: 20238 - protein, 515 aa, synthetic construct
MKTAIYLRKSRADLEAEARGEGETLAKHRTTLLKIAKEMNLNVLAVREEIVSGESLVKRPEMLALLEEIEDNKYDVVLCMDMDRLGRGGMKEQGIILETFKRSNTKIMTPRKTYDLNNEWDEEYSEFEAFMARKELKIITRRMQRGRVASVEAGNYLGTHAPFGYDIHRLNKRERTLTINSEEASVVRMIFDWYANEDMGASAIRNKLNELGYKSKLGNEWNHYSVLDILKNNVYIGKVTWQKRKEVKRPDAVKRSCARQDKSDWIIADGKHEPIIPESLFEQVQEKLNSRYHIPYNTNGIKNPLAGIIKCAKCGYSMVQRYPKNRKETMDCKHRGCENKSSYTELIEKRLLEALKEWYINYKADFEKHKQDDKLKETQVIQMNEAALRKLEKELVDVQKQKSNLHDLLERGVYTVDMFLERSNVVSDRITEITSTMENLKKEIKTEIKKEKVKKDTIPQVEHVLDLYFKTNDPKKKNSLLKSVLEKAVYKKEKWQRLDDFELVLYPKLPQDGDI

SEQ ID NO: 20239 - protein, 491 aa, synthetic construct
MGLAAIYLRLSRNEEQLNIDEILLNHRNALTKLAKQQKLTYDIYQEISSGVNTERPELNLLLSRLDDYDALLVMDIDRISRDNAHAEEIKKVLIIHDIKILTPQGAIDLSQESNEMLFSFQAMMANFEYKQIRKRLGRGRLAAAEQGKWTMSNRVPLGYKKNEEKRLEVVEEEAKIIRLIFQKTLERVSANEIAKQLDILGWRSRQGKVLTSTHISNMRRNVVYYGVVKAGRKVNGRVVDEVFVEDAHEPIVSKQMFLEVQKILKENTTGNFFNKLKATRKLQNLIYCNCCKRKRYIQCDGNGIDYIKSCIYKVDNNKCRDRGYKYEPIEQFVLQKIKEKKPAFEQELQMLKSLDTTEVEKKLSIQRESLEKQINRFNKRQRNLKEMRMDGEISKAEFYEMRDENEEQIKQVKQQMELIDIKLENLSNTDEEQARLKAAIKKLDKLEELEAESCNTFLKKFIKKIWFSSNTEANHDTTKPREDATIEIEWL

SEQ ID NO: 20240 - protein, 562 aa, synthetic construct
MKAAIYSRKSKFTGKGESIENQIELCKNYASNLNIKEFIIYEDEGFSGKNLDRPNFQKLLNDARDKKFDTLICYRLDRISRNIADFSNLINELEDVGIGFISIREQFDTTTPMGRAMMYIASVFAQLERETIAERVRDNMLELAKTGRWLGGQTPLGFKSEAISYFDSEMNEKKMFKLSPKSEELKVVNLVFNKYLELKSLSQVTKYLTQNLIKSKTGNTIWNKRTVQDILTNPVYVKADNRVLSFLKNQGINIAGNADKKHGILTYNKKKGTKAFRDTDEWIAAVSKHSGIIQSDTWLKVQNILATNKDKAPRMGKTNNALLTGILKCYKCGSPMKIIHGRTNKDGLKFFYYKCSLKEASGNVRCDNSNVRTDELEKILIEKLKEISSDEGLILKELNEFKENLATPDTTSFEIKNTIKTIKNKKIQIQNLVEQLSINPNVSEYVIPKIEALDKEIKSLSSSNENLKNTNNQTLKIDMNIDIMLELLKKISVIDIFDIEEKKLILNSILDEVTWDGDTGNIDITLWGMRKKKLKTRQLIINQLLHFSNASRSNSYRFTCWA

SEQ ID NO: 20241 - protein, 510 aa, synthetic construct
MQVAIYSRKSIETDKGESIKNQITLCKEYFNRQNKNCKFEIFEDEGFSGGNINRPSFKRMMELVKIKQFDAVVVYKIDRIARNIVDFVNTYDKLEKMDVKLVSITEGFDPSTPIGKMMMMLLASFAEMERMNIAQRVKDNMKELAKFGRWSGGTPPTGYTTEKVLDNGKQITYLKIRDDCVNVKEMFEKYADGYSLYKITKYFKQKGFNYPITTIQNILNNPTYLLSSKESVAYLKNQGYEVFGEPNSHGFLPYNRRPLKNGMKLWNGENKLVGVSKHKALINLDLWLRVQEKFKEKEMEPHPRVSQFTWLSTLVKCKCGNTMSVSAGRPNKDNIRVYYFRCQGKEGRKSCSYSKFLRVDIAEKAIFDYLEKFTDEKYFNEFMKKTKNVRSVNSEFKNINKKIETNNKSINNLIDKLMVLSNDSSILVTKKIDDLTQMNNLLKEELLYLERERLFEKQDENNQNLLKQQIDRFLDANTTIEERRHYIKNIIKEAVWDSENGLVNIELAMH

SEQ ID NO: 20242 - protein, 515 aa, synthetic construct
MKTAIYLRKSRADLEAEARGEGETLAKHRTTLLKIAKEMNLNVLAVREEIVSGESLVKRPEMLALLEEIEDNKYDVVLCMDMDRLGRGGMKEQGIILETFKRSNTKIMTPRKTYDLNDEWDEEYSEFEAFMARKELKIITRRMQRGRIASVEAGNYLGTHAPYGYDIHRLNKRERTLTINSEEASVVRMIFDWYANEDMGANAIRSKLNDLGYKSKLGNEWNPYSILDILKNNVYIGKVTWQKRKEVKQPDAVKRSCARQDKSDWIIADGKHEPIIPESLFEQVQEKLNSRYHVPYNTNGIKNPLAGIIKCSKCGYSMVQRYPKNRKETMDCKHRGCENKSSYTELIEKRLLEALKEWYINYKADFEKHKQDDKLKETQVIQMNEAALRKLEKELVDVQKQKNNLHDLLERGVYTVDMFLERSNVVSDRITEITSTIENLKKEIKTEIKKEKVKKDTIPQVEHVLDLYFKTDDPKKKNSLLKSVLEKAVYKKEKWQRLDDFELVLYPKLPQDGDI

SEQ ID NO: 20243 - protein, 515 aa, synthetic construct
MYRPEELDVFIYLRKSRKDLEEEKKAMEHGKSYDTLESHRTQLLELAHKEHHNIIDILEEVVSGEYISERPMMQKLLREVESGIADAVLVMDLDRLGRGDMVDQGTIYRVFRYSETFIITPTEIIDPNDENQELTFSIKSLIAREELKTIVKRMQRGRRASAKEGKSISRVPAYGYLRDNDLKLYPDPDKDWVIPRIFELMANGMGRQAIALELDRLGISPPEGEYWNPSTISSITKNEVYLGHIIWGKMRYTKQNGKYIRKKVPKERWQRHDNAHPPLVSEALFQKANMAHSKRWRPPTIKTKKLSNPLAGILLCELCGHSMLYQPRTDRPNPQVRCVQSSCKGVQKGASLALVEQRILDGLKQIIESFEIQENMVQKKKIKNNIQFQQKALEKKAQQINDLQKQKGNLHDLLEKGIYDIDTFLERQKSIVVRLKTTQEEIEQLEQGINQTLEQEKHIHEFVPKIKTVLEAYYATTDVEKKNYLLKSVLKKVTYLRKQEWRRKDEFVVELYTKI

SEQ ID NO: 20244 - protein, 495 aa, synthetic construct
MQLNSIMEVIRKYNCIHTHSFLDKAVSARKKKITNRKELENMFEAAKRKEFDFVIVYKSDRLARDPLEHQTIRIVMKTLDIPIIISSTESVYNTDTDLIVQLMEDGFTKYEVDTIIARTRSGLENKAKQGKWLGGKPPFGYTYDKDSEQFIEHNEELCYVKEIFNLYVNGHGFQYIANTLPNGSRRGKDWGRENVKAIVLNPFYCGLLSWRRQTDGKQNARDIWIEAPNHYVKPIISRTTWESCWRIYSEKRNGNMVPKHYKTSFLLQGLLSCEKCQELMKTKNQQTVSSTNKQYGGKIYFCTNCKLRIDADLLHDKVVNQTLTDVKISGFHNVYHAIEQKIQYEIQELNNNIQKHQRLFENYTIKLHNITEELKQRMKNNDDKRFLKSLAIYRLDVQRKLDGVTQQINNFKQQITLKEKVEKSKETWLHTLNEVFQDDVKLQEISDMDKRRFLLPLIQSVSIKENKKRNEYDISLQLRTDFSKRDVKNQISLIL

SEQ ID NO: 20245 - protein, 473 aa, synthetic construct
MRNKVAIYVRVSTASQADEGYSIDEQKSKLEAYCEIKDWKIYDTYIDGGFSGANTQRPELERLISDAKRKKIDIVLVYKLDRLSRSQKDTLFLIEDVFAKNDVAFISLQENFDTSTPFGKASIGMLSVFAQLEREQIKERMMLGKEGRAKNGKSMSWTTIPFGYDYSKETGILSVNPTQALIVKRIFTEYLNGKSVVKIIRDLNAEGHVGRKRPWGETITKYLLKNETYLGKSKYKGKVFEGQHDAIISQELFDLVQLEVEKRQISAFEKYNNPRPFRAKYMLSGLMKCGYCGASLGLYVAPKNKNGVSKYKYQCRHRYHKDKAIRCNSGWYSKDELEKRVIKELERLKFDPKYKKETLAKKDETIKVEDIKKQLERINKQVSKLTELYLDEVITRKDLDEKNAKIKTERQYLEEQLENQKSNVMSIRKRKLSRLLKDFDIEKLSYEEASKIVKSVIKEIVVTKDDMTITLDF

SEQ ID NO: 20246 - protein, 413 aa, synthetic construct
MNIRKIEAKNNKRKKRICAYVRVSTTNGSQLDSLENQKVYFEKLYAEREDVEFLGVFSDKGISGSKYDRPDFQTMLDACRKGQIDVIHTKSISKFARNLNNVLEISRELKTLGIDIFFEEQNIHTLSNEGEVVLTVLASLAEEELHSMSGNQRWSFRRKFQKGELLINAKRFLGYDLNEKGELVINQEEAQIVRTIFYSYLEGMGTHRIAKKLNEDRVPTVTGKKWYDSTIRNILKNEKYKGSLLLQKYFHDGVNGPKKLNQGQLEQYYIEDNHEGIISKEIWEKVQVKMKSCSRIQGTNKSYKFSRMLKCQYCGSTLKRQVSYKKKIIWCCSKYIKEGKNSCKGMRVPERDIEDWKLSSPVTVLERIEDGEKHYSYTGQKATANSHISNSEKNQSSRLLSSVYRPRRTAIKL

SEQ ID NO: 20247 - protein, 428 aa, synthetic construct
MSTDQDEQLSSYENQVNYYREFILKHEDYDLVDIYADEGISATNTKKREAFNRLIQDCREGKIDRILVKSISRFARNTLDCIKYVRELKDLGIGVTFEKENIDSLDSKGEVLLTILSSLAQDESRSISENSTWGIRKKFERGVVQVNTTNFMGYDKDEKGNLIINSEQAKVVRYIFDRFLEGYSPEFISKELREQEIPGCTGKAKWCPSAIWKMLQNEKYKGDALLQKTYTVDFLTKKRIDNDGQVNQYYIENNHEPILDKEKWEIVQLEIARRKRFREQYKLQFYIMQKENNPFTTKVFCAECGSAFGRKNWTTSRGKRKVWQCNNRYRIKGQIGCLNNHIDEEMLEKAFMKAVGILQDHRSDVVAKWQKLEQGANLLHKHYAKQMYQILDLDKFDGVIMNRVLDHISISEAGQIVVTFLEGTEVDL

SEQ ID NO: 20248 - protein, 481 aa, synthetic construct
MITTNKVAIYVRVSTTSQAEEGYSIEEQRDKLEAYCKIKDWSVYDVYTDGGFSGSNTNRPAIERLIKDAKNKKFDTILVYKLDRLSRSQKDTLYLIEDIFIKNNIAFLSLQENFDTSTPFGKAMIGLLSVFAQLEREQIKERMQLGKLGRAKSGKSMMWAKTSYGYNYHKETGTVTINPAQALAVKFIFKSYLAGRSITKLRDDLNEKFPKEIAWNYRAVRNILDNPVYCGYNQYLGEIYKGNHESIISKEDYDKTQNELKIRQRTAAENVNPRPFQAKYILSGIGQCGYCGAPLKIMLGVKRKDGSRLKKYQCHQRHPRTLRGITTYNDNKKCDSGFYYKDDLETYVLTEISKLQNDTNYLEQIFSEDNTETIDRDSYQKQIDELSKKLGRLNDLYIDDRITLEELQTKSAEFTSMRSSLETKLGNDPALKQKDRKKGMINILNQRDILTMNYEEQKVVVRSLIDKVQVTAEDIVIKWKI

SEQ ID NO: 20249 - protein, 518 aa, synthetic construct
MYCMYLRKSRKDIESELGGEEETLKRHENILLDLATKMNISINKDAIYREVVSGETIASRPEMQRLLSDVEQGVWKGVFVIEVERLARGDTMDQGLVAQTFKYSNTKIISPMKIYDPLNEFDEEYFEFGLFMSRREYKAINRRLQRGRIQSIQEGKYLGTMAPYGYKRVKLKNQKGYTLEINPNEAKIVKLIYKLYTDDNRIGISLIANKLNEIKIPTVKGGDWTTSTIRGILSNPVYIGKIRWNSRPEVKKMIEGKIIKERPRADKKDWILVKGLHNPIIDEYIFNLAQKYLEKNPTVPVPTRYKIMNPLAGLIVCKICNRKLKRRPYKNYPATLICDGPTCTNVSSYLNLVEKRLLDSLEIWLQEHKLKYKKQENKKYNLEIDIINKSISKLDIKLDTLNKQLNNMYDLLEQGIYSNQLFINRSKLICEEIDSLKKDKNYLLNKINSEEYSELHKEILIPKIENIIKVYWTLDEPADKNNLLKEILEKAVYCKTVNGRWHNNPDEFELEIYLKLPR

SEQ ID NO: 20250 - protein, 513 aa, synthetic construct
MAMDRVCIYLRKSRADEEAEKYGERETLEKHRKILLKVAKEMSLNIIKIREEVVSGESLIHRPEMLELLKEVKNKEYDAVLVIDMDRLGRGNMQEQGLILDTFKESKTKIITPRKTYDLQDEFDEEYSEFEAFMARKELKIINRRLQRGRIRSVEEGNYLAPAPPFGYQIEHDGRIRTLIPHPEQAPIVKMIFDLYINHGMGGGKISNKLNELGYKTYMGKNWSSSLVLNVIRNEVYAGKIQWRKKEYKPSNNLSGVEVKKLPREKWISVKGKHEPLVSKETFKKAQEILNKRSHVPYNTRITNPLAGLIICAKCGTSMVYRPYGKIDPHIVCYNTNCDNKSSKFKFVEEKLLEGLKNWLEQYEAEWDRFQSTENLCEDNNIIKMHKLALNRLKNELKELETQKNNLHDLLERGIYDIDTYLERSQSIAERIENTKLSIKNTSKTLSLEEQSMNAQKNIIPTVKKVLDLYIKTDNAEQKNNLLKTVIDKAIYNKEKKQRNDEFTLVLYPKLQK

SEQ ID NO: 20251 - protein, 522 aa, synthetic construct
MATSPVRAVVGARVSIFTDGKESQITQRTKGTAYAESQGWTVVGTFEDLDVSAIKQSPWDRPDLRQWLTDRADDWDALIFAKTDRVFRSAADCVKLSEWCRDHKKILVLVDDGIKLDYFHPDSQQDAFAGAMSKVFLILASVFAEIEGQRFVQRALDRVTQYRHQPRWAYGVPPYGFQVVDRPEGGKALGHDLEAQRVLEGIATQLLSGDSLTRITSELNDAGVPSPADRLRQRAGKELRGSRWTVITVQTILTNPATQGIKTAKGKPVLDAGGEPVRVGPASFDPETWGRIHSELAQRSQSGQQRRHSDNPLLGVAKCGVCGKNMRHFQRTKGERHYRYYICGSTPKACPGVLINADNAEQAVETSFLAVHTNRRIKERVWRAGSDHSAELEQTTNTIKALWEDRALGLFTTPEDQDMFRSQMAALVAKRDALAQTPVIKAGWIDVETEQTYGAVWPDATPVERRKMLTDAGMKLTVYRANQYETYVNLDKAIGEGAVGEELHNELEARAADERRRFGIPD

SEQ ID NO: 20252 - protein, 520 aa, synthetic construct
MATAFSYARFSSAPQAKGSSLERQKSMVANWLAQNPGYTISELTFQDLGKSGWKGEHIKEGGGFANLLAAVEAGAIASGDAVLVESVDRAGRLDTLGMLDILGPILRNGVEIITLDDGIRYTRQSLDGGHIYVLLGKIQSARQYSDNLSRRLTGSYESRRRLAKEGKTPKRNTPAWLTSEGVVIPQIAAQVKLAFELYISGLGKAVIAKRMRESGLAALAKCSGPGVEGWLRNEAAIGRWDGSEVYPPIVDISTFHLAQIEGEKRKTLPREKTAAHFYVGLVKCGSCGHNYIMRTIRGVQVSMRCRRRQELKGCENKKVIPKEIIDTVYRHTSVKAAQEAVAQQSVGVNEKAIIAAEARLLELSRGIESLGAAIRSTGPVAELIEQVGQANAEREVLKRNLALLKATVVPSQGQVWQKQGDVWKLERDDPQRLAAMLRSVGYNITIYADSRITSSHSGAVYRYASVDRKSNRYRLYVGEKLLLVLKAADEHLEAEPLEGDAMMGEAIWTEADYESLQAQR

SEQ ID NO: 20253 - protein, 500 aa, synthetic construct
MKAVAYCRYSSDNQREESIEAQIRAIKEYADRNNIEIIKIYADEAKTATTDDRPQFLQMVKDSELGLFQAVIVHKLDRFARNRYDSAFYKRQLKKNGVKLISVLEPLDDSPESIILESVLEGMAEYYSKNLAREVMKGLKENAYKARFNGGIPPLGYDIKDGHYVINEKEAEAVRLIFQMYRDDYGYRHIIDELNLRGYKTKKGGNFSKNTLNAILKNQKYIGTYIFNKGTKNNHNITKDDVIIIENAIPAIIDKKTFEEVQQKMKNTKKTQGTHNAKTVYLLTGLVYCGECGAAMTGNLGRSKYRYYRCNVKDRSKQCSNKDISKDKLEAYILDQLQKKIFNDDVLPVLAKKLNNENKNIVAEREDERKILARRYEEIIKSINAIVDTIAAGHFHPSLDAKLTELENQKSEIEIRIKELDMKPDISIITEEMIREYLNKDKGVFVAGDLRKIKQILSTYINKITVFKDRVEAKFKIAVDNTVCEWSIAASGVEPPTLRV

SEQ ID NO: 20254 - protein, 582 aa, synthetic construct
MDRENTKPLAYSYVRMSTDMQLKGNSLERQKEKSKEYAIRHDLQLVENFEDIGVSAFKGKNIKEGMLGDFISLIENKTVPAGSYLLIESLDRLSRENIFESIPLFIKILKSGIKIVTLIDEQVYGAENADFKDLLYPMVVLSRAHEESVAKSFRVGKAWANKRKNIHQRKLTKVCPAWLKLNTDSNSFEVIPGRDDVVKRIFDLADSGYGSYSIGRILNNEGVFPFSENSKGWHASYITRILNNRSVLGEFQPHKLVNGTAEPDGDIIPDYFPHLIDEEQFLRIKHARRKRLVEGAGRKGPVYRNLFSRIAKCAYCASPMRFVHKGQPPKGGQFLRCTNAERHFECSASGWRYDHFENVFLYFVHELDLVETLKRADEQSERYTLEQKLVSINENIRGKRELLNTTFDMLQTSNASKDFIQSKIEEISSEILELENQKGAVEAKLEKDAALAPVDDQQIKSLIKELQDADDGDLERKRRVVANRLQMMIKSLTLAPDGLRKDAEKLVLSQFGSSEALFDFFETGAQSGEVSTGMSFSVVLLDGIMRRVTVSRREPLKVIQLIAVDKHGLIIETEQTHESLKI

SEQ ID NO: 20255 - protein, 621 aa, synthetic construct
MGIKSLFGFGQARDKPVRNYSNGEYTFNFGRSTSGKSVNEMTAMQTTAVYACVRILSEAVASLPIHVYRYKDGGKEMVCDHPLYTLLHDEPNPEMTSFVFRETLMSHLLILGNAYAQIIRNGKGEVLSLYPLLPNKMSVERDSNGVLYYVYSRYTDENPNMKKMGGIILRQEDVLHIPGLGFDGLIGYSPIAMARNAVGMTMACEEYGVSFFANGANPGGVLEHPGVLKDPAKVRDSSVLQKKRVCAYARVSTDSRRQEDSLENQMETYERLITGNPEYEFIGVYADQGIPGYCENRPQFQRMMEKARAGEIDLIITKSISRFARNTVTVLKFARELKELGVGIFFEEQNINTLSGDGEMMLAVLASFAQEESRSMSENNKWSIRKKFERGEVMITTSRFLGYDKNEYGDLIVNRKAAEIVSLALDLYLMNVGSSRIGELLDYLGVKTVTGTTWESGTINGMLCNEKYKGDFHLQKYYTSENKRNHTKKNNGEEQSYYISENHEPIVSPEVWEKVQEVREQRKRDRNIGQDNTMKFQNRYPLSGMLICPYCGKTLRRRQVYKKKIQWLCSTYIEKGVKECKGIRIDDTELQGLNITEQTVVKEVIQNGKKHYCYTSKADFD

SEQ ID NO: 20256 - protein, 450 aa, synthetic construct
MARSITVIPAKQISTEESGTAQAVQKLRMVAYCRVSTDQEEQLLSYENQVNYYTNYISENPHYEYAGTYADEGISGTNTKKRDEFNRMIADCRAGKMDMIITKSISRFARNTLDCLNYVRELKDLGIGIIFEKESINTLDAKGEVLLTILSSLAQDESRSISENCTWGIRRRFETGKHKMSTKRFLGYDTDENGKLVINRQQEPIVVRLYQEFLDGKTTDYIKRIFEKEGIKNWDGGTKWQATTLMSMLENEKYKGDALLQKSYTVDFLTKKRTQNKGEIQMFYVEDDHDAIISKRIWECVQLEIKRRKKYLEEHGTNSYSHRPESNPFASKIICGDCNKVFARKGWRSSTGVDRKVWQCSERYKVKGVMGCTNRHVEEETLIKAYLMAWNALVENREDFMEQWTAQQAEREPIRRLSGREVHRIHRWSRNSDRDGHGLHAENTGPHQGF

SEQ ID NO: 20257 - protein, 529 aa, synthetic construct
MYEDLSFPYGSGTYAIYLRKSRKDLDAEALGEGETLARHLSVLKALAQRMELNVVRVYAEVVSGESIDARPQMQELLRDVESGIYDGVLVVEVERLARGDTSDQGRVAKTFKFSDTLIITPSKTYDPNDEFDEEYFEFGLFMSRREYKTIRRRLTAGHAASCREGKYTGNVPPYGYARKKLPKEKGWTLEIIPEQARAVRLIFDWYQNGLNGLPVGYTMIAEELNHLSIKSPAGTFWNRNSIQNVLRNPVYAGYIKAGYRKEVKKLVDGKMNRSRPLNTDYTLYPGRHEAIISQETWDAVHNRMLKRTAPSARKTRPQQNPLSGMIYCSQCHRVMQRRPYQSGRTATLICTTPHCSTVSSDLPMVEQRILDALDGWLLSGTLPDPDQLPDHSGRIELLQHAVTGCQEELHEADLQLQKQYDLLEKGIYDEETFFERSAIMKKKKSELTSRLKNLQAELQHEISQDASAKNLLPTLQTIHDTYHTITDPAVQNSLLKEVIDHIEYTKSESGRWGRPDNFSLKIYPRVPPA

SEQ ID NO: 20258 - protein, 519 aa, synthetic construct
MKKVRKIEPNSKIIKPKLQVAAYARVSTDNDEQLVSLEAQKTHYESFIKSNPDWEFAGIYYDEGVTGTNKENRSELQRLIEDCENKRIDFIVTKSISRFARNTIDCLELIRKLSDIGVFLYFEKENINTQSMDGELMLTILSSLAENESISISQNNKWSIQRRFRNGTFKLSSPPYGYDYEDGILIVNEEQAAVVRRIFSEALSGKGAQKIADDLNADGISPKKAALWNASTILGMLSNEKYTGDVILQKTYTDDHFKRHRNNGEKDQIMIRRNHEAIISHEEFDAVNELLRQRGDEKGIEKGKGKYQKRYPFSGKIICSECGSHFKRRIHYNGGSQYIAWCCSKHIHDIAKCSMRFIREDDIHQAFITMINKLIFGYEFILKPLLKSLRSLNYSANLTEILEIEQKLEENMERSRVLTNLLTKGYLSSSLFNEQINELRAEATLLKEKKKALSRSVNSGMTAVSEVEQLLKWASKADMIESFDEAIFSRYVESIIVYSQEEIGFKLKCGLTLKERLVR

SEQ ID NO: 20259 - protein, 523 aa, synthetic construct
MGNLKNITVIPARARIGNTVKADDTPKLRVAAYCRVSTDSEEQATSYEAQVDHYTNYIKGNSDWELAGIYADDGITGTNTKKRDEFNRMIEDCMEGKIDMVITKSISRFARNTLDCLKYIRQLKDKNIPVFFEKENINSMDSKGEIMLTIMASLAQQESQSLSQNVKLGFQFRYQQGEVQVNHNRFLGYTKNENKRLVIVPEESEIVKRIYREYLEGASLLQIARGLEADGILTAANKRKWRPETLKKILQNEKYIGDALLQKTYTVDFLSKKRVVNNGIVPQYYVENSHEPIIPREIFMQVQEEMVRRANLQVGKSGKRRVYSSKYALSSIVYCGECGDIYRRVHWNNRGCKSIVWRCVSRLEEKGSDCSSRTINETTLQEAVVKAINEVLGSKDTFLPVLQENIAAVLNEDNDQTTQEIECRLNELQQELLRLVNAKADYQKVADEIYRLRELKQNILAENAEREGRRERIADMTEFLNAQSYELEEYDEQLVRRLIEKITVFDEKLTVEFKSGVELDIKI

SEQ ID NO: 20260 - protein, 502 aa, synthetic construct
MEFIREDCIYARQSVDRKDSISIESQIDFCKYELKGGSCRVFKDKGYSGKNTDRPEFQKLLGEIRKGKVRRVIVYKLDRISRSILDFATMMELFQEYDVEFVSSTEKFDTSTPMGRAMLNICIVFAQLERETIQKRVTDAYYSRCLKGFHMSGQAPYGYQLEPTVVEGIRTKKMVADPIAADHVRLMFEMYAEPETSFGDITRYFEEHDIKIYGKSMFRTFLSQLLRNPVYAQADLELYEFFKSQGAAIVNDASDFAGTNGCYLYQGRDVKEDKDRCLKDQMLVIAPHEALISSDTWLKCRKKLMANTTFQQGRKPKNTWLAGKIKCGHCGYALKATHVPNSTGYFRCTKRTENKGCPGCGKIRKEEFEQFIFSAMQEKFKDFQILHGREEKVNPKLTAYQVELAQVEAEIEKLLDTLTGANATLLAYANKKIEELDTRRQTISKAIAELSVETISPQQIKKLSYYLDNWDSIDFDDKRKAADGLISTIKATSDRVQIEWKI

SEQ ID NO: 20261 - protein, 559 aa, synthetic construct
MKKKECYIYTRDSTSMQVDGYSLDAQKDKLRKYADFQDMVIVGEYSDEGKSGKSVEGRPEFLQMLRDIEEGKDHVSFVLVFKLSRFGRNAADVLTSLQKMQDFGVNLICVEDGIDSSKDSGKLMISVLSAVAEIERENILVQTMEGRRQKAREGKWNGGFAPYGYKLVDGELEIAEDEAEIIRLIFDKYINTTMGVNGIAAWLNQQGYQKKKRQNNTLNGFAASFIKGVLDNPVYCGKLAYGRRKNEKIPGKRNAYHIVKQDSYMLYDGIHEAIVSEEIWNTAHDRRLRTGVKREKTYSLEHEHLLSGILCCPICGAGMYGNVNRKKKKDGSRYKDYFYYTCKHRRSVDGHVCTYKKQWGEDKVNAAVAEVIKKLVQNPKFEAAIRKKINTRIDTGELEQEIENLRKQLRQVLGAKNKLAQQMDSLDVTDRYYDRKYQDMQDRLYHFYDQIDEIEDSIAQVEVRIQNIRQQKLGSDNVYQYLLYFDKLYDKFTDAEKKEFLSSFVERVDIYEDELPDGRFLRHIKFKFPVFYNGQEIDEMSWDKESTVETVVLLQRKNM

SEQ ID NO: 20262 - protein, 464 aa, synthetic construct
MARSVTVIPARSQKARTGHKTVQEKKIRVAAYCRVSTDQEDQLHSFEAQVEYYTKYINEHENYEMAGIYADEGISGTNTKKREQFKKMIAGCEDGKIDLVITKSISRFARNTQDCLAYSRKLKNLGIGIIFEKENINTLDSTGELLFTILSSLAQDESRNISENCKWGIRTKFKNGEMHLNTFKFLGYDKDENGKLVINKEQAKTVRRIYRDFLIGINPAQIAKELTEEKVPGCLGQTKWYPSTVTGILKQEKHMGDALLQKTYTADFLTKRQVRNNGEIAQVYVKDSHKGIIDKQTWNAVQEEFDRREKFMESHGTDRYSYGADCMPFCEKVFCGDCRSLFTRHSWRSRGIVQWQCKNHRKDGKVACTNAYVDNADLEKGFVKAFNRLVTDRDKHMERWQQMKTDGTPLEKIRAGQMMEAVGNEPLTRFVPEIAQLVLCEVTVLGAKKYEFFFLEGSRVKVSV

SEQ ID NO: 20263 - protein, 502 aa, synthetic construct
MEIQIREGNSGQKQKLKVCAYCRVSTDADEQENSLENQIRHYEEVITSNPDYEYAGVYSDFAISGFKEKRPGLQKMLADARKGKIDLILTKSVSRFARNTSIVLEATRKLKELNVGVFFELQNINTLSGEGELMLTILAAFAQAESESGSVGAKMVYQRKYEAGIPVQYLERSFGFKKDERGVYIADEEEAVWVRKIYDMAAQGYTLAAIKRYLNENNVKTVGGAKWLDSTVLRILENEIYKGDYIMHKYFVNEERKLVRNRGEVDAWYIEDDHEAIVSPKLWQRAQDALEAKRDYLAEGSVIEEFTEENYPYMNRIYCARCGHPLYRRIYSNGNRLNWGCSGTKRYGRSFCEGINIPDGALRGAWHFDENMYIGEKQTDKGKKEFTYLKEASWKRRHKKKEPEPIPENTETEYPYREKIFCGLCGSRLVRHVNTKNHKVIWVCNGRKRKGKDFCDGTRVPDTIIKGWGEIKKDIYIQRKDDKNGKKRYSYTSKKPKGADRA

SEQ ID NO: 20264 - protein, 537 aa, synthetic construct
MKQQIYNTALYLRLSRDDELQGESSSITTQRSMLRLYAKEHHLNVIDEYIDDGWSGTNFERPSFQRMIEDIEAGKINCVVTKDLSRLGRNYIMTGQYTELYFPSHNVRYIAIDDGVDSEKGESEIAPFKNIINEWVARDTSRKVKSAFKTKFVEGAYYGAYAPLGYKKHPDIKGKLLVDEETKWIVEKIFSLAYQGYGSAKITKILREEKVPTASWLNFTRYGTFAHIFEGKPESKRYEWTIAHVKAILKSEVYIGNSVHNRQSTVSFKSKKKVRKPESEWFRVENTHEPIIDKEVFYRVQEQIKSRRRQTKEKATPIFAGLVKCADCGWSMRFATNKANKTPYSYYACSYYGQFGKGNCSMHYIRYDVLYQAVLERLQYWAKAVQQDEEKVLNKIQKVGNAERIREKKKKASALKKAENRQNEIDRLFAKMYEDRACEKITERNFIMLSGKYQKEQIELEQQITNLREELSKMEQDMIGAEKWIELIKEYSVPKELTAPLLNAMIEKILIHEATTNEDNERIQEIEIYYRFIGKVD
